United States Patent Application Publication US 2011/0214205 A1 - sequence listing, part 5

SEQ ID NO: 13862 - DNA, 1048 bp, Setaria italica
  misc_feature (1043)..(1043): n is a, c, g, or t
  Peptide Sequence Number=SeqID_79836
tgaagaatgcgacaagtcagtagtttgtcaagtcatccagctctcagcatgtacatttaccatccagaaacaaagttctttcagcagcttgtttgcggaaatagcgcacactgcataggtctcatcctattatcccatgttggggggaagaaatggaaataccatatgaacagaacagctaaggacatgccttacaaggtacaagagatcaggctgcaaattatcaaaaactggaagaaaacctagatgcgtgatattctggatctagacagtttcatgtaaatccaacagtcgaattatacagacaccatattggctagatttgtcgctgttttgacagttcgacagtataaagcaaacaatttcagtaaatttggaccgggacacaccatattctcaagcttgccaaagcttcaaggtgtcgtgcattcgtgtccttttcctgttgcatccactagctctggacaagcttctagctaagattgggatcgttctatgatctttgatagtccatagcaatagcaggatggatgttatcccgtccgaaaaatattgccaccaaacaatatccttactgttgaatgactgtttcatgcagcctcatttagtatgcatcacaaattctggaaccttaacagttctgattggttcagcgcataatcccatttactcatctaactatagcttcgcatacttgtcgacataccccattactaattttgtcaccttcctttgagaggattgcacataatgtttaatcttggcaggtgtttttggaatatgactgctagggactgaattagaaaccttatcaactgttttcctgacaatagttttgaaagcctctttgctcatgtttccctgcctccacgatggcttaagaacttccttaacaaaatctgcaatagcaaccttaaaaagcttcattgatcgggaatccttacccttcttatttttgtgcaatgtttggtcattgtcaatatcaccaggaatatcttagttccattcttttgcttttttttttctttttttttttttttttnttttt

SEQ ID NO: 13863 - DNA, 326 bp, Setaria italica
  Peptide Sequence Number=SeqID_79837
ttcgccccgagattcggtggtgtggtcccctcgtacgggtcggaaacttggaacggattgaaaccttttgaggtttcggctggaatgcgttgagatcttcttttgccttggttgcttgtggctagctaacgatgtgggcttcgatcagacctgttgctgcttttcgtgccgattctaggcgagatttcttcgtgtttttttgcggggttcaagttggtttgcactttctcttggcaaggatgaaacggacgatgaataactatgttcagattttgttttcgtgagggttatatggtgtaacgtggtatgtctagcgtttctcgggg

SEQ ID NO: 13864 - DNA, 495 bp, Setaria italica
  Peptide Sequence Number=SeqID_79838
ggaaacttggaacggattgaaaccttttgaggtttcggctggaatgcgttgagatcttcttttgccttggttgcttgtggcgagatttcttcgtgtttttttgcggggttcaagttggtttgcactttctcttggcaaggatgaaacggacgatgaataactatgttcagattttgttttcgtgagggttatatggtgtaacgtgtaatgtctagcgtttctcgggtaaatttgggagtctttaatggcgtaatggtaggtcatgctcttctggttgcttagatctggtccaaaagttggttgagtcagcacgtttgtgattttctttccccgagcaaatcagcaccgtctgtgattaacccagtggttagttcgtttggtcctttcttgttagtaagctcaagaaaaagaacaggaatttccacactgggtttggcatagttagtttcttcgtttgatgtattgtctgtttattatgattataaactatttggc

SEQ ID NO: 13865 - DNA, 1308 bp, Setaria italica
  Peptide Sequence Number=SeqID_79839
gtacttttctacagatagtcatcttcttttttcttcttctcatctagtttttcctgatttttctccatctggatctttctcaagtctataaattcgccgagtttagctaccatttgactttgcttgcatttttttccactagcactttgttgctcctctagattgagatagggtggtgcagattgcacttctggccctcaattttagaaaaaggatttgtaccaaaattgatgccaatagaatcaaagccagcagccgtgtcctgtgtactttgcttagagtgacttctttcaattggaggtcatgttgtcatgttaggtggctcggttgatgtaaaattcaaatcttcagtggctatacttccttcatacaataatccaagttgttatataaaagaaatggcttcttgcggaacttgggaactttgtggttatccttaatcaactttttccaaccttttggctctgcaatgatcatacccaaactgtcgtttcagccaacaccacttttcctcgcttcttttattatcttataacttccttttagctctttctccttttcttgcacttgttgctttgtgaaatgtgtcgttggaaacatatcattgaatttgtttgtgatattcctccaaccttcagctgtccagctattttgtgccctgtacattgggatattgacatgctctttcattacatccaccagtcctttctcatacgtgtagctccatgcagtccttgtaccctgggatgttgacattgctgaaaaatggtgaaagataaatataagctaaaattctagaaatataaatgtaaggtaaaatgctgaaaatgatgaacgattctccaaattaccatctaattattataggcagcccacatcgcttgcgcgatttgatctcgtaatgtgttgccatcactcgattctatctcacttggataactgttatccccctccatcatatcaacaaaagtggttggattgatatattgtggttggtgatctagccaatttatcttgcccattgtgtgctctaattatattgtgaaataccgctgctgctgctgtaggaatcttgatctgagtctcaattggatagtgtgttcccactttcagaattgaaaaccgttttttcaacaccccaaatgccctttcaatatgattccgaagtcgtgcatgctgatgattaaacaactccttgtagtttgcatactcatttctctgcgatgatccacgccttctaaagttgtcaaggtgatacctaactcctcgacacgatgctatgaatgatggagtgttagcatatttgcc

SEQ ID NO: 13866 - DNA, 1211 bp, Setaria italica
  misc_feature (1125)..(1125): n is a, c, g, or t
  Peptide Sequence Number=SeqID_79840
aaatggcatccccactcatctcatagatttgaccaaggccataccaagcacggaaatctctaggattaatatcaacagctcttctgtaggcatcaatggcagcaggagtatttttcagctcaacgtactcatgtcccataagggtccaagctgagagatactttcgattaagctttagtgccctttgaaagtacaaaactgatttctcatgctggcccttcagactatagtaatttgcaattatgcagcaagattctgggcggtatttatctgtcaaaaatactctgtgtgcaaggaaactcaaagcagtcaagctttcttttgcatatagtaaatttgagtaaatatccatagaatctacacggaaaggatcagtcctgagcagttcttcaaaaatcatctcagcttcatccaggtccctcatactgtactgcactgttgcaatttgagcctgaatgtagccactgcagcggaagatccccatcaaacgctcatatcttttcagagcttcttctacaatctttagttccagatatgtactggcaagaaagaggtctttcatccagtgattcttcagatttaagttatttagaatgtcgctgctggtgcataaagcttgtaactctgaccaagcactccagttccaagggtagctgttgacagactctaccaaagtcgttctagcaagaccttcacatcctttatcacgtagaacaaggccatacaagtagagcccaaatgagtcaatagaaccagttctccggtgtgttgacagctctctctccaaagcaactagttcctgattaacagcattactcttgcccaacgatccttcaagctctatcatctccgcctctttccgtttctctccagccatgtagagcgcgtagcatcgcaggaagacagccttgcgcccaacctggttctgcagcacgtgcgcggcgcggcggtactcccggcagtcgaagtaggtcttggcgagcaggtacttgtcgccgcccgaatcgaacgcgtcgtcgtcgggaatgggcgtgctgacgtacgacacgccgcctagcggtgtcccggcctccgagctgggcccgccgccggggcgtgggcggtggcggaagctggaacccccgntgcggtgcaggtgcaatagccgccctgcggaggccgcgggacgaggaggacgggggagtccatcgcggccgacgggggccggggcc

SEQ ID NO: 13867 - DNA, 308 bp, Setaria italica
  Peptide Sequence Number=SeqID_79841
tcctcgccgtgccaaagtcgctgacacgcgcctcccagtcgccatcgagcaggacgttcgacggcttgacgtcgcagtgcacgatggggaagtcgtacccgctgtgcaggtacgcgagcccgtgcgccaccgagacgcacgctcgcagccgctccgggaccgtccaccgccgcgcgtcccggcgcggcgggccgtggatcgcgccgtcgaggtcgccgttgtccatgtactcgagcaccagcgccttgatcctgccgggctcgcacgcgtacccgaccacgcgtgccaggttcttgtgccgcagccgg

SEQ ID NO: 13868 - DNA, 1483 bp, Setaria italica
  misc_feature (1)..(37): n is a, c, g, or t
  Peptide Sequence Number=SeqID_79842
nnnnnnnnnnnnnnnnnnnnnnnnnnnnnnnnnnnnntttttttttgtaattattgaatctaacggtttccttaatatatctggtttaagcttgcaaagtgcaataacctttgcccaaagtaagacagcatggctatgttggcatttatttacctacagaattttcagttctctatcaacagccaaacaagccgataaaccagaaaataaccacaaggaaatcaacttttacagccttgctctgaacgataaccttgctaagatcactgcatttgcgactcattaaacaaaatggttgttgaaaactaaacggcccttgttggtttgggcttaacagatgttggaatgatgcaaatctcctcttgtagactgcatccagcctgacgcatacatgcatactgggtcaagtacttcaatgcttccattaatagtgatgacgtgcaagtgctcataattgaagtgcattcaagcctttcattagtgcatcagtgtgctcaggtttcccgaccgaaatacgaatataccccttcaattccttcttgtcatagtggcggatcatcactcccatcttcgcaaggtcttcctttattttctttgcatcctttcctgatgtaacctcacagagaatgaagttagaatgactgggaaatggtttcaggaatggtatcccttttagaagattgaacagcctctccctctcttgtaacagtaaatttttcacattctccaaataggttggattctgcaacgcagcacatgctgaaacttctgctgcgacagaaacattataaggctgcttggcccgccacaaatactcgataatgcttagaggaaatgctccataacccacacgaagaccagctaaacctgctcgtttgctaaatgttcggagaacaatcaaattatcatgcttcttaacccatgacatccttgtctgaaggctagaaaactcaatataagcttcatccagcactacaagtatcggaagatcaagtatctttaaaagatcctcattgttgattacacttccgtctggattgtttggggatgtcagaaatatgcattttgggttatcctgttttaccacttcaacaatacgatcgacatctagagaaaaatcaggaagccttggaaccttgatgacaagtgcaccatttactgaagcatcaaactcatacatagtgaatgtcggaggacaatcaataattttgtcacctggttcaagtacgcatctcataattaaatcgattagttcatccgcaccgcatccagcaagtatgtattcagattcaattccacaatcttcagcaagagcagcacgcaagtggcggctttccggatcagggtacacataggggaacttaagactacctaatgctgtagccacctctgggggtggaccatatggattctcatttgcatcgagcttgattatgtcctctggtctacgcccaagccgagcagatagcacctgaagggcagg

SEQ ID NO: 13869 - DNA, 882 bp, Setaria italica
  Peptide Sequence Number=SeqID_79843
tagaccctaccgcactagactacaagctgtcagctcagcaaaacaaggctgcagcacttgtgctcctttcagaagacgactagaaggggctgccagtcatcaccacacagctacttttaaatttggacagctacaaaaactataattgcagtggtcagtggattcatctattttgaattggacaccttcagtagctcatggaatgcttcttgaggaatgtcgacagatcccactcgtttcatgcgctttttgccttccttttgcttctctagcaacttcttcttcctagtaatgtcaccgccatagcacttggccagcacattcttcctcattgctgacagggtttccctagcgataacctttgaaccaattgctgcttgtatggtgatctcaaacatttgtctttcaataaatttcttgagcttctccactaattcccttccaacccgctgagccttctggttatgcactatagttgccatagcatcaacaggttgaccattaagaaggatgtccatcttaactagatcagactgttcgtattcggaatcttcatagtcaaaagtagcataaccagacgtaatgcctttcaactcattataaaagtccacaattatctccttcaatggtaatcggtacttcaacatagccctttgggcatcaataaatgtatattccagctgctcgcccctcctttctgaacaaagcataatgacaggtccaacatactagggataatgattgttgcaataactgtgggctcccaacaggcggttatacgctttccaggattagaagccaaagcagcagggttctcaacttgtaccttgcttccatcaccgtattcaaaaatataaggtacggttggtatggtcgatatga

SEQ ID NO: 13870 - DNA, 3365 bp, Setaria italica
  Peptide Sequence Number=SeqID_79844
tttttttttttttcctatagcatccggtcacgcgtttcctgtttggaataatctttcacatgtaataaccagtaaccaacggatcacatcatctgcactcttctccattgactcccaattatccattcccgctatacgaacccactaaccaccatctttgggagcagcaggtgtccttgtccaaatgccttttcagcgtttgacggcacaagacgcaaccagccacacttttacccccaacacatacataaacatactgcctcgttcaaaattaccgccgcacgtcagttcaattgccacttcgatgggcaacccgcggcggctaccgaaacaccacatttctgtggctacaggcagcatccgaacctattactcctaccaaaaatgcaccaatttaacatgttacaaatgggggagttggtgagcgcacaatggacttcgtttagcgcacatctggctcttttctaagaatacttctgaaccaaagcaaccaccacctccagtaatgacatcgattgttgtcccagtcccctctttcaggcttttcataaagcatttgtttcttgttacccattgtattaaagcctgaaattttgttggttcgattcttactatgggtccggttttagaatgttgttagtatttttttatcatgttatgtttccatgactggatcccatcccgagaagaagaattcttcccttgagcctagatggagaactggggctcagcagggtattatttgactagaaagtcaagctcattggcgcgccgatacagcagagctgaagcttctacccatcctgggtgcaccacgaatctgcctgtggacaatgcccagttcaccttgtctgtcccgagggaattagcaacgacatgagtgaccttatcgtcaatcaggttcgtgcagactgcaccaaactgctctgcagtctgccacagaggatgcaaatgaggttttgtgtctccaaccgggaaaactcggctaaagactatatgacagccagcaaggatcctcttctgctcatctgatagtatggttcgcacatcagcctcattgagtttaggatgagaaaagaagttgtggtgaattcgctcaatgaccgccagtgaagaagcaagggtaccatcctctggcctctcgtctctgtcaatctccagaagcgatggtccaggaaggccgaattgacgtctactgcagggaaaataggtgtatctctctacaactatcaaattgtgtctgttgtgaggccagactcttacagaatcatctatgattaccactgcagattccatccccaataccccatccagatctttactcttgggcaagcgctcatcgctatcaaaaggatcaccatcatcacctcttgagatgactcgcccagcaaacaaggtcccagtagggtcaagaaccttagccatctcagtagcgtaaagtttgttccccatggtgtacaggtgcaactcgaagagcttactcgccttatcaaggaaattccatattcctggtctcagtttcgtccacatattcatatggtgaaaacgatagagatggcgttctggcatagacctgtcctgttcctctttcttccgcaagatctcttcatgtacagagtccacctctataaactttgcggaattaagaagggtgtgatccagatcaagcaccaagcatagcttccgtgctgaaaacattttgtgctgttctgtgatccgtcttgccctttccttctgtatgagagctttttgttgatcatcataaccatcaaggagatgatcaacatcaccccatgggttaactggctgcacagcttcaagtggtgttgcaggagcattagctgcataagcattatgaccattctgttcaacggccagcctcggatccaccctagttaggctgcttgaagcttgttgtgtaggagccataagagctgtagcagctaactgtgaatttgagacaggatcaacatgcttcgtgctcatggtgaacggacgtgcaataccagacaccaaagctggttgagaaaccattgaagtagtctgatccttggtgccctgagaatcaggcttagttccattagatttgtgttgctccaagcccactgcatccgttttctgggctatgctattatgaaggatcctcctgggatcgcggggcttcattcgtagtataccagtatcgttttgtgagttcagaggtggtgtctgcatcagaacctgtggccgaacagacggaacttgtgcagcttctgtggtctttggagcgctgccaggtggtaaaaccgtgccagcaattccaatactgatcgtgccactagacatggctacctgctgaggttctgatgctgacatcttctgctgttccattttaatccaattcatcagaactgttggattcccagcaatgtcctttaatagagaagaaggcaatgaaacagcaggaggtgcactgatttgtggagcagaactttgagtggggtgcaaaaatggtgtagtggctccactgctgtttgggggagccctcatgttggtcataagctgattgggattccctgttggcaccagcatgtttcttggatccccagcaccaagcctaaatctttttagcacgttttcatccacctgaggttcatcaactgctttgtgtttacggttaatagttggcactccagcacccaaattcccatccttcagatctgaaaaattcacacgctgatttgcatctgtagcaccagcagaatcacggttcaaaaacctgagccttggatctctacttttagatgtagcctttagtgcatgatttggacctgcagccaattgctcagcttgtttaccataaccaggtggaccacccgaataactaatattgctgccgctggttgtgttaggttgagaagcaggcatctgacttgtacttggcagtgcagtcttctttggagctgggaagctggaaatctcaccaaatatatcaccacctttgtctgcagatttaccatcatcaccagaaggagttggacttggcagatcatcacttggaaagacagatttctgcccatacttctgctgatatgatgaaacagccttcagaggatcatttaaggatggatatatcgaattccttccagactccctctctgggaaagatggtctctcaggtaccattggaaatgccccaaaccctataggctttggcacaggaaaaggaggtgcattatcccgtgtgggtgagggtaagctgttctcatcataatctgcatgaagatccaacaagggactaatcctttttgcgggtatttccaacctcggtaagctagatccactgaatgaatttgctgctcctgattcgtatggcaatctccctg

SEQ ID NO: 13871 - DNA, 294 bp, Setaria italica
  Peptide Sequence Number=SeqID_79845
cgcttcaagctcacacccagacccagaccactcatcctatctcacgcccgcacggtcccactcaccagaggagtgcggagcagagtgagcgacgcgccccagcgagccgagcccgccatggcgccaccgccgctgcccctcttctccccgtccccgaagcccccgcctccgccgccatggctgcacggcccctccacccaaacccagaacccatccaccggccccgcggcacctccagcctccgatgaggcagctcctcccaataagccccgccaccacagcgcccaaccggcg

SEQ ID NO: 13872 - DNA, 255 bp, Setaria italica
  Peptide Sequence Number=SeqID_79846
tggcagtacaatccccagctcagcatcgcctcccatggcctcctcctcctccagttgtcacaaaggccgccgccttgccgccggcattgcgctcctcctcctcctcctcgccggcaatgccgccgcctaccccggcggcggcggtgacctgaggtaccagttcctgtcgcagcagaacgcggcgcgggcgtcgatgggcctgccgccgctggtgtgggacgagcgcgtggcgtcgtacgcgcggtggtacgcgca

SEQ ID NO: 13873 - DNA, 2527 bp, Setaria italica
  Peptide Sequence Number=SeqID_79847
tgctaacaggtggtgtcaaagcataacactttatacatgtattgtagttattggagatcctctttctttgtgataggaattaggatgattgcatactatgattctactcttttgttaccattattatgaaaacctatttgattgtattttatcccagtctttggtttctgactagttttctgatgttctctattgctctagttaggtcaccatcttgatgacacttgggtggcttatgctggaattggagctggaaatagaccgcctactgtacttagctggcagcagttagcctctggcaccccaagtgggcgttttagtcattcatgcactctagttggtgacacattagtcttgtttggtggaatcactgaccaggggcagcgtttgaatgatacatggataggccaagttatttgtgaagaacctcgaaggatgcggatctcatggagactgctggaggtaggtccacttgcaccacctcctcgtggagcccatgcagcctgctgcgttgatgataagttcattgtaattcatggtgggatagggctctatggaagccggcttggtgatacatggcttcttgatctctcaaatggcctccgatctggcagttggcatcaaatagggaaaacatggcctttgcctccacctcgttctggtcattctttaacttggattggtgggactcgcatggttctatttggtggtagaggatcagaatttgaggttcttaatgatgtctggttgtttgatattagtgatcagtacccaaaatggaaggaactaaagtatgacttgtctactgctcttggtgaaatgccttttccacgggttgggcattcagcaatacttgcgttgggaggcaaggtcctcgtgtatggtggagaggactcacaaaggcggcggaaggatgacttttggatcttagatacaccagctctacttcaatacgagtcaggttccaagaaaatgaccaaaaggatgtggaaaaagctaagaattgatggtcagtgcccaagctaccgatccttccatggggcatgtgtagatacttctggttgttgtgtgtatatttttggtggaatggttgatggccttgttcaccctgcagaagccttgggtctgagatttgatgggcagctgtatcaagtggagctagtgctgcatctttagaaagtgtatgttgttgcattgtaaatctgagaaatttcctaggtttggtctttagcatctggtgtagtttgtaaaaacttcatgataaatctggagctctcccagaaaatattgaaatgaccagtatcactaccatgtcacccaggttttcaacactataaggacgctccaaatggtttctgcctgtcaattgtgcatgggcgcatgcccatacctgtcgctgatctgtgaaaggaacggtgatccattgtaattttttgccatcaaggaccgatctgtctgtatatgggtttgaatctccattcctttgtcagattcatatgttccaaagaatgtctgtcaataccatctggaacagatggttgtttcggtacctgatgggctctcatatggttatgggaagagggataaatgttgttgcccataataatccaatgtgccaggattgctcgggaccatctggagctgctcttgatctttgcatcccagtcaccaatgggctcactgcaggaggaccatgtctcattcagcccttggttcatcacatgcatagaacctgatatttgtaatgatctaatgatggtgtatgggtcacactggcaacattacacagcacaattttttggaagacaaggatggtttgatcttgggtccactggtacaagatgttttcaagtcttgtaagttgtaacggtgtatcagtatgcaggttatgtcatgtgcgcattaattctgcgataatgggaccgaaacttgtttggattatttcagatttgggaccatttgcagtatgattgtttgatgatgcatacatcacggagaaaatatgtagttcctgttcagatccactttgtgacagcaaggcaaagcttctgcaccaggaatccaggacccatgtatgctatcgcagaaaggttttccttaggttggccaatccgagaccgagacagaaaacccttaccatgctttctactgctgctgcattcacatctaccctttggttatttgtaatttcaagtgataagatccatcaccaagacattatcaatgctggagatttccagctatgcagctgcagctccggttgctatatttagttcttattcagcattattttcttaggaacccttattcagcattattacaccattctgaagtacacctccggtagcacaacaaaacataattgatgcaattgtggcaaaactggaatcaagcctagctcagtcggtagaagccaagaaggtgcgtagcacaacaaacacatgatgtaaagatccattgttcctcgttcgtaggcattataatttcctgtttacttaatagtaagtagacaaccgttacccgacca

SEQ ID NO: 13874 - DNA, 975 bp, Setaria italica
  Peptide Sequence Number=SeqID_79848
ttttttttttgaatggaaactttgtcaaccaccaacatatctgccaacatttatcccagggccgcacagacttaccaccataacacaggtttcaggactcaagattcattacaactgctcacctctcaagccgcaaacacaatctaaagcatttctcttcttgtcaacaggaactaaaaggcatttcccttcttgtacattgctgacgataagaaacaactgcactgtcatttaagcttgcaagctgcattagccgaatccagggggcacctgaggaccatcatcatcatcatcatcatcatcatcacctgctgggcctcccacagcaacaggttcacctccatttggcttcccttcattatgattttccaaatttggcggtgactgctgtttctgcgctgctgctgcaatgttattgcgctgattatctctgaaaccaaaacctggaggttccgacagatcatcatcttccgcttcgcctgcaacagtggttggtgttggtgttttcgctggcgaaacttgttgctctttgcctttcgtcttcagcttcttggaagaaggctcaggggccttttcagggttcagtatcctgttgtagacagcttctacggttccccttatatcagtttcattggattgaatgacattccatacctcatctgatatttgacccataacttttctcccaatatctttataaattgcatcagaaaggtcttttaattttaacttctcagatccatcttcttgtagtaccactgactgttttacctctgagatgatttggttgcgtagcacctcgttgtctttgaccttccgaacgatggcgcggcgaagggcgtcgaagtcgccgtcgtccttgagccggcccaccacctccgccgccgtcggcggccgcggcttgggaacgctcatggggatcgggaagtgccggctggaagcctcgatccagttctgctgtaaatggtgaacaag

SEQ ID NO: 13875 - DNA, 531 bp, Setaria italica
  Peptide Sequence Number=SeqID_79849
attccgtgttcatcaatgccttcccagaaactgggttggaaccagctgcttttgctgcacttgttcctaacagtgcagagaaggttctctgtgaggtgattgaggaaataatgggtgaccatgagatgctgacaggaaagaacacggaatgaagagaatctaaattagccaatgggcaaagcagaatgacaaggcctatggagaaaattcaggcaacactggagaaaccatgaaacgatctcctgaaatcaccaagtccaagttttaggattctaggatttttaatggagactggtaactcttttatggtatgcgtagaactacaggaagctgtgcatgcaaaaagattcgaggtagagctgcagaagtagaaccatcagtttaggctccctttggttgggctttccaacctgcttttacttttgcaaaagttaaaagccaaccaaagggttccaaaaccattgatgcttttgcccaaaagcagctttcatagtagtacaaatccaaaagcacctctcccccctactttca

SEQ ID NO: 13876 - DNA, 508 bp, Setaria italica
  Peptide Sequence Number=SeqID_79850
ctgggtgaagcttatcgtggcatcttaatttggtaattacacgatttgcaataagtaactgctattagtagtatcacttaacagagggcttcttgcttcggcagcatagatctacacagctaggagacaatcatgtggcaggaaaaagcaagcttgcctattgaagcaacaaccgggaggccaaagttagcaatctagcatgtgtttggtgaaacagaatagagccttgatctgatcaaaacaatacatggacacttccccggcaatccttcttctgaaatcgatccggctaagactaacagggactaaagataggatgatccttattgtttccacataaatgaacagattacacagcatgaaaaagaaatataagcaaagaattcaagcatgaaaacatatgcccataaataggtcaaccaaataactacttctcataaggcggttcataggaagaagcatgtaaagtttccatctttttcccctttccatcacaaagcatgttgaa

SEQ ID NO: 13877 - DNA, 1503 bp, Setaria italica
  Peptide Sequence Number=SeqID_79851
tggtttaacaggtattagataatcttggaaacacatgtttcatgaacagtgcggtacagtgcttggctcatactccaaagctggttgactatttccttggtgatttctgtaaagaaataaacacacataatccactggggatgaagggggaactcgcttacgcatttggtgatttgttgaggaagctatgggctattgatagatccccagtcgctccacgccacttcaaggccaaacttgcacgctttgctccccaattcagtggctttaaccaacatgattcacaggagcttcttgctttcctattggatggactccatgaagatttgaatcgtgttaaatgtaaaccatattctgaagcaaaggattcagatggtcgtccggatgaagaggttgcagatgagtactggggcaaccatttagcacgaaatgattctatcatagttgatatctgccagggtcaatacaagtcaacgctagtgtgccctatctgcaagaaagtttctgtaacatttgacccatttatgtatttatctttgcccctgccttcaacaacaatgagaacaatgaccataactgtcttcagcactgatgggaccactgggccatctccttacactgttagtgtgccaaaatctggagatacgaggactcttatcaatgcattaagcaacgcttgttcgttgagagacgatgagcgcctccttgttgctgaggtctacaataattccattatccggtacttggatgaaccttctgaagtcatctccctgattagagacggagatcgtttggttgcatatagacttccaaaagacagtgaagatgctcctattgtggttttcagaaaccagcgtatggagtcatccctgtccagttttggcaggaagtcgtggaagagttttggcaccccactcgtgtcaagccttcccgatacagtaactggaagtactatctccaaccttttcctgaaggttatgactccgttcagagtatcaaacaatgatgtttcagatgctgatcaaacaattggcgagtgcaatttggctaatgaaactgcagataccgatatgagcattgatgcctcagagcacaccagcttaaacaacaataatctcgaggatgaaacagggagtgaagatgcaatgcaatttttcctgactaatgagaggttcccggaccaacgcatgaagatagaaatggatcaacccattacagtgaaaggtccgcagaagcgcctgcatgtggctgtgtgttggcaggacaatggactggagcagtacaaccttgcttctttggattctcttccagaggtttacaaagctgtgttattttcaaggagaccacaagacacatgttctctatatgcatgcctggaagcttttatcaaggaggaaccattaggcccagaggacatgtggtattgcccaggctgtaaagagcatcggcaggccagcaagaagctagacctttggaggttaccggaaatccttataatacacc

SEQ ID NO: 13878 - DNA, 893 bp, Setaria italica
  Peptide Sequence Number=SeqID_79852
ccaggcattaggcagcaatattcacataatcacaagttaagccgaaccacatcagctgaaaatctgaaacaacgcatcaatccaggcattaggcagcgatatgagaaaaacagaccatttgccatgaaagcatggcatgctcaatgtgcatgttagagcgggagcagcagaacagggcatgggatgaattcagccagcagattgccatcgacatgctttgagtggattgcctccatgcttagcacaaccagatctaactccagctcatcagcaacttccccaattattgccgttggtttcctcccttccccaagacgctccatcagtccaaactccgtaaatccaccttctgagagatgccatctgatgcttgacatctgagtatcatgctctgggaatgactccttaggtttatcatcaataacaactacagtaatgtttgctccgtacttcttagctagagaagcggttgtggctgcagcctgtcgtgtgccttcagaaaggtaagggttgcgatcagtgactggaagcagaacatgtttaacttgtgagagagcatcaactgccaaagtgcttccagattcattcacttcagccctcactccgtgccgggatccccggcggcgcgcggctgcgagggatacggccttcctggcggtcgggaaagcggcgagctccggcgcggtgctcgcgcggacgcgggagaccggagcggggaggagcgagcttgcgaaggccatgcggagagattggattggcctgccctggagttgaggctcaaatggctgctgtggcgcggcgcggcgcggcgggcgaggggagagggtggcggcttctggaacggcgaggaacgggtagcggacagaccgagagactagtgcgactgagtcgga

SEQ ID NO: 13879 - DNA, 364 bp, Setaria italica
  Peptide Sequence Number=SeqID_79853
gactcgtcatatgagatagatagaaatctgaagtcaatcatattccagttagagcattggtctgtcatcttaccctttattttatcaatgcctttcctcaatgcacttcggagaatgtcaacctgcatttagttaggaataagaggatgaaacagaaggctaaaaaacaattaagaggtcaaacatatacgcattttcaaatgccaagtggtcactataagtttgctataactctgcaaattccttagtttctaacatgtcacaaccaacatactattttccaccataggtctaccatccatattggtagccatagccattggtgtgtgagacctgagatccagtgatttctggcagttaccgg

SEQ ID NO: 13880 - DNA, 1469 bp, Setaria italica
  misc_feature (1)..(5): n is a, c, g, or t
  Peptide Sequence Number=SeqID_79854
nnnnnttttttttttttttgacatgacaaccaataaatcacttactctcagaaagatgggtgaaaatgggtccaacatgaaattattcgattcccaaatttggaactagcttccaatgcggacctataacatacactatctgaacctcccaaaagggaggatcattctacaattgataaggcatgtggttacattaagaagatgcagcatcaagcgccggtagacagtcccttataacatcggcggcttgctccagctccttctctgagatgatgagtggcggcacgagcctcacaacattgcctttcccagctgtcagcactatgacaccggcatcaaggcatgcatcgaccagaggaccagccggtacatctagctcgatgccgacaatgaggccaacaccgcggacctcctttacatgtgggtttccgctcagcttggtgcggagaagctgcttgaagttctctcctttcttggacacctcagccaagaaaccaggtttctggattttgtccaatactgttagtgcagtcttgcagacaagagggccaccaccgaatgttgtaccatggtcgccgtagtttatggctgcagcaaccttttccttgaccaagacagcgccgatcgggagaccattcgctagtggctttgctaaggtcataatgtccggtgctactccatatgcctcatgtgcccagaggtaacctgtgcgccccaaaccacattgcacctcatcaaagaccaagagagctccagcctcgtcacatgcctcccgcagcccctgcaagaactcctgggtcgcactatgaatgccaccctcaccctgcacgggctccacgaacacagcggcgagcctgccggactgtatcaccttcttggcctcctgcaggttgccgtactccacgaaggtcccgccaggcatgacgggcgcgaacggttcccggtactgcgacttgctggtgagcgcgaccgagcccatggtccggccatggaagcagttggtgaaggccaggaactcggatggcggatcgtcgctgtcggggtgcgcgacccgctggaacttgcgggagaacttgatggccgcctcgttggcctccgtgccggagttggcgaagaaggcgcggtccgcgaaggaggactccacgagccgcttggcgagcgcaacctgcgccctggtgtagtagacgttgctgacgtggatgagggtgccgctctgctgcccgatggtggcggtcacttccggctcgccgtggccgagcgaggtgacggcgatgccggcggccatgtcgaggtactcgcggccgtcgaggtcgtagaccttgcagccgcggccggcctcgaggacgacgcgggagcggttgtaggtgcccacgaggtaccgcgcctcgtcctccatcacggccaggctcgccgccgtgagctcccgccgcgccgccccggccccgcggtcgggggcggcggcggcgcct

SEQ ID NO: 13881 - DNA, 464 bp, Setaria italica
  Peptide Sequence Number=SeqID_79855
ttgcttctgcaatatttgtgggcgtatatgaaccagctaaaagaaaactactggaaatgtttcctgaaaatttgagtgctattgctcatctgactgcaggggcaattggtggggctgcttcttctcttattcgcgttcccacggaggtggttaaacaaagaatgcaaatgagtcaattcaagactgcacctgatgctgttcgccttattgttgctaaagaaggaatcaagggtctttatgctggctatggctcctttctactgcgagatctaccatttgatgctattcaattttgcatatatgagcagctccgaattggctatcgattagcggtgcctttactggcgctttaacaacgcccctagatgtcatgaagacaagattgatgattcagggacaggcaagccaatatagaggattatagactgtgctcaaactattactgcgagaggaagggctggcgc

SEQ ID NO: 13882 - DNA, 250 bp, Setaria italica
  Peptide Sequence Number=SeqID_79856
agacactacagatcattaatgacactacttggggagaaaatctatgacaacttactggacttggactcggtgatggacggggtgcaccgcaggctccacggttgcaaacatttctaaaactgaagttgacattaccacactgaggacaattccagtccccctcccttacagacactgaaaatagtagaaccttttgtaaccaccaagactcaagtaaaacaagacagtgtagttagtttgctttcccaaa

SEQ ID NO: 13883 - DNA, 1147 bp, Setaria italica
  misc_feature (1)..(19): n is a, c, g, or t
  Peptide Sequence Number=SeqID_79857
nnnnnnnnnnnnnnnnnnnttttccgcaacaatctgcaactgccgcaaatgatagtgcacggtataatgttcttccttagttttcagcatttaaaaggtatacgtaacatcaaacattacgaacagaatctccaaacggaacaagaaacagtttacacaactaatgtaggatacaatctagggtacaacaatacaacaatacgttgaaattgtgccgcatggttgggtttagttgttggtcggggccggcttgctgtatgagcatcctttcctgttgcacaccgtacggaaggggtagttcaggttgttgcactctgggcagttccagcttccttcaggggcatccttgttatccttgcgagatgaacccatgggagctccaggagttggcctcggggctccacatttcttcatgttgcaggtgtttctgaaggaaaagttaatattgtcacatttgggacaggtccagtcaccctcagaaagtccatcagggcctccacggcgctttcgtgaagcaatgctgtcactgttttccactaatgctccaccagaccatgggctagaaaccggcattggagatcctctaaacccatagctatatcggcctagatcaggtccagggccatatcccatgccacccatcggcccaggttgaccatatgaagagaaaaggccatatgaaccgggagctcctactggtggaccataaccatatcgcatcccaaggtgcggatatggagcaccatagctaccagatccaagtgggattggagatggcgcaccacctcctcctccgtaaaatagcggtgaccgatcatatccagcaggaggaggtgctggcatcattcttggacttggactcggtgatggacggggtgcaccgcaggctccacggttgcaaacatttctaaaactgaagttgacattaccacactgaggacaattccagtccccctcccttacagacacgtcgttgcgcgacctcttggacaacgcgcctcggttctccacctgcgcgacagcgccgaacttggcggaagccatcggcgaggaaacggaacacggcagcggcagcggcggcggcggcggcgggaggaggaggggggaggagggaggagccgctgcgtgagaaagggggacgagagcg

SEQ ID NO: 13884 - DNA, 361 bp, Setaria italica
  Peptide Sequence Number=SeqID_79858
tctcctattccaagtattggttgcccgttgccggtatcttgatctcactactgagcatagcttactgttgtgtattgatgcttgcagtaacgattgacgaagtcctgtcgttgctggatgattcagccggcggaactcagattgattgcactgttttttgcattcgaggacctctgatgagccgtcccatggaaacagattatgggaactggaacctcgatctggtgccagtaattttggtttcggtgttagtcatgatgtctgaggtgagggacatagctacctacatcaactccaactggactaaagttgccgtcacctgccaccttgtaaaccatgcctcttcgcagcattcacttct

SEQ ID NO: 13885 - DNA, 1152 bp, Setaria italica
  Peptide Sequence Number=SeqID_79859
tctgaatgatcgatccgcacctcagtttgcatgctattttttttgcattcgaggaaaactgatgagcgacaccgagtataaaggttatgggaatgggtacctcggtatggtgctagtaattttgctttcggtgttagtcatgatgtctgaggtgagggacatagctacctacatctactccaactggactaaagttgccgtctcctgccaccttgtaaaccatgcctcttcgcagcattcacttctcaagaagaaatggattggccttctgctgcgtcgtcgatgcaagctgatgaagcattgggatgagaaaataggtcagtgcactatgctggagattcgcccgagaacaaccctgcctgtacttctcaggcgtctcctccacttaccagaccacaagaggaaggtcaaggtgcctgcagcagtgaaggtttgcatcatggaagttgtaagaagcactagaaatggagaccttagcaatggcagagcatctctccgctgccggggccaagttggtgaaaggctcctctgggcttgccacaacaagagtgcgtcttataccatactgacatggcacatcgccacaagcatcctcgaggtcaggtacccacaccggcttgatcaacaacaaggttcttcttctccaattccgaacacggactataagatcgttgccactcacctatcaaggtactgtgcttaccttgtgacatggtgccctgagttactccctgatgatgatgcatggagcaggagcctgtacgaggatgtcaagaaggatgttgagcatgtacttgccggctgcacagcaggagactcactgacgccagaagcaaattgccaacagctgatcgaagtgctgagtgcagatgcgaagcatgaagtgctcaaggaaggcgctaggcttggaaagcagttgttggcgcttgtggtcgaaggtgaggacgatacggcgtggaagttactggctgaattttggtcggagatgatcgtgtatgtcgcgccatccgacaacctcaaaggtcattcggaggccatcgccaggggtggcgagctgataactctgctctgggtgttgctcttccatgctgggatcgtcagtaggccaggtgaggacgacggcgttgctcctacttctgctggcgtggttta

SEQ ID NO: 13886 - DNA, 848 bp, Setaria italica
  Peptide Sequence Number=SeqID_79860
caaaggaaactgttacagatgtacatgtacttgtcactcaaaagaaatcctcgttcatcctaatgaattttcattccacagcaaaacgaaccaactcagaggctcaagcttaagaggacaatccccctgtccttggccagagcctcagcccgccctcctcccggacaccagcgcgccatcgaacgtggccgagcaccagtggtcaccgcagacgtacaagccgtcgccgatcctcgggtccctcccggccggcgtcgtgggcggtgtctggtccggttgcgtgaacccgatacggtacgtcctcaaatgcttccacgacgcgacctctccggagccgaaccacccgccgagctcccggaccacctcgtcggccagatcggcgtcctccctgtcggcgaacgagccgacgagggacacggataccagcaccttccccgccggcgcgtacgacggcgccacattggtggcgaagaacatgttgttcacgatccccttgccggacccgttgaggagcaggatgggatcctcgaccagcgcccggtcggtagagaagtagaggcagacggtgctcctctcggatttcttgggcttctctggaactgatagctgcggcaggagcttctcggcctccggctgctcgacggcgacgatgacgccgaggtcgccggggatggtctcgccggtgtcgagcgtcacgccggacctgctgatggcggcggcgcgggagttgaggcggactgagccgggagggaggcgatccgcgagctgcgacgcgatggcgccgatgccgtcctccggcagcgcgttatcgccgagggcgaggcgcttgaacacgagctggaagaggc

SEQ ID NO: 13887 - DNA, 285 bp, Setaria italica
  Peptide Sequence Number=SeqID_79861
ttagtagcgaacatgtaagaaatcagatacccctcttcaattctagctttattccagtgattcatatcgtattttcattttcgattataatacaatgttacaggaatgcacggtgaagaaaacaggggaagagaaggaccaggcaagaattttctcagccttcaatatgaaaacttgagaacgagaagaaaatacaatggggggaaaagaaaagaaaaaagtgccgtgttcttcgaagacccacccttttgctaacctgattctgagctccctggccaggtcctt

SEQ ID NO: 13888 - DNA, 251 bp, Setaria italica
  Peptide Sequence Number=SeqID_79862
gtggttgagtccaccattattgaagacactctcattaacattcagtgaaacttgtagtttgcacctttctatttgcaacaatgtaatcaatgctctctaacttagtgggtactctatcgcctatgcatgatcgcagttcgttgacaagatttagcttttcccttcaggccgggttcaggctgaatcatccatattttagcatgtttgtaaagatttactgaatttaatgtttataatcatctatacttaca

SEQ ID NO: 13889 - DNA, 585 bp, Setaria italica
  Peptide Sequence Number=SeqID_79863
ttgcgtgtctcagcattgcccgagctgccctcatcgccagaatacgaactcccagccctttcacagtggtacgcggagctgcattggctcatattatcagcatcactcgacttgctcctgaccaagtgcgccaacattttccccgaatccttttcgtagtgcttctcctgcactgccactgccagcgcatggctttcttgcacttggaagctttgaaccacagcatgctcacgcacttcgtcgaccgcaatctccttggagacatccggaatctgagacaccggaatcttgtcgaatgacttgctcggcttcctccggtgcacagaccagaagcacaggaagcctaggataaacaagattacaacccagatacagatgccaatcacaatccatagcctcaggccgaaaggcggcgtcctggaagatagctctgccctcaagatttccgcagcggacatctttattcctcagcaacctacgcactggtggacgctcgtcgccggcgaagggcctgacgaagacctgggcgaaagggcggcgcgctcgcccggtccgccgccgccaggaaaggaagccactagagag

SEQ ID NO: 13890 - DNA, 374 bp, Setaria italica
  Peptide Sequence Number=SeqID_79864
gggccggagcggcgaacgccctcgccgccggcgcgcccgccaagaaacgcgtctgatctgaacttctcatgaatcaaacaggaaaaggaaaaaaaagcacaactaactcagatgcagtgcaacgacgacagcaacagtgctgaaactgaaacgaagtgcccagcgggatcagcaggattagttaatctgtttaattaattattaattaatttaaggtattattactgccgctattcttatatggaaaataataagccatggtttactcccctaccgggtccaaaatgtataatgtgagccctaggtaggggagggaacatgggttgggggcgccaccgcacaaataatccgtgtgtatagtgagtggctggtgg

SEQ ID NO: 13891 - DNA, 1118 bp, Setaria italica
  Peptide Sequence Number=SeqID_79865
gtcctatgcatcatcaccttgtgacgctctttgctgtctatccatgaatcactgtttgcatcctcttcatggatataactggaacaggctggccctatgatttctcagcttccaatgccttgtgtatgtacaaagccttcagctgtttgcatatgtacatgctcagacagagtgcttgtaattttccctgagtgtcaaccgatagaggggagagtaggttgactgaagccgatgccagacaccccatccaaggtgccaggagcaacatgttttacttgcccataccgcctgatatggcgaaggagcctggccaggaaggtgctgtgacaaatagtggaggtatcacaaaccacagtgatgtgcttgcgtgcccttgtaatagccacattgatgcgcctgctgtcgcccagaaaccctacggctcccagtggattcgagcgaaccattgaaatgatcactgcatctgcctccctcccctgaaagctgtctatggttgaaacctcaacagcagaaagctctggatattgttctagcttctctcttaacaattgcacttgagcaatgtagggtgattgaacagcaattgcagttggagacactccacaatgtacaagattaagaacttgttgtgtgactatatctgcttctccttcattataaaatgagcctgtgccagcaggatctaagtgctccttgcaaccgatgtttagggctccatatggcatccgggtgtcaagtaagagaagtggacaccgtgttatccaagttgccttgacaaccggggagtcagcaagaagatgtgaagcaacggaacgagaggattcgagcaacccatgatacatctccctagatgcccacatcgctattgaatcatgcattctgtactgtactgtcagtcttgttgtcagtaatccatcatgcaatgatgaagctgtttccaacaaagatttaccaaggccaccatccaaggccttcctcgacaatataacgggtgcaagttggcagtgatcaccagcaagaatacagcgttttccctgcaatataggtatccagcaggctggttcaatcgcttgccctgcttcatcaataattactaagtcaaagctcccagttctcct

SEQ ID NO: 13892 - DNA, 269 bp, Setaria italica
  Peptide Sequence Number=SeqID_79866
tgaggttgtaggcaacgaagccggcggcgaggacggcgaaggtggcgctggcggaggtgctgccgccgctggagttggcggtggcgttccacgccacggcggtctcgaggttgccgcggccctggagcgtgactcccgtcttgttgccccaaaccaccaccttctccgcgtagactcccgcgtcgacggcgatcagcgtgcgcgccgccgccgccgccgcgtggtcgggcacggcgtcgacggcctgctgcacgctggtaaagttggcg

SEQ ID NO: 13893 - DNA, 589 bp, Setaria italica
  Peptide Sequence Number=SeqID_79867
aatactcatatatgaagaactgggaatttcttcaggattgtgcaattcgcttctttgtgtactttcactggatcgctttggtgattatgtatcagatcaagtggttgccccagttcgtgaaacttgtgctcaagcacttggtgctgtgctgaagtacatgcacccttctttagtatgtcatacactgaatatcttgctgcaaatgcagcgcaggcaagagtgggaagttcgtcatgggagcctccttggcattaaatacttagttgctgttcgccaggaaatgcttaaagatttgcttgactacgtcattcatgcttgtaaagctggtctggaggatcctgatgatgatgtccgagcagtggctgcagaagccctaatcccagctgctgactctttagttaggctaaatgatcaaatgctgcattcaattgtgatgttgctatgggatatattgctagaccttgatgatctaagcccgtctacaagcagtgtaatgaacttgttagcagaaatatattcccagccagagatggtcccaaagatgcttggcaccgcagcttcaggggaaaggggagaatttgatctaaac

SEQ ID NO: 13894 - DNA, 244 bp, Setaria italica
  Peptide Sequence Number=SeqID_79868
cgcagaacatgcaggaactggtttttcttaggccaccatctcttagttcagacgatagtgcttgggcttggcatgaggctgatgttatacgagttgttgatgatgtggctaatgggattccatctacatacacaaatggtgtatcatcaccaccctccactccatcctgttctcaaaatgaatcttttgatcctgctgctcactcaataacagggaatgacatcaataatgaagctcatacttc

SEQ ID NO: 13895 - DNA, 375 bp, Setaria italica
  Peptide Sequence Number=SeqID_79869
ctgcctaattccatttgattgtgatccaaccaactattacaaatgaaattgcagatcaaaatgaagttttgggtaactggcactgggaagtgtgatcctgccaggtccctgctaagagccagcaggacggaggaaaataacatcatatcatctgaacagctttttatcccacttttgatttcgatctcccaacctggacagttactcatcatcatcgtcatcatcaattaccaacctgtgtcttctttttaaaccagccctttgattagcctcagcgttttgttgtgtctcctgattcaatgatattagaaggaataatctcatcatgcaggtcaatgtttctcagagattcttggtcttgtatattcgctgaga

SEQ ID NO: 13896 - DNA, 413 bp, Setaria italica
  Peptide Sequence Number=SeqID_79870
agcgtttgttgtgtctcctgattcactgaaatttacatcatcagtgatcctttggtcagtatttttcaggatactacaaacgtacgtcaaagtcatccagaagttcagcttcaccagtattgccactgttaaccactgaatcaggctcatgaattagagaagcatccatgatattagaaggaatagtctcatcatgcaggtcaatgtttctcagagattcttggtcttgtatattcgctgagaagtttgacaccactaacctcttcttttttccatttctaagcatggatcctatggtctcatcatcaggataattgtcttccattagtttttttatgttgcgatatactcggtgaagaatccttggtgtttctgttttttgaagtattcttgatggttttgtactttccttc

SEQ ID NO: 13897 - DNA, 283 bp, Setaria italica
  Peptide Sequence Number=SeqID_79871
aacattttgatctgtagttactgcatttccgtacgaaacactgcggtcaatttggcgtttttatttgttcgaacgaaggacgggcgtatgcgtgtatacaggggtagtattcgttgttgcattgttcttctatctgtctgcccgtcgtggcgttttgtttctcagttagactaaattttaggatttctgacccaatccttttcaagtttcatttctacgccctctgttagtttcgcacaagaaatcaaccactggtttagattcagttcatgtttaggcacta

SEQ ID NO: 13898 - DNA, 301 bp, Setaria italica
  Peptide Sequence Number=SeqID_79872
accggaaagattctcagctgcttgtgtttttctttgtgtggctcttttttggggattggctgtttgctgtccagaagcaagaggaagaatcaactcaaggaaaatatttatatgagattagatgaaggaaagtaaaaatgatgtaaatcagagaaacaaacaatttagtagatatcagcctctgttaccagtccaattgtggaaatcaattaactatcaagctacgataacctacaacacagagccagacatcaaaatccatacagatccaactaccagaactagaatttaaacttgccga

SEQ ID NO: 13899 - DNA, 700 bp, Setaria italica
  Peptide Sequence Number=SeqID_79873
ttggtcttggatgggatgaggcaaaacaaactgttgattgctcagacaaatggtgggatgaacaccttgttagatgcaagaatcgtgagaaaggaatcaaatgccaccatatgaagtttcgaaaacaaggacccaagttccttgtgacctgcatatcttgtttggcaaggcacatggtaagtgggtcttctgcaccctgtcctggagatatatcatccgatgaggcaagtgatgaggatgtggatgaggtaccaaaacctcacagaaggatatgacagtgaacctaggaaaagtaacttccagtggtgttgaagagaaggatgagaagagcccattctttcgtttgtacaaaacacttgtttgaagatagaaaatgctgcagagaggatctccacaagtgttgaagcatcatcagctcctccaaccaacctagttcctaccattgcagagactatgaaggtggtgaaagaatgtggggtacaagaaggaactgctctaatgtatacaaccgcctccctaattgttaagcctgaatttagggagctctttagctctctagaaacaatgaaagaaaggctcgatttgattgagagggagctagaaaaggagacgatgaagcgtcactgatttgtttccatatttgtcaaattattttcttgtcatatgttaccctatgttgaaaaccaaaaaaaaaaaaaaa

SEQ ID NO: 13900 - DNA, 418 bp, Setaria italica
  Peptide Sequence Number=SeqID_79874
tttttttttttttttttgtatacggaaaccacgcaagtctattcacgaacgcaatccattcggggtaaacatattacatcacgggaacagctcaaacaacacaagtatttactatttatacaaaaattagaaagataagctagcgtttgctaaaacagcaccaaataaaacaaagtaaatggcaaacaaatggtagcatgttctttcatatgtagtccatgttactgcaacacaattcacaaattgaattctcaatgtagagcaaaagggcgtcaagtagagccagtcggacgtttcactggctgatcatacatcccatttacaaggcctgcacgggataatataggcaaacaacttactactgttaaaatagtcattttctgatgtgcattctgcaacaagaggtgttcctctgcca

SEQ ID NO: 13901 - DNA, 1584 bp, Setaria italica
  Peptide Sequence Number=SeqID_79875
cggccgcccaacgcgctccgcgtcttcaccttccaggagctccgatccgccacccgcgggttcagccgcgcgcagatgctcggcgagggcggcttcggctgcgtctaccggggcaacgtccggagcgcggccggcgagccgcgccggagcatcgacgtcgccatcaagcagctcagccgcaagggcttgcagggccacaaggagtggatgacggaggtgaacgtgctcggggtggtggagcacgccaacctcgtcaagctcatcggatactgcgccgaggacgacgagcgggggatgcagctgctgctcgtctacgagttcatgcccaacgggagcctggcggaccacctgtcggccaggtcgccgcggccggcatcgtgggcaatgaggctcagggtggcgcttgacaccgctcgagggttgaagtacctccacgaagaatccgaattcaagataatatttcgagatctgaaaccatcaaacattcttctcgacgagaactggaatgcaaaactgtcagacttcggcttggcaagattaggacctcaagaaggaagccatgtgtccacagcggtggtggggacaattggatatgcagctcctgagtacatccacacaggacgcctcagcaccaagaacgacatatggagcttcggtgtggtgctttatgagctccttacaggccggcggcctctggaccgaaataggccgagaggtgagcagaatctcgtggactgggtgaagccctactcttccgacgctaagaagcttgagactgtgatcgatccgaggcttcaggggaactatagcataaaatcagcagcccagcttgcgtcagtggcaaacaagtgcctggtgcgccatgctaggtaccggcccaagatgagcgaggtgctggatatggtgcaaaagatcgtagagagcagcgaacttggaacaccggagcatcccctgatcagcaattcaaaagaattagtgagtgatgaaaagaaaaggaaagtccttgacttgaagagaagaattgcagatattaaagcaggggaagggagatggtttgcatggcaaagatggacgcccaagcttgtgagaacacaatgattcacagcatcagcagatgaggtgttcttgcatggcttgacttgcatagttagtagtgaaaacagcaagtgactaaaagatcacctgaagttttcatttagcatacaggtctgagagcatgacaagtgtaaacaaacggtttggtgcagcctatgcggacactttctgtaagcacatgtaggcagtcttctccacccacctggaggttccatgttttttatcagagcttaatcaaagatctaggagtaatttttccaagtagaagggttattgtacagtttaacttggttttgtgaagtgatttttgagttgtattaagtgctaagggtattcatgtagtgtatgtagctcattacttcctatgtttgcaggtgttgcactttgcatgcacctacctgtagaattcctgtttatctacatttggcacagctgatatgcataaaaagaaagaggggtaatatgtacgacgcgatgtagggcggaaac

SEQ ID NO: 13902 - DNA, 360 bp, Setaria italica
  Peptide Sequence Number=SeqID_79876
cacaggccttcttctacccctcggcgactgggtgctagctcaacagcagcttaactgatctgaagcttttcttcaagtaaagccctagctggtagtgtcctactcagctctcaccatgggcgattcctcatcctcatcagcatcttacatcagaatggttcaccatctgatagagaagtgcatctgcttcaacctgaacaaggaagagtgcatggacgcgctggagaatcatgccaacgtcaaccctgtaatcacttccaccgtgtggaaggagctggagaaggagaacaaggagttcttcgagacgtacaacaaggaccgcgtggagcggaacatcgaggcggagacgatgcagcggaa

SEQ ID NO: 13903 - DNA, 179 bp, Setaria italica
  Peptide Sequence Number=SeqID_79877
aaatgtcttgtagctaggcttcacgcgcctcagacagaccaattatttaccttgctcagaagacctgataaaccgcagagcctcaggtcctcagaggagctcacctgtccattctgcagaacaaaagcgctcatgtggaagtgcggtttatcaggtcttcagaccaattatttaccttg

SEQ ID NO: 13904 - DNA, 505 bp, Setaria italica
  Peptide Sequence Number=SeqID_79878
actggaccattcttaagtatcagcaatcgcaaatggctgttccaccgcgtgctatggctgcagcagcaggtcaaagctctgggatggctcctatggcaaataatagactgtcagccactgaaagaggggaaggaggaagtgggtggtcagctgatcctttgcggcgtcaggttccacctgcaggaataaatgtagtcagcttgtcaaaacagaaatctccaattagacaagaacagtcctcatcaaaagatgctgtgttcgactttttttgggtcggtcaagcggatccttgaggcgtcctgctgtttctagtagccgagttccaaccggtgaagctgaaacacacagccgtacaccagatacaagcccagggactttccaaagaaatgctcccccacgtaggacctcgcaaacactggagtactcggaccccaggctttcatcgtctggcaggctcatgcccaactccaagaactacgagtccactttaaggggcatccaaggt

SEQ ID NO: 13905 - DNA, 234 bp, Setaria italica
  Peptide Sequence Number=SeqID_79879
tagtaaattggtaactaccctaaaggtaatagaacaataaaacagactgatgaactcaaaggggcgcctgacagacccagctacaagacatttacataacattatgagagctaggcttcacgcgcctcagacagaccaattatttaccttgctcagaagacctgataaaccgcacttccacatgaacacatcgtctccccagcacattatttcctgttgatccaaaaactcaac

SEQ ID NO: 13906 - DNA, 380 bp, Setaria italica
  Peptide Sequence Number=SeqID_79880
aactacaatagggtactacgggaaaagggcaaaccaggtttacgctatagattttggacttgcaaagaagtacagagatacatcaacacaccagcacattccttacagagagaacaagaacttgactggaacagcaagatatgcaagtgtgaatacccaccttggaattggtaggttttattttaatggtcaatgttgactcctttatctggtggttcatagtttcgaggcatgcagtttccagattcctggcaaatttctcttgcctttctgcatcctctcattttgattatcattattgatgttttgcttcacatagaacaaagccggagggatgacatggaatctcttggatatgtactgatgtacttcttgagagg

SEQ ID NO: 13907 - DNA, 251 bp, Setaria italica
  Peptide Sequence Number=SeqID_79881
gggccatggtgcgggaccttctgggttggcacctgcattacagaatgacaggcaatcaggtaatttggagcgctcttcttaatttgccatgtttgtacttcagcatttgattgagtaatgctcattgtttatcttttaggccttgaggaagcgaggactagtggttggtcatcaatggatcgacgtcgtacaccaccccctattacaagcgtggggacattatctaagcagaaagcgcctgtagggaatga

SEQ ID NO: 13908 - DNA, 618 bp, Setaria italica
  Peptide Sequence Number=SeqID_79882
ctgggaacagaaacagaagtacgaaaagatcagcgaaggaaattgctacttcaactgaggcactttgtcgtggatatcctaccgaatttgcttcgtacttccattactgccgctcactacgtttcgaagattgtcgtcctagtacttattcaatatctgaagagattgttcagagacctttttattcgagaaggctttcagtttgattatgtttttgactggacaattctgaagtaccaacagtcacagatgaccagtgctcccccacgtgcaattgttccagcggtaggacaaagctctgggatggctcctgtggcaaacaataatagacattcaggcaatgaagagggaaggagaagtgggtggtcagacatggacccgacgcgacggcaggttccaccaccagctataaatgctggcagcctagccaagcagaagtcccctgttcggcatgagcaatcgacatcgaaagatgctgtgttcgacttttttgggacgttcaagcggatcgtcaaggcggcctgctgtctccagtagccgagaaccaagcactgaagcggagcaaacgcgtagtcgaactactgacgcaagcccagggcattccagaggtcaggagct

SEQ ID NO: 13909 - DNA, 561 bp, Setaria italica
  Peptide Sequence Number=SeqID_79883
ccactgaagagggaaggagaagtgggtggtcagctgatcctttgcggcgtcaggttccacctgcaggaataaatgtagtcagcttgtcaaaacagaaatctccaattagacaagaacagtcctcatcaaaagatgctgtggtgagtttttatttaatttttcgttatcttgaattgctgatgtggcatcttcttatttaggtgcctgagatttttctgtgtaatttctgacccctcaaatgacttatagttccccagttcgacttttttgggtcggtcaagcggatccttgaggcgtcctgctgtttctagtagccgagttccaaccggtgaagctgaaacacacagccgtacaccagatacaagcccagggactttccaaagaaatgctcccccacgtaggacctcgcaaacactggagtactcggaccccaggctttcatcgtctggcaggctcatgcccaactccaagaactacgagtccactttaaggggcatccaaggtctaaatttcgatgccaatgataggatccactactagtatctattattgatctcttga

SEQ ID NO: 13910 - DNA, 911 bp, Setaria italica
  Peptide Sequence Number=SeqID_79884
ccagcagcacgaaagaggaaaaaggagagcggaaatccccaatcccccacttcgatccactcgagccctagccggatcccccggagcatcagactgaatccattcgattgccgcatggcaggctccgtctgcatctgctgattcccgggatcgtctccaccgacgcgcttgcagcagccatggagccgcgcatcggcaacaggttccgcgtcggccgcaagctggggagcggctccttcggggagatctacctcggtaccaacgtgcagaccaacgaggaggtcgcaataaagctggaaaatgtcaagacaaaacatcctcaattgctttatgagtcaaaattatacagaatacttcaaggaggaactggaattccaaatgttaagtggtttggtgttgagggtgattataatgttttggttatggatttactgggaccaagccttgaagatcttttcagtttttgtaacaggaagctgtccctcaaaactgttttgatgcttgctgatcaaatgatcaaccgagttgagtttgtccattccaagtctttcttgcatagagacatcaagccagacaattttctcatgggtctcgggaaaagggcaaaccaggtttacgctatagattttggacttgcaaagaagtacagagatacatcaacacaccagcacattccttacaggtaaacatgtacttatttattcaaaatagttgtataacttcatatttctttccacccattccatttttgaagtaaaagaattgtacccactccataatatccccgacgatatattgtgctgctatagttctgattctgccacactgggtacgtaattattttatgctaatggttgagatttgcaccatgtacatctagaaattcaaataatgaacatattctcttagta

SEQ ID NO: 13911 - DNA, 1721 bp, Setaria italica
  Peptide Sequence Number=SeqID_79885
gccttgaagatcttttcagtttttgtaacagtaagctgtccctcaaaactgttttgatgcttgctgatcaaatgatcaaccgagttgagtttgtccattccaagtctttcttgcatagagacatcaagccagacaattttctcatgggtctcgggaaaagggcaaaccaggtttacgctatagattttggacttgcaaagaagtacagagatacatcaacacaccagcacattccttacagagagaacaagaacttgactggaacagcaagatatgcaagtgtgaatacccaccttggaattgaacaaagccggagggatgacatggaatctcttggatatgtactgatgtacttcttgagaggaagccttccatggcagggtctcaaagctgggaacaagaaacagaagtacgaaaagatcagcgaaaggaaaattgctacttcaactgaggcactttgtcgtggatatcctaccgaatttgcttcgtacttccattactgccgctcactacgtttcgaagatgcgccagactatcaatatctgaagagattgttcagagacctttttattcgagaaggctttcagtttgattatgtttttgactggacaattctgaagtaccaacagtcacagatgaccagtgcctcccccacgtgcaattgttccagcggtaggacaaagctctgggatggctcctgtggcaaacaataatagacattcaggcaatgaagagggaaggagaagtgggtggtcagacatggacccgacgcgacggcaggttccaccaccagctataaatgctggcagcctagccaagcagaagtcccctgttcggcatgagcaatcgacatcgaaagatgctgtgttctccagttcgacttttttgggacgttcaagcggatcgtcaaggcggcctgctgtctccagtagccgagaaccaagcactgaagcggagcaaacgcgtagtcgaactactgacgcaagcccaggggcattccagaggtcaggagctccacgttggagcccccagatgcttgactcctcggacagcaggcgctcgtcttccggcaggcgccactcatctaacccgaagaactacgagtccactatcaggggcatgcagggcctaaatttcgatggtgatgacagggttcactactagcctcatcccttgggacatgacaggatgcatcatcggtgcgctgcccccccatatgatgctcccatgtactaccggcagctgagatggaagcactgaggggcggctggttaataagaggtttgggtgagctgagcctaagcgcggtgggtgattggctcttagaaactttgtcaatggctatgcttagcctccgttgtacaggttggcatttgtttaatttcacggaacggtggtgtattctcgagagatttgtgcaggttcgcatttgatgtaatgcgctgctttggaattcaatggccacttgggaaagccttgaacatttgggaaggtttttatggcgcttgctctggttcagctatggattcgattcggcagctgccatgcctttgcctgggctctgagattttaatgctgcttgtgacagatctgaaattgtggtgttcttagcctataggaatgtagtcataggttaacacttgtcttttgtaagccgcgcggttgctgcaaataatcttacatggcgaatgaatgctcggaggaaaatgtacatgtttttg

SEQ ID NO: 13912 - DNA, 2016 bp, Setaria italica
  Peptide Sequence Number=SeqID_79886
accgcccccaccaaagcaaacaaaaatccccaatttccgccgcactccgatcctcctcccaaaccctagcagctcccaaatccccaccccccgcaatccctcgattcgccccgtatccggatgcccccgccccgcgcggcctaggggcggcagagttcggccggcgggcggggacgcgccgccgatggagccgcgcgtggccaacaagttccgcctcgggcgcaagcttgggagcggctccttcggggagatctacctcggtacccacgtgcagaccaacgaggaggtcgcgattaagctggaaagtgtgaagacaaaacatcctcagttgctgtatgagtcaaagctgtataggatactgcagggcggaactggaattccaaacgtcaagtggtttggtgttgaaggtgactacaatgttcttgttatggacctcttggggccaagccttgaagaccttttcagcttttgcaacagaaaactgtccctgaagactgttttgatgcttgccgatcagatgattaaccgggtcgagtatgttcatattaagtccttcttgcaccgagatattaagccagacaattttctcatgggcctcggaaagagagcaaatcaggtatacatgattgattttggactggcaaagaaatacagggacagtgcaacacaccaacacattccatacagagagaacaaaaatttgactgggacagcacgttacgcaagtgtaaacacgcatcttggaattgaacaaagtaggagggatgacttggaatctctgggatatgtactcatgtacttcttaaaaggaagccttccatggcagggtctaaaagctgggaccaagaaacaaaagtacgagaaaattagtgaaaggaagattgctacttcagttgaggctctatgtcgtggataccctactgaatttgtatcctatttccattactgccgctcgttacgtttcgaagatacgcctgactatcaatacctgaagagattattcagagacctttttatccgagagggatttcagtttgattatgtttttgactggaccattcttaagtatcagcaatcgcaaatggctgttccaccgcgtgctatggctgcagcagcaggtcaaagctctgggatggctcctatggcaaataatagactgtcagccactgaagagggaaggagaagtgggtggtcagctgatcctttgcggcgtcaggttccacctgcaggaataaatgtagtcagcttgtcaaaacagaaatctccaattagacaagaacagtcctcatcaaaagatgctgtgttccccagttcgacttttttgggtcggtcaagcggatccttgaggcgtcctgctgtttctagtagccgagttccaaccggtgaagctgaaacacacagccgtacaccagatacaagcccagggactttccaaagaaatgctcccccacgtaggacctcgcaaacactggagtactcggaccccaggctttcatcgtctggcaggctcatgcccaactccaagaactacgagtccactttaaggggcatccaaggtctaaatttcgatgccaatgataggatccactactagtatctatatgatctcttgatgtccagatgaagtgcaaggtagtgtccgagctacctttagtctcatgccctgtgtgatctacaagctacatgctggagcagcaaggcagcatgctgatccaaagcaatgattggcaaaataaagggctgtctgttttcttgagcagcttttgccttaaaaaggcatcttggctatgttttaggctctgtacaggttctaatgtgttcttattgtgctttgagattctgctttagtattttccacataatatcgcgtctcaagctgtcagctggctcgtgctccagcggctcgtttctgaatgcaatgcctatttgtgaaggattgcaaattgtaagtaacctaatgtgattgttattcaagtgttttggagtgtcatgtgcgggcaggttgtggccttttgg

SEQ ID NO: 13913 - DNA, 1607 bp, Setaria italica
  Peptide Sequence Number=SeqID_79887
taaaaaccgtaggaggattggactcgctccaccaccccccgaagcttgtgtacgcacgcgcgccctcccccgccacggccatggcagccgccgccgtttcctccccatcctcatccacggccctatccgcaaaccctaggtagcacgggagcctcccgccgccagatcccagagtcccgccgcacccgcgccgatctgagctcgctagctagatttccgctgcggaaagggcgcgttttttcggtagttttttttcttttcttttccttcgggcagtttcgggagtaatggagcccagggtcgggaacaagttccggctcggccgcaagatcgggagcggctccttcggagagatctacctcggcaccaatatccagacgaacgaggaggtcgcgattaagctggaaaatgtgaagacaaaacatcctcagttgctctatgaatcaaagatttataggattctgcaaggaggaactggaatcccgaacgtcagatggtttggcgtagaaggagactacaatgtcttggttatggatttgcttgggccaagccttgaggatctgttcaatttctgcagcaggaaattatctctgaagactgtacttatgcttgctgatcagatgataaatcgagtggaatttgtccactccaagtcttttctacatcgagacatcaagccagataatttcctcatgggtcttggcaggcgagctaatcaggtctacgttatagactttggccttgctaaaaaatacagggatacctcaacccatcagcacatcccatacagggagaacaagaacttgacaggaactgcaagatatgctagtgtgaacacccatcttggcattgaacaaagccgaagagatgacttggaatctcttggatatgtacttatgtacttcctgaggggcagccttccttggcaaggtcttaaagcaggaacaaagaagcaaaagtatgagaaaatcagcgagaagaaagttgcaacatcaattgaggctctatgtcgtgggtatcctacagagtttgcgtcgtatttccattattgccgttcactacggtttgatgacaagcctgactattcataccttaagcgactgtttcgtgacctttttattcgcgaaggttttcagtttgactatgtgtttgactggacaatacttaagtaccaacaatctcaaattgccactgctccaccccgtgcggtgggccatggtgcgggaccttctgggttggcacctgcattacagaatgacaggcaatcaggccttgaggaagcgaggactagtggttggtcatcaatggatcgacgtcgtacaccaccccctattacaagcgtggggacattatctaagcagaaagcgcctgtagggaatgatgttactgcttctaaagatcctgtgatttcaggaccaaattttttgggaaggtcaagtggatcttcaaggagacctgttgtttcaagtagccgcgatgtggtggccactgatagttctgagccttcacgaacacgtacaactgatgcaagccctggggcattccgcagagcctcaggtcctcagaggagctcacctgtccattctgcagaaacaaaagcgctcatc

SEQ ID NO: 13914 - DNA, 1494 bp, Setaria italica
  Peptide Sequence Number=SeqID_79888
tgccctatacaatcgggcaaagtcaattgactaaggaaagaaggaggaagttcaagcacagtttaatgagcttcaagaatactacctgcaaagacggcgtactggagcacagtcacgcagacaagaagaaagagacattgttgcaatgaacagagaaggttatcatgcaggccttcaggatttccagtctgtgctaacaacattcactcgatacagtcgtctacgtgtcattgcggaattgaggcatggggacttgtttcactctgccaatattgtatcaagtattgaatttgatcgtgatgatgaactattcgctacggctggagtctcgaagcgtattaaagttttcgaattttccagtgttgttaatgagccatcagatgtgcactgcccggttgttgaaatggctaccagatctaaacttagttgcctcagctggaacaagtactcaaaaaatgttattgcaagcagtgactatgagggtatagtaactgtttgggatgtccagacccgtcagagtgtgatggagtatgaagagcatgagaagagagcatggagcgttgatttttctcgtacagaaccttcaatgctagtatcagggagtgatgattgcaaggtgaaagtgtggtgcacaaaacaagaagcaagcgtgatcaatattgatatgaaagcaaatatttgctcagttaaatataatcctggatcaaacttctatgttgcagtcggatctgctgatcaccatattcactactttgatttacgtaatccaagtgcacccgtccatatttttggtgggcacaagaaggcagtatcgtatgtgaaattcttatctaacaatgagcttgcgtctgcatcaacggatagcacattacggttatgggatgtcaaggataattgcccggtacggacattcagagggcacaaaaatgaaaagaactttgttgggttgtctgttaacaatgagtatattgcttgtggaagtgaaacaaatgaggtttttgtttatcacaaggcaatctcaaaacctgcagcaagccatagatttgtatcttctgacttggacgatgctgatgatgatcctggttcttatttcattagcgccgtctgctggaagagcgatagccctaccatgttaactgctaacagtcaggggacaatcaaagttcttgtacttgccccttgatgttatcaagggctttcacgagatttacagtcagcttgtatatcttactgtccagttgtttcttttcgtgccattatattcccaaagtgggagtggaggtattattgatctccggtttagggcacgaagttttgaagctggtcagctgacgtagggtttgaggtctcagaatgtgcatattcatgttgatgttgtatatatgtaaaagcagccaagatattgattacaagtgtaacatgaggaatacaccttgataaagccccttatttctacaatgagggtatttgtgtttaaactcataaccacataag

SEQ ID NO: 13915 - DNA, 252 bp, Setaria italica
  Peptide Sequence Number=SeqID_79889
aagcgagtgacaaaaggttagtttgctggtggttgcgttggctatgtggtgatgggcaatgtgaaagcaagaatggcctgttgcggttggtgtggtacgtgatactgcaaagcttgtccatcatcactgcagagacgattggtggttttaaccttttgggtagtggaagcatgcagcatgaatgagcttggtttttttgttttgcaaaaaagctagagccatgtcgaaaccacatctccctctccgttgccg

SEQ ID NO: 13916 - DNA, 905 bp, Setaria italica
  Peptide Sequence Number=SeqID_79890
gagccattcatttcacaatcgggattgttcctttctgacttagtataaattgggatattgggatacatttgttgttccatgggaataattgattgcgctggtggtaaaatccagggcggatgagtggaacgtcaacaaatgggcatgggaaggggcacttaaggttgtcagcaagggtgaggaatgcatcatcaaattggaagataagaacacaggggagctgtatgctagggcatttctcagagagggtgagcaacatccggtggaacctgtaattgacagcagcaggtctgtatctagtgctgccacaaaatatagtctaataacctacaatgaagtacatgcctttgtatttcccagtgtccataaataaactacttgaagactgaataagcagaacctgaacttagacttgacgctcaaatatttctcttgcagatattttgtactccgcgttgaagagaatataggtgatgactgtctctttcttgggttctatgatattccttgtgctttaatgttttatttagtgttgagttgatgatcatagcatttggtacttaacttgaagcggtgtggtcaatgcagtactaaattgggtaatatactggaaacataacaaaccttactgtgaactgcagatgggcgtcagcgtcatgctttcataggtttaggcttccgcgaaagacctgaagcatatgacttccaagctgctctacatgatcatatgaagtatccttctgttcatttgaaacatgatatgcctatcataaaaaagcacacgatttccccccctgtgcaattcctcaatgactaatagttatatgtggaattctatttgatatggcatttaccattgatttcgattagccataatacatggtagattgttgtctcagatcttt

SEQ ID NO: 13917 - DNA, 880 bp, Setaria italica
  Peptide Sequence Number=SeqID_79891
ccgcaccagaatccttccccgcaccttcttccttctcccctccgtctcctcttctggttcgaccgacgaccggactcgctgctccgccacgccgcattcggatccggcccagccgctcccgatcccgccgtctccccttcaccgctcggcacgatccgccacgcccacgaccggttcgcggccgagcaccctccggcgcttctgcggccggcgccatggcgagcggcggctacggcgagcaggcgccggcgccggcggaggctgagccgctggagatcgtgctgttccaggtcgccgagtgctacgtctacctgatacctccgaggaagacggctgcctcctacagggcggatgagtggaacgtcaacaaatgggcatgggaaggggcacttaaggttgtcagcaagggtgaggaatgcatcatcaaattggaagataagaacacaggggagctgtatgctagggcatttctcagagagggtgagcaacatccggtggaacctgtaattgacagcagcagatattttgtactccgcgttgaagagaatatagatgggcgtcagcgtcatgctttcataggtttaggcttccgcgaaagacctgaagcatatgacttccaagctgctctacatgatcatatgaaatatctaaacaagaagaaggccgctgaagagatggttcagcactatgagaagcaatcgtcagtggattacagcctcaaagaaggggaaactttggttcttcagcttaaaagtaaagaaaccggcaccaagacaaaatcagcattttttgagcaaggcctaaacaaactctcattgagtgaaaagacaaactccaaggaggcccctgtctcccttaaactaccccctacctcaccttc

SEQ ID NO: 13918 - DNA, 854 bp, Setaria italica
  misc_feature (828)..(854): n is a, c, g, or t
  Peptide Sequence Number=SeqID_79892
ggtcttagcagatcctgacagcaaactgggtttttaatatgagctttatgaaatattgctgtattttccgcaaggaattcatttcgttttccttgattataatagtgtgatcatgcttcaaatatcttctttatataatgcactaagtttcctgtatgatttgttcgtctcttacattatcaaagatatctaaacaagaagaaggccgctgaagagatggttcagcactatgagaagcaatcgtcagtggattacagcctcaaagaaggggaaactttggttcttcagcttaaaagtaaagaaaccggcaccaagacaaaatcagcattttttgagcaaggcctaaacaaactctcattgagtgaaaagacaaactccaaggaggcccctgtctcccttaaactacccccacctccaccttcacccgtctctccaacggattctggagtagccgcttcccccttcaaagcagaatttcctccacaagaacctgctgctgaacccaccagcacaaccagcggtatccccgccaaaaccgaactttctcctgagcaaccagctgctgctgagaaggtcgagcaagaaaccgtcgatgaagattttggggacttccaggctgccgggtgatgtatcttgtattttgtacatacaacatgttactcagactgccttttatttttattttgcccactttcaatcagctgtgacttttgccggcactcgtgttgatgtatagagagctactgtaccatctcataagctatacaaaccttgtacctttcagtagctgccagaaacatttttaccccctcggttcaaaaaaaaaannnnnnnnnnnnnnnnnnnnnnnnnnn

SEQ ID NO: 13919 - DNA, 280 bp, Setaria italica
  Peptide Sequence Number=SeqID_79893
tattaaacttagtcagcctttctatgaaaatatttcaaatatacgttatcgaggagaattggtagctagtcagctactgaaattccgaatccccagttcaagtatgaatctatcaccaggaacttaagatataacagaattggttaactattcgttcaaaacagaattggttaactgagttttcagacaaaacagaagggcactggatacaattttctgctgttttttgacgtaaacttgaattggttcacttctgtgatttgacaaggatcacattggg

SEQ ID NO: 13920 - DNA, 249 bp, Setaria italica
  Peptide Sequence Number=SeqID_79894
taagaaactgaaattctctcctcttgcagccagaactgttggtcgattattgaagaaagatttcacacgggagcactggatgagagttcttgaaagaaaagagtggggatatcaaaaaggcgatgaggatatcatgccggcactgaggataagctatcactatcttccttttcatcgtaaaaatgttttcaattatgtgctcttttccttgaggattatgagtttgatggtctagattgattaatatgg

SEQ ID NO: 13921 - DNA, 1027 bp, Setaria italica
  Peptide Sequence Number=SeqID_79895
gtctttcggggtagacgactagcaacttcaggtctgcctgctgcggcagcggaagcggatgcgatcgagctctcgcccccaaatccgatccaggggaagagccgcgagtacgggttcaagttttactaattcacttggtggccacaaacaagatgtcattgcatatcgggcggctttcccaagatgtgcggcacagttatctggaacaacttttccagaggtttggccgttgcactgtcaacctgaaagatggatacgggtttgcagtgtatgattctgatggtgacgcaactcgagccctgcgggccctgcatgggaaatatgtttgtggggaacgcatcactgttaattggtcaaaacagcagcccagatgttctcagggtttcaggaggagttcaagatttgttgaatcgtttcgtggaaggaacgtcagagatgctcgagacagtattaggttcagggattctgtagctcgtaagagtcatccagcaaatcatgatcagggccatgatcctgatgctgtgccagaaaaggattctcataaattcactgaggttgtcgatgatgctggagaaaacatttgtgatgatctagcggacgcaaagagggatgaaggtggtacaattgatgaagatccaggggaggtgaagacagacaaaggtggtacaattgatgtagatccagaggaggtgaaggcgtacaaaggtggtacaattgatgaagatccaggggaggtgaaagcgggtgaaggtggaacaattaatgcaaatgcaattgaacatgatagatgggctgagactggaaaaggtacccctggtggagacagtgatgattttgaccgctatgagccttatcatggatatgataggcaagaagaaacagaaaatgtgactaaagcaagctcttatgattctcgtgaacccagacgttcttcagagaagtggtgggagcactcagataagcatgttgatgtaagccatgataaatcaagatctcctccaacctgttacaaatgtggtgttgccga

SEQ ID NO: 13922 - DNA, 529 bp, Setaria italica
  Peptide Sequence Number=SeqID_79896
ggcggcggcggtacgcctcggtggacggatcatcggcgacggcggccggagcaggatggtggtgggaagacgccgacttggaggacgcgtgctcgtcgtggcgcctgtcacgatcacggtcgcggtcgcggtccctgtggtcgcgccggggcggggtgcgggagcgggatctggacctgtcgcggcggtcgcggctccggggaggcgggggaggcagcgggggcggaggcggcgggagctggtcctcgggggggatgggcttctcgtactgcgtgacgttggtctccgggttccagtagtagaggtagccggtggtgccgtcgacgaggccgcgccacggcttgggcagcgacgggtcgtccggcgcgtaccgcggggccgcgcgccctgatgagcccgacatcggatctggccggatctgtggcctccggcgacgcctgggggcggaggccgcggaggacagccgggatgaggggtgtggctgcggcggcggcggcggcgaggggcagggcgaagcgagggtttcagc

SEQ ID NO: 13923 - DNA, 665 bp, Setaria italica
  Peptide Sequence Number=SeqID_79897
cgtcatccaaaccaaaacccaaagcaagggaagaagccgagcctctcatcacccatcagtcgccgccgccggggaatcgggggatgagcggcgggggcggcggcgcggcggactcccgcgtggagaccatctcccggctggcgcagtggcggatcgagagcctgggcccctgctcgtaccggcggtcggagcccttcaggctgggcatctggaactggtacctgtcggtggagaagagccggtcggtgtgcatccgcctcttcccggagcccggccgggtggccaaggaccagccccctctcgcccgattcatcctccgcgtctcctgcccaggcccgccgcgacgatcctgcgcatcccctgtgcaagagcagcttctccggaccagcgatgactttgtgtggcaagttgacgtcatgtcccatgggcgtttcacaatcgatgttgagtttctggacctgagggtagccacaaacaatgctactgaatcatcctcgtcaatctggccgaatgaaggcatggtgcagaggatcgctagcaagagcactctgggctgcctctcccgcctgctgacggagtcgatccacaccgatgtgaccatcaacacgaccgacggcgtcctcaaagcccacaaggctatccttgcagcctgctctcccgtgttc

SEQ ID NO: 13924 - DNA, 1279 bp, Setaria italica
  Peptide Sequence Number=SeqID_79898
gttttgtaattagattatatttaatacttttaattagtatataaacatctaatgtgacatgtcctaaactacgccggatccaaacatgtcccggatccaaacatgtcctaagggcgtgatgggttttcaccatgccatgcctgctattagtttctctctcttttttattgcctagtctccgtgctgctttaatggcctcttcttcttacccttttcctgtgcgtggcagtgcaagagcagcttctccggaccagcgatgactttgtgtggcaagttgacgtcatgtcccatgggcgtttcacaatcgatgttgagtttctggacctgagggtagccacaaacaatgctactgaatcatcctcgtcaatctggccgaatgaaggcatggtgcagaggatcgctagcaagagcactctgggctgcctctcccgcctgctgacggagtcgatccacaccgatgtgaccatcaacacgaccgacggcgtcctcaaagcccacaaggctatccttgcagcctgctctcccgtgttcgagagcatgttcgtgcacgacctcaaggagaaggagtcgtccacgatcgacatcagcgacatgtgcctggagtcctgctcggcgctgctgggtttcatctacggggcgatcgagccggagcagttctggaagcaccggctgccgctgctggcggcggcgaacaagtacggcatcggcgacatcaagggctgctgcgaggagagcctgctggaggacatcaactcgagcaacgtcctggagaggctccacgtggcgtggctgtaccagctggagaggctgaagaaagggtgcctgagctacctgtttgtgttcgggaagatctacgacgtgagggatgagatccatagcttcttccaccacgcggaccgggagctgatgctggagatgttccaggaggtgctcagcgtgtggaagcccatatgaatatgttatgcagcatgatgtgtgagcaagtatataagtcagagatgtataagaagaatccacgcggttacacatgtttgtgtggaagaagcaatcaatccaactttggcgtgctgtgctgtgaattggtcttgttctagatacggatcaatccaacaatcaaaccaggcttactagttcgacacgcacgctggtgtttggaaccaatcgcgtgtcggagaaaacgacatagaatagaaacgacatagatcgtgtgacattttcatcgcaggtaggctgatgtgctacctgtactactgtacacgtgtcgtcgtcctcctcttca

SEQ ID NO: 13925 - DNA, 464 bp, Setaria italica
  Peptide Sequence Number=SeqID_79899
agacggagtactacaaggatctcggcggcgtcggcaagcagcaccacacggttactactgctggctcactcctgcttccttcccttttcttccgtgacctgcttatgagctgcagacttaacaacttttttgtccttcgactctgcccaatatcgccgggcaagcagaccggaacaggcttcatcgggatggacagagacaagggcgcctctttcaaactgtccgaagaccccgatgcagcggagcgccatgcttcttgcaaggggaaccctgccaccaacgaatggatcccgtcggctgacacggtgtatccggcgtcagacaagccgagcagaagcgacagctgagcaatgcaatatcctcggcccgcggagaattcagacaagtgatgcagaatagcaaagatacagacatcactaatcctgtaataacacagtgtggcttcttattttcctggtggcatc

SEQ ID NO: 13926 - DNA, 313 bp, Setaria italica
  Peptide Sequence Number=SeqID_79900
ggtcggggaggagttcgtggagacggagtactacaaggatctcggcggcgtcggcaagcagcaccacacgaccggaacaggcttcatcgggatggacagagacaagggcgcctctttcaaactgtccgaagaccccgatgcagcggagcgccatgcttcttgcaaggggaaccctgccaccaacgaatggatcccgtcggctgacacggtaagatcgggcagacgggcacgaatgattccagcttatcctatgctgctttggcgtgtcgacacttgtcaccaacgagccatatggtgtctgttcacgaacgcg

SEQ ID NO: 13927 - DNA, 914 bp, Setaria italica
  misc_feature (911)..(914): n is a, c, g, or t
  Peptide Sequence Number=SeqID_79901
aaccccgaataaaaaagaaaaaacaaaaaagaaaaacggaaaaagaaacgaaaccaaataagacttacttagacgcgcgcgccagccattatagcacggcgcgcgccttcgacctgatcccaactgcccaaagacaaagagcaaagcctagcgagtagcgacgcgacagcgaggaggaaggaaggatgtcgaggccgaaccggagcgacgcgcacctgtcgccggaggacgaggcggcgcgggaggccgaggtgcgggggtacttcgacgacgcggcgcccaagcgccacaccaagccctcccgcagcgagcactccccggtgtacgccgacgcgatcgtcccggacagctcccacccggagctcgacaagttccaagacctcgaagcccacaccgagaggttggtgtacgagggcggcaaggtcggggaggagttcgtggagacggagtactacaaggatctcggcggcgtcggcaagcagcaccacacgaccggaacaggcttcatcgggatggacagagacaagggcgcctctttcaaactgtccgaagaccccgatgcagcggagcgccatgcttcttgcaaggggaaccctgccaccaacgaatggatcccgtcggctgacacggtgtatccggcgtcagacaagccgagcagaagcgacagctgagcaatgcaatatcctcggcccgcggagaattcagacaagtgatgccaccaggaaaataagaagccacactgtgttattacaggattagtgatgtctgtatctttgctattctgcatcaaaatgcctgtaatcttgaatttcaaataagctcgcgattcgcattggatttctgtgttccgcctctgattggcaggaaataaagttttaatcatggttcagtagtacaaaaaaaaaaaaaannnn

SEQ ID NO: 13928 - DNA, 341 bp, Setaria italica
  Peptide Sequence Number=SeqID_79902
ggggagtggcgccgtgcgggcacgcggacggcggtggaggcgatgaagctctcgagattattcgccgccgtcgccgtctccggcgccggcgaagggggaggatctcgccggagctccggcgtcggcttcgccggctcctcgactgccgccgcagtcagcggcgggtgctgtttctgctgcttgtcgaggaggtggcggcgggctggggggcagtagaagcggtcggcggcgcgggaagcgacgccggggacggacatggcggtggcgcggctcggtgccgccggccgcaaaaggagccggtgtggagcggcctcgggattagggtttctcggtgcggggcc

SEQ ID NO: 13929 - DNA, 276 bp, Setaria italica
  Peptide Sequence Number=SeqID_79903
ttttttttttagtaaccaaaaaccaacgaatgttgcggtgttttattcatggaaatggtagcatatatatggtatcggcgccacaaagccagcagaagcagcaaaacgacatgtcatcatcatattcaatggacaccaaccatccctctcaacatctctctctccctctttctccccatcatcagttaacctctccctccctctctctctctctctactaaacatagatagatagaacaaagactactaagtacggaaactacaaaatagctacta

SEQ ID NO: 13930 - DNA, 1252 bp, Setaria italica
  misc_feature (42)..(42): n is a, c, g, or t
  Peptide Sequence Number=SeqID_79904
ggatatgcctcaacagatgggagaagctgtaagccctttaancccccttcttggggagacatatgaagcagactatccagataaaggcctccgttttttctctgaaaaggttagccatcaccctctggttgttgcatgccattgtgagggaactggctggaggttttgggctgatagcaacctaaagagtaaattctggggccgttccattcaacttgatccggttggtgcattgacactggagtttgatgatggtgaagttttccaatggagcaaggtgacgacttcaatttacaatctcatattgggcaagctatattgtgatcactatggcactatgcgcatacaaggtaatcgtgagtattcatgtaagctgaagttcaaggagcagtcaataattgatcgcaatcctcaccaggtgcaaggtgttgttcaagatagaagtggtcgaacagttgctacactatttggaaagtgggatgaaagtatgcactatgtaatgggtgattgctttgggaaaggcaagggatctgaacaattctcggaggcccatttgctgtggaaaagaagcaaaccacctaagtttcccactagatacaatctcactcgctttgcaattacattgaatgaacttacccctggactgaagggaaaaactgccaccaacagactcaagattacgaccagatcagagatgtctggagaatggtgaatatgaaagggcaaatgctgagaagttgaggcttgaacagagacagcggcaggcaagaaagatgcaggagagcgggtggaagcctcggtggtttgcaaaggacaaagctactgacacataccgttaccttggtggttactgggaatccagagaaaagagcagctgggaaggctgccccgacatctttggacaagtcccaaacgatccgatgataactgactaggtttgagtaggttacaggtcttttggttctctgcctttgttgggatcacttgattccagaaattttagcggttcatattagagcaattaaatgcccgttgacgtgtaagcaatggcagtgcctcagataatattggtctcgtacataataagaagagaatggttcgtcccacatgtcaccttaaacttccaggaaagtaattgttttcttgcgagggtttcgtcctcgcaagttaaagaatggtgtcatgtgaccggctgtgtatttcacatgttggatacgtaagtatgcaataacaaaattagtactaaaaaaaa

SEQ ID NO: 13931 - DNA, 1259 bp, Setaria italica
  Peptide Sequence Number=SeqID_79905
cttgctgactgctcagttcacaggttcaatcaccgactcgctcaaggcggcacgtacgttcctcttgagtctgtagaatatgtggcagaggagcggtgattttaaccatctcatttgtcgttggatggcaaagaacaagccaatgtgcatgtaggtgatacccacagtctccaggaacaggttgcaaaggtctctcgtaacctccatcataagcaaaagaactatctgtgccagcagattctggctcaacaaatttggggtgcccaccaataccatagagaggatcatctacaagagggtgcccaatgtatgcaaggtgtatccgtatttggtggggtcgccctgaatgaatttcaacctggaccaatgtatgattttggtgtgcaagtctctcaagaacacatactttgctcattgctggctttcctgaggaacatgctgcataaagtccctctgcaactccaggataatgaactaaccctatgggctgcgtaaccacaacctcatcattatcaagtatgccgctcactaaggctcgataaaattttgaaatttttcgctcctcttggaattctgatttatcccttttatttccagcatttatagcgccttcagcaaaatacgatgcaagtcgaactttggcaacctttgtcttggcacagagcaggaggcctgatgttccccttcctaatcgatgaacaggcactggatgtgactgcgcatcttttctcttggagcagcaagatgtcatcttccagtctttcatctgaacctgtgctaaaacagtgcgctgctggaagagtcctttaggcagaacttgcaagccagaaggcttattaagggcaaccatgtcatcatcctcgtaaagcacttccagcaaatatggcgcaaatggctccggccaagggagacgatgatataccaacttagaaccatccctcagagtcatatctggatcggtgataacttgaccatcaacggttatctgcccgttacgaatcctcttgatccaccctagcaatggcgcggagctcttgtaattactggagtagaactcaatcaaggtggtggcggcgtccgcatcagcgcaacggaactcgtcgctgtaggagaggccttcgttgagctccggccacggagtaccgaaggagtagagcgcccctggcggcggagccccatcgtccgccggtgtttctcccgcggcggcggccatcgcgcgttggggaagaggtttaagagtacatttgcatagatttagt

SEQ ID NO: 13932 - DNA, 564 bp, Setaria italica
  Peptide Sequence Number=SeqID_79906
actgaatttagagcaggttacaaaaaaaatttggagtcaatttttccttttccatgatagcttacatacttcagattgcataccctcggactacagaggaacagcagacaacctgattagcctactgttaatgcatcaggtcaagtcttcttggattgctgtctctttccaggcgttagattgttttccgtggccaaagcactagcattattttttggtgagacatcacctgctaaagatggagagctgttcttggcagaggaatctgctgctgaagttggagaatttcccttctcatggctgttcttgtcccgggaaaaaaactctggttttgcaaatgatcttgtacatggccacctgcttgactgaattgtttcaccttcaacaatggtttctgcttcaaagatgttccctattaacaggataaagaacataacatttatgcaaggcctaagaaagagaactaggactggttcaaacttataatcaatcaaattgaaatttgcattaagccacagggaacggtctgactagaaacacatgggaaacaaggagaataactat

SEQ ID NO: 13933 - DNA, 627 bp, Setaria italica
  Peptide Sequence Number=SeqID_79907
taaccaatagtttagacaacttagactaactagactaactagaggccatcacgcaaccaagcgagaaacagagctcgacgacctagaggcgtcggacaccacaacagatggttataagttcttagcctcatcggtcatcgccacgaacaacacaaaggacaacgggtcttgagaacgaagcaacacagctgcccggccacgaagcgccgccgatgaagccatcgcatccttaatgccggtacccgaccatcaccggcacaaaaaattcctagaggaacaacggcggcatcggtcgccactagatcgcgcactcctcggcacgggcgccgacggcgccgcggcactcgagggcggcgacgtgctcctcatgcatcgccgcgaggtccgggtgcccgtacctcgccgcggcgacggcgtagcacccgagcacgtagacgaaggcgaggaacacgaggccgaacagctgcaggttggccagctgctcggcgcgctcctcggcggcgcggctgcggcagtccacgccgccgccgtccgggccgcacccggccgggagcatgggcccgtacagcgtcagcgccgtctggtagaaccacagcccctgcagcgcgatgagcacgccggcggcga

SEQ ID NO: 13934 - DNA, 490 bp, Setaria italica
  Peptide Sequence Number=SeqID_79908
aacttcatctgagacacccaatttcctctccttatggaatagcaatgtaccgattttgccttctctaatttgctcccaaattaccagcaacttgcagcaagctaaccagagtcacacggcttacttccaagtttctccacagcatgtcactggcaatttcaaatgcattccatgaagtagaatccatattttcagaataaccagtgatcatcgaggtgtaagaaacagtatccttgtccagaatctcttcaaatgccttctccgaatcatccatcctggcaagcttagagtataacctgacaagagaagaaccaacaaaattatccctactgaggccaagcttcagtgagtcggcatgcattcctttgcccagtaacaaatttcggagctcagtgcagctcttcaagccagaagtaacagttttctcatccaagccaatctggcgcaacttcaatcccctgtacaaaagaatagcctcctctggataacc

SEQ ID NO: 13935 - DNA, 2013 bp, Setaria italica
  Peptide Sequence Number=SeqID_79909
cgcttcttctcctgggggctgctggtgcagttgttcactatatgggctatacacctggccttttcattgttgggctgtttgggatattgattatgtggatgtatggctacttttggattacaggaatgcttctagttgctggaggttgtatgtgctctctgaaacatgctcgatatgtgataccaattttgaccacatatgctatttattgtgtggctattcgtgttgggtggcttggagtcttcttgacactcaacctttcgttcttggcaaatgatcttcttaataagttactgcaaggatacgaggaaagcactgaagaaaaatttgaagatatgaaggattctgatccagttatggatgagttctatcgtagctgtgaattccctcctgctcctgacagtgaacctgagaccgtgtcttctgcaaagccttattgctcatcacccacccaagatgtcttacatgtacaaaaagaggaacctcctagtaaagtagttaaatctgattctagttcattggatgagattaagaggataatggatggttcaaaccactatgaagttctgggcatacctcggaatagaagcattgatcaaaagtccctgaaaaaagaataccacagaatggtcctgcttgtacatcctgataaaaatatggggaatccattggcttgtgaatcattcaaaaagcttcaatcagcttacgaggtcctctctgatttcacaaagagaaacagctacgatgaacagctgaggaaagaagaatcacagaaaatgaccccaagatcacgtgttgtctctcaacagggtggggtagagtttctttccgaagagtccaggcgtatacaatgcactaagtgtggtaatttccatatatggatatgcaccaagagaagcaaaacaaaagcaagattctgtcagggttgtgatcagtatcatcaagccaaggatggagatggatgggttgaaaccagattttcaacctcctacaagatggaaataccccgagcttttgtttgtgctgagagcaaaatatttgatgtgtctgagtgggctacctgccagggaatggagtgtaagcctaacactcatggtccaacttttatggtgaacatggttggagcagataggatgcctcagagatcctacagttcccggtatcccttcagcttggatgcggagatgatccctgaggatgaatttgagctctggcttcagcaggcattggcatcaggcgtctttgctgacagcccaaagcgcaggaaaagctggagcccattcaaactgccccaaaaggggattaaaagttggcggagatcatcatgagggtatgacagtatgcagcaggggtctcgggtgaccacgctttggaaagaaggcgataacgcaaggcctcgtgaatgtaaatagactgaccaacaatttgcctgggcgggcaactaatttttgttcgaaaggagaaacaggacgtaaaaggaacactcgaacgaataggtgtaacaagtctcactgttgaacttggttccctctgctaacatcccacgagtttagctgcaaaacagtatgctattcatcctatgatcaaacactggtggctctgtgatgtattaacttcagtagtttagggatcgacatttggaagaccgccgaaacatcatgcctggactggaagaaggttgagatatgaagggatgttcatgttagtcaaagtagtaatttctggtattatcttctggagaagcgaaggagatgatagtagtgactggctgtaaatacactaaaagctcccacctggaatttactgcttgtaacattgtatactgattaaacctaatcctctgaaagacttgcacaatcaaggtctctgctgtaacactctgacggcatgctctgtatcgttctaaggtgataatataggtctaattctggactataaccattgcccatttcttattcctactgataatctgctctggtggtaaaagaagtcttgttcccagtgctgttaaaa

SEQ ID NO: 13936 - DNA, 263 bp, Setaria italica
  Peptide Sequence Number=SeqID_79910
attcccacataaattttgacagggaaacggcctccatttggaacaaggcatctgcaagaaacagaaatgaagtgtgtgttttctgtattctggtttgcaagcagtcatctgtgtgcaccacacaacagaggaaaagggggggcagtaataaatcaaccaaaagactacagtattaacaaaaacttacagcgcgttcttggccaagatgttgcccaaagcatggcactacaaccacctctttgcatggttggcacagtgttccg

SEQ ID NO: 13937 - DNA, 371 bp, Setaria italica
  Peptide Sequence Number=SeqID_79911
aatcttgcaccttcaccttcttcttgcagtcttcaccacaggcaagtaagccagctccaaactgacttttgggcacttcttttggatcacgaccagaattgcggtattccttaaggacatcttggcatatccactcttgcttcagcgtgttgcatgcacaacggacattgaccttgatagatagaatgagataccatagagtgagtatgataagtatgattaaacaaatataatttaaccgcaggttcaaactgtaaacaaactttgtgctaaatagaacttctcactggactacagttccagcagataagcattgtagcatcacagattaagcactttgtaccaattgacattacttgcttagtcgttcc

SEQ ID NO: 13938 - DNA, 1506 bp, Setaria italica
  misc_feature (1)..(47): n is a, c, g, or t
  Peptide Sequence Number=SeqID_79912
nnnnnnnnnnnnnnnnnnnnnnnnnnnnnnnnnnnnnnnnnnnnnnnggatcatagaagtgataaagtatatattgattgaatcatttgttcatttacaactaatacatgctcgcaaaaaaaaataacaatacacgatgtaaacagttgccaatcaatttataatgacacaagtgagaaacaaatcggtgacatctttcactaccctccaagttcaatccatcagaactgaactgccatttattgatccacatctcgataatgattacttggtgaaaaataactatgatcttttttctacaacattgcacccctcggatgccttcgactggtcctctgctcttccatttcattcatccagtcagaaagccggaatatacccttccacaataggtacaatccagcagcgataatcatcgatagaaaaataatcagcagcactctcagcacgtaggtcttgacttcctggaattttgatacttcaacctcttgtccacgatcacgccgcttcctgcgtttgggcacatttgcaacttccatagcgggaatcttgttctcctgggttttccggagatgcaactcggaatcttgcaccttcaccttcttcttgcagtcttcaccacaggcaagtaagccagctccaaactgacttttgggcacttcttttggatcacgaccagaattgcggtattccttaaggacatcttggcatatccactcttgcttcagcgtgttgcatgcacaacggacattgacctttttcatgcactgatcaaccgatgggcatgtaccagggtgacatacttctgagcacagatgggaacaatttggtagtttcctatgacatgggccgccacacgacctcactttaacctgttctttagcttttaagttgttaaaatacacacactcgaaagcatgtaccatagcaccacaatggcatggttttttaacaaggactttgcaaggtggacaatcgctcggatggcatcgcaaagggcaacgatgtgaacaagaaggctccctaaccctttgacaaggaaggttgcattgttcacaaggctcagcaagtgtgctctctttactgacagatggtagaggatctccttcaggttgattcaatgggacctctaacacatggcaagatttcgtacaataatggttgccacaaagaagaggattcccacataaattttgacagggaaacggcctccatttggaacaaggcatagcgcgttcttggccaagatgttgcccaaagcatggcactacaaccacctctttgcatggtgggcacagtgttccaggtgtacattctatgtgcttttccattttcttttttgttggttttagtgtgaactcggggtttggaggagaaatagggccatgacacctttctttacatatgtggccacaggaaagttcttcaccacaggtcagcttgcaaggtgggcaggctccatagtggcatttgtggggccgacattcaagcttgtgcctgcaaagg

SEQ ID NO: 13939 - DNA, 374 bp, Setaria italica
  Peptide Sequence Number=SeqID_79913
aactggggcggacgaggaagacgaagccgaggaggaagccggagacgaggccgccgatgtgggcgaagttgtcgacgtggggaggatgccgagggcgaggttgacggcgatcaccagcaccagcgacgccagggcggccgccttgttggcgtagagcgaccagttggtgatcagctccgacagcatcgacccgatcaggccgaacagagcacccgacgcgcccacggagacgacgctcgaccggatgaacagggcggacatcaggctcccgccgaacccggagatcaggtacaccagcccgatccgcgcgaacccgaattcttgctccagccgtatgccgatgaacacgaggcagagcatgttgatgagcagat

SEQ ID NO: 13940 - DNA, 245 bp, Setaria italica
  Peptide Sequence Number=SeqID_79914
ttgtggcctgagcttaccccccagttgaaactagtgatccagagcagcaatcttattagtccaggccagcatcctgagtggaataccattaatgctctcaaagtacttcaatctgttgttaggcccttccagtatttcttgaatccaaaagttgcaaaagagcctgttccacaacagttagagcaaattgcagctgagattcttgtaccattgcaagtgacattccatcactttgctgacaaggg

SEQ ID NO: 13941 - DNA, 574 bp, Setaria italica
  Peptide Sequence Number=SeqID_79915
ggagcggaccaacgcggcggcgggcgtgtacgcgcgggcgtgcgtggaggtggcgcggcagtgcgggatcagggccatcgacatctggtcaaggatgcagaagttcaccggctgggagaagtgcttcctcagggacgggctgcacctgacgccgcgcgggaaccgggtgctgttcgaggaggtggtgttcgcgctcaaggacgccaacctcagcctggaggcgctgccggccgacctgccgctcttcggcgacatggaccccgacgacccggccaagtccttcgaggacgatgacgagtgggctgagtactgaggatggagaagatgacagcttcagttccgtgtcgactctgacaatccgcgtccctacgatatgttcaggataaaattccttcccgaatgaaggtgtaggatcgtggcgtgttcgcttgctcaaagctcaagggcagcgatgtctagaatcgcaattcattcgcaccaactctattttgttgtaacaagtttatttccggttcattcttttaacctaaaaaatgtcaaataaatgcccacgggtttgtttctcttctaaaaa

SEQ ID NO: 13942 - DNA, 666 bp, Setaria italica
  Peptide Sequence Number=SeqID_79916
ttctacaatcatgttgcctccgggcgtttgcatctctttcattcgtatttgtcagcatgtctcagcaaatagaaactgaaacggttactggactaaaacaatgtgatacagaaatgtgttgagcgtacaggaattatgatcagacaaatccattctagcaccaccagctcagatcaaaattacatcagagagcaagacctatcatgcacctcgaaaaattcagcagaagctaggataactcattactgttttgcagttacacagagtctcatagtaacctcttgctgcatcctcaatctttgatgagattcatgatgctgttgcttattgaatcttccgggaaagattcgtcactcccgctccgacacattttagaataacggtctccgaattgggatcaggactgataacaaacttgacaccaagaaaatctctgatgtttcgaagcgtttcaataccatatggtgtcaactgtccaacacgaacctttgatacatcaggtgggcacaaagcacacagtataaataggaggccctgatgtgtagagtcaacaacccctccttgagccacctcttctagtagcattgatgctgcttggacaccaagatcctccggagacattagctctggcttctcagattcttcatttctattttcgttctaact

SEQ ID NO: 13943 - DNA, 931 bp, Setaria italica
  Peptide Sequence Number=SeqID_79917
ttttttagtagttcaaatatatctttcatataatgcaacaatatggaaaaggagcatcgatcatgtaactaatccctccattaaaattctggctacaatattactccaggtttgatgaagattggatagcggataagacagcggtatattacgactactactccacactaccagtttcaactaaggattccacagacttaatcatcactcatgtgtgtgcttgcctcaatttgcttggcagtcaacaggcctcggacttcagtgtcttggtcagccatatcagcgggtgtctgcccatacgtgttctccttcttgggggatgccccggcctcgagcaaaagcttgacaacatccaaatgttcccctctagcagcatggtggagcggtgtatcgccttcagaatccacagtgttgagcattcgcactacgcaaccatccttgttagcagcaaagttcagaatatattggaccatctcagtgaagcctccagcacaagcatcgtgaagagggattgcaccttcttcatctttgcattccaagctagctccacgttccaacagtagctgcacacaagggagatgaccgtataagcatgctaggtgaagcaaagtatcaccatcttcaactggaacatcaatactgccatcatgattatcgagggcggcaaggagcgcggcgacgtcaccggtctgggcggcgttggcgagggcgcggaggtggggaggcacctcctcgtcatcggagacgccaccgaaggcctcggcgtgctcagcgatgtcgtcgtcgtcatccctgaggccgttgcggccgccgggaactgccatctgcggcgaggactgcttgggattgggccggcgagcgtccgactccgagatggtgagcaaaagagaaaccctcttggcggcggctttgggtcgagggctacaagctg

SEQ ID NO: 13944 - DNA, 399 bp, Setaria italica
  Peptide Sequence Number=SeqID_79918
ggcgggggcggtggcggtggagtagtcctcgtcgatctggagccgcagcgcgtgcgggggcgagcgcggagaggcggagcacgaggggccgcgggcgggacgggtgggagagctcggcggagatggagccgtcgggggagatcgcgagggagccggcggcgagggagagcggcgcgtcgagcgagtgcggggcgcgagtccgcgcgcgcttgcagaagggcgtctggttgcagttgcggaactcgtccttcttccacgcgcgcgcggcgggggaggccgcggcgacgagcaggaggaggaggagcggggcggctagccgccgcggcgggggatccatggtgcgcgcggcggggccggtggcggatgggtggatctgggactggagacagtagtagactg

SEQ ID NO: 13945 - DNA, 745 bp, Setaria italica
  misc_feature (1)..(8): n is a, c, g, or t
  Peptide Sequence Number=SeqID_79919
nnnnnnnntttttttttgtaagaaaaaagttctttttttgctgtgtgaagtatcaagtagtatatcacattatcacatcaaaaatcacttgagttttgggggaggagtcacctcacaccacacacacacatatatatgcaaccaatttttttccccaaagtaaatccagctccgagtttcagaaatcacgcacgcatacgtttcggtctttcttggcgaagaggccgcccaagttgaacccgccaccgctgccgccgtcgccgctgctgctggcaggtttcttgccgccggacgtggtgacgtttcagtctttcttggcgaagaggccgcccaagttgaacccgccaccgctgccgccgtcgtcgctgctgctggcaggtttcttgccgccggacgtggtgccgccccgcggcttggcgcgcgaggcggcggccggcgcgccgtcgaccttgttgaggagcgggtccgtctcgacgagctggtccttcttgaagatggagctgaagatgaagtcgaccaggctcttctcctccttggccggcgccgggctgcccctggtggcggccggcacggccagcacagaccgccgcggccgcctcctgcccgcggccgccgaagacgatgccggcgccacggccgccacggtgctgccaaagcccaccgacgccattgtagctagcttcttgcagcaacgaattgggaaagaaatcggaaatgtatgatgcgccgcagctctgcggcttct

SEQ ID NO: 13946 - DNA, 1688 bp, Setaria italica
  Peptide Sequence Number=SeqID_79920
tttttttttgtggattcaaatgtttgatcaggaaaacatgaataacatgcacatttgttaattttaactggtcagtcaagggctcaaggccgttgggtgagtattgaactgggggatcagagatgacaagtattcttcaatataaactaaactcacatgccaattaatactcactatattgtgtacaagaaaaaaggggaaaaattaacccataaaaaataaatgtgttgtttctgcatcctatgctggtgtcctaacgatccatcctaggcactccttccgaagaggcgagtcagcaaatattgctttgatgaaattttgcacctcagatgatgtgaaaccacagctaactaggtcaccactttcccaagcagctgtgatggacttcaatgacatatcaagcaactctgctagcttacggaactttttcaatgatggtacaattccatccaattgaatccaagtgtcatggtctaagaactttgtgctgccatcaccgttctcaaccagagaaagaaatagtgatgagaggttttcgagagccaaatggataaggccttgcagctgcagtgtctcttctgctgccatgtcatctatcagaagcatatctcttgtaattctagagaacacagacccaaggacatgacacatacttttcctgtaagttgattttggcagtattgattcccacatgatgcgtatcttttccaaaatgaacacggcctgctcaatactaaattttgctgactcataatgttgaggttggtgagtattctgaaaaccatcagcaccatctatagcctcgcttatggtatcaatagcaagttgtatttgtcgtctcaatacaacatctgccatatgggagaagattggcgctaaatccacaaaaacaacttgtttctgtagatcaataggaaaatctgcacggtactgaaatgcgaggccgagaatttcttgggacaaatggtagaagtcattgtgaacaatagcagccacttggcttatgctatgaagttgcttctctagctgaactggcacaatagccttatacaggagcaagacatccctagcagcaaagcaaaactccttagcaactcttgcagatgacaacgatgcatcctgctcttgagggctccgtgaaccagttccattaatagaagtgctgatttagacgtaaaacacttctctggcaggaaaagtagatcaacaacagaatcacctcgatcaccagattccagagggttatcataatcatactgtacaagaatgttccttgctttcaccaagatctcacttcttttccgtacagcaaaatgaacttcgacatcatcaacaaattgggtcaacttgccgtcctttctatcaggcaaaagaaacatcatgctcctaagtttgttctcgaattcagctgtacttcgcacaacatcctggaactcaattagcttggatgcctcattgggtacagccttggagagaaagtgtgtgataaccaggtcagaaattcttggccaggttaactttgcaaaagactgaacccacttgctattttccatgcaaatgaacttgcaaatgaacttgatggcatcaattattcttgaatatagattcgaaccatctttgttgtcttttagctcctgtgaagggactatgcttaagactgatacagagtgttttggaccaccttccta

SEQ ID NO: 13947 - DNA, 414 bp, Setaria italica
  Peptide Sequence Number=SeqID_79921
tcctgtgcctgtggttctgtccaacaagttcaattccacctcgttcgttggaaaccttcagctctgtgggttcaacggctccgccatttgcacttccgcttcatctccggtggtgtcgccgtctcctccgctgcctttgtcgcagcggcggacacggaagctcaacaaaaaggagctcatctttgcagtgggaggcatcctcttgctcttcttgctcctgttctgctgcgtcctcctcttctggaggaaggacaagaaggaaagctcgtctcccaagaagagcgccaaggacacgaccaccaccaagaccgtcggcaagcccggttctggcgcaggctcgggcactgacggcggtggtgacagcggcggcaagctggttcattttgacggtccgctctcgttcacagcggacga

SEQ ID NO: 13948 - DNA, 262 bp, Setaria italica
  Peptide Sequence Number=SeqID_79922
cggggtgtgcctctctaatctctaccccaacattgtcctgatgccgctgccatgtagttcaagcaggctgctccctcggcttcgccggcagcgagtgcggcggcgacagctgcgacggtgacgggctgacggcggaggcagctggtgttcggccatgtagggcaactatacatctttggcagatcttcctcctccgtgagaagatggtaattgagcgcgtgtattaccgcccctagctcatgagtcactgtagaaatgctaa

SEQ ID NO: 13949 - DNA, 1026 bp, Setaria italica
  Peptide Sequence Number=SeqID_79923
gctcgatcggcacccgcgtcgcttttccttccgcggccagctgcggcagcgtgttggcctccttgggcgcgacgcctgcagccgtccacagggtggcgtgcggccactcgttcctggactcgatctgctcgccgttcacggccccgagctgcgcctccagggcggccatcttgtcggtgtagtacaaggcgttaaacgacacggggacctcctggtgctggtagactccgtagctcgcgactgcagccacaccatggcctcgtttgtgggcgagggtgacgtgggccttggttaggctgtcctccagttttatctcgttgaggaaagtgtttacggcagtgtccttctctgacaccttacggagaaggcccactatatcagctggggttaatctaacagcagcaaagatgatatttccaaacttccgcttcccagtatcaggtgttttgatatcaccttttgcaacagctttcaactgttccagtacttctttcacagcaaactcaaacggaacctgaatggcattaatataatcagcattcccaaacaaggtcacacgcaacctctgctcccactgtgtccattctttagcatatgaaccttttgatggatccactcttccatgcctgctctgatgcagtctgaacaagctaatcccctcatctaacaccgctttcacagcaccaggtaatggagctctatctggcttaaggagaggcatcttaaccagggagccaaaacgctcatacagttcattttcaaattctcttcgactcttgccatcatataggtggtaaaacattagcaaaacatagcccgcgttgggtgatgccttatccagatttcccggatgattgacccgctgatgattgacccgctggaggacacgaaacatgaaaacagcaagagcatcaagagaaaatggatttgaatctgtgccttcagagtctggaaccacaggaacagcggccgcctttgtgctcccacacatgtcctcaatctgcctccacacttcttcgtttggtg

SEQ ID NO: 13950 - DNA, 626 bp, Setaria italica
  Peptide Sequence Number=SeqID_79924
ttcttcctccgcctacaaatctaccacttggatagccccctggtggactgccggtcactaaatccgatacttatatttgttcctagagttaactatgtgatgtaagacttgctcatgatgattttaccttgtgctacttttagtcactatatgatattctaattgtttagcaatatgttttctttgttttttttgtcctcctgcatttctctgtagtgttatatgtttgattcatcacacgattgcacatttgcactgctcaacctttgagattttggtagactattggaaagcgtgctttatgattagtcgatgtcaaattcaaacaaaggttaacattggatcaatcaacactagagcttgtgttgccataatgctgtgatagtatgatgatgtttatgaagggttaactaaagctttgttggatgttggtagcttgttgggaagggcgaaggtgaacaagagcaaggaggagagaagtctcaatgacccaccccctgaaataaaatggtggttctctcagtttctcacaccatcacttcagaacatggatatgcattaactgggcttccagtagttttcgctgaaactgattgggaattgattgatcagcgccatgttaaatg

SEQ ID NO: 13951 - DNA, 738 bp, Setaria italica
  Peptide Sequence Number=SeqID_79925
ctactcttgctgtggctgccttcaagttatatgtgctgcaggcatgtcctgggcagccagcctttggggccttttctcagtcttgcagcctgagaaatttcttccgattgaaatacgaccggaggtcttctcctagggctgagtttttactaatcattgtcgcatgcatcagctgttgtaatattttaatgaaattgctgtgcagtgtctactgcagatacacagaggggatgctaacaaatcagtttgctgacaattcaatttgtaatactgcaatatttcgtaactcgttgcttttttttttttgcatgtaccaatccttgatttaccagcaaactagttgctgtcttgcactcaatttctagatttaagtgccataattttcttttgaattgtattggtattctatgaatctagtatatattattatcaaatagctgcgttcccactattttttctttccatatacctttttatttttttgcaggttgctggtacaatccgcaattgttgctttgaggctgatactcagctacagaatttgctttctttagcagaatatctttggccagctctacttttgcccgtggctggaaagaagatatatactgaagaagacagatcgaaaatgccacttgagctgtcaagtgcactctctcatgaacgagaagctgttgaggattctgaaattcgccaacataccttggaggctatctatatgattgtattgcaggatgg

SEQ ID NO: 13952 - DNA, 1232 bp, Setaria italica
  misc_feature (1199)..(1232): n is a, c, g, or t
  Peptide Sequence Number=SeqID_79926
acgaccgacgacttaggcgaccgtacgaacgccgccatggacgtcatcgccaggcgcgccggggagcagccggcgctcgcgcgaagcctcgtcatgctgctcgtcaacctcacccacgtcgcgtccggcgtcgccgcgctcctccaggttggggatgaaaaggtgcaagggttgtatgttgcaaagctggtgcgatcattctgtaggtcatccagtgattctgaagagcaagacacttttgaatatgttgcctccatgcttgtcaatatatctaaggtcgaagctggaaggagaatattgatggaacctaagagaggtcttctcaagcagattattcgacaatttgattcaacaaaccaactgagaaagaaaggggttgctggtacaatccgcaattgttgctttgaggctgatactcagctacagaatttgctttctttagcagaatatctttggccagctctacttttgcccgtggctggaaagaagatatatactgaagaagacagatcgaaaatgccacttgagctgtcaagtgcactctctcatgaacgagaagctgttgaggattctgaaattcgccaacataccttggaggctatctatatgattgtattgcaggatgatggccgacgttccttttggtcagttaatgggccgcgaattctgcaggttggttatgaggatgaagaggacccgaaagtgatggaagcatatgaactgattggttccctgcttgttgggaagggcgaaggtgaacaagagcaaggaggagagaagtctcaatgaccccaccccctgaaataaaatggtggttctctcagtttctcacaccatcacttcagaacatggatatgcattaactgggcttccagtagttttcgctgaaactgattgggaattgattgatcagcgccatgttaaatgtatggtcggatcagggcggaactgagcctgcattggaaactgctggaattcacatgttgtgcctaacgctgacatttctgcctgtatacttggagatgtgtgatatcaagtgtatcaagttcttgcaatgttcatgagttgaactacaaccaaggtgtaataggacgtttcgataaatagtgtatctcctcatggatatatatcctgtggattccaaatatcagtttttgaaatataagcgaggataaggcatgtttgttggtcaacaaaannnnnnnnnnnnnnnnnnnnnnnnnnnnnnnnnn

SEQ ID NO: 13953 - DNA, 417 bp, Setaria italica
  Peptide Sequence Number=SeqID_79927
tttttttgggcaagaggaactactatagctatttctaaattaaggactatcgctgtacaaatacatggcttttacaattaactgctgctcattttggtaagtagatgaagtgcattaccggcaaaatttggagacatcaggtcggaccttaacctttgctcgtttgctaaattttctagcatcagttacatctcatccaagtcaaactcagccaaaataacggcagtgaatcaaagatagacatgatgtctcaaaatatgttggcttcggagtagatggacatccaagtgatcttatgagctcaacaacaggcaagatcttgaactttgttggtgaattcctggcaatattgtccaccttatgctcatagatcttcccattcttatccaacttatactcagaggtgccgtcaaagcg

SEQ ID NO: 13954 - DNA, 451 bp, Setaria italica
  Peptide Sequence Number=SeqID_79928
cacctgtacccgcccagccagatcacagattcacaatttctcaaaccagtttctactgttccaatcctttgaactttgatccgatccattcattttgtcctggattactaggccaggatcatcatccaagatgccaaggaatccgattgattcctttgatggagtcggcgaggtcttggtacgaccggctggacgaaggcggtggagcagaggaggggagcagcagccaggtcaccgaataggaggaggccctgcgtgctggacatctacgtgcaccatgtgcgtggcatccacaacatctgcatctatgccaaccaggacatgtacgccaggttcgcgctcacctcgtcgcctgacgacgacgcgtccctctccacgcgcgtcacgacgaggggcagcgccagcccgcgcttcgacgagcgcctcccgccgttctgcattcgactcgggg

SEQ ID NO: 13955 - DNA, 385 bp, Setaria italica
  misc_feature (328)..(385): n is a, c, g, or t
  Peptide Sequence Number=SeqID_79929
gacgacctgaatgaggggcacctggactaactttcttctggttgattggctgctcttaggcgtggtgaatctgctgcacttcttgcattgctccttgagatacagaggcaacaacaactgactaagggatttgctcctatcccgataactatgcaggaaagaagaagggatttgctcctatcccgataactacgcaggaaagaaggataagttgagagtaaatgtatggagaaagtgtaaggatacaatcactacaagggatttgctgattagtgatgaatcaaaatacgtcataaacatgttttacaaaaaaaaaaaaaaaaaaaannnnnnnnnnnnnnnnnnnnnnnnnnnnnnnnnnnnnnnnnnnnnnnnnnnnnnnnnn

SEQ ID NO: 13956 - DNA, 388 bp, Setaria italica
  Peptide Sequence Number=SeqID_79930
ctcgtccatgctgctgcttcgctgagtctgctcctgctggaggggtctctgcaccccatgcgccgtccttagctcagctcatgtcgtcccactcaggactcagcacccatggtcagctacctgaggggaccatatgcatatagtgcgtgtacttgacgagtaggagtgcaagctggtctccttaattggattctttgaagccattgctggagcctagaagctcccatggatgcacaagatgaggagaggccactgattcatcacctgcacccacagggtgaaagttcagaatttactagcgatgggacggttgacattagcaatcagcctgctctaaagaggagcactggaaattggagagcatgcttctttattttaggtaaagcac

SEQ ID NO: 13957 - DNA, 808 bp, Setaria italica
  Peptide Sequence Number=SeqID_79931
caggcaacagaggggccatcatataggaagtggttgcttatttccatacccactcaacaccattgctgaagctttccatcaaaaaagggaaccccactgctgaggctcacaggggaccatggaagcaacagcagatgaggagaggccactgattcctcacctccagtcgcaggatgtagattcgctgtatactggggatggaacggttgatattaacaatcagcctgctctgaaacggaccacaggaaattggagagcatgtttcttgatcttaggtaccgaattcgttgagtgctttgtctttttcggagttgcgaagaacctggtcacttatctcaggggtgaactccatgagagcaatgccgatgctgcaaagaatgtctctacctggatcggcacttgcttcgtcacaccagttatcggggccttcttggccgatacatactggggtagatactggacaatagtaatctccctatcaatttacatagttggtatgctaacaatgacggcctcagcatggctaccactgctcatggacccactacacgacagtggcattcgtcatgtcgtggtgtacctgggactctacctagtcgccctcgcaggaggcggcataaaggcctgcgcctctgcccttggtgccgatcagtttgatggcgccaacccggtggagagggtcgccaaggcgtccttcttcaactggtactacttatccatcaacattggctccctgctgtccgggacagttcttgtctgggtgcaggacaatgttggatggggaattggtttctggatcccgacggtt

SEQ ID NO: 13958 - DNA, 563 bp, Setaria italica
  Peptide Sequence Number=SeqID_79932
ttgggtaggggaagtacgggttggcgatccccacggtgttcatggtgtgtgggttctccgtgttcgtcggcggcaggaagctttacaggtatcagaaagtgggagggagtcctctgacaagactcttccaggtagttgttgcagctgtgaggaactaccatttggtgttgcctgaggactgctctgctctgcatgaggtggctacctcaacagaaggaaatcgcaagattcagcatacaagtcagttcaggttctttgacaaagctgccatcgttgcaccattctccggcgacaaaggcccgatgagcccatggaagctctgcactgtttctcaggttgaggagctcaagatgctgctccggatgttccccgtgtgggcatccatggtgctctttttcgcggtcacgtcgcagatgtcgtccacgttcatcgagcaaggcgcggccatggacaaccgcgtcggcccgttcacggtgccgccggcgtccctcgccacctttgacataatcagcgtcatggtctgcatacccatctacgacggcgtgctggtgccgctggcccga

SEQ ID NO: 13959 - DNA, 2091 bp, Setaria italica
  misc_feature (1995)..(2091): n is a, c, g, or t
  Peptide Sequence Number=SeqID_79933
gatgaatcagtggcctctcctcatcttgtgggtgcaggtgatgaatcagtggcctctcctcatcttgtgcatccacagggtgaaagttcagaatttactagcgatgggacggttgacattagcaatcagcctgctctaaagaggagcactggaaattggagagcatgcttctttattttaggttctgagttcactgaaagtgtggcctgctttgcgatcgcaaagaacttggtcacatacctgacgggtgcgctccgagagagcaacgtcgatgctgcaacaactgtgtccacctggattggctcttcattcttcacaccgctcattggagctttctttgctgacacattctggggaagatactggacagtattgatcttcctctccatttacgtaaccgggatgttcatcctgacagtttcagcctttctcccactgctcatgggttcatcctacgacctcagctttcatcgtgtcaccgcgtacctggggctctaccttgttgccctaggtaacggtggcatcaagccatgtgtttcagccctcggcgctgatcagtttgatgcgacggacccagtggagcgggtgacaaagggatcattcttcaactggtactactggtctgtaaacattggctccctgctgtcagctaccgttctcgtctgggtgcaggacaacattggttggggagtcgggttggcgatccccacggtgttcatggtgtgtgggttctccgtgttcgtcggcggcaggaagctgtacaggtacaagcaactacaagggagccctctgaaaagagtctctcaggtggttgttgcagctgtaaggaactacaatttggggttgcctgaagactgttctactctgcatgaggtgccttccccaactaagccaaattgcaggattcagcatacctctcaattcagattctttgacaaggctgccatcttagtgacatcgtcccacgagaaaggccaaccagtgtccgagaacccttggaggctctgcactgtctcccaggttgaggagctgaagatgctgctccggatgttccccgtctgggcatccatggtgctgttctccacggtgatcgcgcagatgtcgtccacgttcatcgagcaaggcgcggccatggacaaccgcgtcggcccgttcacggtgccgccggcgtccctcgccacctttgacataatcagcgtcatggtctgcatacccatctacgacggcgtgctggtgccgctggcccgccgcgccaccggcaaggagcgcggcctgtcacagctccaacgcctcggcgtcgggcttgctctgtccgtggccggcatgttgtacgcggcgctggtcgaggcacggaggctggtcctcgcgcggaccggcacgccgatgagcatcatgtggcaggcgccggcgttcgccgtactcggcgcgggcgaggtgttcacggccatcggcatcctcgagttcttctacgacgagtcgccggacggcatgaagagcctgggaacagccctagcgcagctggccgtcgcggccggcaactacctcaactcagcggtgctggccgccgtctcggccatcacggcgcgcggcgggaagcccgggtggatcccggacgacctgaacgaggggcacctggactatttcttctggttgatggctgctttgggcgtggtgaacctgctgcatttcttgcattgctccatgagatacagaggcaacaccaacacagtttcatgacgtgccctgcgtcatcaatctataaaaccacggcaagaatatctgcattgtatatcttattacggactctctagtgttgacgtaattcatgcactgttataacttaggcccatgagaaatcaataagagtgtaggtatctcttttgtctactagttctcaaagagctgtttagctctttgagaacaaaattgggggggggagggggggggagattctgttggaagttgaggtggccctaccgatatatacctaggatnnnnnnnnnnnnnnnnnnnnnnnnnnnnnnnnnnnnnnnnnnnnnnnnnnnnnnnnnnnnnnnnnnnnnnnnnnnnnnnnnnnnnnnnnnnnnnnnn

SEQ ID NO: 13960 - DNA, 314 bp, Setaria italica
  Peptide Sequence Number=SeqID_79934
cgcgcagtcgaggcagcccacctcgccacggagcaggcacaggcgtttggaggttgaccggctacgcgaggaggcagaggcgacgtacgcgatggcgcggcgcgacgaggagctgaggcgcagggcgactgtcccgagccgcacgacgaggcaaggcagtgggacgcggacgtggattggtggggccacgacccgcgtcgaggcgcgaacgcccaagttcaactccgactccgacctcggctccgggcaccgactcccgaaggtcgtgaagaccatcatccgggagtccatcggcaacacgcagtggtcgatgt

SEQ ID NO: 13961 - DNA, 322 bp, Setaria italica
  misc_feature (266)..(266): n is a, c, g, or t
  misc_feature (269)..(322): n is a, c, g, or t
  Peptide Sequence Number=SeqID_79935
ataggtttccaagacgaattgagataacttgtagtttgtatccaagtttcaaagtgcttgttgcgcttgcgcacttgtgctggtcatgtgtatatttacatctttagcaattgacttctagggagatatattaagtacttcgtttatgtaccaatggctcataatgagctaggaagttcaatacatcctgagaagaaacgatatattcttcagtgagcctgagtgttcttataatttatccaaaactttagcatgctttttcctcnccnnnnnnnnnnnnnnnnnnnnnnnnnnnnnnnnnnnnnnnnnnnnnnnnnnnnnn

SEQ ID NO: 13962 - DNA, 296 bp, Setaria italica
  Peptide Sequence Number=SeqID_79936
aaccaccagaccaaccgagaccaggcaggcagagccaggcatccaccacaaccaacaacaacaggccagggaaggaaggagctgaggaggaggaagggcgacgatgagcacggcgaggttcatcaagtgcgtcacggtcggcgacggcgccgtcggcaagacctgcatgctcatctcctacaccagcaacaccttccccacggattatgtgcccacggtgttcgacaacttcagcgccaacgtcgtcgtcgacggcaacacggtgaacctcggcctctgggataccgccggacaag

SEQ ID NO: 13963 - DNA, 1664 bp, Setaria italica
  misc_feature (1624)..(1624): n is a, c, g, or t
  Peptide Sequence Number=SeqID_79937
gtcgcatttacacccacgcctcccaaggccaccggtagcagcgcgcacagccagctgcgagcggcgagttctttaaggaagcggcaggccggtgcctttgcctggcttggcttggagtggagtggagtggagtggagtggctttgccttctcggagaagacaagcgaggcgagcattcttgtctctgtccctcctgctttgctccttgtcctgtttctttctactactagcagtagccgccgcctctgcctggtgtgcgggagaagagagccaggggaaagagagaagggggagttgggagagatgagcgtgaccaagttcatcaagtgcgtcacggtgggcgacggcgcggtgggcaagacctgcatgctcatctgctacaccagcaacaagttccccacggattacattcccacggtgttcgacaactttagcgccaacgtctccgtggatggcaacacggtgaacctgggcctctgggataccgcaggacaagaggactacaacagattgaggccgctgagttaccgcggagccgatgtgttcgtgctcgccttctcgctcgtcagtcgagctagctacgagaatgttatgaagaagtggctaccagagcttcagcattatgcaccgggtgtccccattgtgttagcctatattgtgaatagattgtcgtgaagacaagcactacttacttgatcatcccggtgcagtacctgttactacggcacagggggaggaacttcgcaagcacatcggcgcaacatgttacattgagtgcagctcaaaaactcagcagaatgtcaaagctgtgtttgatgctgccatcaaggtagtaataaggcctccgacaaagcagagggaaagaaagaaaaagaaagcacggcgaggatgttcaatattttgcagccgaatcatgcacacaaggagactagggtgcttcaagtgatcgaggccttatctgacgatcacataggtttccaagacgaattgagataacttgtagtttgtatccaagtttcaaagtgcttgttgcgcttgcgcacttgtgctggtcatgtgtatatttacatctttagcaattgacttctagggagatatattaagtacttcgtttatgtaccaatggctcataatgagctaggaagttcaatacatcctgagaagaaacgatatattcttacttacaagtagaaaactgctggacattttcgtggaagtgctaatgcttcaaaatcctgaatgcttttttctgtggaagaaaaatagctatgcttcaaatcctgaatgcttgaagggggtcttatacatgaaggaatatcatgagtatgaccacaagtttccgaagcttgaaatctgaatgtgcctgttgcacatgtgtatatttgcacctttggttattaatcactagaggtagatgatcgaaactagtctgcttaagcgctgtgcactgctggtatggttagctctctgaattaggcagttcgacagaggccaaaagagacaatgagatttttgtctttcatggcggagtcacagcttttgtgaatctgatctcaatgtattatctgttagcttatcccatgattccatgtcagaaaataaaccaaaaaaaaaaaaaaaaaanaaaaaaaaaaaaaaactaaaaaaaacgtaagaacgtaacg

SEQ ID NO: 13964 - DNA, 707 bp, Setaria italica
  Peptide Sequence Number=SeqID_79938
gcttaggcctcttagctacagagggctgatgtctttctgctagcattttccctcatcagcaaagcgagctatgagaatattcacaagaagtggataccagagctaaggcattatgctccaaatgtgccgattgtgttagttggaacaaaacttgacttgcgtgaggacaagcagttcttcctggaccaccctggtttagcccctatcactactgcacagggcgaggagctgaaaaggatgataggcgcagctgcatacatcgaatgcagctccaagacgcaacagaatgtgaaggcggtgttcgactccgcgataaaggtcgtgctgtgcccgcccaagccaaagaagaagagcgcccggaagcagaggagttgctggatcctatgagtcggcagtatacaacatggagttgctcttgcatttctattgcttgcgttcgtgttgtgttgctgctagatcctgtgtgggttcaaattgataagccccagtgcttccggtgtatgtaggcttgtagccaatattactctctgtgtgttaattacaaatgaatccttgcattggttcatattggcattcagtgattaggaatctactgcttacattcgtagtatgggcacttttgtctttttttggctctttcatgtacggttgactgctgtatcggaacttatctaacgcattggttaccacttttcattcaaaaaaaa

SEQ ID NO: 13965 - DNA, 916 bp, Setaria italica
  Peptide Sequence Number=SeqID_79939
ccaaacgaccaccaagaaggcgagaacgcagtccgtccctcccttcccctcctctcccgtaccgtctcctccccccgctcctctcccggttctcccctactctgggctcggagaatcggggtgaggcgcgcgcggccatggcgtccagcgcctcccggttcatcaagtgcgtcacggtcggcgacggcgccgtgggcaagacctgcatgctcatctgctacaccagcaacaagttccccactgactacatacctactgtgttcgacaatttcagcgcaaacgttgttgtggatagcaccacggtgaatttgggcctctgggatactgcggggcaagaggactacagcaggctgaggccactgagctacaggggcgcagacgtgttcgtgctggctttctccctgatcagcagggcaagctatgagaatgttcttaagaagtggatgccagagcttcgcagatttgcgcccaatgttccagttgttcttgttgggaccaagttagatctccgtgaccacagggcctaccttgctgaccatcctggagcttcaacaatcacgacagcacagggtgaagaactgaggaagcagattggtgctgcagcttacatcgagtgcagttccaaaacgcagcagaatgtcaaggctgtctttgataccgccatcaaagtggtccttcaacccccacggagaagggaggcaatgcctgccaggaggaaaagtaggcgcggctccggatgctctataatgaacctgatgtgtggaagcacgtgtgctgcttagacgctcgaaggagatgaagccgcgatgcatatgtgtatgtggtgtgaacttgtggcaagtgaatttggtatattagtaattgggtactaaatgaatgctctttctattttacttagctcttctgtacgtctttg

SEQ ID NO: 13966 - DNA, 434 bp, Setaria italica
  Peptide Sequence Number=SeqID_79940
aaggtaaggaaaaagtaaggacgcggctccggatgctctataatgaacctgatgtgtggaagcacgtgtgctgcttagacgctcgaaggagatgaagccgcgatgcatatgtgtatgtggtgtgaacttgtggcaagtgaatttgctatagaatgggacaagctttggatgaatgctcctttcattttacttagctcttctgtacgctttgatttttaggcttagtgcgtcaggcttttcgaggactgacttaaccagactgtagtgtcatgtaagaagtttgtgttggacgaggattgctgtaatgttctgcaagagggatgtggtataagtactagtaagatacaagcaagctagagcgtttgtctgcaccatgaatgttcatggctctgttggcattgctttgctacagattcgtatgtttgtaatccgtt

SEQ ID NO: 13967 - DNA, 892 bp, Setaria italica
  Peptide Sequence Number=SeqID_79941
gaacggtcagagggaattcagagttcggacaagagacgagagggagaaagagaaagcatgtgacccctctctgtttctctctctctcctctcctcttctacaacgagccacaaccacaccagcaggacacgctcctcgcctcacctcttgtcctctgcattcctctgcttgtttctctcttccaccttgggccttggccatggcatccagcgcgtcacggttcatcaaatgcgtcacggtgggggacggcgccgtggggaagacctgcatgctcatctgctacaccagcaacaagttccccactgattacatacccactgtcttcgataatttcagcgcaaacgtggtggtcgacggcaccacggtgaatttgggcctttgggatactgcaggacaggaagattacaacagactgaggcctctgagctaccgtggtgctgatgtcttcgtgcttgccttttcactcgtcagccgagctagctatgagaatatcatgaagaagtggataccagagcttcagcattatgcacctggtgtgcccattgtgttggctggcacaaaattggattttcgtgaagacaagcactacttactggaccatcccggtgcagtacctgttactacggcacagggagaggaacttcgcaagcacatcggtgccatgtattacattgagtgcagctccaagacacagcagaatgtcaaagctgtgtttgatgctgccatcaaggtagtaatccagcctccaactaaactaagagaaaagaacaaacgaaatgtttagcccctatcactactgcacagggctttaagacccctaattacaacttaacttagtactaactaagggtacgtaaggtaagtacttagtaaaaaggtaattagtaattaa

SEQ ID NO: 13968 - DNA, 896 bp, Setaria italica
  Peptide Sequence Number=SeqID_79942
tttttttgttttttttaaacatagttttatctattctcttaaatgtaccgatgtgcgaaacatactagacctgataaaagttgcaactgtaatatcatgaagaagtggataccggagcttcagcattatgcacctggggtgcccattgtgttggcaggcacaaaattggatcttcgtgaagacaagcactacttgatggaccatcctgggttggtgcctgttaccacagcgcagggagaggagcttcgtagacaaattggtgccatgtattacattgagtgcagctccaagacacagcagaatgtcaaagctgtgtttgatgctgccatcaaggtagtaatccagcctccaactaaactaagagaaaagaagaaaaagaaatcgcgcaaaggatgttcaatgctggacattttctgtggaagaaaaatgctatgcttcaaatcctgaatgcttgaagggggtcttatacatgaaggaatatcatgagtatgaccacaagtttccgaagcttgaaatctgaatgtgcctgttgcacatgtgtatatttgcacctttggttattaatcactagaggtagatgatcgaaactagtctgcttaagcgctgtgcactgctggtatggttagctctctgaattaggcagttcgacagaggccaaagagacaatgagattttgttctttcatggcggagtcacagcttttgtgaatctgatctcaatgtattatctgttagcttatcccatgattccatgtcagaatccattgcaccaaaaaaaaaaaatttttttttcgaatggtgcaatggattctgacatggaatcatgggataagctaacagataatacattgagatcagattcacaaaagctgtgactccgccatgaaagaacaaaat

SEQ ID NO: 13969 - DNA, 271 bp, Setaria italica
  Peptide Sequence Number=SeqID_79943
gccccgacccgccgcctccgcctccctccgcccgcctagggatccgcgcccgcgtttgaggagaggagggcccagcattgccgatcgatccacacgcgcctcctccccgcgccgactagcgcgccgcgcccgcccgccccgccgccgccctgcaaccgattatggatctactaaggaatcccttcaagggagtcatcgctgatatcaaaggaagggcagcttggtacaggcatgattgggttgcaggactccgttctggatttaggattag

SEQ ID NO: 13970 - DNA, 403 bp, Setaria italica
  Peptide Sequence Number=SeqID_79944
cggcccggtcgttcgacatggacatgcggtacggaccctgcctcggcctcacccgcgcccagcgcctgcgccgcgccgccgcgctcgggctcgcccgccgccggcgctcctcgctctctgcacggacgaccagccctgcctctgggagggacgcgtctaggctccagatggggatgggccctcccctcgattcgccgccatgttcgactccagcaacagcttgtgttattgtgttattaagcagcaaccgcgctcgtccgttctctgcttccgcacctcgtggtagcactggtagtactagtaccatctgcatctgtagttgtgtgatgtgtttatctcttcgtgccaatcgaaggattctgtgatgccatgccatggcaagtgatgtgttattttggtatct

SEQ ID NO: 13971 - DNA, 415 bp, Setaria italica
  Peptide Sequence Number=SeqID_79945
cgcagcaatgatgttgaggagtaggtgcaaccccaaatgcttccattgtcctgtacagaacaagtccttcgtccaccagtccagagtagttacatgctgaaatcgctgccaagaaggttacagcatcaggttttaaccccttctctcgcattgagtagaaaagggacactgctctttcgccaataccatgctgaccaagaccagaaatcattattgtataggagacagtgctcttctcagtcatgctagcaaagacatcttctgcagtagaaatctcgccgcacttggagtacatgtcaacaagagctgtacctacaaagacattggagtccaaacaacggcgcacagcaaaacaatggatctgcttccctgcacagacgcctccttccaagaggatcacttgcctcagtgctcc

SEQ ID NO: 13972 - DNA, 279 bp, Setaria italica
  Peptide Sequence Number=SeqID_79946
gcttgcacatattgttgacaatttagcctcttcttagagaaaacacaccgatatttttttaaatttaagtggaggaatacaaatttctttgatctttcgtgctggtgggtgatgtgtctgtgctgacgggtgatattatcgcccgccagcacaaatctatatacatttttctctttttttattttttagacaattaaattagtttaaagttattgaatcttctacaaccgtgtgtgtgtatatatatatatagtattatacatagtaaaaattttgaag

SEQ ID NO: 13973 - DNA, 385 bp, Setaria italica
  misc_feature (4)..(4): n is a, c, g, or t
  Peptide Sequence Number=SeqID_79947
tgangttcaagaaacgcaacaagatttcgttgtacagccttgagcttcctccgccgccgccgcggccggcgggaagcatgggacagtggcgatcctaggtgccgccatggaccttttcacgaattcgtggtcctccgctcgccatcaccattgcttattggttacccgccagcgagcaacgtcggggaagggcggctccatggatgcttcggctccggtgacgagctcatgcacctgcactcccaggcctccccgcgaatggaactggcagatcaaggacggaaacacaccgacaaggttggggtcttggggaagccggggtcctcttccatgggcaggtccggcggcgcaccgtgggaagagagatagagaaggagatggtcgg

SEQ ID NO: 13974 - DNA, 407 bp, Setaria italica
  Peptide Sequence Number=SeqID_79948
ttagtttagtttacgttaaattttcttaactttcgttccggttctaaggtactaagtattattctagtaggcattcggcgaagtggtactccagcttcctccatggaggcgagctcaggccggtggctctgcctaacggagcttactcccagtgatcagcacactccagcttgacaggatcggagttcatattgatgagcaccctctaggctcttgccgtccgttcaaaaaaaaatgagcaccctctaggtggaaagaacttagcccgtgtatgcacggatagttgggtggcataacagtcctttcatagtttcatatgctgggtaaatgcatgcgggacgagttgaataagatgatctttgaagtaacggtactaaggtaacaatagtttacttttagggttttaa

SEQ ID NO: 13975 - DNA, 297 bp, Setaria italica
  Peptide Sequence Number=SeqID_79949
ccaccacggagccatacgtagtggagttgccttcctcacaagcgaataagccaaaggggaatgagcatcgccgtggcggtagcattcccctttggcttattcgcttgtgaggaaggcaactccaccacggagccatacgtagtagcacaccaccttctgcttgcacatgcctcagcagtgtccctatatggagagaagtaccaggctgagcaaggaggacggattggtcttactttgcttggttggtggtatgagcccgccacggaaactccaacattcttcctcatcacaggaggg

SEQ ID NO: 13976 - DNA, 551 bp, Setaria italica
  misc_feature (535)..(551): n is a, c, g, or t
  Peptide Sequence Number=SeqID_79950
ttgtttcgtagttaccttatttcggtcttaccgtcgttccggtttcggttgtctatggtgtcgaattcaactcgccggcaaggacaagatatcagaggcattcggcgaagtggtactccagcttcctccatggaggcgagctcaggccggtggctctgcctaacggagcttactcccagtgatcagcacactccagcttgacaggatcggagttcatattgatgagcaccctctaggctcttgccgtccgttccaaaaaatatgagcaccctctaggtggaaagaacttagcccgtgtatgcacggatagttgggtggcataacagtcctttcatagtttcatatgctgggtaaatgcatgcgggacgagttgaataagatgatctttgagtacggtctaggtacatgtttctttgggttttaggatggcagcagggtcttggtacatgttttctttgactgatttgcagttgtacacaaaaaaggaggtaattaaagtgttggcataagaaactacaaatttccttgctaaaannnnnnnnnnnnnnnnn

SEQ ID NO: 13977 - DNA, 343 bp, Setaria italica
  Peptide Sequence Number=SeqID_79951
atacctgctcaatcaagattcaagatacagtttgatctctattctctactactatttctatgatttatatcgagtgttcaccttctgcagaccacctctaaaatggacatttccaatccttagtttccccctctacaatatagtcgcctacgcatcttgatcgacatcctgctaatgaccgttcaagcacgccttcttcatgtcttgctctgcgctacaatctcctgacaccgaaccgcctctccctgctctggaaggagaccagggcctcgaggtagtcggcctccccgaagtcgggccacagcgcgtcccggaagaaggtcgaaaagaaaagaaagaacaa

SEQ ID NO: 13978 - DNA, 630 bp, Setaria italica
  Peptide Sequence Number=SeqID_79952
cgggttcatcagagaaggcagggtacaaggaaggaatcaaggtcgcacgtgagatgcttgagcttgggtcgggcttgtcggttgtgtccatggagattttgatcagcggcttgtgccgtggtggtgaggcactaaaggcggctgaggtgtttgttgagttttggggggatggagtggtgccagaaaggtttgattgctttgaactagttgaggctctgtgccgtgtggggaagatagataaagcagtggaagtggtggacatggtattggagaggaatatgaaatgctgtctcagcgtgcctgctggtgttacggttttggagtgcctgatgaaggcggggaagctggataaggtttgccagttgatgtggagaatgattgatcaggggattgttccagatacaattacttgtaactgcgtctttgaggcgctttgtgaagctgggagggcagctgatgcaaaccagcttagagtgctcgctaaggagcagggttttgtggctgatggtgaaacctatcgtatgctggtgcagggatttggaaggcaggggagatgaaaaaagggggaagctgtgttggatgaaatgcttgattcaggatttgtaccaaatattgcctcttacaataggc

SEQ ID NO: 13979 - DNA, 405 bp, Setaria italica
  Peptide Sequence Number=SeqID_79953
gagtaaaaacccccacaccactatgctggcggacctagcacccaccagcaattttgagccagcacaaatggctctctgacgggtgctcacccgccagcacaaagcgggggttagctaacccgccagcacagtgatttttaaataataaaaaaaggcccggccaccctgccaccgccggcagcaatgacggccccgccagctccagctccagtgccattcaccattgaagcactcccagtggcaggtcaccttgcccttgggacggctgttcttgcaggcgttgtagcagtcgcagaagcagcgcacgaagtcgccggccacttcctggatgaggaggaaggagaccggcgtcgtcaccaccagggccctcagcgtcgtcgctcgagccgtggccgccttctgcgg

SEQ ID NO: 13980 - DNA, 657 bp, Setaria italica
  Peptide Sequence Number=SeqID_79954
gacacacaaatgtaggtgatcaagtccatatataatcacaaacatcatgaaacttccagaatggagaacagatctcatcagtcatcgcaagcatgcatttttattcggattactattactattgctctcagcctctacggccaccagatcatgtctttcctcctaaagcctccattctccatacagcctcctccagatctcaaggagtgactccctctccagtgccattcaccatgcccaaactgccaccgccggcccctccagctccagtgccattcaccatgcccagactgcctccgccggaagcgatggccacacccacgtcgtcaccattggaggagtgccgcccgcagttaccggggttcttgcagctgaacctgcaactggatttgttgaagcactcccagtggcaggccaccttgtccttgggacggctagggtcgttcttgcaggcgttgtagcagtcgcagaagcagcacacgaactcgccggccactccctggatgaggaggaaggagaccagcgtcgtcaccaccagggccctcagcgccgtcgcgttgccggtcgccatcgtgcacagcgcaggctcaccgatcgagtggttgtttggctcggatgggtgatcgtagtaggggttttggtcttggtccgttctta

SEQ ID NO: 13981 - DNA, 2123 bp, Setaria italica
  Peptide Sequence Number=SeqID_79955
gcaaggcgcacgcgaggtcgggcggcgacggcgacgcggtcttctcccctcaagcgctcatccccttcggtggtcgtcttctcgccggtgagtcacccatcctcgcccttctcctcttgtctcccttgcctgctagggttttgattcacatgcccggatctagatgtaggagttcttgatttgctgaaaattggttcaactgttgtgtcctactgttatttcactgcactgaatggaatggtggatgtgtcactgcaccgaattgttgtagcggttcaattgacagaaggattgcagaagtatatgttgtggagagattgaccaattctagtcactcatggtcggcagtaaatcactacgaacaagcaaagttacacatgcagaggacactccaggccttctctcttaaacattaatcgtcaagcatatataataaaaagacagggacacacaaatataagtgatcaagtccatatataatcacaagtcacaaccatcacaaaccttccagaatggagaacagatctcatcacaagcatgcatttttattctgactactagtactattgcctgaactggactgaatgttgattgtatctgtatatttggataaatactttttttattattttgtttctctgtcatgatgagattcctatgttcatgttcggccagtgttatactgccagtgttaaatgtcgtaagcacagtgaaatacctttggacctggatcctatttctggatctgtttctaggaatttagcaatagttttgtagttctttcagtcttgattgtgcatgctgattgtttaccatggaagcagcaggcacacaataacaatttaattcttgttgacttcatgagcacaagaccccttatcataggggtcaaaatggatggccatcagaatcctggaacaagattgtaaacgaattccatgtgagagaagactacgtgtatttcacaaaggcccagatccaagagaaggaaaaggagctgaaaagagagtacaagttgctgaaggacgcaaaacagcaaagtggagctcattttgatgcgaaggcagggaggattaaggcttgtccagcagtatgggaaaacatcttagattcatatcccaaggctaagaagtttcgcagtaagggttttccactctttgaggccttgggagagctttatgatggtcaaacaactgaagggacctacaactacacatccaatcaactaacagatcctacacaagtggagaatggggacaaggttgagaacatggaagttctgaattcagatttgcaagaaacaatggcaggccgagaagatgatgacgtgatggtactagaagatgatcagatgcgacaaagaagggatgcaactgtgacaaagaacacagaaaatgatgaaagggttgttcattcatcgcaaagaagggctgctaccgtgacaaggaacacagaagaaagagaaccaaagaggcagaagaaaatcagtaacttagaaggattgatggagagatacatcggcatgagaaccaaacaaggtgaggacgaagctgttcaactagctagagaaaaggaggaaagtgaaggggaatgctttttcaatcaagaaatgcatttctgttcttaacaccctggaagtcacaaaagaggaaaaggcaaagtcattcaaactcttcaaggaccctgacaacaggcagatcttcttaagtgcatgtgacgacgatccagaagttgcattgttatggttgagaagtgaaattgcttaggcaacacataataggctgatgaagacttgatgcacgtgttgacaaggactcaaggaggattagaatgctgtatccccagcttgatgaagacttgaagtaggggctgcagagtttcggaagctctgttgtcttgctcttactcttttgagaggatggaagattctttcctaagttatgatttttagatgtttctgttgttggtttctgtctttctgaccacctcaaaatctaaactttgcttaaagctaccatctcgttttgaactaaaatctttgcgatacttaaggtctctgtgtaataaatggactggtaacctataggaaaagttgctagtttgtactaaaaaaaaaaaaaaaa

SEQ ID NO: 13982 - DNA, 293 bp, Setaria italica
  misc_feature (244)..(244): n is a, c, g, or t
  Peptide Sequence Number=SeqID_79956
tgaattttgcaggttcagtattgtttgcagtccaggatctggtgctttgacaacccaccaagggaaattggtaacccagctagtttatgcggagaatcgatgccttggctgaatccatcctgttcttcgtaaggagtttaatataaattgggtaattttggtaacgttcgtggataagtaagtggtacctactcaactggtaaggagtatctaatactatttgtaggtacttttttttttaccngtgttttctcacagatggtccaacaagcaaacctaaataaggttacgag

SEQ ID NO: 13983 - DNA, 395 bp, Setaria italica
  Peptide Sequence Number=SeqID_79957
acgcccgcgccggcctggccgctcctgctcctccgccaccaccctcgccgccaggtacacactctccgcacaccaaaaattcacgacggaattactcttcagattggctgctacagattagaaattacaggctgaacacattaaatggatgcccgcttgcgaggattaattggcatcaattaccagtgctgttccccctccagctcctgctgggctgctgccacgggaggttcgtggtggagaagaacagcctcaaggtgacggcgccggatgacctcaagggcacctacgagtgcgccattggcaacttcggcgtgcctcagtacggcggcaccatggtcggattcgtcgcctaccccaaggccaacaagaaggcctgcaagagcttcgacgat

SEQ ID NO: 13984 - DNA, 553 bp, Setaria italica
  Peptide Sequence Number=SeqID_79958
ctccttagcaaccttaaacacacaaacttggcgcaaattctggatcaccacatctttcccatcatatcctttgctaaaatcctgttctgggtcaggcgcacagtatctcccatgattgatgcactgggacttgcactgcttgctcagaatgaaggcctctcgtggtgatgttaccatcttaccaactctggtaatcaacaatagacaatacagagggaagcttgacaaaggagcaattctttaagcactttgtgctggttttcgggaaactactgagcccgctgtttgcttgagtgaagatacacaaataaatgagtgcctagagaacaatggtggctgttgacaagataaggctgctaacgtcactgcatgcaaggatactttccatggaagagtttgtgagtgtccagttatgaaaggagcaaaatttgttggtgatggctatagtcattgtgaagattggcgagaagacggaggctgaggtttccagtacaattggacggtgaaaaacaccatcaacggagccaactagtggttatgtcctttacttaat

SEQ ID NO: 13985 - DNA, 202 bp, Setaria italica
  Peptide Sequence Number=SeqID_79959
cagtcatgtttgtggtcactggtttgtcaaatggtggagggatatgaactggccaacaaacagaaaactgtgaccacaaacatgactgaacaccagtcatgtttgtggtcactggtttgtcaatggtggagggatatgactgccaacaaacagaaactgtgcctggtgtttgcttgattcagtggatagccatcacgaatca

SEQ ID NO: 13986 - DNA, 674 bp, Setaria italica
  Peptide Sequence Number=SeqID_79960
aaggaaaattagacaaggaataatagacaagtgtacaagtacaggatccggaggtatatggactcggagatccgtgccatcatggctcagtacatgcccctggacaaccaaggagatgttcagagtcattctcatcatattgagatgtgaataggatgcagactttataagaggaaaccaagatgtgatccaacatccaactcatataaacttggggaccaataaaggagatggcagacgggcatgactggtgttcagtcatgtttgtggtcactggtttgtcaatggtggagggatatgactgccaacaaacagaaaactgtgcctggtgtttttgcttgattcgtgatggctatccactgaatggaatttgtttgtatttttaagagcagggactggacatctatgtgcgtgatactcgaggcgggtgtttaacagacagaagtattgctccttgtaaaacatatgttcgagcggaatcggttgctgagaaagttggctaccagtggctaactgaaatataaagcgttctgggatcacatacgttgcgtatgtatcagcatctgatcttgtaacaggtgcattgaaatatgagatcgacagagctgatgctaattgtttatttgtacgctacgctgctcaataggatttctgttctggtactggaagcctta

SEQ ID NO: 13987 - DNA, 2571 bp, Setaria italica
  Peptide Sequence Number=SeqID_79961
cggaaacgaaaaatctctcccactccaactcttccatccgagtagtgtagaactcgcaccaacgccctctcctgcggccgtcaaaatccaatctttccgctctccgccaccgttttcggggctttttttcgcccgcacagccgcaagattgatcttaccttgattcaatcgaacctcagacatcagtccaatccccagcaggttttcgccaattgcaaagtccggcagtggatcggaagcatggggttccgatccgccggcgcgatgttgcggttgctggtgtgggcagcgctcctgctgggctgctgccacgggaggttcgtggtggagaagaacagcctcaaggtgacggcgccggatgacctcaagggcacctacgagtgcgccattggcaacttcggcgtgcctcagtacggcggcaccatggtcggattcgtcgcctaccccaaggccaacaagaaggcctgcaagagcttcgacgatttcgacatctcctacaaggccaagccaggggcgttccccactttcctgctcgtcgacaggggagattgctacttcacaaagaaggcatggaatgcacagaacgcaggagcagcagcaatccttgttgctgatgacaaggatgaacctctaattacaatggacacccctgaggagagtgggagggcagattacttagagaacatcactattccttcagcgctaataaccaagagctttggggataggctcaagaaggcaattgataatggtgacatggttaatgtaaatttggattggagagaggccctgccccaccctgatgagcgtgttgagtatgaattttggaccaacagcaatgatgaatgtggcccaaaatgcgatagccagactgattttgtcaagagcttcaaaggagcagcacaggtacttgagaagaagggctacacagagttcactcctcactacattacatggtattgtccagaggccttcattctgagcaagcagtgcaagtcccagtgcatcaatcatggtagatactgtgcgcctgacccggaacaggattttagcaaaggatatgatgggaaagatgtggtgatccagaatttgcgccaagtttgtgtgtttaaggttgctaaggagcacaagaagccttggttatggtgggactatgttactgattttgcgatccggtgcccaatgaaggaaaagaaatacacgaaggagtgtgctgatggagttatcaaatcacttggccttgatcataaagcaatagataaatgtattggtgatccagatgctgatgaagaaaaccctgttctgaaagctgaacaagatgcacagattggcaagggctctcgtggcgatgttaccatcttaccaactctggtaattaacaatagacaatacagagggaagcttgacaaaggagcagttcttaaagcactttgtgctggttttcgggaaactactgagccagctgtttgcttgagtgaagagatacaaacaaatgagtgcctagagaacaatggtggctgttggcaagataaggctgctaacatcactgcatgcaaggatactttccgtggaagagtttgtgagtgtccagttgtgaaaggagtaaaattcgttggtgatggctatactcattgtgaagcttcgggatctgggcgttgtgaaattaacaatggagggtgttggaaagagaccaggaatggccggacatactctgcctgtactgatgatggctgtaaatgcccggatgggttcaagggtgatggtaagcacaaatgtgaagatattgatgaatgcaaggaaaggactgcatgtcaatgcaaagaatgcaaatgcaagaacacatggggaagctacgagtgcggctgcagtggaggattgctttacatgaaggagcatgatacatgcataagcaaaaatggagcaacagaaacaggctggggcttcttgtgggtcatcttccttggccttgtggcagcaggaattgcgggatatgcagtatacaagtacaggatccggaggtatatggactcagagatccgggccatcatggctcagtacatgcccctggacaaccaaggagatgttcagagtcattctcatcatattgagatgtgaggatgcagactttccgagaggaagcaaagctgtgatccaacttatagaaacttggagttagatgtgtgtgcataaccgtaacgatcttatgtctagcatgcatagagagatcctcctgtaaatttcttgaccgttctgtatccacgtgattcctgggttaggcttaggctgtaccatgacatggtgttgtttagtaataattgccatctcttcctttaagtacaataaacgagatggcagagggcatgactggtgttcagtcatgtttgtggtcactggtcagtcagtagtagagggatacgagtggcaacaaacagaaaactctgcctggcgtgcattgtttgattcgtgatggctatccactgaatgagaattgtgtgatgtaagagcagggggtgactacgaacccttagtagtgcgtacttgggggttattgtctaagggaaagacgtgttg

SEQ ID NO: 13988 - DNA, 1167 bp, Setaria italica
  Peptide Sequence Number=SeqID_79962
ccactgattgttaagccacttggtgttgttttacaattccaatgaactctatagcaccaaggtgcgtacaatgccacttttcatggctccaaagaatttgagttggatcctggggtagctacaagttgcaactgattcctaactggcgacttgcatacttcgagctggaggaacaattgagtgagacataattcatgtgacttttttggttaacggacgaaacaattgtgccggcctccatgaatgttctattggttggtattactgaatcttttacttcttcatgctgttgcactgttctgcaagtttcggatgtaaatttcctgattcatccttgaatatgaaatgattcatccttgaatatgaaatcgactagccaaaacattcggttgaagaactggttctgacggtctgctcttatttggctcgtacaccaagaggtccgagtccaattttcgctactaggggaatggttttaatcacactaacctgtacagaaaattggtattttgcctctagagtgaaaaatggtcacagttgtttttcacatcatatgcgtacagttaaacgttacatctcgcgtctcggcaggcctatagagggccacataacaccgtgcttgttctccactgttgcctccgaaagttactgccccgagattcgagatgctgtgcttatgatgttctccagaaactcttgcctctttgccttgaagaggagattgttgtagatgaacagccaggcaactagtatcccgattaattcaaagaaaagtggaagaaccggaagcttatcgatgatctcaatgagatgtactgaagcccataatgcagctacggttgcaaagcctattccagctagagcaaagatgtcttcagcagtgctcaaagaactcttgacgtatctcacaacgctcccggacgattccgaactgtcttgcgcgacgttcgccacgacgctgcggctcctgatcctacctgaaagtctgggagacggcagccgtgggagatggccggagaggctcctcctgccgcatggcgcaagaaccgctgcaggctggacgacggcgagggcacaagccatcatggctgcccacccctgagagtcgtcgcagaatgagatggtgtctgtgtggatgaaccgaagaactgatttgcctccgtctcg

SEQ ID NO: 13989 - DNA, 297 bp, Setaria italica
  Peptide Sequence Number=SeqID_79963
gcagtcgccactgctcgcaacgatgccgccgccgccgaaccctggcttcctcctcctccgctcccaaaccctaactcctcgcttccggcgaagccccagctgcgacccactcctttgccggcccagacggtgcctctccgcgcgcgcctccgccgcacaactgtccgccgcgggcgtcgcgacggcgcagcaacctgagcttggggtggaggatgcggtggtgggcttcgtcaccggcaagaggagggccaccgaagtagcccagcgtaggtactaggcctgccactgggtatccat

SEQ ID NO: 13990 - DNA, 1962 bp, Setaria italica
  Peptide Sequence Number=SeqID_79964
cctcaacagcaatttccatttaccagcagtatgtctctatcaaacagtgtacaagcactagagcagactacacctcctctatcgtattcattcaacctccggaagaaaataaaatagaaacaacactatggacaaacatatgttgcattcttagggtctgtgtggaatgcgagtgctttttccaagttccgacctcggctttcaagatgtgaaaaacaacgtgagcaaatgccgccgaatgctagcctcattctctagtgacgcacaccagtcagcaatcttcattcatcgctatctacctactgacaagccagctctgtttgaatataacatctttcctcaagctacggccatgccctgaggaggaatcaccttgctggttccggtagcacctgtagcagacaactgagtcatctgggtacatcacaaatagcttggtgccgagtcgagctcgacaggaatcgcagatactctcgtcagtcagctgcacatgccttgatctctcctccaatcttgtcaaccgtgcatcgaggtttgtcgcacgtgataaattgtgaacaatctgtccttgacgatgatggtgcacccgggctctcagcattcgcaaaattgtatctgatgccagctgaagaggcatatcgggagataatctctccaatacttgcattggatccaaagatttcccatggttatgaagaagtcgtacagctgctgtaaacataggctctttcccattttgaggatccaaatacaaacccaaaagctgaatataggcatcatctcgaccaatctctgcacaatactgttcggcagcttcactatcctccagtttcaatgctagtatctgaagtacaatattctcttggcccatcttcctatacaatatggccttttccagccatagctcagattctgctatcacatcgagcacgtcttctggatcatacaggtctgaagcttgcagaaacaactgcaacttctctcttaacaagtaaatgaattgtgcatcagaatcaatttctctatcatctttccctctatatttagattccatatgaactgcttcaatcgcagatttggccagcgaaagagcatatgatgtgtgatagtgaggatcatcacaaccttgatcctcaatcaaccactgcaaatatctttgatggattacaaccttctctgtatcaatagcagcgacaaccttctctggtgagagttgattttccctcatctctgatgttaaaactgcaatcgccagctcttgatcaatgtctgccacccatccaagatgttccagaacaaggtcctcatcagatgatgttttgaggatcttggctgcttctatagcggcaatttcctcaccagatcttttttcaaccgaacttccacaagaaccattttcagacatatccttccacaaaccagaactataatttcttgccaaaatacgccatatagcaagagctttggggcatattcctttactgccatataagaaagcaagtgtccgcaaatgtccagagtcatccaaaagggattctagttcatccacaacacagctattctgagatgatgcaagcttctccatgtcatcaacaagatcaagtgctctataaagatacatcagaaaagtatcaactccttccatctccggagaagacagattcttcatccgcgatgcacataggtacctgataatatttctgatcgcttgttctaaaagatcagctctacttggtgggtttgaaaggaaatcttcatccacaactgtatccacacctgcctttttcagaaacaatgcctgttgaactgttaccagtccatcatcaataacttcttcaaggggcttagggggaggatgcaaaccccaataacgctttctcggcaccagatctgaccaacggttaggatccggcatgatgaatggaaatatttctgatggctgcatagtctccgagagcaaga

SEQ ID NO: 13991 - DNA, 768 bp, Setaria italica
  Peptide Sequence Number=SeqID_79965
tcgcacagcaggtccagcagcttctccgacagcttctgtatctccgatgcgaattgcttcatcacttgcctgcagcgacacggaaggcttttcttttaatcacaggaacattccagcagataaaagcgcgtccatctcactgtcacttgctaaagagtgattcgacttgtgatggactaacacaccattctgatgcgcactgtcaagcaatgaaatggtcggcaggatagaactctagcgtgtcgtcaggcaaaaattatacacacacacacgcacactataaaacttacttttctaggaaaaaaaacctttgatataactctgtacgagcatttgaaacattatttaatttgctaataggagcaggtcatgccaggtagtatagctttttctgagatgcgtacaaagcgtctgattgggcctagcacacaataggtggcttcgtcagcctcaatttgtaggcttgcatcaaagccattaaacaagttcaacttggtagaccaaagacattcaagttgagaatctcccaattaaaaaattgattatccccaaggttttgcgaccagagtcaaaagctggtgacatggcgcttcaacttttattcagaagccaacagaaggtttatcaacgaccgagtggattgtaaccaactaataatatgatactcctacgaataacgtcgttgatgacgcgcacttgtctgtttgaacacacctgtagtggtcgtcgaggtcggggaggtcggcgaggttggaggcggggaggttg

SEQ ID NO: 13992 - DNA, 517 bp, Setaria italica
  Peptide Sequence Number=SeqID_79966
acaatggccacgtgtatcgtgtacggtacatagcctgcttataggtgtggtgtggtgtggtgtggtgtaatgtattgtattgtttaagttgcgtctcggatctatatgtacgtatgtattgcaaagtgtgtagcgtgcctatttgtacgagcaacgtgtgcgtgaccaggagttggtctgttactgttactgccacatcatgtttatttagagactagtgatctagtttcactctttttaagcttcaattgatttgttcccgacaagtggatcacataactcactgcctcaaagatgaaaactacttatcgccaaacatgatgtggcagtaacagtaacagaccaactcctggtcacgcacacgttgctcgtacaaataggcacgctacacactttgcaatacatacgtacatatagatccgagacgcaacttaaacaatacaatacattacaccacaccacaccacaccacaccggatttgcgttggctcatttcctgctgaaacgagcggttcag

SEQ ID NO: 13993 - DNA, 1443 bp, Setaria italica
  Peptide Sequence Number=SeqID_79967
tgaaaataataaaataggataaatttctttcctgcaatttgaaatacagggaaaagggggctcgctgtaacggtagaactacaacacatgctggtcgagactcgagagtagagcatcaacgagacaacgacacagcgaggatgccgaacacatcgtacactagctagataggcctatttatatatatctggcccatttattcagcatactaccacacagtgacctcgccgtactaccactccactagttttctgtagggagacacgcacagcatcttgtcatccagcactccaatgtgctactgacacgtacagctccggcattgaggccaaggcatgctctgcccgctctttcacggcgatggcgatgcggttggaggtctcggtctccatggacttgaaggccttgaagcgtggctccttggcctcgaacttgtgccgcacgtacagcttcatgtagtcctcgaacacgaactttgggtacgccgccgaggcctcgtcggccttcaccagcgccggcgccggaaagatgacggcgtcactgcccgggttgtagaaggaggcgatggacatcctgttgccgtcggtctgcgccacgacccggtgcatgacgctcttgtacctgccgttggtgaccacctccagctggtcgcccaggttgacgacgatggagtggcgcgtgggcggcacgtccacccactcgccgtccttgagcagctgcagcccaccgacgcggtcgtcctggaacagcaggatgatgccgccggcgtccgtgtgcgcgcgcaggcccttcaccagatccggccgcgggcacggcgggtagctgctcaccttggtcccgaaggtcggggcgcccctgctgggcccgcggaaggcgcgcgcgaggtagcccttctccaggccaaggttctcgcacagcaggtccagcagccgctccgccagcgcctccagctcgccggcgaaccgcctcatcgcgcgccggtacccgtcgtcgaggtcggggatgtcggcgaggttggactccgggaggtggcggacgaagaaggtgctctcccagtccaggttctccgccgccttaacgccctgcgcgccgcggccgtcgccgtccttgagcgccttgctcgcgaactcgaggaaccgctgctcgcgcacccgcttgtagtggtccttggtcagcctctccacctcttccatcagcttcgtcgagatgccatggttaagaatctgaaagaagccccagttctcacacgcatcgcgcaaaaggtccattgccgccggcctctcttccccggcgagcagccccatgtcgatgatcgggaaagatgacgtcggtgccatttctagctctcaaaataaccccgcagatcttccgcaaagcaaacaaagactggctatttctctcttcctgtctctagctagtgctctaggcaagactgcaatgctc

SEQ ID NO: 13994 - DNA, 1490 bp, Setaria italica
  Peptide Sequence Number=SeqID_79968
agtactagtgatctagtttcactctttttttaagcttcaattgatttgttcccgacaagtggatcacataactcactgcctcaaagatgaaaactacttatcgccaaacatgatgtggcagtaacagtaacagaccaactcctggtcacgcacacgttgctcgtacaaataggcacgctacacactttgcaatacatacgtacatatagatccgagacgcaacttaaacaatacaatacattacaccacaccacaccacaccacacctataagcaggctatgtaccgtacacgatacacgtggccattgtgtccagctagctctcgcatgcacgcagccaccacgcccattctagctttcggcgtttcttgctcacgcggtggcgatggcggacttcatggcctcgaaccgtggctccttggcctcgaacttctggcgcacgtacaggttcatgtagtcctcgaacacgaacctcgggtaacgaccgacgacgactacctcctcggcggcgacgagcgcgggcgccgggaagatgacggcgtcggcgccggggttgtagaaggaggcgatggacatgcggttgccgtcggggcgcgtgagcacgcggtgcgtcacgctcttgtaccgcccgttggtgatcacctccagctggtcgccgatgttgacgacgatggcgtagcgcatcggcggcacgtccacccactccccgtccttgagcagctgcaggccgctcacctggtcgtcctggaacagcaggatgatgccgccggcgtcggtgtgcgcgcggaggccgtcgacgaggtccgggcgcgggcacggcgggtacgcgctcaccttggtgccgaacgttgggtccgttggaccccgcgaaggcctgcttcaggtaccctttctccaggcccaggttctcgcacagcaggtccagcagcttctccgacagcttctgtatctccgatgcgaattgcttcatcacttgcctgcagcgacacggaaggctgtagtggtcgtcgaggtcggggaggtcggcgaggttggaggcggggaggtggcggacgaagaaggtgctctcccagtccacgtccttgacgtcggcgcccttctcgccggcctccagcgtccgcgccgcgaactcctggaacttgggctccggcagctggtgtagtgcgccttgttcagacgctccacctcgtccatcagctcgtgggagatgccatggttcagcagctcgaagaagccccagttctcgcaggcgtcgttgaggaccgccatggtcgcgggcttctccttggtctggagcttctccatgttgatcaccgggaacgaggtggagcgtctgaacaaggcgcactacaccagctgccgggagcccaagttccaggagttcgcggcgcggacgctggaggccggcgagaagggcgccgacgtcaaggacgtggactgggagagcaccttcttcgtccgccacctcccgcctccaacctcgccgacct

SEQ ID NO: 13995 - DNA, 2709 bp, Setaria italica
  Peptide Sequence Number=SeqID_79969
caagcttactgagcaacacccagagagagcacgagagagtgagtgagagagagagagagagagggaaaaagatcgaaggcgagcaagagagatggcagctacaggcaccacgctctcgttcccggtgatcaacatggagaagctccagaccaaggagaagcccgcgaccatggcggtcctcaacgacgcctgcgagaactggggcttcttcgagctgctgaaccatggcatctcccacgagctgatggacgaggtggagcgtctgaacaaggcgcactacaccaggctgccgggagcccaagttccaggagttcgcggcgcggacgctggaggccggcgagaagggcgccgacgtcaaggacgtggactgggagagcaccttcttcgtccgccacctccccgcctccaacctcgccgacctccccgacctcgacgaccactacaggcaagtgatgaagcaattcgcatcggagatacagaagctgtcggagaagctgctggacctgctgtgcgagaacctgggcctggagaaagggtacctgaagcaggccttcgcggggtccaacggcccaacgttcggcaccaaggtgagcgcgtacccgccgtgcccgcgcccggacctcgtcgacggcctccgcgcgcacaccgacgccggcggcatcatcctgctgttccaggacgaccaggtgagcggcctgcagctgctcaaggacggggagtgggtggacgtgccgccgatgcgctacgccatcgtcgtcaacatcggcgaccagctggaggtgatcaccaacgggcggtacaagagcgtgacgcaccgcgtgctcacgcgccccgacggcaaccgcatgtccatcgcctccttctacaaccccggcgccgacgccgtcatcttcccggcgcccgcgctcgtcgccgccgaggaggagcgcgcggcgtacccgaggttcgtgttcgaggactacatgaacctgtacgtgcgccagaagttcgaggccaaggagccacggttcgaggccatgaagtccgccatcgccaccgcgtgagcaagaaacgccgaaatctagaatgggcgtggtggctgcgtgcatgcgagagctagctggacacaatggccacgtgtatcgtttacggtacatagcctgcttataggtgtggtgtggtgtggtgtggtgtaatgtattgtattgtttaagttgcgtctcggatctatatgtacgtatgtattgcaaagtgtgtagcgtgcctatttgtacgagcaacgtgtgcgtgaccaggagttggtctgttactgttactgccacatcatgtttggcgataagtagttttaagcttcaattgatttgttcccgacaagtggatcacataactcactgcctcaaagatgaaaactacttatcgccaaacatgatgtggcagtaacagtaacagaccaactcctggtcacgcacacgttgctcgtacaaataggcacgctacacactttgcaatacatacgtacatatagatccgagacgcaacttaaacaatacaatacattacaccacaccacaccacaccacacctataagcaggctatgtaccgtacacgatacacgtggccattgtgtccagctagctctcgcatgcacgcagccaccacgcccattctagctttcggcgtttcttgctcacgcggtggcgatggcggacttcatggcctcgaaccgtggctccttggcctcgaacttctggcgcacgtacaggttcatgtagtcctcgaacacgaacctcgggtacgccgcgcgctcctcctcggcggcgacgagcgcgggcgccgggaagatgacggcgtcggcgccgggggttgtagaaggaggcgatggacatgcggttgccgtcggggcgcgtgagcacgcggtgcgtcacgctcttgtaccgcccgttggtgatcacctccagctggtcgccgatgttgacgacgatggcgtagcgcatcggcggcacgtccacccactccccgtccttgagcagctgcaggccgctcacctggtcgtcctggaacagcaggatgatgccgccggcgtcggtgtgcgcgcggaggccgtcgacgaggtccgggcgcgggcacggcgggtacgcgctcaccttggtgccgaacgttgggccgttggaccccgcgaaggcctgcttcaggtaccctttctccaggcccaggttctcgcacagcaggtccagcagcttctccgacagcttctgtatctccgatgcgaattgcttcatcacttgcctgtagtggtcgtcgaggtcggggaggtcggcgaggttggaggcggggaggtggcggacgaagaaggtgctctcccagtccacgtccttgacgtcggcgcccttctcgccggcctccagcgtccgcgccgcgaactcctggaacttgggctcccggcagctggtgtagtgcgccttgttcagacgctccacctcgtccatcagctcgtgggagatgccatggttcagcagctcgaagaagccccagttctcgcaggcgtcgttgaggaccgccatggtcgcgggcttctccttggtctgggagcttctccatgttgatcaccgggaacgagagcgtggtgcctgtagctgccatctctcttgctcgccttcgatctttttccctctctctctctctctcactcactctctcgtgctctctctggtgttgctcagttaagcttg

SEQ ID NO: 13996 - DNA, 475 bp, Setaria italica
  Peptide Sequence Number=SeqID_79970
gcgcgccggaagtgcgtcccccgcgcgctgctcttgtgcaccacgatcttcttcgccaccgtgtcgtcagggttcacgaagtactgcttgacaacagagtaggcagggtggtcttgcaggggattcgggtagctcttgagctctgggagatagtcggtgaggtgcgggacgtcctcgaggacgtacccgccgcagccgccggcgagcttcttcttggccgccggcttggccttcctcgccggcggcgacgatttcgccgcgggggcaaaggaagacttcagttccaaaagcttgtgctgcggcggcggcgtgatggccaccggagccggcgcgacgacgacggtggcggtctccatcgatcgcagcacagtactaaggaaactggaccgatcgatcggaggagagcgactatccgacgattgaattcgccggaattccggggaggggaggactggaattcttgttctttgtgaga

SEQ ID NO: 13997 - DNA, 421 bp, Setaria italica
  Peptide Sequence Number=SeqID_79971
tagtgggatggcgaagaagtggcactccaagaaagtgtaaagagggggttttggacgatgtgtggggaagggtgtgccgacaacggcgggaagcagaatgcttccaggaagaaaggttgatgggcgtagggtggttggattgtgaagatgtcacgtatgaaattgcgggagagctcgagagcatgctgggcgacgaactcctggaagaagtaacagccgagctgctgctgtgattcgagaagatgtaatgtaatattattccatacactggtttccatatagtccatagcttgtgttactgcttgccttgctggtccggtgagtgatgtcaatgcactataatgttctggactgggcggcaaaggccatctgcattctccttgctgccgaagtatgatgttttgccacaaatcaaggcagg

SEQ ID NO: 13998 - DNA, 277 bp, Setaria italica
  Peptide Sequence Number=SeqID_79972
cagtacctctctatcactattccatgcctctttgtcaacatcagtccatcttaatgtcaacctagccagtcttttcttatttccgagttttgcctcttttgcatctgcctctttcacattttctagctgtcttagctccagctgaccaccaaggtcgtctaaccacccaagttctcccaccttactgcaaccggatccagcacctgctacaaagcatgtaagggtctgtagggaagtgaggtgtctaaggtcagcaggcatggtctttaacttttca

SEQ ID NO: 13999 - DNA, 1280 bp, Setaria italica
  Peptide Sequence Number=SeqID_79973
gttccggccatccccctccattcggtcttcgccgggccctttgccggcgacgaccacccaccagggaatgacgcatcaccatgaacaacagcatgcataccaatccggtgcgccacctggcatgatgggacaaggtggcggcagtagcttccctcagtcctccagcccaatgcccccggtccagggtcagatgaacctgccactatccggcggaccacaaggcatggttggaggtcaggtgcacaaccaggttgcgatgcagcaacaatacctgaagcttgcgatgcagcagcagcagaaggcggcccatgggatgctcctccagcagcaggccaagatgaatatgccggggtcatcatcaagagaccaagatatggttaacaaccctgccaagatgcaggagcttatggccattcaggcacagatgtttaagcgacaggctgaacatcttcagcatgcggaaaagcagaaagagcatgaacaaccaagcagtaatgagcaaagaagcggtgatatgaggcctccaatgcctcctcccggagtccctggacagcagttgccatcagtgggtatgatgaggcccatgcagccaatgcaaggccaggtgggcatgggcagcgccggtggtggcccattaacgccattgcagtttcaagccgtgcaagcctgggcaaaggagaacaatttcgacctgtccaatcctgcaaacatgagtgcagtttctcaactcctgccaatctggcagtcaagcaggatggcagccatgcagaagcagaatgaggcaagtatggctgcgcagcagcaagcaacaccctcgcaagtgaacagtgataccccagggcgtggtaatgttcccaatcagggtgccccattgaagcccggtcaaccccttcccccaagctcagtttctggtggagaagaggctaaggtaatgaattcgagcaacctgcagttgcaacaacagttatctgcccatagcagggatggctcaaatgaaagggccgtgagggctcctatgacagtgggcaatggtgcacagatgatgcatatcccgcaaagctctggacatgtgaataaagttcccgagcaatccaatccaaaaactgtgctcgcaaattcagaagcgatgcagatgcagcatgcgagacagatgcagcagcttaaccaagcaggtgcccccacagcatcctctggcgaagcaggaggatcacagcccccaactccaagtgctcggctgcaaccagggcacacaggtttcaacaaaaaatcaacttcattcg

SEQ ID NO: 14000 - DNA, 227 bp, Setaria italica
  Peptide Sequence Number=SeqID_79974
tggctttgaagcagagacattgcacaatgcttcctgagatgcaatttgtgttcctgaaacagtattggcaaactgctggtttgcagtactttgtgttcctgaagcagtgttgacaaactgctgatttacagtacgggcctgactgctatctttatcaggcatcattgaggttcgggatagagatcacatctgtacagagtactggcggtccaggcctcatgttgtca

SEQ ID NO: 14001 - DNA, 575 bp, Setaria italica
  Peptide Sequence Number=SeqID_79975
aatacaaaagaacaaatactagatcctctatctggtgtggaagttagagctaggggccattcagctatgattatgcagccttctttggaaaatcacagcaggaatggagtagcacagaagggtcctcgcatagctaatgttgtgcaccgatttaaatgctctgtcgaacctattgaaattggtactgtgctatctgggaggttgtggtcctcaagccaagcaatcttcccaaaagggtttaagagcagagtaaaatacttcagcattgtggatccagtagaaatgacatactacatatctgaaatattggacgctggccagcagggacctctttttatggtgactgtagaaaactgtcctggtgaaatttttattaacgtctctccttccaagtgctggaatatggtccgtgagaggctcaatatggaaataaggaggcagctcagtatgggtagggctaaccttcctacactacagcctccaggatcaattgatggctttgaaatgttcggcttgttaacaccagcaatagttcaggcaattgaggttcgggatagagatcacatctgtacaga

SEQ ID NO: 14002 - DNA, 1106 bp, Setaria italica
  Peptide Sequence Number=SeqID_79976
gttcggcttgttaacaccagcaatagttcaggcaattgaggttcgggatagagatcacatctgtacagagtactggcggtccaggcctcatgttgtcattgaggatcaagacagtcagcatatgccacctcaggatccactgcatattgcactgaggggcctcttccaacgggctaattgtgatgaactgcgagcattgcgcagtttactgatgagcaatagaactctggatgataattctaggcagcaggcttgccaaatccttgatgaggagattgcgaagcaatggcgctgaccagcgtaaatacaagctgttgtactgaccaatcttagatagcatgatttttttttacgggatcaagcagttttaactctgaggcttgcttctttggttgccctcatgcccattctttccattctcgtgtccatactccattctttattgtatgtggtgtcaacaagcatgaggctacagccacatcaccaattcacccgcaaggaagtcacaagtaagaagcacacgcatttgtaatggcataatgatttttttattgccatttcgtcgttcctcaagattttgtgattagttaatggctaattactttaccaactgataagggtaagcgacttattatacaatgcaactgggtcatcatattcctttgttcttgaaatccgttagtcatgcatgcttgtctgatgtaacgagatccatgcgttatggattctgtatccttattggattcttccagaatttgtattcttctctggatgaaccactatttatgtattctcgtggcatgcatggtgtaactttgactaacactttagtataaactgaatcagctgtccatgcatgtgccaactcccttttaacaaaccatacactcgattcttcttaagaactgatatgtatcattccttgctctgtccttaaggactagctgatgaacgttgattggcaactttgtgaacagttctatttaatttgataaatttaatgtccattttcacctgcaaatcagcaaaaagagcaatttgtattttctctgaattagtattgattgtgtatgcctacgttgcattttgcatagaaggtggtatta

SEQ ID NO: 14003 - DNA, 1069 bp, Setaria italica
  Peptide Sequence Number=SeqID_79977
cggtgcacaacattagctatgcgaggacccttctgtgctactccattcctgctgtgattttccaaagaaggctgcataatcatagctgaatggcccctagctctaacttccacaccagatagaggatcagattgtctttgatgccacctctcatttaattgctgattaccaaaagccggatgcccacgatgggcgctgccactgcctgaaccaaaagcaccatacgaatttttcataactgaaggatctatgagtggctttgaagcagagacattgcacaatgcttcctgagatgcaatttgtgttcctgaaacagtattggcaaactgctggtttgcagtactttgtgttcctgaagcagtgttgacaaactgctgatttacagtacgggcctgactgctatctttatcaggcatcattgaggtattagtttctgatgttatgagtactcgatccttgtatgagtgacatagagctgcattgaagtcggatgccatcaacctatgagaattgcttgagcttcccagacttggcttcatgttggctccgttgtcaatcattgacaatgacctgttatgatgctcaccaagtgaagctgtaccgtctccagtttgagaataagtttctctactctctttaagtactgccaagccatgcacacttctcatgggttcacttgaagtaactaagggtcttgtcacagcatttgagggaaatgattgccaagaaggagctgtcaagcttggtgctgagcctttgtggcctccagtccctccattatattgttgttggctcgcatcactatttgctggacaggataattcattcttcacgcacggctccttcagtggtgagacatttcccggttttatctgctctactgaaggacaggcactattcgtctcctgacatattttaaccaaattcatacctggactagctacatccagtatcttattttcattggtttttctgttcccaagaaggcaccaatgatactgttgatgcctgtgacatgtaggaccgtcttgggccatcagttaatctgcgaacagtcttggaatcttgg

SEQ ID NO: 14004 - DNA, 423 bp, Setaria italica
  Peptide Sequence Number=SeqID_79978
tttgcatcggtgcctaacatgggcggggcacggttgattaggggagacactaaactagtctgccccgtggtaggaatctcgataagcatccaaacgcccagataatggagccagcgtctcagaaggagaagaaacaaggttatataccccagcaagcaacactccccggctgcaaaggcaaagccagccagtcaagcaagcgacacttgtccaagaagccattccctcgtggccgtggaggtcaggccggagctgcccggaggaggaggagctcgggaagaagttgccggcggtgggagcatcaaggcagcgcagcgcgggcgggcggcgatcgagatgctgatcctcgacctggcgatctggatcatcccgatgacgctggtgttcgtgccgtgccggcggctcgtggtgctggtggccagg

SEQ ID NO: 14005 - DNA, 457 bp, Setaria italica
  Peptide Sequence Number=SeqID_79979
agaagacaaacaggaaggggatggagctaaccagcatcccctaccttgcatcatcttcctccagcttcttctactctagctacagtcgctgtacctgcaggggtaaaagagatgggaagctggtgataacagcttctgctgctggtggtaggtgtgctgctgatttggcatgttcacaactctttgagcaggaaaatgaagatgccctttcaggttctagatcttcctggcattatagaaggagagagtttgcttctgccattttgctcccttttctgcttcctcatattgacatttcgagcgcggctgagacatacaatggatcagtcattcgaagtggtgtaaggaatgttttaaccaaggccaaggctgctggtgtgcttcgtttggttttccatgatgcagggacttttgatgttagtgagaaatcaggtggcatgaatggctctataattta

SEQ ID NO: 14006 - DNA, 485 bp, Setaria italica
  Peptide Sequence Number=SeqID_79980
caggaacctaatgaaatgaggagggcctatgaggatgtgcactctatgaaggaagtgactccatatgtatctacagcagaattggttaagaagtttgaatcagggactagaaagcttagcatcagtagcagcagatctgtttctcatgaggatgcatcatcacagggaaggcctaagctagttttaacaagaccaaaggagcctgagcttcagacttcccacagagtccgggcagtcagagtgaagagctttgctgagctagaggaggaaatgctggccaagatccccaagttcagggcacggccattcaacaaaaagattgctgaagccccatcgttccctccgcttccaaggaaaactccacatgtccctgaattcaatgagtttcatcttaagacaatggagagagcaacacgatatgcggacacctgttcagaaatttcttctgctgatactattcagagtcaaagtaagccactcaaatt

SEQ ID NO: 14007 - DNA, 946 bp, Setaria italica
  Peptide Sequence Number=SeqID_79981
ttttttgttttttttccctgcacatagaagcgcagctatctcaatactcagcaacatcaactagccacttgatctggatacttctcagcaaatgaacagatctgactcatactccagatcaagtgaacaattttgaggaacaggggcaagtctggctaccgcctccccctcaatgtttatatcacacgaaccattttggtttttgccacgaaaacaaccaaccaattccagctccatggttcaagtcctaagcaatctatgcaacacagctacaggccttaaaaagcggcattctcccatgtgacgatcagcttcagccacggccacggccccctcctttgttaccacctttgccaccaattccaccccttccacggccaccactgcctctgcctccatcatcttggccacgtccaatgcctctgcctccaggcttagcaccgacatccccccttcctcttccacggccaacaccaggtggcttcctatctgatcgactcttggaagtttcctcctgaaccttgtcaatcacctcatcaggcactcgaagatacttaatggtgttaccgcggatgtaacactccggcatcctccaaaacttgtcaccatcctttgaggtgcaaataacctccctaaggtggatgttcatccacgtgtcgcagttgaccagatgcccgttgtacgtctctccattcttcagctccacgagcatgggatgcccctgggcagtcttgagaagcgagaggggaagcatcttggggaggatccggggatcaaaagggccggatcggatgaggtaggcggtggtatcgccggcgtgcggcctgtcggcggcggcgcggcagcggcggcggcgagaggaggttccgggagcaaaaccctagcttcgtctcggcgagaagcgagaagagggcagagctcgagaccgagtacagaaagcgaccgc

SEQ ID NO: 14008 - DNA, 289 bp, Setaria italica
  Peptide Sequence Number=SeqID_79982
gctcagtcgaggtggcgtggcttagggggtatagggccaacgacgtcgggacgctgctccagggcgggcaggcgtcgtcagggggcggcctggtgtcgtcggggcgcaacttcgggccgcgccacctcgactgagcgcccccgtccagcagtcgacgctgagctcccccgtccagcaggctgaggcatcagttcattaaggtgttgtgccattgttgagcatccaattattgcagtcgaccagagggtgcaaaaagatttgggagaaggaacacgagtaggaagaatgg

SEQ ID NO: 14009 - DNA, 321 bp, Setaria italica
  Peptide Sequence Number=SeqID_79983
ttttttttttttttttttactattcaaccggaacacatgcaattgaaagactggtgactaagaaatgtgcaccatagtggtattttacacaacattatatggtactgcaatggttggaaataattgtaccaactactgaattgaaatggacaagatattaagtacatatgaagggtgaaataacaaatagttcttcatgtcctacaagtagcatagtgctactttattattacaaccaccatgcttgagaatagtagattaacagcaaggtctctgcactgcgaagagacagagagaaggggaagggagggggaaaagaaa

SEQ ID NO: 14010 - DNA, 250 bp, Setaria italica
  Peptide Sequence Number=SeqID_79984
cttcttgagtacgaattgtctatcttatttgacgcatcagaaatgacaattactaagtaaaatgtactcttccgttcatggctacatgttcttctgccagcagcgcccaacttcagtttgagtgattaataatgcaggggttgaaaaaatttccaacatttttgtttcttgaataaacctgcatactgtaatcttctactgatagtgtttatacccttgcaacaggctggtttgccacttgtgcagcaat

SEQ ID NO: 14011 - DNA, 497 bp, Setaria italica
  Peptide Sequence Number=SeqID_79985
ggttggccccatcaacagcgatgctccggacgcgagcccaagctgcccgcccgtggccttggcactcaaataactcaacaagctgtgacgccttgttgagaccatcgaggctggctggaaacttcgcatgcatggacctctgcccattattcccaggcagtggctgcacatctacaccggcaaagcccatctctctcagcttgctctccatatctttattactcatgacatccttttgtccgtcgttcgttgacttgtatgcattctcgataatgactgttggaggccacaagataagatctccttgattggcttcagcatcagcagtagataatgcttggtaagcggttttgtgaacaggggctaccgagtaattccaacccataagaacacataatgctttgtgaaatcctaggtgatctgcacgatgctccgcattctttgcatggtatgcatgattgaggagcgcatgcaaatcttattagtaattccctttt

SEQ ID NO: 14012 - DNA, 635 bp, Setaria italica
  Peptide Sequence Number=SeqID_79986
tttttttcatggaacagaaccattatttgcattccatatcaaccgaagctgattactcaacaaagaatttctcaaagttgaaccgggcatcctagtcagataaaacacgaaaaacatcgaattacgctctatggattaacagtttatctgtaacatacacaactctaccagtgttaggtcctcctagtctaaatcgagctcctttctgctctttacagtcacattctgcttcgactcggggtcaagcatgtccaggtcccatgccgtggccaagtagccatagaggacccaagtccgctcccccttgccatccaccttcaccaccaaggggtggttggccccatcaacagcgatgctccggacgcgagcccaagctgcccgcccgtggccttggcactcaaataactcaacaagctgtgacgccttgttgagaccatcgaggctggctggaaacttcgcatgcatggacctctgcccattcttcccaggcagtggctgcacatctacaccggcaaagcccatctctttgacagacagggcacttcagctggcaaagcttcccatcagcccggtaattcttcttagctatttcactctcattcatcagcttcaccatcttaagaaaggagctcttc

SEQ ID NO: 14013 - DNA, 389 bp, Setaria italica
  Peptide Sequence Number=SeqID_79987
caaaggaaggccttctcacaaatgggtgattcccacgccgtggacatcccttccctggcccagcagctgagggaggagctggccgccgcggacgcgccgccgccccgactccccggcggctgccccatcgtcatcgccgtggtcggcgagctcacccgcaacgtcgacccggccgagtacgtcccgcaccacgtatgcatcgggcccaaccaccgcttcaggagcccgcccctcgacagggacgacgagaagctccggaacctccgcgacgtcatgtcggtggcaagcgccggcgtgacgctggaggactacctcggcgaggtcgcgcgaatcgagtggcaggccaggagctgctacgaccgcacgttcgagcagatgagtagcgcgga

SEQ ID NO: 14014 - DNA, 909 bp, Setaria italica
  Peptide Sequence Number=SeqID_79988
ctatatattacagaaggaagttcaaaagctagttcaatacctagacgctcaagctcaatagtagaggtttcatatctatttgctgagatgattcaacatgggctccgttgcattgcattctgtaaaactaagaagctatgcgagcttgtcctagcttacacgcgtgaagttcttcaggagagtgcaaaagaattggtagattctatctgtgtatatcgtggtggctacattgcagaggacagaagaaaaattgagtctgatcttttcggggggaaactccgtggtgttgctgctactaatgctcttgaactaggaattgatgttggacatattgatgcaacattgcatcttggatttcctgggagtattgccagcctgtggcagcaagccggaaggtctggaagaagagcaaaacaatcattagccatttatgttgcctttgagggtcctttagatcagtatttcatgaagttcccacataaattatttggcaagccaattgaacattgccatgtagattcacataatctaaaggttttgggacagcaccttgcttgtgctgcttatgaacatcccttgtgcctgcaatacgatgagcgctactttggttctagtctggatagtgcaatgacaacacttaaagacaaaggttatatcattaacaaaacatctggacctttctcttcaagcatgtggaattatattggacctgagaaaagtccttcacaggcagtgagcatacgggcaattgagcatgataagtacaaagtgatcaacaagttaaataatagattacttgaggaaattgaggaaagcaaggcctttttttcaggtttatgaaggtgctgtttacatgcatcagggtgtcagttacttggttgaggaacttgacttatcatcgaggacagc

SEQ ID NO: 14015 - DNA, 451 bp, Setaria italica
  Peptide Sequence Number=SeqID_79989
tcttgtccgtagaactcccacacccactgcacgatgtggatcacgtcttcttccctaccatcttccccgtggcgagccaccagaggccggctcatcacgtcttcttccctgtggctgcggctaacggccaccagaggccgccggccgcaggcgatctcgaggaggacgacgccgaagctgtagacgtcagtctcggtgctggccctgccggtgatcatgcagtcggggtctatgtagcccaaggtgccggcgatcaccgtggtgtgcgagcggcggccgtggtcgacgagcctggcgagcccgaagtcgccgagcttggcgtggaaggacgcgtcgagcatcacgttgctcggcttgatgtccctgtgaagaacgcactgctcccagtcctgatgcaggtagagcagagccgacgcctaaccccagcacgatctcgttgcggatcggccat

SEQ ID NO: 14016 - DNA, 324 bp, Setaria italica
  Peptide Sequence Number=SeqID_79990
aggggccatgcccgacgcctacgagtagtggagggtggagcttgggagatgaggaaggcgtggatggcagcgatttgaaggggacggtcggaggtgcttggatttgaccggcgaagttgtctgggtcgagctcgtttcggtctgtgttcacaggaagaagatgcaggaagaaagaaaagaaagggagacaaagggagactgaggcccggccagctcttggcttggggaggggcgacgcgaggccaggcgtgtggaggctgtagaagttgcttgggggtactgggagctcgggcggcgtccgttgagctcggcggcaggggatgc

SEQ ID NO: 14017 - DNA, 687 bp, Setaria italica
  Peptide Sequence Number=SeqID_79991
tctgccagtaatccgatcagtagctctgtgttgagtattggatcagggccaaaggccttaagaagaagctgggaaggaaacgtggatattaaaggaaaaggcaattcagaatcaaagacaacgaaacctgacaggaagtctgataacaagatccctgtggtatgtaatgtattgactctattggttatgatagataactgcacttgatgcatttaatttatgtgattagtgatcagtgatatccaccgctttctcttgaggctggttccaacttttaggatttccagtgacaatagataatggaacctgtatctcatcatatctgtttattattgtctcgtccatgacatcgtgtgtagcaaggaaatgtgatgtcgttctttttccccctatttgcatgaaccattgtacattcttaatatgcagactcctagacgaaaaacaccagtggatgagaaagtgtcacgcaaagatgatagtgtgattcagaaagctgctaggaagagcaccgcaagtgctccttcagatgatgccgacaaagcagttaagaagcatactcctactgtaaagagaacttctggggttttggtcaactcaaatgctacaaatttagtcaagattcctcccaatagcaaaaagctaacagatacaagcacttcatggacatcactccctccatctcttgcc

SEQ ID NO: 14018 - DNA, 2000 bp, Setaria italica
  Peptide Sequence Number=SeqID_79992
cggtttcccccagcctttcctccttccgcgcgccccacagagagccggaggaggaggaaagcggcggggaagagaccgcttggcgccccgcccggatttccgccgagagagtgatgcgcttaaggagttacgacaatggcttcattggtgcctggtgtccttgtgaagctcctgcagcatatgaacaccgatgttaaggttgccggcgagcatcggtcctcgctccttcaggttgtcagcattgttccagcacttgccggtagcgatctttttaccaaccaaggattctaccttaaggtgtctgattcatcccatgcgacctatgtttcccttccggaggagcagcatgatctcatcttgagcgacaagattcagctgggccagttcatccatgtggaccgcctggaggcagccactcctgttcccatccttagaggagtccggccagttcctggtcgccatgcttgtgttggcacacccgaggatcttgtggtaaccagctcctcaaattttcatggcagcaagaaggcacaaccaacaaatggattgaaggatgccagcagcttgtctctagaaaaggaaacgagcaaattggagaaaataaatgcttcacgcaagcctactggagccgaaaataagaagccaatgctcaccaaatcaaactcttcactgtcgaaacaagctttgaatgggattggtggtaagaaggaatcagttaaatcaaaggtgaaaccagctattacgaggtcaacaccttcgtctccaacaagtgtctattctctacctgcatcattcgacagattctctaatgatctgaaacagagaaataaagtaaaaggagctgagaaagcatcatcttctaggctttccttgttagaaaaggcagcttctgttttgaaggttactactgccgggaggaagtcctctgccagtaatccgatcagtagctctgtgttgagtattggatcagggccaaaggccttaagaagaagctgggaaggaaacgtggatattaaaggaaaaggcaattcagaatcaaagacaacgaaacctgacaggaagtctgataacaagatccctgtgactcctagacgaaaaacaccagtggatgagaaagtgtcacgcaaagatgatagtgtgattcagaaagctgctaggaagagcaccgcaagtgctccttcagatgatgccgacaaagcagttaagaagcatactcctactgtaaagagaacttctggggttttgggcaactcaaatgctacaaatttagtcaagattcctcccaatagcaaaaagctaacagatacaagcacttcatggacatcactccctccatctcttgccaaactaggaaaggagcttctgaagtacagggaatcagcacaaatggctgctgttgaagccatgcaagaagcttctgctgcggagagcttgctcagatgtttaagctcgtacgccgaggtgagctccacggcggaggagcagaacccgcagccggccgtggagcagtttctcaccctccacgccgcgctctcgcgggcaacagtgatcaccgacaccctcaccaagcctaccgcctctgtggcttcaccggaccggtcggcggccagcgacgtggggacggtggcctccaccaccgacgaggaggccgcggcagtcgcggccgagcgccggagacgagcaacgtcatgggtgagcgccgctctggccacagacctgtccgccttcggcctctacaacctcaaaccagtccccgccacggtctcctcgccgttggccgtggtggtcgtcgacgagtcctcgaagccggctgcggccgcggccacggttacgaaatcatcgccgtcgcctaagtcgcggatgtcccccgcgaagggcaaggcgaggacgggccctggcgctacggcggccgcagcggcgctgacgacgacgcccgcgccgccggagtgggagagggggaggaggcgcggacgagaggggcgagctggcgaggcggctcg

SEQ ID NO: 14019 - DNA, 506 bp, Setaria italica
  Peptide Sequence Number=SeqID_79993
tcaaatcagtccacttcggatgacagctcaaagttaaatcataagtgtgtgactactgaaagattgaagggctctagctttgtggtagacagggtggttgagaaggaagtgcatgatggagattcctcagagtttagtggcagcaaactggatagaagagattcatcttgtgcgagggcccaatcttttagtcctgattattctgatacgctttctggggaatcaaaagaagatttctatttcaagagagccaatagacattcagattccagggacttctttgaagacaccaaacttcaggatgagcatgtcaaatctgacttttaccgccattcaagtaagtcggacagagaaaacagcgaaagtcgcagtcgtagttataccccttccctgctgatgatagaaatcacaaggcaactaaacttttcagagggttgaagctccttttgatggacgaggcaagtccagtgattttttgtgagtgcaatagtgatcacgacctcgtg

SEQ ID NO: 14020 - DNA, 966 bp, Setaria italica
  Peptide Sequence Number=SeqID_79994
tatttaacatgctcgagtggtatgccataagtactcaatatttccaaagtttcctgaacccgcccatcaacttcttcacatttgaggtcaactatcttaagatgactgcatataaatgagtgttctgatcgtttgtaactactttcagttcccactcgatcttttggcaccttaggaagctggagaaccagcttctccataattggtgagtgttggaggaagcaagttaacacattacggtcagcagcaacaccaggacaccatgcactaaggaacaaagtctttaacttgcaaaatgtagggcacaactttaaatccctgttgacaataaacactgttgaatcaacggagagctccaactctgtaacttgagataaacctttcaaaagcaagcactcaccacgccgatcattagcaccatggtcaaaatcatagcatcacaaacatgtatgatcaccacaatccccataggtactcttagaacatttgttctcacagtctttaactctgacaatcaccaaaactaacaatggcatgttttcgagcagcggagtcctatgggtacactcacttaagaccagcgaaataagacctggcatataaatcctagcacgaaaggaacgtgtcacaaagtaacagcttgtaatgctgagatgtttcaagaatggggatggcacattcccattaatatcacattctttcatcttgaggttgaccagcgtaggacagcctgagaaatcgagagtgctccttttcaaagtcacctttgaagatccaatattttgaggtgctgggagatgataggcacatttggtagctccagaggcaggtcccaattttcaacatagatgccaaggctggtgtgcaatgagattacacgagcttggcacagcaaagcgatctggaaccccgtattcacatccacatcataggtggcaagaatggcttgaaactgaagtcacactc

SEQ ID NO: 14021 - DNA, 401 bp, Setaria italica
  Peptide Sequence Number=SeqID_79995
aactgacgtagctcccgagcgccaccgtgagcagcgccagcgccgagcacaggctgcgcatcgacggcggcgcctcgttgtagaagaactccgtctgcccgacgcacgcgaacacgacgctggcgcccaccaggaagtactggggcacctgccacaggatactcatcgacgaccggccctcgccgtgcgcgctcgccaggcgtcgcgtctcgaccaccgccgcggtcaccatcaccaggacggacaggagcagcccggcgccgaggcgctgcagctccgagatgccccgggcattggcggtgagccgcctggccaccgggacgaggacccgatcgtagacgggcacccagatgaggacgctgacggcgtcgaacgatgccagggacgccggcgggatggcg

SEQ ID NO: 14022 - DNA, 301 bp, Setaria italica
  Peptide Sequence Number=SeqID_79996
ctgcgtcacacggacggcgacacggccgctgcgacaccgcgttattcgtcttgtcttgttgtcgtgcgcctcctcctgcgggtggcagtagcagcggccgttggccaccgaggagcggagcctgccgtgcagtggactggaccctcccttgccgcagctccgctggtggagtggacgctccgctcggctgctccccgttctactcctccaaaggagggcaagaagctgcaaagctcacccaccctgcccatcgcgtcgtctctatcctccccaaatccgccaattcctcgcgagaaagcgg

SEQ ID NO: 14023 - DNA, 317 bp, Setaria italica
  Peptide Sequence Number=SeqID_79997
tatgtaccttggaacttgcatgagccagaaccacagagctgggaattcaagggctttgcagatattgaatcatatctgagacttgctcaagaattagatatgctggtcatgcttcgtgtaggtccatacatttgtggaggtggagagatggtggggtgtactacttccaaaagttgcaccattattgtacaacaatggaggtccagttattatggttcagttatacaactgatgggggcgacattggtaatttaaagaacggatcaattcctcaagatgatgtttcgctgctgttgagttttggaactgggtccaat

SEQ ID NO: 14024 - DNA, 478 bp, Setaria italica
  misc_feature (52)..(52): n is a, c, g, or t
  Peptide Sequence Number=SeqID_79998
gaatcatatctgagacttgctcaagaattagatatgctggtcatgcttcgtntaggtccatacatttgtggagaatgggacttaggaggatttccaccttggttgctcgccatagaacctgcccttaaactacgatcatcagattcgacctatctttccttggtattctgaccaaaacatgaccattctttgggtatatagcattaattttagatgtttatggagatattttgaccaattctaccacgctttccaggtggagagatggtggggtgtactacttccaaaagttgcaccattattgtacaacaatggaggtccagttattatggttcagattgaaaatgaatttggttcatttggagatgacaagaattaccttcattaccttgttcaactggccagaagatatcttgggaacaacattgttctgtacgcagttctgtctgctcatactcttagctatacaaatcattgt

SEQ ID NO: 14025 - DNA, 1255 bp, Setaria italica
  Peptide Sequence Number=SeqID_79999
aatgttgttatgaaaagatgtgtgtggatatgtaaaccacaaccacagctattcttgtgggcagcatccatatgaaattctaaaaatatttactgcacaaatataatttataccgttgtgccagtgtgtgtggttgatagtagggatgctattaagaatttagctgaaatgctacaacccacatgctaatcattcaatataaggaaattgggtatattgaactgttagattcttcaaatagtatatatgaaagcattctaatgcaacttcaagtgtttgttgatacactacatgcaccaacacactaatattatgtagttacaaagaaaaaggaaaagaaagaaaataggggaaaaagaatccagacttgtgagttcatgttccttatgatttggttctaaacttctaattaccaaggccgtgattatgtctactcttaaatcatctttcagttatacaactgatgggggcgccattggtaatttaaagaacggatcaattcctcaagatgatgttttcgctgctgttgattttggaactgggtccaatccatggcccatattcagattacagaagaaatacaacttaccaggaaaatcagctcctttaagttcggaattttatactggatggctaacacactggggtgaagtatagcaacaacagatgccgctagtacagctaaagcccttaaaacaattttgtgccacaatggttctgctgtactttatatggctcatggtgggaccaattttgggttttataatggtgcaaatactggccaagatgaatcagattacaaggcagacctcacttcatatgactatgatgcaccgattaaggagcatggagatgtacataattcaaaatacgaagcactgagaagggtaatacataaatgtactcggactcctcttcatccacttccttctgacattgaaaaggcaaattacgggcttgtgaagttacagaaggttgcttctttgtttgacatcattgataatatcagtgatcctttgaaaggtgctgtttctgagcatccactgtatatggaacagataggccagatgtttggatttctattgtacatgtcagaataccaagggaaactcccatcaagcatcctatcaattccaaaggtagtggccttcaatttttgttttctctgcatgaaagaaagttcatctcttctaagatgtaaattctgggttactgcaggtacatgacagagctcaggtgttcctgtcatgctcaa

SEQ ID NO: 14026 - DNA, 645 bp, Setaria italica
  Peptide Sequence Number=SeqID_80000
ggccggcttggggaccacagtgtgccctttatgttcctgctccgatcctcagacctggagacaacactattgtaatctttgaactgcacggtccgaatcctgaactcacaatcaacttagtaacagatccagatttcacatgcggtccaaatcagtaagaacggtcgcacgtggtgtgctgagcacagtgcagcggattctgtctccttcctctcgcttctcttctctacgttggtgctcgcgtgctgctatccagaaaagcaagaacgcggagtacccgaggaggagcacgaggaggagttcgaccgtgagccgaagcccgaggaccagtaccgtgagcaggagctcccggagggctttgagaacgaggaggatccggactacgtcgccgaggatctcgagtaggaggttgcgtgtgcacccaacgttgcctgcggtgttggcccttttgcaggatgcttccgctgatgcatagttccgattgcagcccggagtccgactggactacaacttggatttgtattgtcatcgctttagttctactttgggtgtggctttcccgcctgctccttcgggagctgtacggtttctgaactatctattgaataaatgtgttatcagcctcctgggactgataattggatc

SEQ ID NO: 14027 - DNA, 349 bp, Setaria italica
  Peptide Sequence Number=SeqID_80001
ctgatgttctccggctaccctgggtcttattctacaatgaatgcccattgaaggcagaattctcaaccctatggagcactaataaggctgcagcagcgcccatggttgactgggaagagttggtcttgctgcgagtcttcatcttcagaatcctcaagtgacaactctgaggagcaggatgaatgtggtatagttgatgcactgacgacagcaataacacaggtgaggatatcagagcccaagaggagccggcaatgcagcccagccaccgcggtattcccgccgagcagggatgctcttcgaacctgaatagaatccgtgtgcgacattctgacctgaccctccctag

SEQ ID NO: 14028 - DNA, 310 bp, Setaria italica
  Peptide Sequence Number=SeqID_80002
ccggcaactcgtggccgcgatccacgccaggttcccctctgtgagcctcgagtttattgagaaggctctggaagagggtggaaatgattttgatttagcaacaaagtacttgcttaatttccatgcacaatctgccgaatgtgatgcagctaatgggtaccaatctcccaacgggatgactactgaggatcaagttcctgcagaaggtattttggttgacaatgtggttgctgcacctgtagatagtgttccttgggcagaaaaccttccgtcaagcagcactcaatggtctgaggttcttgtgaaggag

SEQ ID NO: 14029 - DNA, 454 bp, Setaria italica
  Peptide Sequence Number=SeqID_80003
cgacccggcactcgtggccgcgatccacgccaggttcccctctgtgagcctcgagtttattgagaaggctctggaagagggtggaaatgattttgatttagcaacaaagtacttgcttaatttccatgcacaatctgccgaatgtgatgcagctaatgggtaccaatctcccaacgggatgactactgaggatcaagttcctgcagaagatagtgttccttgggcagaaaaccttccgtcaagcagcactcaatggtctgaggttcttgtgaaggagatgatgagtgcctccaacacggatgatgcaaaggctcgtgcttccggagtactggaggtttttgagagggccatgacctctcgtattggtgcagaagcacttcaaaatttcccagaaggaaaattttggttttactaaggtaactaagctgttattagggagaacgctattctgaag

SEQ ID NO: 14030 - DNA, 939 bp, Setaria italica
  Peptide Sequence Number=SeqID_80004
ttaccttaatttagttacttaatttcagggaatagaactacctcgaaggatcaagttcctgcagaaggtattttggttgacaatgtggttgctgcacctgtagatagtgttccttgggcagaaaaccttccgtcaagcagcactcaatggtctgaggttcttgtgaaggagatgatgagtgcctccaacacggatgatgcaaaggctcgtgcttccggagtactggaggtttttgagagggccatgacctctcgtattggtgcagaagcacttcaaaatttccagaaggaaaatttggtttacaaggaacaatttgaagctgttattagggagaacgctattctgaagaaagcagttgcaatacagcatgagcgccaaaaggagcaagatgagagaagccaggagcttcagcagctgaagcagttggttgttcagtatcaggaacaagttagaagccttgaggttaacaactatgccttgtccatgcatctcaggcaagcgcagcaaggcagctcgattccagggcacttccagcgtgacattttctgaataagtggaaacctgaactggaggtttccatagcatcaggatagcatttcaccctttcagttagtggcatgtcttgttattggcctatatttaacatatatagccaaatgataacgtatcttaatttatgttgtataccagtgtaaatgtatgcccgttgttggcacgctgctgccctctgcagttgggagctgggagagcaagcagcccaacatcggcgtattgttgtccaaaaacagatgttactatgttatcgatttagagagagaaaagatgaaacggcgttaagttatacttgtgtgtacgttatttcggtcagaaatttagttgagtttaaataacaaaaaaaaaaaaaaaaaaaaaactaaaaaaagagaactagaccaaagg

SEQ ID NO: 14031 - DNA, 304 bp, Setaria italica
  Peptide Sequence Number=SeqID_80005
ccgtggacacgtccaaggagtcgcggtcgccgagggacaacgacggccacgggacgcacacctcgagcacggcggccggcggcgccgtccagggcgcggacctgctcgggtacgcggccgggacggccaagggcatggcgccccgcgctcgcgtcgcgacgtacaaggtgtgctggacgggcgggtgcttcagctccgatatcctcaaggccatggaggccgcggtgaccgacggcgtcgacgtgctctccctctccctcggcggcggcaccgcggactactaccgcgacagcatcgcggtggc

SEQ ID NO: 14032 - DNA, 861 bp, Setaria italica
  Peptide Sequence Number=SeqID_80006
ccactccgttggcctcgctcactcactcactcactcacaatgtggcgccatggcgagagatgcgtgatccttgctgtggccgccgccgcacttttggtggcggcggccgcggccgggcgggacggccggcagacgtacatcgtgcatatgtcccactcggccatgccgaatgatttcgtggagcatggcgaatggtacgcggcgtcgctgcaggcggtgtcggaggcggccaccgtgctctacacctacgacaccctcgtccacggctactcggcgcggctgacgcgcgccgaggccgaggcgctggagtcgcagcccggcgtcctcatcgtcaacccggaggtgcggtacgagctgcacaccacccggacgccggagttcctggggctggacggcacggacgcgctgttcccgcaatcgagcaccgggagcgacgtcatcatcggggtgctcgacaccggcgtgtggccggagaggccgagctacgacgacacggggttcggccccgtgccggcgggctggaagggcgagtgcgagaaggggaacgacttcaacgcctcctcctgcaacaagaagctcatcggcgcgaggttcttcctgacgggctacgaggcggccaagggccccgtggacacgtccaaggagtcgcggtcgccgagggacaacgacggccacgggacgcacacctcgagcacggcggccggcggcgccgtccagggcgcggacctgctcgggtacgcggccgggacggccaagggcatggcgccccgcgcgcgcgtcgcgacgtacaaggtgtgctggacgggcgggtgcttcactgagacacgcaacaggagataggcaaggcacacaggggatagg

SEQ ID NO: 14033 - DNA, 2007 bp, Setaria italica
  misc_feature (1839)..(2007): n is a, c, g, or t
  Peptide Sequence Number=SeqID_80007
tactagtacgacgccccgcgcgcgcgtcgcgacgtacaaggtgtgctggacgggcgggtgcttcagctccgatatcctcaaggccatggaggccgcggtgaccgacggcgtcgacgtgctctccctctccctcggcggcggcaccgcggactactaccgcgacagcatcgcggtgggcgccttcagcgccatggagaaggggatctttgtgtcctgctcggcaggcaatgccggcccgggggcggcgacgctgtcgaacggcgcgccgtggatcaccaccgttggcgcggggaccatcgaccgcgacttccccgcccatgtcaccctcggcaacggcaagaactacaccggcgtgtccctgtacagcggcaagccactgtccaccacgccggtgccgttgatctacgccgggaacgcgtcgaacagcagtatgggccagctctgcatgtccggcagcctcatcccggagaaggtcgccggcaagatcgtcctttgcgaccgcggcaccaatgctagggtccagaagggcttcatcgtcaaggacgtcggcggcgccggcatgattctcgccaacaccgccgcgaacggcgaggagctcgtggcagacgcgcacattctcccgggctccggcgtgggggagaaagccggcaacgccattagagactacgccatgtccgatccgaaggcgacggcgaccattgtgttcgccggcacgaaggtcggcatccagccgtctcccgtggtcgcggccttctcgtcgcgggggccgaacaccgtgacgcccagcgtcctgaagccggacatcatcgcgcccggcgtgaacatcctcgcggcctggtcgggctccgtcggcccctcggggatccccggcgacagccgccgcgtcggtttcaacatcatctccggcacctccatgtcgtgcccgcacgtgagcggcctcgcggcgctgctccgcgcggcgcacccggagtggagcccggcagcgatccgctcggcgctgatgacgacggcgtacaacgagtaccccaacggcgacggcatcctggacgtggccacgggccgccccgcgacgccgctggacgtgggcgccggccacgtcgaccccgccaaggccgtcgacccgggcctggtgtacgacctcaccaccgccgactacgtcgacttcctgtgcgccatcaactacggcccgatgcagatcgcgacgctgacgaagcggtcctccgacgggtgcgtcgccaaccgcacgtacgcggagtccgcgctcaactacccgtccttcgccgtggcgttccccgccgccggcggcacggtgaagcacacccgcacggtgacaaacgttgggcagcccggaacgtacaaggtgaccgccagcgccgccgccggcagcaccgcggtgaaggtgtccgtggagccgtcgacgctgagcttcagcaaggccggcgagaagctgagctacacggtgagcttcacggcgccggcgatggcgtcgggcaccaacgggttcggccggctcgtctggtccagcgaccaccacgtggtcgccagcccgatcgcggcgacatggaactaaccggtggctgtagcagactagcatcgcttagcagaagcgtactagatctcgagataaaaccagagcgagatggcaacgactaaaatgagcgagcgccattctcgaatgcgagagagacggtggaaggatgtcgtccaagagtgttgttgtatcagtcagtcgattagggtggcgatttcaacgcatgtttccccgcctctccggtgtgtaagctgccggtgtactctgtaactgacccgattgtcgtgaagcagcaattaagccaaatnnnnnnnnnnnnnnnnnnnnnnnnnnnnnnnnnnnnnnnnnnnnnnnnnnnnnnnnnnnnnnnnnnnnnnnnnnnnnnnnnnnnnnnnnnnnnnnnnnnnnnnnnnnnnnnnnnnnnnnnnnnnnnnnnnnnnnnnnnnnnnnnnnnnnnnnnnnnnnnnnnnnnnnnn

SEQ ID NO: 14034 - DNA, 480 bp, Setaria italica
  Peptide Sequence Number=SeqID_80008
tagtactaaccttaccgcacctccaaatcgatagggtttttgctctcccccctagcccgccgccgcctcctccgccggcgccgccgatcgcggtaaaagggaggctcaaggcggcggcaacaggcgggagaaatggcgcagtcgctggagctactgctgatccagttcctgatgccggacaacgacgcgcgtcggcaggcggaggagcagatccggcggctggcgcgcgacccgcaggtggtcccggcgctcgtccaccacctccgcacggccaagacacccaacgtccgccagctcgccgccgtgctactccgcaagaagatcacctcccactggcccaagcttcacccggactccaaggcgaacctcaagcaagcgctcatcgactcaatcacgctcgaccacagccatcctgtaaggcgagctagtgcaaatgtcgtgagcattatagctaagtatgctatccctgcaggagagtgg

SEQ ID NO: 14035 - DNA, 307 bp, Setaria italica
  Peptide Sequence Number=SeqID_80009
ttgaggtgctgccaatgctttgcattcttgatgccacgattggtctggtgagtccattgatgagagcaatgaactgcgcttccttttctgcataggatgagcatgtgacaagtaagtgcacattgtgctcatcgtctttagcagagaaaaggtacatggtaagcctttctctgtttgcttctagcacaatgcactcatcaatcatatttcgaaggtcatcatcggaggtgatggaaatgagcatgttcagttgctcccctgggagatggtacttgattgtgtgatcccgcctaattagctttgttgt

SEQ ID NO: 14036 - DNA, 310 bp, Setaria italica
  misc_feature (303)..(303): n is a, c, g, or t
  Peptide Sequence Number=SeqID_80010
tggcggccgctcctcctcgccagcacggccggcgtggccgcgtcgatggcgtcgctggggacggcgctctgtgttggctcgacctcgccggtgagcatggcggccaccatcgcgtcagtgctagcgttcatagcggcgttctcgatcgggttcggccgctggccggcacgtacagcgccgagatcatgccgctgcggctgcgggcgcagggggcagcctgggcatggcggtgaaccggctgacgtgcgcgctggtgagcatgacgttcatctcgctggcggacgcgatcaccatgcccgggtncttctcc

SEQ ID NO: 14037 - DNA, 508 bp, Setaria italica
  Peptide Sequence Number=SeqID_80011
tttagactaggtcttgctattcttctttggccatttgctgtagttggagctgttctggcgtccatcctctccagtattcctttaggtgcttatggtgcagttgtggcttatcaggaatcctccttcatcatgggtcttgcctatgttgcttcgtcagtgtccatctttgatgaatacacaaatgatgttcttgacatggcaccaggttcttgctttccaagatttaaatatcgcaagagcaaggatgagtcttcacacggacacagtgttccgatatctaggccatcatcattcaacaaggagaagcaagaaggaaaagacctccatctcgtgttacttcatttaaaaacagtatcgatgagttcaatcctttcaagttgctggaccacctatttgtggagtgcaggaaccagggggaggagttggttaacaaaggagttataacaatgaaagacatcgaagaaacgaagtcaggcaaagttgggagtggtgttcttaatgttggtct

SEQ ID NO: 14038 - DNA, 953 bp, Setaria italica
  Peptide Sequence Number=SeqID_80012
tttgtttattttgtttagtttttctttaattttccttttttctttaagtttttgttctttggttaccttacctttattttgttggagtgcaggaaccagggggaggagttggttaacaaaggagttataacaatgaaagacatcgaagaaacgaagtcaggcaaagttgggagtggtgttcttaatgttggtctgccagcatatgttatcctgaatgcgctccttcggtccgcaaaagctaattctgtcggcctagttttaagtaacggctctgagattacatctgacaatagacctagacatactctcttcgattggttctttgagccgcttatggttatcaaagagcaaatcaaagctgagaatttcactgaagaagaggaggaatatctgaaaatgcgtgtactgctggctggtgatcccagtcgcctgaagggtgctcttcctaatatgccatccttgaacgagcgtaaaaacgcagaaatcgacgcatttgcccgcagattgcaaggaatcaccaaatcaatatcaagataccctacagcaaagcgtcgtttcgacgtccttgtgaaggcgctgctgtcggagctcgagaggacaatgggcggcagccagtctactaatggatcccactcccaggcgcagaggctgcggaactcggtggcccggatgctgagccagaaatccatgggcaagacggctaacatcagggacgaagacccagaagcgcaaataacaacctcgtctcgcactccgtgacatttgtaaattcgacgatgcagtacgatgctagtgtagagaggctttcacatgcaacgccaagctttgtacaaaagtagttgctgcggctttgagctgattctaaccgttctcctgtatgatttttacattttgtgcactgtatgtatcatgtatgcaatgaaatgttccataacgtggatgacccaaaaaaa

SEQ ID NO: 14039 - DNA, 811 bp, Setaria italica
  Peptide Sequence Number=SeqID_80013
gccgtttcctaacaagcgccgagcctgacgagtgctgaaccggcgagcgcttgcgtgagcaccatcaccagcatcaacaacagctgcggcggccgcaacaacgcgtcggccatgtccatggcgccgccgccgctgaagcctgcaccgcaggagccgcagctgcccaaaagcgcggcgtccgggaacagaactgcagagaagcggcaaagagttccttcggcatacaaccgattcatcaaagatgagatccagcgcatcaaggccagcaacccggacatcactcacagggaggctttcagcgcggctgccaagaactgggcccatttcccacacatccatttcggtctcatgccggatcagggcctcaagaaggcctctatgcaaaatcacgagggaggtgaatgcatgcttttcaaggatggcctctacgccgccgccgccgccgcagcatctagcatgggcattgctcccttctgatcttcacggaccgggatgatcgacagagttctgcctttgtgcatctagcaatagggcacagcttagtgtttctgcctcgttccctcgatatcttgttgctagctagtttagctttaatgtttcctccggaggatctgaaacgtatctctcagtaaccgcatgtcggtatctatgcgtactcttcttcttctagttctgcttccgttccgttttttcagtttttctgtaacctggactcctggagaggttgacatgtgcgtatgctgcctcttatataatatattggtaattctagctgttactaagaactaaaggaaaaaaaaaaaaaaaaaaa

SEQ ID NO: 14040 - DNA, 428 bp, Setaria italica
  Peptide Sequence Number=SeqID_80014
ttttttttttttttttgttattttgttacccttttgtactttctttgcacttctcaaaaagtcaaaatgtacactggtaagtgggtaagaaataagaataggactactcactgaagaaacaactaccctcaactacgaggagaacaaatgtaaaaagaagaagaagaagaagaattactgtacgacgaaaaccattaacgaaagacagagctcctgacatgttgattcagaaaaaaaaaacaaaaccattaacaccttttctttccccagaaacaatctgtaagcaccttgagttgttgttagctgcagactgcggagcgtcgcgccatgatcttccaaggtcatggaatgtgtgtatggtagtatgtgtgcagtatgcatcgtctgttacttcatctctacagatttctgcttcattttgtacattc

SEQ ID NO: 14041 - DNA, 457 bp, Setaria italica
  misc_feature (442)..(457): n is a, c, g, or t
  Peptide Sequence Number=SeqID_80015
cttgtggcctgtgggtgcaagcgtgttgctcaagtccaacttggggcaatgtgccgttgatgggtaattgggtgtggcgagttggccattgaacttgaggtctgaagcctgaaagtagtcgccttcaggtgagggtcgtgaagtggaatacaagtttggaaataatatgtggtacgctgcatcatgcatgcagtctttcccttgcagccatgccatttggcttggtgccatggtcgtcatttagattctgccggcctttattgagcatgtaattgttggataaaacgttcttcacttgtcttgtgctgaattgatgtgtcaagcacaagcaacttgtcctggttgtgggtactaaactgtggtacgctgcatcatgcatgtttcttgacgttactatcataataagatacttcggtattccccgttgctctttaaaaaaaannnnnnnnnnnnnnnn

SEQ ID NO: 14042 - DNA, 456 bp, Setaria italica
  Peptide Sequence Number=SeqID_80016
aagaatggaactggcaagactgctgcattttgtattcctgcactggaaaagattgatcaagataaaaatgctattcaagttgttatattggttcccacaagggaattggctctacagacatcgcaagtttgcaaggagcttggtaagcatttgaagatccaagttatggttaccaccggtgggaccagcttgaaggatgatattgttcgtctgtaccaacctgtacatttacttgttggaacacctgggcgtattttggatcttacaaagaaaggtatttgcattttgaaggactgttcaatgcttattatggatgaggtaatttatttgaacctttgtctaaatgctattgtattgctacttacataaatggccagttttactagtcttgtgctacatgttattcagcgatgtatcttgccacttttaatccattaatgtctaaaataacctttt

SEQ ID NO: 14043 - DNA, 695 bp, Setaria italica
  Peptide Sequence Number=SeqID_80017
taatgtcgccaaaaatcggcctgtcctcaggctgtttgccccaagcttgtcagacatgttgcgttggacaatgtaacatctggcattttctacaggacattttaaccccggtacctctctgcgttgtgatcttggcgcgaagaaactgatcattgcacctaagtcatgtagtgtccattgtgtcagttgtcaagctatatagctcttggacacccaatcatacttccaatctccagtattttgtgcttaagtcatcctatctgttccgatgtggcagtcctgtattttctagattgggtcagtgttctagtgtgtgtttacccagatcagggttttcatttgcttccttttttccccataatgtgagaatgtaccttttgctgtcgtgattctagtcgaaacagttttagacctgtggtctttgtactccctgctggggggatgcgaaagtggcactaggctgaagtactgttgctgtgtttgcattctgaaaggacgaacatgttattgtgtcttttttgtgaaaaacatgttattgtgtctgccatcaggtgatagttggcaccctatcaatagctggttggattctgcattggcatcctgttttgcaggagtttagcattacaggtatcgctggaatcgaactgagttcttttttttaatttaaatctattttgtattaatttaaaaaaaaa

SEQ ID NO: 14044 - DNA, 1931 bp, Setaria italica
  Peptide Sequence Number=SeqID_80018
agcgtcagccgcagccgcagccctcgcagcacctcagccagcaacagcaacagcagcagtggcttcggcgtcggcagatcgctggcgaggccgcgggtgctggcgcacagaaggcaacgcctgccgtggacggcatcgattcaagttcacaagattggaaggctcagctgaagcttccacctcaagatacacgatacagaacagaagatgttactgcaaccaagggaaatgaattcgaagactattttctgaaacgtgaacttcttatggggatatatgagaaaggatttgaaaggccttcacctatccaagaagaaagcatccctattgcattaactggtagtgacattcttgcaagagcaaagaatggaactggcaaaactgctgcattttgtatacctgcactagaaaagattgaccaagacaaaaatgcgattcaagttgtcatattagtccctacaagggaattggctttacaaacttcgcaagtctgcaaagaacttgggaaacacttgaaaattcaagtaatggtcactactggaggaaccagcctaaaggatgatattattcggctttatcaacctgttcatttactagttgggacacctggtcgaattttggaccttacaaagaaaggcatttgcgttctgaaggattgttcgatgcttataatggatgaggcggataagcttctttctccagagtttcaaccttctattgagcagttgattcgataccttccatcgaatcggcagattttgatgttctcagcaacatttcctgtgaccgttaaggaatttaaggataaatatctgcctaaaccttatgttattaaccttatggatgaacttacgctcaagggaattacacagttctatgcttttgtggaagaaaggcagaaagttcattgccttaatactctcttttccaagctgcaaattaaccaatccataatattctgtaactctgtaaaccgtgttgaacttttggcaaagaagattactgagcttggttactcttgcttctacatccacgctaaaatgctgcaagatcatcgcaatagggtatttcacgattttcgcaacggtgcatgcaggaaccttgtgtgtacagatctttttacgaggggaatagatatccaagctgtcaatgttgtgatcaactttgatttccccaagaacgcagaaacatatcttcacagggttggtagatctgggagatttggccaccttggtctggctgtgaatttgatcacatacgaggatcggtttaacttgtatcggattgagcaggaacttggaacagagataaaaccaatacctcctcagatagaccgggctatatattgccaatagtgatattagagagtgatcttgtagccactctcttgaaggaataagacagcttgtgtaaatatcagctcaccaggtttcattctgttatatcgtatggtgtattttaacccaaagttgtggggcaatcggtaactagtgacatgtagccaagctcatctaaattcagactcggtgaagcgtttggatgatcagttgatcactgctagacattagttaatgtcgccaaaatcggcctgtcctcaggctgtttgccccaagcttgtcagacatgttgcgttggacaatgtaacatctggcattttctacaggacattttaaccccggtacctctctgcgttgtgatcttggcgcgaagaaactgatcattgcacctaagtcatgtagtgtccattgtgtcagttgtcaagctatatagctcttggacacccaatcatacttccaatctccagtattttgtgcttaagtcatcctatctgttccgatgtggcacaagtacctagtaatttactaaagaattaagggtaacaaagtaagttaactaaagtaagtaagtaagtttaaacccaaagaataaca

SEQ ID NO: 14045 - DNA, 2071 bp, Setaria italica
  Peptide Sequence Number=SeqID_80019
taaaaaacaaaaaaaataaaaaacaaaaaaccaaaaaaccaaaaacaaaaactaaaacaaaataacaaccaagacaagacagcaccacaatcaccaccagcaacagcagcagcagcagtggctgaggcggaaccagatcgcccgcgaggccgctggcgcggccggtaccagcgagccgaaggccctggcgccatccacggccgccgatggcgtggattctagttcgcaagattggaaagcccaattgaagctgccgcctcaagatacacgctacaggacagaggatgttacagccactaagggaaatgagtttgaagactactttctcaagcgtgaactcctgatggggatatacgagaagggatttgaaagaccctctcctatccaagaggaaagcattcctattgctttaactggtagtgacattcttgcaagagcgaagaatggaactggcaagactgctgcattttgtattcctgcactggaaaagattgatcaagataaaaatgctattcaagttgttatattggttcccacaagggaattggctctacagacatcgcaagtttgcaaggagcttggtaagcatttgaagatccaagttatggttaccaccggtgggaccagcttgaaggatgatattgttcgtctgtaccaacctgtacatttacttgttggaacacctgggcgtattttggatcttacaaagaaaggtatttgcattttgaaggactgttcaatgcttattatggatgaggcagacaagcttctctctcctgagtttcaaccttctgtggaacagttgattcgctacctccctgctagccgacagattttgatgttttcagcaacattccctgtgactgttaaggagttcaaggacaaatatctgcctaaaccttacgtgattaaccttatggatgaacttacactgaagggaattacacagttctacgcgtttgttgaagaaagacagaaagttcactgtcttaacaccctcttttccaagcttcaaatcaaccagtcaataatattctgtaactctgtaaatcgtgtcgaactattggcgaagaagatcacagagcttggttattcttgcttctatattcacgcaaagatgctgcaagaccaccgtaatagagttttccatgatttccgtaacggggcatgcaggaaccttgtttgtactgatctttttacaaggggaattgatattcaagctgtcaatgtcgttgtcaattttgatttccccaagaactctgaaacctatctccacagggttggtagatctgggagatttggtcaccttggtctggctgtgaatttgatcacctatgaggatcggtttaacctgtataggattgaacaagagcttgggactgaaataaaaccaattcctcctcagatagaccaggctatatattgccaataatctgacaaagtttccaccttcattcatttctccaggagtaataaggagacaacttttgtaaataccagctcatcagattttatggtgtgaattcctgtggcgcatcgagacaattttatgttggtggatggcgtgaaacgaggcatccaacttttctgaaaaccttgttatgctgacactattatggctatctgagggcgaacgtcctgccacatttaggcacagagtagtgtatattgctaggtgcctgttcctagggccgtcgtggtctagtttctttgtatttctcttatttttcgtcaatctgtgtctttagctgtttctcacaggacattttaaccctgttgctggttctgggcttgtggcctgtgggtgcaagcgtgttgctcaagtccaacttggggcaatgtgccgttgatgggtaattgggtgtggcgagttggccattgaacttgaggtctgaagcctgaaagtagtcgccttcaggtgagggtcgtgaagtggaatacaagtttggaaataatatgtggtacgctgcatcatgcatgcagtctttcccttgcaagaccaattagacccaatttaggacttaggtagaccaataggtacgtacaattttaagtaatttacttagtacta

SEQ ID NO: 14046 - DNA, 202 bp, Setaria italica
  Peptide Sequence Number=SeqID_80020
caagtgcgagatgacccggccctcaagctcaatatttggacgttgcaacactctgaatgagatgttccgtgtatttgcttcatttgtgttcagctacccttttttctcttgttgggggatttgtttatatcatgaatgttgcaatgggttgatttgaatgtcgtgaacacagattctatttgtttcaattacagaaactgta

SEQ ID NO: 14047 - DNA, 238 bp, Setaria italica
  Peptide Sequence Number=SeqID_80021
gatcttgaggtcacaatttgcgtttaggaacaaattgctaggctttagatcccggtgcaatatatttgctgagtgcacatattttagccctcgtagcaactgatacaagaagtactggcaatgatcatcagtcaatggctgatttgaacgtatgcccacccatctcctctcctctcctctctctttccacccctgcgtccgtgcgctgcgttggttgggggcaaactggccggggcaa

SEQ ID NO: 14048 - DNA, 405 bp, Setaria italica
  Peptide Sequence Number=SeqID_80022
gggttttaagtcgctgtcaactcagatatacaggggttgttcaagtaatcgtactacaaaattacaatcatagatacataagaatagtttatgaaatcaaccggtataatacaagcctgggttcaggcatctgaaaagaaatacaaacatcgtttgttctcacaagcctttaagagaattggtattgcggcaacaacccatgtccgtgtgcccaacaagcagtgtgaaaaataatctatgcacacagacataagtttttgcatccgctggagctagagatcttcagatgccttgcagataacttatcctgcactcgcacaaagccaaagaacggggaaggttagaggactcaacatcaggaatacaaatgtactgttttggaaaaccaacaataactattattaa

SEQ ID NO: 14049 - DNA, 1711 bp, Setaria italica
  Peptide Sequence Number=SeqID_80023
tttttttttttttaggcaaagacaatctagaacagtaagctcataatgtagcgtatttgtgacaatacaattgggaagcgctgtcaactcagatatacaggggttgttcaagtaatcgtctacaaaattacaatcatagatacataagaatagtttatgaaatcaaccggtataatacaagcctgggttcaggcatctgaaaagaaatacaaacatcgtttgttctcacaagcctttaagagaattggtattgcggcaacaacccatgtccgtgtgcccaacaagcagtgtgaaaaataatctatgcacacagacataagtttttgcatccgctggagctagagatcttcagatgccttgcagataacttatcctttgctcttagtagggaggatccgggttaaaggctaaagattccctccagatgagttcttttatatgtgcttctgtaaaggatggttgctcaaaatcaaagctgaaaggtgcagggcaggtaggttcttcattaatgtcatgaagagaagccaagtatgggtgatgcagagcctcatcaactgtgatccgcctgcttggatcaaacacgagcattctctccaacaaatcgactgcaccggcagacatgttgcggaaacgcaagcggaaatcctgccttggaaactgtggtagttgtttcatgtatctttttgcattatcacttcgaaggaatcccaggcttgcatcatctggtgagcctattagctcagtgatcagttttaattgctggatgtaatcccgtccaggaaacaggggttgccgagtaacaatttcacctagtatgcatccaactgaccagacatcaatggcagcagtatactgtgaacagttcaacagcagctctggtgccctgtaccaacgagtgaccacatactctgtcatgagatctgtctccgaagtggttcttgcaagcccaaagtctgcgatcttgaggtcacaatttgcgtttaggaacaaattgctaggctttagatcccggtgcaatatatttgctgagtgcacatattttagccctcgtagcaactgatacaagaagtactggcaatgatcatcagtcaatggctgatttgaacgtatgatctgatggagatctgtatccattaactcagtaacaatgtacacgtcattaaagttctctctacttggtgggcgtatgacgtcctttaaggcaaggatgttctcgtggtccatgtggcggagaagcttgatctccctcagcgtccgcttggcgtcgatgtggttgtcgaacgcattgccaaccttcttgatcgcaacctcctcccctgactccgagttaacagccgcgcagacaatgccgtaggcgccgcggccgatggggcggatgggcggggcgtacttggaggagacctcgaagaggttcccgtacacgttgtacagcacgtagcgcccgccgtgcgtcgccatccccttgatctgcgcgccaccgccgccgccggaggaatccatggcttcttcttcgccgccttcctcacagccgctcgcgaagggggagggggagggggaggagggctagggttgtgtggcgctaggattggtgctgcttgaccagcgtctagtcgtcggtgggcgtggggggactctggtggaagaagcctttccccctttttgacttgggcggcgactgtggaagtggggggtggggggatggatgtgggag

SEQ ID NO: 14050 - DNA, 405 bp, Setaria italica
  Peptide Sequence Number=SeqID_80024
gcccctactcgtggggctactgcttcaagcaggagcaaaacccggggtccgactactgccagcccagctcgcagtggccctgcgccgccggaaagcagtactacggccgcgggcccatgcagctgtcctggaactacaactacggcccggcggggcaggccatcggcgccgacctcctcggcaaccccgaccaggtggccgccgacgccaccatcgccttcaaggcggccatctggttctggatgacggcgcagtcgcccaagccgtcgtgccacgccgtctccacggggcagtggagccccacgagcgccgaccagaccgcggggaggctgcctggctacggcgccatcaccaacatcatcaacggcggcctcgagtgcggccgcggcgtcgacagccgcgtcg

SEQ ID NO: 14051 - DNA, 359 bp, Setaria italica
  Peptide Sequence Number=SeqID_80025
cgtcatcctggagggctccatgtgccagtccgacagcttgaggttcttctccagctcgtccagcacggcgcggccgccggcgtggatgcagaagtgctcgaacgccagcttgaagtcggggatgtagggcttgaccttgcgcttgaggacccttcgcgcgacgagcgtggcgaagaagagcagctgctccgacatgggcagcaccagcgggcccagcgtggtgatgttggtcttgagcgcgtccccggccacggccatcaggtccttggacagcgacactcccaccttgccggcgccggcgtcctcgcgctgcgtcacgcagccgaagcaccggtcgtcggcgcccttgtgggtgcgca

SEQ ID NO: 14052 - DNA, 771 bp, Setaria italica
  misc_feature (732)..(732): n is a, c, g, or t
  Peptide Sequence Number=SeqID_80026
tgttcgtaattcttccgtctaaagtcgtaattaaagtaagtcttgtctaagttatttttgcattcccattcttcttgtgcagcaggggggaagctttttcggtcaactaatgataacttctgaagataagcaagtatttcctttgggttaagcgaattaacagaaccagtagatgaagcaagcctgcaatcatcctcaatccaagcttttatcatatctagtatgcatagaagaatgctaggatcagtgcctctctctgaaaggagagcttgaagtatttggcccatagattttctgtggtcagaagaggtcatcaccctctcacttatgagctttaagacagtcttcatgtttgatatgacagtagaatctacagtagggcgtgagttaactgatgaatccagttcaggtctctgtccttgtcgtatatggctgccagcagaagatcccatatcacgtgcaagacgttgcagtacacggaaaagaaagccgatgaaaggatcaacgaaattcttctgtacttctgcaagtgcattgaggacaaacagtgaaaagtttatgatagagttagcattgctgagctcaagtgctatctgcgaagttgtaacagcagcaagactcttctgaatcagatcttgaaccctttgatgcaacaactttatatcttgaggtgttgtggatgctggaaagtcgctttgttccttgctcaagatggtattcagtgcttttccncttgaagcagccacaacaactttatatcttgaggtgttg

SEQ ID NO: 14053 - DNA, 501 bp, Setaria italica
  Peptide Sequence Number=SeqID_80027
acctctcagacgaaatatttctgctttgttcttcacagggaaaaattccaaattggtattatttattaagttaaggccactgactagttcgcctttcatttccaagtaagccttagcttgttcacatatcttcacaaatgcttcctgaacttccatggtagcatgaccatacatcttgtcaagtatagttacacaaacttcaggtagaccttgcttacgagctatgtgagcgagcttattcacattccaagccttgtctcggtacccaagatggtgaagttgaggatttgtttggccaaagtccttaaacgcatctatcactgaattgtacatttcattcctccattggagcagatcataccaaactgtcatattatcccattcattgggtgtacgaagtctccaggtttcaagaatatccttgaggtcagcaaatgaattatttgggttggaattggcaccagagcttgctgaaactggtttgttcccatttgcaatgtt

SEQ ID NO: 14054 - DNA, 2445 bp, Setaria italica
  Peptide Sequence Number=SeqID_80028
ttctttcacttcaaccaactgttgaaactgctgcagcagaggcattcgagactgcacagacatttcaggcaactgccaccactgttctagtgcaagttcaacacctttgctgacaaggttctcagcttcactaacaccattagtacttttgtcatggagagtaaaaaaagcttgaatcagacgtagctttggtgtctcttctacctgtgctttggaaatcacattctccttcatatatgcccaatcaggaaccttccataagcagtctaaaagaatttcatgattctccacacctttcccataatcagctaagacttcccactggcctaattgagccgcacaggatagccactgttcttcccaaagacacatttcagcttttgggacagtgttattgtatgttccctgagtagctttaatcatagcctggtaaaatagattttgtgcctgttgccagtaaccatgctggacaagtgaaagcccagctctggtttctgcagtgattgatcttctcttccataatccacacctcatgtcttcttcattaagaagtctgtataactcagccaatgactcagagcacttagcctcattcataagcaccatatgactctcaagtaatgcaattgcaatataccatgcattgcaagtttttccaatatatttgataagctcactaggcatgcgtggttgagggtggctcaaatgaagaccttcaagaagtgcctgggcaacgttaggtctgcatccctgctgcctcttgtggtaatctttcgataaaagagcaattattggcttagctagagcaacttgttcctctttatgtaaggtgacccaaacaattggaaaaacaagcacccacaaatgatatgcaacattgggatcagcaaatgcaagttccttcaatggagccatgatatctgccaccacaagcttgctcgcttcatttaagaactgagcatgccttgctgcaagggagtcaaatgatagtgatgtgccatccatgctttcctgagcatctggaatctgctgtggcatggtgatgcgatctggaacaggtcctgctatcataagcgctggtactcgagcagaatttgctgcaagtgtaattggttcattttctactaatatagccaaaatgagatcaaggccttgcttcaaccagaaaacatcactcactgcttcccagtcctgtgactgtattataaactgcagtctagaaaataatgtttttcccaccgagtcatggtaaagtttgaagaatcgcttcctcatttctggatctttagctctaagcccaagcatatactgtctctcaaccttatgaaaaaactcttgcctaaaagctaatggatatttggtcgaatctccgcaaagcgaataaagaagctgcaagtattttgcatcccattcttcttgtgcagcaggggggaagctttttcggtcaactaatgataacttctgaagataagcaagtatttcctttgggttaagcgaattaacagaaccagtagatgaagcaagcctgcaatcatcctcaatccaagcttttatcatatctagtatgcatagaagaatgctaggatcagtgcctctctctgaaaggagagcttgaagtatttggcccatagattttctgtggtcagaagaggtcatcaccctctcacttatgagctttaagacagtcttcatgtttgatatgacagtagaatctacagtagggcgtgagttaactgatgaatccagttcaggtctctgtccttgtcgtatatggctgccagcagaagatcccatgtcacgtgcaagacgttgcagtacacggaaaagaaagccgatgaaaggatcaacgaaattcttctgtacttctgcaagtgcattgaggacaaacagtgaaaagtttatgatagagttagcattgctgagctcaagtgctatctgcgaagttgtaacagcagcaagactcttctgaatcagatcttgaaccctttgatgcaacaactttatatcttgaggtgttgtggctgcttcaagaggaaaagcactgaataccatcttgagcaaggaacaaagcgactttccagcatccagcattttgttgctgaaacaaggttccagtatttgagaaatatgattgatgttattccggatgaagagacggggttgtttctccaagactttgttcataacatcaaggccttgtgcaagggctgttgcagggtccttggactgaggagagggtgacagattcccgagcaatttttcaagataattgaatttaacattggcatttggccagacttccagagtctttgggttctagttagtattcaagaagcttgcttgtacattgagactagaactaccttaataccttaaggaactaacaaaataaacaaaaccaaaagtaaagaaaaaacccttaaaataaaaaggaaaaaggtaaaa

SEQ ID NO: 14055 - DNA, 3649 bp, Setaria italica
  misc_feature (126)..(167): n is a, c, g, or t
  Peptide Sequence Number=SeqID_80029
aaggttacaaacaatgtggtgatattgacttgatacgaccgatgacataatccacattgtttgtaaccttctgttggaaatccaatcggttggaagcgactagggactgacggaatgacctaagannnnnnnnnnnnnnnnnnnnnnnnnnnnnnnnnnnnnnnnnnggcactaagcatgccaggcaccgttcccgtttccagaggcactgaaagatagcaagtaacagttctagattttatatcactgatcacctaagttcatgttggcgataagctaggtcaatacagcagtcaacacagggcttgatgacacccctgctttatctacatgacacgagttcctagtctctaccagagttgccggaaaaggcgatatgtacagcatctacgaacaaactaccagatatgctactataaatcagaatcgactgaacacacgccggctgttggtcaggctacgatcaccagaagagcaggggggctacgatcaccagaagggcagggggctgggctgacttcagaaccacgggtgccatgtcgggtccatcatgcacaagttcctcgaggataatgctgcttctaccagatctgtgacgcctctttggaccgactgaggtggctcagttgcgttctcctcctcttcagcaagataatgtggtgatattgacttgatacgaccgatgacataatccacattgtttgtaaccttctgttggaaatccaatgggttggaagcgacagggactgacggaatgccaagtggccttctccatgaccaagataatagttcatcacggaaaaacatagccaaatgatgccaaatatgttggttttgtttaggagaaaccacagactgcgccgcagaacacatggcagacacaatgagaccttcaacaccaaaattcgagaagaaagcttgcaagttacgtgtcagcctaaacgggacaagctcattgaactcgatcattccatttggatcataagctggatggaagtcagtctggaaaattttcccagtattttttgcaaacaaaattttgttgggagccctgccaccaatctgcagcatatatgacatgaagcaggagagagccacttggattgcaaactgcttcttgaaggtccagaggtagtggccagttggtagaatcttgtgcatatattgagagaagatattatcattaacaatatttttagtaatttcattgtatgcttgcaaacgcagctccacaactgcttcaggagagacctgccctgaaatagcttgattaagctgctctttgaaaattgtaataggtgagtcagcttctctattatgccgggcacagttaatttcatacacctcaagaaaagtactgtacatcaaatcatcctcaaccatccgaacctgtgaccaaacaggaataattattggggtatggatagctagatggcgacgcctagattctttgtgtttgtcaaacattttatttagcacacggaatagctgcagcatcctttcatcactccgagcatttggagtcagtgatgtctgaacaataaaatggcgctgtgaaccatcagaaccaatgagtgtcaacctccgaaagctactaccatgcctccggacaattggaatgtcaggtccaactctgtccaacttaacagtgtggtcaggtgcaatttcctgatccgtgaagtactgccctgggagttcaatatcaacaacatgaaaatcccttagtgttttactttcctcctccagttttaatactgcagggaaccggtcctctacattactctgaagaatattcttccagtgtttcaatctctcagtaagttcagcaagggttgcaggaaaagtagtagcgctctctgggtcaaggtcacgctcaaaatcttgcttgtactccttgacaaaatcaacgtgcttgttaacagcatcttgtgagaagcaagctctacatacaccagagagttccttcctgagagattgtggaacctcgccagtggttgcagttggatacttgtagcagcgatgaaggagagcattaaccacagcaagaagcctttcctcaggtagagtaacaaatcgcgatccaatttctgacagtaaaagctcaagctcattggctagattagtgtgcttgctcctaagagcttccattatgtctttcgcggcatcaaatgcacttgctgcagaagttacccaaccaagtccactattgcgtcttagcgcaacttgtgagccctcagcacctgtagaactttgttggccttgatcatggctgctatttgtgccagcttcagcagtagatctgtctggttcttgtccttggacgttaccaccgtcatgagatgctgtagcaccaactgattgggaggcttgatgaacctggttgtcagaagtcacattaccacctgcatgattagatcctcttgcactcccatccggtaggttattggcagcattgtttgccaacatagcttgctgcatacgctgctgagccaacatgtttcttcccatttcagttttagtggcgacatcacggcgctccatcaagtatgtacgaagccaataatacaatgcctgcggataaacttgagctatctttagcaaaaccaatttacagtgctgggcttcacctctctgtaatgataacaataactgaggaatccatgaaagccaaacccaatgaggtagctgctcaagatatttatctaaagcccttccaacaggttcattttgtgtatcaaagctgagaaggtaaagaattcgagctagatggctccttgagttcgagaccccatatttaataccctggaagaaacaactgactgcatactcaagccaaacctcttcatttgtttctttaaaaatcatatcacagtaatttccccagctaatccatcctttgggcagatgcttaaaaagggttattgcattcgaataagactgatttgcagcctcacagtcattcattttaagcaggaagtcacctctcagacgaaatatttctgctttgttcttcacagggaaaaattccaaattggtattatttattaagttaaggccactgactagttcgcctttcatttccaagtaagccttagcttgttcacatatcttcacaaatgcttcctgaacttccatggtagcatgaccatacatcttgtcaagtatagttacacaaactaaacgttcaaaaggtaagaaaattgtcctcaggtagaccttgcttacgagctatgtgagcgagcttattcacattccaagccttgtctcggtacccaagatggtgaagttgaggatttgtttggccaaagtccttaaacgcatctatcactgaattgtacatttcattcctccattggagcagatcataccaaactgtcatattatcccattcattgggtgtacgaagtctccaggtttcaagaatatccttgaggtcagcaaatgaattatttgggttggaattggcaccagagcttgctgaaactggtttgttcccatttgcaatgtcaagaagtatttttgaggattctttcacttcaaccaactgttgaaactgctgcagcagaggcattcgagactgcacagacatttcaggcaactgccaccactgttctagtgcaagttcaacaaagtctctcaggaaggaact

SEQ ID NO: 14056 - DNA, 384 bp, Setaria italica
  Peptide Sequence Number=SeqID_80030
ttacgaaccgtcgactgccgaccgcccgaccggaggggaaggaagggtcgaagggaggggggagtccacgctgccccgcgccgctcgaaatccccaattccccaggcgagattggatcagatcacatcacatcaggggatccatcacactcaccagatcccatctctccaatccccatggcgattgtgtacgcgctggtggcgcgcggcaccgtcgtgctggccgagttcgccgccgtctccggcaacgccggcgccgtggcccgccgcatcctcgagaagctcccgcccgacgccgaggcgcgcctctgcttcgcgcaggaccgctacatcttccacgtcctccgcggcgacgccggaatcactttcctctgcatggccaacg

SEQ ID NO: 14057 - DNA, 514 bp, Setaria italica
  Peptide Sequence Number=SeqID_80031
cacctttagaatatgcacggaacactatgttgaagacgggatggtcaggtgaataccatctgctaccatcagatctaagaaatcatgcatatcagcaagatctcctttcgaagcatacccattaagcagagtgctataggtagtcacattaggttttattccctttccaatcatagaatcaaaaatctttctagcttctgtgatgtttctattcttgcaaagataatccagcagcaaattataagtaacaacatctgctcgcagaccctgtgtggacatttcattgaggattcgaagcatctctttccactgtcctgtagtgcaatatccattgatcagacaattatatgtcctattatctggcttaacacctttatggatcatctcctgaaggacaccctcagccctgccaactgctccagctttgcataggccatcaatgactgtgttgtaggtcacagcatctggcagaattcccccgatctagcatttcaaaaaataggctgtaagctgt

SEQ ID NO: 14058 - DNA, 399 bp, Setaria italica
  Peptide Sequence Number=SeqID_80032
atggttagtgactggctgaaaacgtttgctaggtgtttagacaaccagaagatcacatcacacttataaacagtttacttccatcaatagtctaaatgaagttcaggagaactgcttgaatgccttttagcaatgattcaaagtacggtttgcagtaaataattgagcctttatagtctgctcttggtcttgagttagtagcaattacttatttgagggactgttatctttcacacttgcatctctatgtcactttggatgatatctaaccgttgctgtattccatgttttccattgaagacacaagggatgagacctggagtagtgccttaccaaagcatcttatctgctttgcagcggattgcaaaagaagaaggaatccgtggattgtacagtggt

SEQ ID NO: 14059 - DNA, 1308 bp, Setaria italica
  misc_feature (1272)..(1308): n is a, c, g, or t
  Peptide Sequence Number=SeqID_80033
taggtaacttaccgtaagtaagtaacggttttacgtttggttttcttagtctttcggttcccgaggcgcctctgccggcgatgtcggaaggcggccgcggcggcgcgcgggagaagctccgggaggcggcctgcaacgccgtcgccggcggctcggcaggggtgatctcggcgacggtactttgcccgctggacgtgatcaagacgcggctgcaggtgtacggtctcccttccaacttctcctcaggtgctgcgccgcctggtagggtgattatttctggttttcagcagatattgaaaaatgaaggcttgcctggattgtatcgtggtctttcaccaacaattgtagcactgtttccgacttgggctgtaaccttttcggtttacaatcatgttaagggacttcttcactcggaagatggtaataacagtgagctatctgtccaagcgaatgttcttgctgcttcatgtgctggaattgcaacagctactgcaacaaatccactatgggttgtgaagactaggctacaaacacaagggatgagacctggagtagtgccttaccaaagcatcttatctgctttgcagcggattgcaaaagaagaaggaatccgtggattgtacagtggtctcctgccttctctagttggggttgctcatgtagccatccagctcccagtctatgaaaaggtgaaactatactttgctaaaagagacaatactacagttgataaactcagccctacacaagtagctatgtgttcatcaggatccaaagtagcagcctcaataattacatacccacacgaggttgtacgatccaaattgcaagaacaaggccgtaatgatcatggtgccatgcggtatagtggtgtaactgactgtatcaagcaagtgtacaagaaggagggtttccctggcttctaccgaggctgtgctaccaacttgctgagaaccaccccaaatgctgtcattacttttaccagctatgagatgatcaatcgactcatgcaccagcttttggtcccgtaatcaaacacttgaagccagcaaagttccattgagattgaaattctggccgagatgacctccaatctagctgcgggtgtaatggttggttaacatggttgcattgccattctcccatactgacgaagtggtggctgttaaacacagattttggtgagagaaccgaaatattatgacgttatacaacttctattatgcgtgttttccaaactgttgttaggaaggagtcaatccttgtctgacnnnnnnnnnnnnnnnnnnnnnnnnnnnnnnnnnnnnn

SEQ ID NO: 14060 - DNA, 504 bp, Setaria italica
  misc_feature (435)..(504): n is a, c, g, or t
  Peptide Sequence Number=SeqID_80034
cggtcgtccgccaaggtgtcgtcggaccacgccgccgtcgcggcgccgccaccgcccgcagcggagttggccgcggccgcggaggaggcgccgaggatgcggctcgagcagatggtggtggacgacgacgcggcggccgcggagctcggcgcgctgaagcaccggctcagcaatgcgcggtcgaggaggccgacgctggagaccatacacgaggagaattacctgtcgtcgagagcctgagacgtgcctggcgatcggcggagcttttttgatatgtgatttaagcacacgcttctcttttcagcttcattttttgagcattcggttgaagacttgaagtgttgaactcaagttccaaaagatatgtaatgtgaagcaagtaaattgtacagcccacgttttttgtgaatagagaaaatcatatactaggtacannnnnnnnnnnnnnnnnnnnnnnnnnnnnnnnnnnnnnnnnnnnnnnnnnnnnnnnnnnnnnnnnnnnnn

SEQ ID NO: 14061 - DNA, 421 bp, Setaria italica
  Peptide Sequence Number=SeqID_80035
cggcctccgcctgcgggcggccggccgcttcaatgacgaccgcggtacggagcgactccccgcagtgcgcgccggcgctttcccgtgcgtgcgggcctgcgcgttcctgcacttcgtgacggcgccgtccatgttcccggggggcgccatgccggtggcgcggcagctcgagttcagcgtccgggcctgggatctcgccggcggcagcggcgggctaattggcttggacgacctgcgcatggagcatctcccttcgctggaggagattaaggtggatctctggtacagtggtggcggtgatcaggtggagattgtggcggcggtgctgaggcgcgcggctgacggccaccccaaccaccccacccttcgtatcacagcaactccatgttacagatactagcaaagatactagcagaaatgt

SEQ ID NO: 14062 - DNA, 669 bp, Setaria italica
  misc_feature (1)..(22): n is a, c, g, or t
  Peptide Sequence Number=SeqID_80036
nnnnnnnnnnnnnnnnnnnnnntttttttttttttttttatttccgaattcccagcaagggcacacatgagcaaaaatatccaaagaatttggtacaaatgcagcacatacagcatatcctcccccctgggaactggaaaggtttcaccaggttcatccatccatgcattacaaacaaacactgtgagatcagatcgcagcagcatatcacctctcaatccaccagtgctccttttcttttgagaaccattgctctggtcattaagtttggaaaatgggatcatacaatcaggcagttacgagctgatgccacaaacagctatgctcctacttggtaaggtagtatacgagcaagaagacagcaatgaaggatgccaccatggtagccatcctgcggcttgatttcgtctcgaagaccatcttgaacttgtccaccgttccagaaagaaatcctctcgaagcatccatgtcactacccattctgtccagcattcggttatgattctccacttcttcgtgaatatcaccagtcaatcttttgagaatgctgaccctatcgtgcaaactgtccatagcttggtcattctcatgctcatgaatttcacgagaagagtaagctggagctcttatcccaccttcttcaatgccatcaaataaagcagttctgtg

SEQ ID NO: 14063 - DNA, 384 bp, Setaria italica
  Peptide Sequence Number=SeqID_80037
cggcggcggcggcacaggctcgccgagctccgcacgtcgctgctctccttggacgcggccgccgactcgccggacgcctcctgcttcgccacctcttcctccttggcgccgccgccctggtggccggggtgcttggggggcttcagatctgtggagttggactcgcggcacgaccgcccgggctcctcgccggagagccggtcgttgccgctcgcctcgtccggcttcgcctcgccggagacgctccgctcccgctcctctctgagccgtttcactttcgactgcagcgtcccgatggagagatcgcatcgctcgacgtcgcggcggagctcggcgacgcgcagccgccggagctcgtccacccacccctggcggcggaggcgg

SEQ ID NO: 14064 - DNA, 786 bp, Setaria italica
  Peptide Sequence Number=SeqID_80038
ccccagactacgtctgccgtctgcagaagtccttgtatggactgaagcaggctccgcgggcctggtaccagcgcttcgccaccttcatcggacagctcggcttcgtcacctccgcctccgacacgtcccttttcattctacgagaggggacgagcctctcctacctactactgtacgtcgacgacatcgttctcaccgcctcgtcctcggctcttcttcagcgcattatggctcggctgagctccgagttcgccatgacggatcttggcgccctccaccacttcctcggcatcactgtcacacgctcctccgatggcctcttcctctcccagcgacagtacgctgtcgagcttcttcagcgcgcgggcatggctgagtgtcatccgaccacgacacctgttgacactcacgccaagctatccgcggccgatggggatctactgtcagagaaggacgcctctgagtacaggagcttggcgggggctctccagtacctaaccctgactcgtcctgatctggcatatgctgttcaacaggtgtgcctcttcatgcacgccccgcgcgagcctcaccgtgcgctcatcaagcgcatcctacgcttcgtacaggggactctctcctcgggtcttcacattggcaccgggtctgtcgacaagctgactgcctactctgacgctgactgggcaggctgtccagactctcgacgatccacctccggcttctgcgtctatctcggcgacaatctggtttcttggtcctccaagcgccagaccacggtgtcccgct

SEQ ID NO: 14065 - DNA, 384 bp, Setaria italica
  misc_feature (363)..(363): n is a, c, g, or t
  misc_feature (379)..(379): n is a, c, g, or t
  Peptide Sequence Number=SeqID_80039
attggtgctgcgaggaggtggcgctgcgtgcccccgcgccagcaatgatggggaagacgcataggttctccaagggccacctgctcggcttcgtgccggattatcggcacggggtggagacagtgggggagtccaaggggctcggaagcccctccaggattgactcggggagctcccgcgctccgcccaagaggaaatgcgtcagcgtgaattcggaggagggggaaggggcctcggggttcaatgtgcgccgggaggtgttctcgctggcgaggatgacggctctggataagaaggacctggagatgaagctccgtgatgagcttgcgcaggtgagggccctccagaatgactgttccaagngggcctgcggttaacntgaat

SEQ ID NO: 14066 - DNA, 621 bp, Setaria italica
  Peptide Sequence Number=SeqID_80040
gccaaggtgctgaggcagcctacgcctcgtcggccacctgtatacccaataggcccgttgattcggacagcagaatgtagcggtgccaatgatgctgctgcgcctcattcgtcacgtgcagcatgcctcgagtggctcgacgaacagccagccagatcggtcatcttcgtctcgttcggctccggtggaactttgccggcggagcagatgcgtgagctcgcgctcgggctggagctcagtgggcaacgattcctgtgggtgctgcggagcccaagcgacgaggattcgttgagcgactactactacgacgctgcgagtaagaaggaccctttcgtgtacctccctggagggttcgttgagaggacaaagaagacgggtttcctggtgccctcatgggccccgcagatacaggtgctggcccacaaggctactggagcgttcttaacgcactgtggctggaactccatattagagagcttagtacacggtgtacccatggtggcctggccattgttcgccgagcagcggctgaacgcggtgatgttgtcggagggagctggagcagcgatacgtttgcccgaggtgaaggataaggagaccatcgcagcggcggtgaggaag

SEQ ID NO: 14067 - DNA, 524 bp, Setaria italica
  Peptide Sequence Number=SeqID_80041
cacatgtccaagtaaacaaattgtgtcaaaatcagcagtatagatctgcaaaaatatcacaagggttaactacaaaacatggtaaagaaagcataaataaacctaactaatagtggtatatttctgtatgaattttgcataaatagtggaaggaattagttgagcattgaggaaaactaagggaaaaaaggtaaatgagcttactgctgcagcatactccacaagtatcttggcaagagtggagttgtatatggtagtggagggattatgtttactcgtaagttctgtttagtaaagcatcatcatcaagattcatttacaaagtactgaagagtaatatggaacatgatgaatacatggagacaaaccagctaataaaactaatagtatgtatcatggaaaatataatcacacagaaaatttcttcaaaagttaagtggaaatatgcgacacctctgaatcaaatctgtatgcaaactaataatttactaatatacagaaaatattggcattgcttgttcaag

SEQ ID NO: 14068 - DNA, 1609 bp, Setaria italica
  Peptide Sequence Number=SeqID_80042
tttttgtcctgtttaaggaaacacaatatgctccaggcttacaccagattggatgattggatgaattattgattttcatgtgcatttgtcaaatatcggcacacatatttgcaaagtgaacaatatgttacgaaatcacatttacagcaagcatctccaaatctgcatgctccttccaccctcctgtttggtgcgggaataattcaacagcaagcatcacgagggagatgagagggaacatctgtacagtgctaactctgcacattactgattcgtgatgctatcgtgatatacacatcatatactggttcactgggcactgaatcctctatcactcgacaaaccaggttgcttcgacaatacgacattaccgttgaggtccatctgatactgcaatttgctgtagtccatgacgattctgcagctgctccagtcttctgcatgcatgctgacgccgagatagtatatatggtctcgcacgctggttccagttaccgacctgctgcatgttgggtcttcgccagaatcatcgcagatcttctccacagagtacattagggttcctagtccaatgttatggatccatacctctcttgggaagtgatggtaggtcttctgtgggaagaatgagaagtatggtggcaggtgaggcacgatatcgtgggcatgagtaactcgaattgcatgaggcaagtatgtcttgaaataagaggcaaaagcagcattgccaatacgaggctgcccaaacgtcatcagtcttacgccatccaatctgtagttcacaacaagatccagtgcacaaaatgaagccatagctccacccattgaatgccccgtgatcatgattggaatatctccgtaaaatttcctagtcttttgaataccactgactaccccatcacgtagtgttgtgttgtggtaagcagaataaaaccctcggtgcaccatcgcttcaggcatgccagggtagtcaagatcaagttgtttccataacaagtcctctacccaattctggatgctgttctcttgagttcctctaaacacaacaatggtagcattgatatcactagcataaccaacatatgcctccaagcagttctcaacatctacaacaatctctatcatctcgaaccccttgatcaagtcaccgcatctagcacatgtccaagtaaacaattgtgtcaaatcagcagtatagattgctgcagcatactccacaagtatcttggcaagagtggagttgtatatggtagtggagggattatgtttactcgtaagttctctcccggagcaaacagcaagtaaacagagcaaaagagccgccctgagcaacccgcggcgctccatgcccggaggcccgaatcggctgaaacccaggacgaaatcccgtcgcgcgcgatcgcgggccgcaagggaatcgggggagaagaccggagtatccccgattggtcaatccgaacttgcacggaatcttattctggcaagcaatccgatttctgacttgcgaggctcgggaacagtcgggaaagaagagcgagcggagcggagtactaagtcaagaagaaggcggaaaataaataaattataggactgataaattattaaggag

SEQ ID NO: 14069 - DNA, 1181 bp, Setaria italica
  Peptide Sequence Number=SeqID_80043
caggttagagcattatgcaagtactggggaaaaagttgaggtggagctgataaattgcagtccaaagggatttgttgtgtcacttgactcactgataggtttcttgccataccgaaatcttgctacgaaatggaaattcttagcttttgagacttggttaagaaggaagggtggtgatccttccttgtacaagcacagtctgggattagaagatggccttgaggttcctgacaggaatatagaaccagaatctagctccatctcagaagtagctggtgaggatcaaggatctcttccatctaagccgaagttggaagatcttcttcgggcatacaaccaagagaaatccaagttttttccttcatttattggtcaaagactccgagtatcagttgtcctggctgacagaaattcaaagcggatatttttctctatgaagccaaaagagagtgaagaattgattcagaaaaagaaaagtctgatggctaagcttaatgttggagatattgttcaatgcactatcaagcgatttgtttactttgggatatttgttgaggttgaaggggttcctgcattgattcagcaatgggaagtgtcttgggatgataccttagatccagcagtttcttacaaaattggtcaggttgtggatgctaaagttattcaactggactataataataaccgcatatttttgtcacttaaagatgtaaagccaaatccatcggtaggtgctttggaagcagtcattggtgaggatttatcactaggtgaagctctcgaacctgtacaagcagatttcgagtggcctgaggtggatgcccttatggaggagatgcggaaaatagaggatgtaagagatgtttataaaggacgattcttccaaagcccagggttagctccaacctttcaggtttacatggcaccagtgattggtccaaaatacaagctcctcgcacgatacgggaacaatgtgcaagaggtgatggtggagacgacgctggacaaagagcggttgaaggaggcaattttgacgtgcacaaatagggttagctgattagctaggatctcggtgctgcgcattggacgggaccaattttctttgttctcccaagatagtttgagaatcatgttgggagaacaaagaaaattggtcccgtccattgccgctgcagtgccat

SEQ ID NO: 14070 - DNA, 618 bp, Setaria italica
  Peptide Sequence Number=SeqID_80044
gggtctacgttacgggtatcaactacgggcgcatcgccgacaacctgccggcgccggaggacgtggtgcggctgctgaagctggcccggatccgcaacgtgaagatctacgacgccgaccacaaggtgctcgacgcattccgcggcagcgggctcaacctggtggtggccatccccaacgagttcctcaaggacatggccgccaacccgagcaaggccatggactggctgaacgagaacgtgcagccgtaccacccgtccacgcggatcgtcggcatcaccgtcggcaacgaggtcctcggcggcggcgacaccgggctcgccgaggcgctcgtcggcgccgtcgccaacgtccacgacgcgctcaagatgctccgcctcgaccgcgacatcgagctcaccacgccgcactccgaggccgtcttctccaactcctacccgccgtcggcctgcgtcttccgcgaggacctcatggtgtacctccgcccgctgctcgactttttctccaggaccggcgcgcccttctacgtcaacgcctacccgttcctcgcctacatgagcgacccctcccacatcgacatcaactacgcgctcttcaagcccaactccggcatcgtcg

SEQ ID NO: 14071 - DNA, 375 bp, Setaria italica
  Peptide Sequence Number=SeqID_80045
gtgcctcaccgccggcgacggggcacagcaaagccactcccctctcgccggaatctgcccgcctcatcctcctccctgcttgtgcgggtactggaccgccgcggggcgggcatccatccggacctgctccattccttctcgcgtacccttcctccttttgctcgttcgtcctccccatcgcgcaagttcaaccccagttgacgccgtaggagaatcggcggcgccctaggtgtttgcgcggaatttaggtgtttgcgcggaatttattttccagacgatttgggggatttagccgaaccctatgccccgcgttaagcctgccgccggcatgcccgcttaccaccaccgggcgcctcccccggccccgggcagggt

SEQ ID NO: 14072 - DNA, 496 bp, Setaria italica
  Peptide Sequence Number=SeqID_80046
taagtacttagtacgtcttgtcggtcgttttcttcccttcaccttcgacaacgttcgtgccggcgccggccgcaaaaaaggatcatccaccgcgaggggctatgacggctgccgagttatcagacgaggtgacgcaatcggtgttcgaacacacggagggagcaatgggttcggtctcggactcgcaggcgaatggaaaccaccagccggcgccggcgccggcagaggcggagcaagccgttgaggaaggcgatgccggcgagacgatggaaggcgtcgcctccatcgccttgctgccttctggcgccatctccggccatttcatccgcctccctgattccatctgcttcggcctccaaggcaccccaatatcttgtgagagggaatgtagccgaggagaggattaccgccttataaagctcaccatcattgattttaagagcaagagagagaaggtgcttgtggtggaatgcagaggccatgatgctgctcgatt

SEQ ID NO: 14073 - DNA, 393 bp, Setaria italica
  Peptide Sequence Number=SeqID_80047
acagggtgaaggttggaatcagctggttcaccaagactgcgatcgattcacttgcctccgtgcaaaacgcagtaagtaacatgctcacaagctcatgagtcatgactgtctggttgtcggatgtattgtgactgccaattcctgaatcggatgtactggggagcagattgagaccgataatatctactccgtagtacataattgaggatcttgttaaatactacctccgttctctattatatgacgttggttagctcatttttgaactaatcaacgtcatatattaaaggatgaagggagtagttgtaacatacttttgagtaagcatttgtaaaaaatggcgaactatggtattctgcagaaatggtatctttatctgtggtataagagcgg

SEQ ID NO: 14074 - DNA, 1662 bp, Setaria italica
  Peptide Sequence Number=SeqID_80048
ccttcgcgtcccttccgggccgcacttcccgacctcggcgcggccgcgctccccactcggaaataggaacctgtggaagaatgcaattttgaagaactcatggacacttggtgctggtgttccaaatatgtttgcactgccatcaaggctgttcaggtgcatggcttcaagtagctctggggatggtggttttgctcggcctacatcgactgacgaagcagtagcaccattgccgttatactcatggccagataagcagcgaccacgagtgtgcattttgggtggtggatttggtggcctgtacactgctctaagactagaatctcttgtgtggcccagtggtaagaagcctcaggtcgtgctggttgatcaatctgatagattttgtattttaagcccatgttgtatgagctcttatcaggagaagtggatgtctgggagatagctccatattttacagagttgctgaaaaacactagtattcaatttgtgagggacagcgtaaagcttctgcgcccttctgatcactttagaagagaacctggagaatcatgcactggtggagttgttcatctggaaagtggcactgtcattgaatatgattggctggctcgttcttgctttaggggctgaagctaaaattgatgttgttccggggtcagctgaatatgcacttcctttcacaacattagaggatgctttgagagttgaaagcaagttgaaaatgctagagaggaaaaggtttggtaaaagcgctcctactattgaggtggcaatagtgggattgggctattccggcgttgagttagctgcaactatatctgagagattaaagaacactggaactgtgaaggcaataaatgttcaaacaaccatatgtcccactgctccacaaggaaaccgtgatgctgctctgaaggttcttgagtctcggaatattcagcttttcttgggatattttgtgagctgcattgaagaggctgctacatctgatgattcaagtagcacagttacaggttctggagttgacggtgatcataagaaattaattttggatcttcaacctgctgaaagaggcgtcaaaagccagactctggaggctgatttggtgctgtggacagtgggttcaacatctcagattccccggttacagcctcctgatgctccctatgtgattcctctgaatggtcgggggcaggtggagacagaggaaacccttcaagtaaaaggccatccccggacatttgcaattggtgattcagcagctctaagggatccctcaggcaaacttctcccagccactgcacaggttgcttttcaacaagcagatttcgctggatggaatctctgggcggcaatcaatgatcgtcctctcctgccatttaggttccaaaaccttggtgagatgatgacgcttggtagaaatgacgccgcaataacagcaagtttcattgatggactgaccttggaaggacctctaggacacgctgctcggaagcttgtgtactgccttagaatgcccacagatgaacacagggtgaaggttggaatcagctggttcaccaagactgcgatcgattcacttgcctccgtgcaaaacgcagtggccaactcatttccatttcctcccccaacccccatgggcgactccactaccaccaa

SEQ ID NO: 14075 - DNA, 438 bp, Setaria italica
  Peptide Sequence Number=SeqID_80049
cctttgagtgccaggaagaagaaaaaaatttcagatgcgcaacttaaccacagttaaacattggtcaactgaaactgtcagtatgctcatcggttgatcgtataaaagaaataataaaaggaattgccacacaaccgaaaagggaaaagtgatgtacatcagtagtgactagtgagtcagtaattttaaaggtgtgtcctgatgactccaattctgaaatggactcgatctatagttggcaaacacgagtccacgactatactagactgtatctgcttgatgaagcaagatgtctccatgcacaaagttatcggtagcagtaaggattacagcatacccagctagttttgagaatcaacgacgacagatcatggagatgatcactgtcacaatctcaactaaaacaggacacacaaacacaagacaaaacagcgggca

SEQ ID NO: 14076 - DNA, 318 bp, Setaria italica
  Peptide Sequence Number=SeqID_80050
attcactcactaccatcgaaaggtctaccatggaacctaaaggaattgcagatgctaggttgctcacctatgctagaggcacgatgccagaaggaagatggagagatatgggtgaagaagaagatacaggaacagcagaagcggacaataaatgagtatcaacagaaaaaaacaaatgaagttctggcaaggatggcaggagtacgaggaacagttggtccaatgtgcgggtgagcagcagaagaataagggagagtggttgatgaatgaagaagaggactggctgaagcagcatagtgcggtagagccagtaagtaa

SEQ ID NO: 14077 - DNA, 257 bp, Setaria italica
  Peptide Sequence Number=SeqID_80051
tggtgatgtagaaaatgtacaaacagtgactaataataatctcaatctaacggaagcttatgtggtgagaacaaataaacagaaactacgtgattggaagtcatccattggaaaatggtcacgtgtacagggtgaaggtgatcacaatgccaaacttggtattactattcttggtgaagccgttgatgttgaagatgaagtagttgtagttaacagcattgtgctcccaaacaaaactctcaatgtcagtgtccaag

SEQ ID NO: 14078 - DNA, 441 bp, Setaria italica
  Peptide Sequence Number=SeqID_80052
ttttttttaagtaaaacaaaactaagaacaatttagataggtaaagtagttcattctcgacaaaaataggcgtcactgtttgtacattttctacatcaccacactagccaacctaacaagtcatgaagattgtgccgtatcacgctgcaagaagggtacaaatacagactaataataatctcaatctaacggaagcttatgtggtgagaacaaataaacagaaactacgtgattggtattcagaccttatttggaataaacagaaaaaaatggtgcccgttataggatgatctcctcttggacactgacattgagagttttgtttgggagcacaatgctgttaactacaactacttcatcttcaacatcaacggcttcacctgcgttaatataggatgatctcctcttggacactgacattgagagttttgtttgggagca

SEQ ID NO: 14079 - DNA, 1235 bp, Setaria italica
  Peptide Sequence Number=SeqID_80053
tgggtctgctggagggctctacagctttagggattacatcatggaagacagtccgtcacacatagttttgctgaactgcgacgtctgttctagcttccccctgcccgacatgctggaggcccataaaaagtatggaggaatgggtactttactagtcaacaaggtatctgcagagtcagcaaaccagtttggcgagttggtagctgatcctgaaacaaatgaacttctgcactatacagaaaagccagagacttttgtgagtgatctcataaattgtggagtatatatatttactcccaatatctttagcgccattgaggatgtcttaaaacagaagaaagacagagcaaacttgcgccgtgtatctagctttgaagctcttcaatcagcaaccaaggcacttccagcagactttgttaggttagatcaagatattttatcccctctagcgggaaagaaggagctgtacacataccagacactcgatttttgggaacagatcaagaccccagggatgtctttgagatgctctgggttatatctttctcagttccgccgtacctctcctcatcttttagcttcaggagatggcataaggactgccactattgtaggcgatgtgtacatccatccatcagccaaggttcatcctacttcaaagatcggtcccaatgtctctatatcagcaaatgcgcgtgttggagctggtgccaggcttatcaattgcataattctggatgatgttgaaattatggagaatgcagttgttatacattcaattgtggggtggaagtcatccattggaaaatggtcacgtgtacagggtgaaggtgatcacaatgccaaacttggtattactattcttggtgaagccgttgatgttgaagatgaagtagttgtagttaacagcattgtgctcccaaacaaaactctcaatgtcagtgtccaagaggagatcatcctataacgggcaccattttttttctgtttattccaaataaggtctgaataccaatcacgtagtttctgtttatttgttctcaccacataagcttccgttagattgagattattattagtctgtatttgtacccttcttgcagcgtgatacggcacaatcttcatgacttgttaggttggctagtgtggtgatgtagaaaatgtacaaacagtgacgccattttttgcgagaatgaacactttaccatcaaatgtcagttgttcacctgcttgtt

SEQ ID NO: 14080 - DNA, 811 bp, Setaria italica
  Peptide Sequence Number=SeqID_80054
cacctagctgcagtcattatattcaaggtaagatctttcgagcacagagtagcatgaatctatggacttggcatcagagataggtatacacgcttcggtgcaaattaaataaactgatggaggtgggctttatgacaagagactacagactaatcacttgggtcgaattctcttctgctcttgaggaaagcccttttcctcgaatctgagtctagttcatccaggtcggatgcaattgctaggtagccataaaatatcctctttctctcacctgtcctgatatctgtctcaaccaacaaagggttctgatcagaatctatagaatgagtggcacgcgcacgtgaccaacctatacgtccatgatcttgtctctcaaggaactcagcaagacgctcagcctccttcaagccagctgggttgtttgcgaacttgataagtgtcaaacccaagtgcccttcttttccatacaaggacttcgacttgccaccagaaaaccctagttctgtcattttcttatccatgtctttgttccctaaaccctccaagcggccatctttcttcctcccagttgcagtattgtgcatgataacagttggcggccacacaataaggtcctccctacttgctcggacaaggtcagcaggtaatgattggtatcccttagagttctcagggacttttgtataatcccatcccataaggacacacaatgccttgtgcaaaccaagatgatcaacaagtgaatctgtattcggtgggttgtaagcatgcatgacaagtccatgcacatcagcaaagtccctgccacagg

SEQ ID NO: 14081 - DNA, 616 bp, Setaria italica
  misc_feature (42)..(42): n is a, c, g, or t
  Peptide Sequence Number=SeqID_80055
cggtcgggctccgcccggacggtgaggctgagctcgccgccncggggctgcccttgccgcctctcttcccgatggagatccagccgctgtgcagcaccgcgggcttggcctcggcgcccttgaggtcgagcgggatggtagccttcccgagcagccgcccggagctgaccccgcaggtgctccccttccggccggcgtagaccgcgaccttcaggcacgcctccccacgtgaggagaagagcgacggcttcccgttgaaccactccaggtcggccttggacagatggaacgcagcggcgagcgccccggacgccggcgcctgctcgccgccgtcgaagggcgcgagcggtgccgggacgagctgagccggcatctttcctaaccggatcttgcagtggcacggcgacgtggacgggtggacgcccgcgccggcgccggcggccggcggcgccaccggcattctgagagcgaggttgccgaccagcacccgcacgaacgggcacgggtccatggccaccggtgctgctcctgctgtcacacctcccgaaatccccgcgaacttggcctgatccgctgggattgacggcggcgggcgcaatgcgggtgcgtcgtcgtg

SEQ ID NO: 14082 - DNA, 581 bp, Setaria italica
  Peptide Sequence Number=SeqID_80056
acgcgccggcgccgccgcgctcgcgccagcactcgaggcgcgcccagggctcccaggcgccgtcgccggcggggcggaggatgagccacgcgcccgggttggagcggctcacgcggtccgtccccggcgacggcacgaagggcgtgaccatggacgccatcgctacgggggagcccgacaggtcgtgcaccgtcacggaccaccccttgcgctccttccccgacgccccctcccgctccggctgcatccccggcctccgcaggtcgctgttgctgcggcacccgaacttgcaggtgaacatcggctgcttcatgctgccccgcacctgcagcacctgcgggctgcactccggctcgccgtcgaactcaaacacgaaccgcgggtcgggctccgcccggacggtgaggctgagctccgccgccgcggggctgcccttgccgcctctcttcccgatggagatccagccgctgtgcagcaccgcgggcttggcctcggcgcccttgaggtcgacctggagtggttcaacgggaagccgtcgcttctacttagtttgttcgttacttttgtttagttttcggttt

SEQ ID NO: 14083 - DNA, 453 bp, Setaria italica
  Peptide Sequence Number=SeqID_80057
caaaaccttgatttcaatctcaaatgacaaagacctgaggcggatggttgactttcacgcggagtcagaaacaacatacatttatgtcatgaagaaggctgaacaacaggttgaagagctcgatatcagactctggcactcctgcagattctgctatcatagctactactccagatggatccaagcggcaaaagatttgtgcaagttgggagaatgcgataacaggagttggtcaagtgtttgaaggtccaaaggaattccgtgatgcattacacaagtatgccattgcacataggttccattacagatttgttaagaatgactcttcgcgtgtaaccgcagaatgtactgacgaaggatgtacgtggcgtatacatgcatcaaaatctcatgcaaaggagttcgcgatcaagaaagtctttgggactcatacttgtgaatcagagaccattc

SEQ ID NO: 14084 - DNA, 1107 bp, Setaria italica
  Peptide Sequence Number=SeqID_80058
acgcacggcggctggccggagctggcggcggcgacgccgactcggcaaggaaggggggtgcgggcgcgagccgcgaggcggcgagggagggaggcgcggggttagatgcggcgagccgtttggtgttcgccgtccaacgccaaccagcgctagcgctcgaggcctgaagcagcagactcccgcgcggcggcgcttggcccctcaaggccatccgaagtcaccagggacagggatacagcagctcctacagcagcccagatcacggatgaagattggagagaatctttggcatgcaaagcgatttctgcatatgccactgcttgcgtagatcatcttaaggggacctttgtgttggttatatcttagaaggagtcatgggaagaggacaaatcgttgctgttcttcaagtaggtggagaattttcaacggatgatgatgggcatatgtcctattatggtggagaggcacacgcaatgcatgtaaagagtgattggactttttaaaatgttcaaacatgagatatcttcaacactcaataatctcaaacttgattcctatgtgttcaagtatttccttccaagaaatgacaaaaccttgatttcaatctcaaatgacaaagacctgaggcggatggttgactttcacgcggagtcagaaacaacatacatttatgtcatgaagaaggctgaacaacaggttgaagagctcgatatcagactctggcactcctgcagattctgctatcatagctactactccagatggatccaagcggcaaaagatttgtgcaagttgggagaatgcgataacaggagttggtcaagtgtttgaagaatgtactgacgaaggatgtacgtggcgtatacatgcatcaaaatctcatgcaaaggagttcgcgatcaagaaagtctttgggactcatacttgtgaatcagagaccatcaaaagtcatcgtttggcgtctcaaaaatgggttgctagtgttattaaggaaaaaatacgtgatagtccaaactacaggccaagagatattgccaatgatctccaacgtgaatacggattgtgtctgaactactcccaagcttggcgtggcaaagcaatagcccg

SEQ ID NO: 14085 - DNA, 1969 bp, Setaria italica
  Peptide Sequence Number=SeqID_80059
taactttaggttactaagttaactaacgataagactaacttactaccaagatggatccaaagacggacaaaaagaatttagtagacaaagttgggagaatgcgataacaggagttggtcaagtgtttgaaggtccaaaggaattccgtgatgcattacacaagtatgccattgcacataggttccattacagatttgttaagaatgactcttcgcgtgtaaccgcagaatgtactgacgaaggatgtacgtggcgtatacatgcatcaaaatctcatgcaaaggagttcgcgatcaagaaagtctttgggactcatacttgtgaatcagagaccatcaaaagtcatcgtttggcgtctcaaaaatgggttgctagtgttattaaggaaaaaatacgtgatagtccaaactacaggccaagagatattgccaatgatctccaacgtgaatacggattgtgtctgaactactcccaagcttggcgtggcaaagcaatagcccgaaaagaactttacagctcacatgaagaggcatgcaatcagcttccttggttttgtcaaaggatcgtcgagactaaccctggaagtgtggctacattagaggccttggaagattcgaagttccgtttctttgttgcattccatgcctcccttcatggttttgagcatggttgcaggccccttctcttccttgatgtgatatctgtgaggtcaaataagcactggaagctattagctgctacttcagttgatagtgaaggtgatatcttccctgttgcactgtctgtagtggatgatgagagtcaagaaaattggcattggtttcttgagcagctaaaagcttcattacctgcactaggagcaataactttcatatcgaatggtaagaatggtttatgggacaaggtttctctcttatttccagatagttgtcatggatatgatgtcaattgttttgttgaagaatacaagaaacagttggatgacagttggagtgaagaagtaaaagatacaatggttgagcatcttaagaaagctatttattcttgcaaagttgatgaattcaatcagtacgttgaactcatcaaagctgaatctgacaaacttgctgaatggcttttagaaactaaacctgaacggtggtcagatgcctttttcaaggggtcacgacttggtcagtacacgtgcaatgtttctgagaccattgctgagtggatccccagcagatatgagctctcagtagtgcagttggttgacacaatcagatgcaacctaatggagatgatgtatgcacgaagggaatcttccaatgcctgtacagaacttctaacaccatcagccaatcagaaacttcaggaacagatgaacaaagctctcacactcaatgttgtctgctcgactggaagtgatggaaacagtcatgtgtttgaggtgtgtgatgactcggtccatgttgttaacattaatacacgggagtgcacttgcagaaaatggaatgtgtccgggattccttgctcgcatgcaattgcagtttttgaccgtactgaacagtgtccacttgattactgcgacaaatatttcacaacggaatactaccgctggacttatgcaatgtccataaatccaatacctgatgttcttgtacctactgtagcaggtgacccatcgcatggcacaatattacatttgagcccaattctaacccggaggcaagttggccgaccaaaggaaaagcctgctgatccacgcattgcaatcaaaagggcggtgcgctgcagcaggtgcaagggctatgggcacaacaaagcaacttgtaaagtccccatcactgcataagttgcccttgctatcagttctcaaatgtaaattatgtggtagtcactttctctgtccttatgaagtatgaactccagttgaaccttcatgtgaaatgacatcgtttatcaagttttagtctttgtttaaaaaaaa

SEQ ID NO: 14086 - DNA, 287 bp, Setaria italica
  Peptide Sequence Number=SeqID_80060
ggtagccccaaactttacctttgtctgcaatgtattgaaatttattgtcatttctataccttaatatattatagacttctggaaagttacttcttaggtgttgtgatgctattagtttccattcttcttctaacccctttggccattgttgctatgtaggctcataatttaatacttctgaaagggtcccttgagagctttatggattattccaactctattattttgttttctaccatgtttggaagaaaccaaatagcttaactaagataattagggcaatataa

SEQ ID NO: 14087 - DNA, 544 bp, Setaria italica
  Peptide Sequence Number=SeqID_80061
cctctaacaagcactccacccttcccatcctccataagaggtaaggttttcttctgtctatcttcaagagcaaccttagataatatctcctcgggtgcaagaagatctgtgatttcctcattgtacagctccaggaacgtgaccttaacactgtactcagtattctgcctctccagggtatcaaagatctgcttcactgccctaggtatgactccagcatctgcaggcaactgaccctttggtccgctcttggctctcctgcactctccttccatggtataagtttttcctgtgcccgtctggccatacgcaaatatggtgcagttgaatccctccaagacctcatggacaataggaataatcgcctggtcatacaagtcctgctgctttgctgtcggtccaaaaaccttgtcgaatgtgaagacccggtcgaactgcttgccggcgatggtctgcgtgacggcgacctcccgctggtagtcgttgcaggtgacgacctgcggcgcgttgctcctaagttcgtcgtcgctgaagggcctgcagc

SEQ ID NO: 14088 - DNA, 560 bp, Setaria italica
  Peptide Sequence Number=SeqID_80062
ctccggcatggagatcgcctacgacctcgccgccgccggcgccgtcacctccatctccgtccgcagcgagcttcacctggtgacaagggagatctggaacgtggcgatgtctctgtacgggtaccacgtcccggcgtggatcattgacaagctggtgctgctcatgtgcgccgtcgtgttcggcggcgacaccgcccggcacggcctccgccgccccgccgtggggcccttcaccatgaagctcaccaccccggcctaccccgtcatcgacgtcggcacctactccaagatccggaccggcgagatccgggtcctccccgccggcgtcaagagcgtccgcggcaacgtcgtcgagttcgccgacgggaggcgccaccccttcgacgccatcgtcctcgccaccggctaccggagcaccgtcaggcgctggctcaggagcgacgacgggctgatcggcgacgacgggatggcggcgcggccctacccggagcactggaagggggagaacgggttgtactgcgctggcttggtgcggaggggcatctacggcagctactcgg

SEQ ID NO: 14089 - DNA, 383 bp, Setaria italica
  Peptide Sequence Number=SeqID_80063
ccacattttgtgtttatgactccgatattgctaccggctatggtgttggtgctttcctgtttcttctctcaggccactcactgcttatgggtgttacaagatgcatgtgcttcggcgccccacttgcgccaggatcacattctcaattgcagaggcgtgccttattgccggagcaacaaagaacgcataccacacaaagtatagggatatggtatatgctggtaactggacttgtcaatctctgcgcaaaggagtttttattgcaggagcagttttcgtggtgttcaccatgattctgaacgtgtacttctacatgtactatgcaaaggccacgagccaagctgccaaaaagatcagtaagacaacccccagcgttaggacaa

SEQ ID NO: 14090 - DNA, 989 bp, Setaria italica
  Peptide Sequence Number=SeqID_80064
taggttttaaaagtttaatttcttttttttgttccttaacctttgttagttagtttcttaaatttcctttattttccttcgttcccaaacggcagagacctagcaaaccgaagggacagcaagtgtcgctgcgccaccaaccaccatccttgcccaggagaggagagggaacagagggagaaggtcagctatgggggatacggcgaggagctccatactggtgcacattctggtgattgctctctgcctgaccgccttcggcttcgccatcgccgccgagcgccgccgcagcacgggttcaatagtcacggacagctccaataccacattttgtgtttatgactccgatattgctaccggctatggtgttggtgctttcctgtttcttctctcaggccactcactgcttatgggtgttacaagatgcatgtgcttcggcgccccacttgcgccaggtggaaccagagcctggtccattatatacttcgcatcgtcatggatcacattctcaattgcagaggcgtgccttattgccggagcaacaaagaacgcataccacacaaagtatagggatatggtatatgctggtaactggacttgtcaatctctgcgcaaaggagtttttattgcaggagcagttttcgtggtgttcaccatgattctgaacgtgtacttctacatgtactatgcaaaggccacgagccaagctgccaaaaagatcagtaagacaacccccagcgttagcatgactggctatgcatgagcaatctaatagaactctcttgtgatagaaaaaaaagcatatttgtatttgtggtattttctgtaacactgcagtgagtaattttgggacatgacttagtttcgcttaaatgtttatgtgtatagtttaatctttgcaaaaccaaagtactcttgtggtgctaccttatctgacagaccgtcggttgtgtaaacaaagtgtttgcaacaaacaatatgaacttgcg

SEQ ID NO: 14091 - DNA, 314 bp, Setaria italica
  Peptide Sequence Number=SeqID_80065
ggggcgagctcgcggtcgcgcctgctgccggaggaggaatggaagctgcaatccccctcggcctgacccttccccggagcagcactggtatctgcagcttctccgtgctgctcaagtccacccccaagcccaacctcagctactccggcagggtccccggaaagcccgcgcttttccctccccgcgccgtctccgaggaccgcgccgacgccacgccgcagtggcagctcgactttctgggggcacgctctggggccctcgacccgcctgaggaggaggacgacgacgacgagcttctccccgcgaggccaacg

SEQ ID NO: 14092 - DNA, 492 bp, Setaria italica
  Peptide Sequence Number=SeqID_80066
ccgacccccgctgaagccggcggcctcgccgaggcgccctgggcgcatgttctgcgacccctgcgacgacgccgacgagctccacggccaccaccactacctcgacatctgcttccgctgccgcaagctgctctccggaaacagagacatcttcatgtacagaggtgacatgccgttctgcagcgaggagtgccggcaggagcagatcgatatcgacgaggcgagggagcagcggtcgaagcagacggggagggccgagcagcaactgcagcggcagcagcagaagcagagcccccagaggatacccatctgggcgtggtgatgaaacaattttgagcaccagaaaacgtactaggatttagctgtacctcaagaaccgagctatcggagagcacgatgagtgtggaatcacgctcggatcaccagctcgacgggcagagagagagagagagagagagagagagagagagagagagagagagagagagagag

SEQ ID NO: 14093 - DNA, 674 bp, Setaria italica
  Peptide Sequence Number=SeqID_80067
aatttaatgaagcctatgaatgaggagaaagatcactgggtcccagatgaagctgtcagcaagtgcacggcgtgtgcagcagatttcagtgctttcaaccgcagggtaagaacagttaaatattcatctgctaatgatgtcacttgaatatcttttaatgtggcaaacctattatattttcagcatcactgtcgaaactgtggcgatattttctgtgacaagtgcacccagggaaggactcctctaactacagatgctgatgctcaaccagtccgagtttgtgacagatgcatggctgaagtaacacaaagacttgccaatgcaagggaagcagcaaatcgaccaattgttcacagccatgaggatcttgccaaaaaacttcaggaagccatggatataaataaaaggtcgtcttcaggaacaaggtcttcggatgcttctggcaagcgaatgcgggaggtcgcatgccctatctgcactgtccaccttcaggtccaagttccaacttctggttcagagacgatcgagtgcggcgtgtgtcagcatcctttcctcgtcagcgcccgttgagttcagccgtcatgcgggggcgtctactacaagaattacaacgaaacgtaaaagtacttagttacaaatacgacgacttagactagtaccaaactacaagacga

SEQ ID NO: 14094 - DNA, 626 bp, Setaria italica
  Peptide Sequence Number=SeqID_80068
acagatgcatggctgaagtaacacaaagacttgccaatgcaagggaagcagcaaatcgaccaattgttcacagccatgaggatcttgccaaaaaacttcaggtatgtttgttagctcctccgtttcttttgagccttgctatcttgtacagttctactgaaccaatagagctttctagttcactttcaatggataatattttactttggttgtgacatgcatgagaccagatttaccctggggtgctaatgtataaaaatgaaaatgctccaccagctgtgtggaaaattcttttagcctattgtaccattgtaagtgacaagtggaggcagacatcacccacttgtttgtcaaatggtgaacaacaggagatacatatctaactttcaaatttgaaacaaataagctgactgaggataatctgtggtttcaacaggaagccatggatataaataaaaggtcgtcttcaggaacaaggtcttcggatgcttctggcaagcgaatgcgggaggtcgcatgccctatctgcactgtccaccttcaggtccaagttccaacttctggttcagagacgatcgagtgcggcgtgtgtcagcatcctttcctcgtcagcgccgtgagttcag

SEQ ID NO: 14095 - DNA, 749 bp, Setaria italica
  Peptide Sequence Number=SeqID_80069
ctggaaaggcgaaagggaagctcatgaaatattgaagggaacattatctaaagataaaaatgagttgctttttcagcaattccagatgaactacaacaatgaacccgctttgttccgaaagggttcatgtatttatcgtagaaaggtaatttttacagatttcctagaaccacttcaactgcaatgttgtgttgtttaagctgttcccatagttacacaggagcgataaaattgtagcattggtaacgaagcaacttttagcttgcctacaagattgaagcaacttttcagacactatcctgaaatgaagttttgtcctttgatatcaaatattcatagttgataagactgtcgttagtagctccaattattccaaaataaaataaataaagctattgcatttactgattcacatcaatccaattaaagcgaaacttggtagccaagatatctccagatttagtgttcctgtcttattccaaccaatcatgctgctgctatatatggggcaaaagattcaaatactcctactacttgcagtttttttttgtcacttaaatggccccatagcaaatgtctacaggtggaagaacttgcggaggcggagggcggcggcgatgtcaccacaagagaacagtgggatgtgaaagtggaccacgttgacctgggacccgggttctggcgaaagcacccttggataatgactaattgtaattgtagttctgactgatacatggttatcatcaagc

SEQ ID NO: 14096 - DNA, 842 bp, Setaria italica
  misc_feature (779)..(842): n is a, c, g, or t
  Peptide Sequence Number=SeqID_80070
aacgattcattcatttgacaagccaaatgatgagactgctttaagactgatggatgcatctgcatctttgatgatggagcaataccctgacattgtctttggctatggttttagcaatgagtacagttttgtgttccatgacaaggctgaactatatcagagacaggagagcttaatcctctcgtcatgttcttcatatttcacttctctttacatgaaaaagtggaaagaattcttccccgacaaggaattaatgcagacaccacggtttgaggccgaagctctgtgttacccaaaactaaagattgtctgtgaatacttgtcatggaggcaagcagagtgtcatgctggcaaccaatacaatacatgcttttggatgctagtgaaatctggaaaaggcgaaagggaagctcatgaaatattgaagggaacattatctaaagataaaaatgagttgctttttcagcaattccagatgaactacaacaatgaacccgctttgttccgaaagggttcatgtatttatcgtagaaaggtggaagaacttgcggaggcggagggcggcggcgatgtcaccacaagagaacagtgggatgtgaaagtggaccacgttgacctgggacccgggttctggcgaaagcacccttggataatgactaattgtaattagtagttctgactgatacatggttatcatcaagcatttagataccccgagaatgttgttaatacttgatgtaattcttcctcaccggtgagaaaacacagttgtctctccnnnnnnnnnnnnnnnnnnnnnnnnnnnnnnnnnnnnnnnnnnnnnnnnnnnnnnnnnnnnnnnn

SEQ ID NO: 14097 - DNA, 348 bp, Setaria italica
  Peptide Sequence Number=SeqID_80071
tcgttggatcggcgtgcctgcagatttcctctatgactgcctcatgggagacgacgaccacccgctcacctgttaacgcaacacgcgacagcttcagtttgcagcttgaaattcatcaccaggtgcaagttttgaccacacagagagcacaagaaattactatgtggattagtgcttacccttgtgcttcttggcgatttcgttcaagcgggaaacaaagcgctcggaaagttgatcaagactctccccaccaccaagtatttcttgatctctgccaccgcgtgcgaaaaccttgtaagcttcagatctcttggcatcgtcaaaggtccaaccttggaacaatccccc

SEQ ID NO: 14098 - DNA, 381 bp, Setaria italica
  Peptide Sequence Number=SeqID_80072
gattgaggtgttaggaattttcctgccaaccgagatcgttggatcggcatgccctgcagatttcctctatgactgcctcatgagagacgacgaccacccgctcacccttgtgcttctcggcgattgcattcaagcgggaaacacagcgacttcgagatcagaggagaatggaaattagttacaggtatttcttggtctctgccaccacgtgcgaaagccttgtaagcttcagatctcttggcatcgtcaatggtccaacctttggaacaatcccatgtgcctttccgtcagtgcccgatcaatcaccagatcagaatcagatacgcagcaatgcgctgcgatcgtttgcgcagtctgggaagcacgcttcaagtcagagga

SEQ ID NO: 14099 - DNA, 604 bp, Setaria italica
  Peptide Sequence Number=SeqID_80073
ttttacatatcaagtgcttctgttaactttcaaaaaaataacatttcacaaattacagtgtgattgactgaaaatagaagttctcacggacaaatgagagcattgtagcaatggaggacggaacgaaggtatcacctatgctttaacagtctgtatgaacatgagcagcatattttcggttacaatgtactctgcgggaagccatctccgatgaggtgtccggcgtccccgaacttctccaggatccagcgtccatcggaaccggagatatgggacaacgctgattgaggtgttaggaattttcctgccaaccgagatcgttggatcggcgtgcctgcagatttcctctatgactgcctcatgggagacgacgaccacccgctcaccggattagtgcttacccttgtgcttcttggcgatttcgttcaagcgggaaacacaacgctcagaaagttgatcaagactctccccgccaccctgtccaaaggagatgactagtgagtaatatatagcaaccaacaggggaaaagcatgcctaagcctagcttttacttcgactaagactaagtacaactttgagaggagaatggaaattagttacagg

SEQ ID NO: 14100 - DNA, 1360 bp, Setaria italica
  misc_feature (213)..(213): n is a, c, g, or t
  Peptide Sequence Number=SeqID_80074
aaaaccttaccggcgatccacctccatatcaatcgatccctccccaatgtcatgatcttctgaaaatatgcttagatataataaacatgccttcagatgaaaaggaagatcataatagctgtaggataatatctctcgcatgttcttcacgttatcaccaagtccatgaccaatagagttgagcacagtgtaccattgatcttttgcttttanctgctggtgactagccaaaagctagctatggaaattatggccaatggtaccccgccacatttcttcaagatatctgtagatacctgttccaattcaggactacatccattgcggtgcccaaatattctcatatagaagagcctctgggagtcactctcagatagagtcatcatcttgtaaatcttattatgatcatcagtggaagggcagcatgctttagcaacatcgtgtttgcgggttgttgtgattagtgcactaccaagatagttcttagggaaagcgttcttgataaaatcccacgcttctgcatcccatatgtcatcaattacgatgaggaaccttttattctgtagaaaacctttcagctcattgatgagctgcattgcatcccatacagcttcatcaaagtgcgcatactgttccttgtcaagttgaaatagtatcttcttgaaaattctggtgaagtcaggactccgagacacggaaacaaaacgcagcacaacaaactgatctttcaccgtgtcatataccgctttggcaagcgtcgtcttgcccaacccaccaaatccaacaattgagacagtctgcgcatgcttctttgaccgatcggatatcctctcgatcagctcatccctggagccgttgacgccgacgagctccgtgacctctctgaacatagccgtcaggcgagggtcaatagaatcaccgccagtacctgaacccgtgccgccgccgtcctttacctccggccagatcttgtacttctggctgcattccctaagctgattggagagcctcttggcgtcttcgacggcgccggcgatctggtgcagctccttgcccttgccgaacaaccggccggtcttcttgaggaactcctggaccctgcacttgaggtcgccgcgggcaggctccgtgtcccccgtcacgcgcagcatgaaggcgtcgacggcgtcctccatgtcgtaggagagctcccgcacctcgcgcgcccagtgagtgtcctgctcgtcgggctggtccaccttggccaccttgcggagcgcctcgtccatccactccatctccgtcttgagggagacgacatccttcctcacgcgctgctccagagtcagctcgccgacgagcagctcgccgagcttccggg

SEQ ID NO: 14101 - DNA, 246 bp, Setaria italica
  misc_feature (189)..(246): n is a, c, g, or t
  Peptide Sequence Number=SeqID_80075
tttgataggggcaggtggcacctcgagtttttgactccttttttaccattcttttgttcattgagtagtgttgtaccataagaggcgtatatagcgatgttgtaagattatgtcgaactgccaaagatctcattataagtgagaggaatgctactttttgtgcaaacttcaaaaaaaaaaaaaaaaaannnnnnnnnnnnnnnnnnnnnnnnnnnnnnnnnnnnnnnnnnnnnnnnnnnnnnnnnn

SEQ ID NO: 14102 - DNA, 312 bp, Setaria italica
  Peptide Sequence Number=SeqID_80076
ggcggcgatatagctggggagtagttcacttcccctccctctccctctccttcttcccccagctactccccgtcgcgtcgcccctcctcctacgtctccttcctctccccgcttccgcttcctcgaagcggagcggaggcgcgcaagcaatcggcgccttttcttggcgtgcacagcccctgatcggcaggacaccacccgcgggatctcgcttgctggcgtggccgcgcgagattgaggcggggcggcggttggattgcggaagccgctgcgggtggtgttggcgcttcgcggccggccgggcgtctggtt

SEQ ID NO: 14103 - DNA, 449 bp, Setaria italica
  Peptide Sequence Number=SeqID_80077
gttgtccgtccggccaggcaagtggctggcaatgtgtgcccacctgttgccaacaatggcgtggaggctgatgatcagcttctcctcctccgccgtgaaccgccctcgccggatgtccggtctgaggtagttgatccatcgcaaccggcagctcttcccacaccgctgcagaccggctttctccgggacctcgctccagcacccgtagccatgggtggtgatgtatctgatgagcttctcgtcctcctcaggagaccagagccccctcttcaccttctgctggttgcagcaggagtgatgccccatgcacacaacacaatggaaattcactagcagttaatagctgtagctagcttaacactatagctggctctgcacaccgccaacacgggagttataggttgatgcaagttgtgttataactatcaaggtagcaatatgcatatgac

SEQ ID NO: 14104 - DNA, 291 bp, Setaria italica
  Peptide Sequence Number=SeqID_80078
gcgacgcaacccagagatttccccatttcttggctttctccttgctcttcccgcgagcgcccgcccccaaattcgcccgcctgatcgcgccgagctcattttccggcgaagaattcgtactctgcagctttgatttgcctccaatctcagccgatttccacctccaaatagtacagtcttttttttttggtcgattcattgttgttatagcaagtagaacaccaaattcgtcgacttcatctcaccgagatcaaaatcttggcaccgaattctgtgccccacacggcttcg

SEQ ID NO: 14105 - DNA, 493 bp, Setaria italica
  Peptide Sequence Number=SeqID_80079
acgactacctcgaccaccggagccgccgcggcttcccgccgctcccggagcccacggtgcgcgccgtcatgtggcagcttctgacggccgccaaggcgatgcacagcgccggcgtcatccaccgcgacatcaagcccgagaacatcctcgtctctggcgaccgcaggtccgtcaagttctgcgacttcgggctggccatgtccatgtccgacgcgccgccgtacgagcaggcgggcacgctctcctacaaggcgccggagatgatgctggagatgcccgtctacgacgcgcgcgtcgacgcctggtcccctggggatgcctcatggcggagatcatcaacaacggggggctgccgttgcagggcgacggcgaggacgggcagctccgcgccatcttcgacgtgctcggcgtgccggacgacgagacatggccggagttctcttccacgccgttcgccgccaaagtggtgccggaacttgtctaagttagttgt

SEQ ID NO: 14106 - DNA, 313 bp, Setaria italica
  Peptide Sequence Number=SeqID_80080
gctttgctttaatgaacagacagaagaagttcagaagttaacactttatcgctttccaaattaaaaatgcaatggcaagtaccattaattatcaaagctacagcaacaataattatttgacatcgaagactatataaaagaaggatatcagcatgagggtagaacaataatgctataagcagagacactcatatgcacaagctggaattgggaggacaaaactggaacatgttccaaatgatcaagaggggaaaaataatcaggtaccacagtacaaaatgtcaaaatgacagtttatgtactcagaattgtc

SEQ ID NO: 14107 - DNA, 841 bp, Setaria italica
  Peptide Sequence Number=SeqID_80081
ggcagctacagctagcttgggtgtggcgacgcggcccgaagggcaagaataagatggactacaagggtaagagtgagcaaatgatggaatacatcaagaagctgcgggcctgtatcaaatggttgcttgagagagaagatgaacacctcactgagatcaggaacatcactggccagcttgaggctcaagggaaacaaaactccgagacagtggctgagttgaagaatactcttaacgaagcaagagcagtaaatgaggagcttcagaaacaacatgcatctctgcaagagattctgaagaaagtggaagctgagaaaattgatgctttacgggctctacaagatgaaaaggaggcaagggcatctgttgaatcttcacggaaccagcttttggaagatctcaaaggaatcaagttggaggaaaaacgccttaacgatcagattaagatgcttcaggatacaaacaagaggcttcaggaatataacacaagtttgcagcaatataatagcaatctccaagcagatgcaactaagaatgctgaaacaatcacaaagctgcaaaaagagaagaacaccatggtggagacaatgaacggtctgaaggatcatgcaaactcagtaaaaatgcagctagacttggcaaagtctttgcaaactgaagctgcaaaaacaaaagaatgatttattgaaggaggttgaaggtcttagaatggagcttcagcatgtacgggaggaccgtgataataaatcttccgaagtagattctttgatggctcttgttggaacacacaaagaaatgactctgaaaactgccatggagttagatggtgccatgacaagaa

SEQ ID NO: 14108 - DNA, 309 bp, Setaria italica
  Peptide Sequence Number=SeqID_80082
ctggaattcgtctgcttgtttccttgggttaaaccatcgactcacttggtactgtgctgtctgcgtcgtccaggatgttcgacggttctcgtccccgcacgcgtcgtgcaagctctgaaccttaatcttgacgacctcggcgcacagcctcgttaccccggcggcttcgttcttgatcacggtgcctcgattagccggagcaacgccatgctggcgagccagaagcggcgtgccgcggcagaggtggcctccacgttataatactgcagttctgttgtctgcccgtacgttctattttcacttccagag

SEQ ID NO: 14109 - DNA, 2081 bp, Setaria italica
  misc_feature (2076)..(2076): n is a, c, g, or t
  Peptide Sequence Number=SeqID_80083
ccgcaccttttcggtggcaagcacgccgctcctctcctctgcttttctgcttggagcagtggttgcggctcggcgtcgaggcgcggtgtgcaggggttcggccgccggggttggattccttggtttctcggaccggttcgagagtggaggaaatgtcgacggagtgctcggacctcggggaggagttctggctcccggaggagttcctagacgacgatttcttctccgaggaggagaaggcggcggtggccgcaaggagcgagagcgatgaggaggacagccttgccggcctctcgcgccgccttgccgggctcctcggggatgtcggcgagcggaagcctcctgccaaggccgaggtgacggttgggtcgccgcagtcgacgctgtgcgggctgcccaagtccggccaagagagcccgaacggcggggcgtccaaggggacctcgccgccgtcgtcgccgctggagcagcggccggcggatccgtgggagctcctctacgaggcggcagggcaggttgcccgcatgcgggcggtggccaacagcatccccgtgcctactaacggctacggcttcaacggccacggtgggttcgcgccgccggcgaggaagccgtcgccgccgccgccggtggctcctcccgccaccaaggcccctgccggcgggtactaccacccgctcgcgcaccttgtctcgcagcgccagatgcaggctgctcagttccatctcctcaagcaacagcagctgctcaggctgcagcgagagcgccagctgaccgcggcgtggagcgctcgccatggcgcaggtccgaaatccgttggctgcggcggcgacgcgcctctctgtctgaacccggcggcatggcccccgcttcagaagccgcagcagcaccaccaggcgccggcgcccctgccggtggcatgcgcgcggtgttcctcaccccgcccggcgccaagcgcgagcgtaacggcaccggcgttttcctccctcgcccagccggcgcccccgccgagccgaagagaaagacaggatgttcgacggttctcgtccccgcacgcgtcgtgcaagctctgaaccttaatcttgacgacctcggcgcacagcctcgttaccccggcggcttcgttcttgatcacgatgccttgattagccggagcaacgccatgctggcgagccagaagcggcgtgccgcggcagaggtggcctcgccggcgctctgccacagttcttgagttcagtcgccggtcggagcggacgaaggttgccactaaagattccggcgacaccttccgtcttttcgtcacttgtgtcaatcctaataataatcaaggaaattggttggagcaccttttgttaggtagtgtgttagcagcagagttaggaaggcaatactagtgttagcttcagtgttaggtctgttcattttggatccggtgatatattggtttttttggtgtggacggaaagcggtgaagatggacgaacagcgaagaaacccttgtcccagtttggtggtgtgggggaagaataataataagtggttggagagaggtgattagctgctgccagagcaaggaagaagatgatgatgagaaatgacatgaaaggaccggatggggtttatcttggagaagagaaaaaggaaataggagctcatttccccatccatccctccatggctttgcttgcgggttctaccagcacagacccagctaaggcctcctcctccctcttttttgcagccttttttacttgcaaaagaagcttgccgtgggctccatgaataagggcgcttgctttgttatcttagagtatgctcaaaggatttattggtgtttttcctgtactacttatagctagtagcagcagtagttaaagtgtcccctgacttttcttacatgggtctttaggagtgcagtggttattattagttgctttgctgctgcggcatcgacagcagcggcagcaagtgtgggctgattacaaaatgtctggtgtacttgactacttgctcgatggcatcatgggacatcaattaatatattgaatttcattgctttaaaaaaaaaaaaacaangacac

SEQ ID NO: 14110 - DNA, 2588 bp, Setaria italica
  misc_feature (2497)..(2588): n is a, c, g, or t
  Peptide Sequence Number=SeqID_80084
gctctgctcacgctccacgcccatccggccaagcccttgctggttcgccgtcgcgggagaaaggagaagaaaggaggatggcggctgcagccgccgcgagcatgggggtggtgcgggaggtcctgggccccgacgtcgtcgaggaggtggaccagcccatcatcgactacatcgccaacgtcctcgccgacgaggacttcgacttcggcgcccccgatgggcacggcatcttcgaagcgcttggagagctcctcatcgactccggatgcgtctccggccaggaccactgcctccaggtctgcagtaagctttgtgaaaagtttggaaagcatggtctggtgaaacccaaacaagctatgcgtagtcttgttacaccgttacgtatgaatgcggggatggacgaggatgtcgctccgaaaaagcaaccagaagtatttgagggaccattgctatcttcacgcgataaagccaagattgaaacggaaaaaaagaaaggatgagaggcaaagagaggcacaataccaaatgcatgtcgcagagatggaggaacttagggctggaatgcctcctgtttatgtagatcatagtaatgatggtggcccagctgttagggatatacatatggagaacttcagtgtcactgttggtggccgtgatcttattcaagaagccactataacacttgcctttggaaggcactatggccttgttggaagaaatggtactgggaagacatcttttctcagagctatggcgatgcatgcaattgatggtattcccaaaaactgtcagatattgcatgttgagcaagaggttgtgggtgatgacaccacggctttgcagtgtgttctgaatgctgatgttgaacgagttcaacttctgcaggaagaggcccgcctggttcaacaacagaaagacctagagattgaggttgagttcggggaaggctcgggcaagagcaaggttgatctcgacaaagattctattagcaagaggcttgaggagatatataaacggctcgagttcatcgatgcagatgctgcagaggctcgtgcggcatcaattttggcgggtcttagtttcactccagaaatgcaacgcaaacgtacaaaagagttttctggtggatggcgcatgagaatagctctagcacgtgctctgttcattgagcctgatttactacttcttgatgagccgacaaaccatcttgatctccacgctgtgttatggctagaaacatatctcctgaagtggccaaagacatttattgttgtatcgcatgctagggagtttttgaatacggttgtcaccgacattcttcatctacatggtagaaagctacatgcttacaaaggtgactatgacacgtttgagaggacaagggaagagcaccttaagaatcagcagaaagcctttgaaacaaatgagaaggccagatcccacatgcaggcattcattgacaagttccggtacaatgcaaagagagcatcgcttgttcaatcaagaatcaaggcattggagcgaatggaacatgttgacgctgttgtcagtgatccagactataaatttgagtttccaaccccagatgatcgccctggaccaccaatcattagcttcagtgatgcctcgtttggttatcctggagggcctattttgtttaagaatttgaattttggtatcgacctcgacagccgcatagcaatggttggtgctaatggcattggcaagtccactatactgaaattaatatctggagatctgcagccaacttctggaacagtattccgctcccccaaggtccgcatggctgtattcaatcaacatcatgttgatgggcttgatttaactgtgaatccccttctgtacatgatgaggtgctatccgggtgtacctgagcagaagttgaggtcacatctgggttcctttggtgtttcaggaaatcttgccctccagcctatgtatactttatcaggtggtcagaagagcagggttgcattcgccaaaatcaccttcaagaaaccacacattatacttctcgatgagccttctaaccatctggatctggatgcagttgaggcactcatccaaggtttactggtgttccagggaggagtgctaatggtgagtcacgacgagcatctcatcaccggaagcgtggacgagctttgggtggtgtcagacggcagggtgacccccttctcgggcacgttcaaggattacaagaagatgattaaataaaccgtagattagcactggagaacgcctcttcctcgcgcaaagccgcaaacgctgaaggaacgcatagtaaaccgagcaacagttttgagtggtatccagtttttatccattgtaccattgtactgatgcgacatgtacccttaccgtaggtgatggcatgcatcgtcatcatatacagagtactttgtaatgtatcaagtttggagtctaaaataaatgcaagagttttgatagaacgaaaaaaaaaaaaaaaactaannnnnnnnnnnnnnnnnnnnnnnnnnnnnnnnnnnnnnnnnnnnnnnnnnnnnnnnnnnnnnnnnnnnnnnnnnnnnnnnnnnnnnnnnnnn

SEQ ID NO: 14111 - DNA, 445 bp, Setaria italica
  Peptide Sequence Number=SeqID_80085
gagtggcacgagccagggcattgtttgctagttctagactacctttatcctccatacattgcacatagcggatccagaattctgaataactagcacatgcaataacacatctttcgtacaatttgataacagattactccattagctgattacggaggcccctccataaggaaaggagggaccatccttgcaaagtatgtctccatgagagaagagatgtacaagaaggccaaagaagcttgaaaattggcataactaccttgattttatcgagaaggaagaagacatcaataagtattttggagaagcttcctttataatgggatattgaactgaggatagagcgtggacataatgtttggtttcgatgaggctaagtactccaaactttcatttggcagtggtcgttctgggttaatgatatatggtaccaaataccagttgt

SEQ ID NO: 14112 - DNA, 432 bp, Setaria italica
  Peptide Sequence Number=SeqID_80086
cggagatactgactgcggagggaagcttctgtgtatggtgttgcttctgagaatagtgctcaggttcttgatggtgagacacatcctgatgatcctgataaatccagcaaacctgaagcagagaaccttgcaaagtatgtctccatgagagaagagatgtacaagaaggccaaagagtatgaatctaagattattggttttgagctagctattagaagaccatattttcacgtcaatcctcttgacaatccagagcttgaaaattggcataactaccttgattttatcgagaaggaagaagacatcaataaggttatcaaattgtacgaaagatgtgttattgcatgtgctagttattcagaattctggatccgctatgtgcaatgtatggaggataaaggtagtctagaactagcaaacaatgccctggct

SEQ ID NO: 14113 - DNA, 1032 bp, Setaria italica
  Peptide Sequence Number=SeqID_80087
ttctgagaatagtgctcaggttcttgatggtgagacacatcctgatgatcctgataaatccagcaaacctgaagcagagaaccttgcaaagtatgtctccatgagagaagagatgtacaagaaggccaaagaagcttgaaaattggcataactaccttgattttatcgagaaggaagaagacatcaataagtcttattggctccattatatgctgtaacggctagtattttggagaagcttcctttataatgggatattgaactgaggatagagcgtggacataatgtttggtttcgatgaggctaagtactccaaactttcatttggcagtggtcgttctgggttaatgatatatggtaccaaataccagttgtttgaatttttaatctcatatatgcaggtatttgcttaatgctcaccttcttaaccatctatctatcaagcaaggatggtccctcctttcttatggaggggcctccgtaatcagctaatggagtaatctgtgtgaacttctctttgttttttgtcaataccaaattcatattccctttagataccccctttcccccctcatgcttatgttctctgatggcactttctaccttttcaggttatcaaattgtacgaaagatgtgttattgcatgtgctagttattcagaattctggatccgctatgtgcaatgtatggaggataaaggtagtctagaactagcaaacaatgccctggctcgtgccactcatgtgtttgtcaagaagcagccagagatgcatctgtttagtgcacgctttaaggagcttaatggagatgtttctggagcacgtgcagaatatgagcatctttactcagtactatgtcctggctttacacatggaaagatagactctagatgaatgacagcctcaagaactggttttgttatgttcaattgctcatgcaattcagttaaggtatcccttgccctttccaaatcttggatggccaaaaataagaagcgtgagtactgaataagcaacgttggcaagagctggc

SEQ ID NO: 14114 - DNA, 462 bp, Setaria italica
  misc_feature (458)..(462): n is a, c, g, or t
  Peptide Sequence Number=SeqID_80088
aaaagaaacaaagaactacctacaaaccctaactatggcacaacctactactgatctgtagagtgatcctggagacggtgagtcaatgagcctgttaatctgccttcacgcatgtggtgtttctgcagtctactcggcaggttagcaagtaccaggccaaaggtatcgcaaggccctttgtagggctagtgttcctcgaagacggtgtcagcgttgaggtttaacttgcctttatccggacgctatttgcggtagtgctaccgaggatgatcacgagtccaaatctgagatttgtatagtcagaatattatgtttgcgagcatctgtcgctaggaatttttcattcgcgtagcttgtccgtcctactgtaacgctataatcgatatatcggtgttcgcaatgcttatgaattgccataacccaaaaaaaactgttcgtggttcatggacccaaaaaannnnn

SEQ ID NO: 14115 - DNA, 657 bp, Setaria italica
  Peptide Sequence Number=SeqID_80089
tggtgttgcttctgagaatagtgctcaggttcttgatggtgagacacatcctgatgatcctgataaatccagcaaacctgaagcagagaaccttgcaaagtatgtctccatgagagaagagatgtacaagaaggccaaagagtatgaatctaagattattggttttgagctagctattagaagaccatattttcacgtcaagcctcttgacaatccagagcttgaaaattaggacataactaccttgattttatcgagaaggaagaagacatcaataagtccattatatgctgtaacggcaattttggagaagcttcctttataatgggatattgaactgaggatagagcgtggacataatgtttggtttcgatgaggctaagtactccaaactttcatttggcagtggtcgttctgggttaatgatatatggtaccaaataccagttgtttgaatttttaatctcatatatgcaggtatttgcttaatgctcaccttcttaaccatctatctatcaagcaaggatggtccctcctttcttatggaggggcctccgtaatcagctaatggagtaatctgtgtgaacttctgaataccaaattcatatatcaaattgtacgaaagatgtgttattgcatgtgctagttattcagaata

SEQ ID NO: 14116 - DNA, 183 bp, Setaria italica
  Peptide Sequence Number=SeqID_80090
tctttcttcttgcatatttcttccaataaccaaagcaaagagggaactccgcaagaaatatgcagatcatgaaggtagacttgatggtgccaacaaagttatagaggtgtatgaacgagcggttcttgcagttacttattcagtggacatttggtagacttgatggtgccaacaaagttatag

SEQ ID NO: 14117 - DNA, 962 bp, Setaria italica
  Peptide Sequence Number=SeqID_80091
cgcagtcaccaacgagatgggcgagccggttccagagccatcaataacgaaagaagctgcggtttcagcagaagaggctaggttgtggagtgttgttactgcaaattccttagatttcaatgcttggaccacacttattgatgaaacagagaagaatgctgagagcaatattttgaagatacggaaagtgtatgatgcatttcttgcggagttccctctttgctttggttattggaagaaatatgcagatcatgaaggtagacttgatggtgccaacaaagttatagaggtgtatgaacgagcggttcttgcagttacttattcagtggacatttggtataactactgtcagttcgcaatttcaacatatgatgacccagagatcatcagaagactgtttgaaagaggtttggcgtacgttggaacagattatcgatccaatattttgtgggatgagtatgttaagtatgaagaatcactgcaggcatggagtcatctagctgtgatatatacaagaatattagagcatcccatacagcagcttgatcggtactttaattgcctcaaggaattggcttcaacacgggatctttcggagatactgactgcggaggaagcttctgtgtatggtgttgcttctgagaatagtgctcaggttcttgatggtgagacacatcctgatgatcctgataaatccagcaaacctgaagcagagaaccttgcaaagtatgtctccatgagagaagagatgtacaagaaggccaaagagtatgaatctaagattattggttttgagctagctattagaagaccatattttcacgtcaagcctcttgacaatccagagcttgaaaattggcataactaccttgattttatcgagaaggaagaagacatcaataaggtatggttttgcacttatagcaaccttttgtctttttttatttagtagatttttatgg

SEQ ID NO: 14118 - DNA, 1647 bp, Setaria italica
  Peptide Sequence Number=SeqID_80092
tagatattctttttttcatttgaaaattagtcgcttttttttgtttggctataatgatgctattattgattaactatacactgttgtttattgattaaaaggtcgctagctattagaagaccaaacgtcaagcccttgacaatccagagcttgaaaattggcataactaccttgattttatcgagaaggaagaagacatcaataaggttatcaaattgtacgaaagatgtgttattgcatgtgctagttattcagaattctggatccgctatgtgcaatgtatggaggataaaggtagtctagaactagcaaacaatgccctggctcgtgccactcatgtgtttgtcaagaagcagccagagatgcatctgtttagtgcacgctttaaggagcttaatggagatgtttctggagcacgtgcagaatatgagcatctttactcagtactatgtcctggctttctagaggccattgtgaagcattccaatatggagcaccgactgggtgatgatgcatcagcttgttcagtttatgacaaggccatttcaactgaaaaggaaaaggaacagagccagctcttgccaacgttgcttattcagtactcacgcttcttatttttggccatccaagatttggaaagggcaagggataccttaactgaattgcatgagcaattgaacataacaaaaccagttcttgaggctgtcattcatctagagtctatctttccatgtgtaaagcgtattgaatttttagattcacttgtggagaggtttattacacatgaatcatctcaaggagaggggtcaagtctaggcgacaaagaagaaatatcttccatatttttggagtttttggatctctttggggatgcaaagtcaatcaagaaggctttaactcggcacacggctctcttttcatgtaagagaagcattctaccatcaaagaaacggaaagcagatgatgctattatgtcagacagggacaagttggctaaaattggtggtactcagccagttatggggactgatccaaatgctcccaatcctccagtttggcccgcgacttctgaagcatcagggcaacaatggggagctggttatgcacctcaggctgcataccctgcatatggaacttatgactacagccatcaaatgcctcagcctgctgctcaagctgcttatggtgcttaccctcaagcatacccctgctcagggctacacacaacaaagctacgcacaacctgcagcaatggcagcagcaccagtgcccgcagcggcaccagcaccggcaccaacagcagcctaccctcagcaacctgcggcagcagctcctcaaccctactatggcacaacctactactgatctgtagagtgatcctggagacggtgagtcaatgagcctgttaatctgccttcacgcatgtggtgtttctgcagtctactcggcaggttagcaagtaccaggccaaaggtatcgcaaggccctttgtagggctagtgttcctcgaagacggtgtcagcgttgaggtttaacttgcctttatccggacgctatttgcggtagtgctaccgaggatgatcacgagtccaaatctgaagaatttgtaataagtacaagaaataattaatagtttagacgaagaca

SEQ ID NO: 14119 - DNA, 432 bp, Setaria italica
  Peptide Sequence Number=SeqID_80093
gcagagaggccgggaagctagttgcgagagagtttgtgcctagcttgtgacttgtgagcgatcgagagagaggatgccatctctgcagctgggcctgtacaccggcggcagccggaggaggttccatgccaggagcggcggcctgtcggcggcggcggcggcgaagcagctgctgtcgaggctgaggtccacgtggaggagacgcgtggtgcggccgaggagggccgcggtgaggttcgggtacgacctgcagagctactgccacaacttcgacgacggcctcgcctcctccgaccaccgccggttgtagctagaacctagagctatgagccagtactattattccttcagtttcttctccagttctgtgtgtaaatgattgtgcctcgtcaccgggagagtactagccgatttccagtgatgattagctag

SEQ ID NO: 14120 - DNA, 270 bp, Setaria italica
  Peptide Sequence Number=SeqID_80094
aatcgccgtcgtccccgccgtggacgacacggtgtcgagcccgccgtcggtcgccggccacacgaaggacggcttgaagggcggcaccgccggcggcggcacggacccgagcaggacctgctggatggccggcgtcctgggccgctcccccggtgtcgggtggctgcaggcgagccccagcaggatgagccgctccgcctgctccctgtcgaacgcgccctcgaggcgcgcgtcgacggcctcgagcgcgcggccgtcgcggtgcaggcg

SEQ ID NO: 14121 - DNA, 880 bp, Setaria italica
  Peptide Sequence Number=SeqID_80095
gacatcatcgacatcctctccggcacgcggtacaagagccgccagttcggtgtcctctgcgacgtgctcgaccacatgaagcgccacggcacgaggtcggtgccggttgaggagctgctggcgatcctgcgcgcctacacggagaagcatctcacgcacatgaggaagctggccaagaagcggcgggttcggatgcgtacgccgccagagaccgacgcgctcaacgtgctgctggacgcgttctgcaagtgtgggatggtcaaggaggcggaggcggtgttcggccgcgtgaagaggaagttgcagggtaatgccgagacgtacagtatcctgttcttcgggtggtgccgagcgagggatcccaagaaggccatgaaggtgctagaggaaatgattcagatgaagcacacaccagatagtttcacctacatagcagctatcgattcattttgcagtgctggattggtgtcagaggcaagggagttgtttgagttcatgaggaatgagggatcaacgatatcgtcacccacagccaagacgtattcgattatgattgttgcgactagctaaggctgatcaaatggaggagtgttttgaactgatttcagatatgagaagtagtgggtgtatgcctgacgtatcgacttataaagatttgattgaagggatgtgcttggtgggtaaactggatgctgcctatcgtgtgttggaggagatgggaaaggctggatttcctcctgacattgtcacctacaattgctttcttaaggtactttgtagtcttcgaaaggctgatgatgcacttgaactttgtgagaaaatgatagaggcacattgtgagcccagtgttcatacctataatatgctgatggtgatgttc

SEQ ID NO: 14122 - DNA, 662 bp, Setaria italica
  Peptide Sequence Number=SeqID_80096
agtaaagaaaaacctaaagaacctaagaacttagttacaatacaaccaacccgttagtgaagcttggtcatgaaagatgcagcggttatcaatttcttccgcaaggggctggtctgttggcctgttgcaccgttttgaggcttctaggccaacagattacttcataagttgcttacttgacatccaccaagctttaaccgttgctgattgtactggctgtcaggagcactttgcaaaatcttttggaacatatttgatggtgatgaagatcgagtcacatggcagtgacagaagactaagaggcgttacaacttgcacagtagctggaagccagctagctggtctgttgtacctcaaaacaacttgttctgttattttggagcttggacgatgatgttataaggtagtgttaggttcaggggcgagactgctgggacaacctattagtctgacaacggtagattagagaagtatggagaagcatcgggtatactaattgacctattatcgcttactggttggctttttgttgtacattacgtactggtgcttaaagagttgttgtcttctgacagccttttttgttcactttctaggcttctcgaataataaaccaacatggcatcactgcaatgtaaccttactttaccaatagaaataaa

SEQ ID NO: 14123 - DNA, 360 bp, Setaria italica
  Peptide Sequence Number=SeqID_80097
gcagcggttatcaatttcttccgcaaggggctggtctgttggcctgttgcaccgttttgaggcttctaggccaacagattacttcataagttgcttacttgacatccaccaagctttaaccgttgctgattgtactggctgtcaggagcactttgcaaaatcttttggaacatatttgatggtgatgaagatcgagtcacatggcagtgacagaagactaagaggcgttacaacttgcacagtagctggaagacaacaactctttaagcaccagtacgtaatgtacaacaaaagccaaccagtaagcgataataggtcaattagtatacccgatgcttctccatacttctctaatctacc

SEQ ID NO: 14124 - DNA, 1469 bp, Setaria italica
  Peptide Sequence Number=SeqID_80098
gagtgctgcaaatggttgccatgtttcaaatcagctagtgctttgctgtctttgatgctccaagatggcttccatccgacttgtacgacttatacatctctcctgaaggttgtattagcaaaagacgattttgagggtgctctggatctgcttgatatatgcaagactgaaagaattgagcctgacatacagattttcaatacagtactctcacgtgcatatgctagaggtcaaattcacgtcattgaatatattgtggagcgtatacatcgagcaaaaattcaacctaatccatcaacactcgtgtacacattttgcgcgtatgaggagcatgaactttacaatactgcaattgaggcattgcaagtactcagcacgagaatgatatctgaggatgccaacattcttagcgagaaaataactgtttttgaagatctaatcctcagtgaagagcctgatgctgaattgagaatcataagggcattcgaagcagctgaagaatttcttgcgacggctttactgaacctgagatggtgtgcaataatgggtgccaccatatcgtggtcaccagaggagagtctttgggcaaggaggctggcatcctcgtacaatgctaacaagagaccacatataatcccattggatgtcccccaatcttcgtgaaggaaaccctatttcctagtgtccgggtaaggaatccacttaagcacccattcaggaagctaatggaggcagaacagagtcattgtccctacctagtggtaggcagaaccaaggtgaatctctccgctaggcatgatgactacttcatgttttcttttgcccgaaagcatccagttgttggaattccttttacctaaccatgattgcagtagagagaacaattgaacctgcctgcttgttcatcaccacccgttgtgaagcttggtcatgaaagatgcagcggttatcaatttcttccgcaaggggctggtctgttggcctgttgcaccgttttgaggcttctaggccaacagattacttcataagttgcttacttgacatccaccaagctttaaccgttgctgattgtactggctgtcaggagcactttgcaaaatcttttggaacatatttgatggtgatgaagatcgagtcacatggcagtgacagaagactaagaggcgttacaacttgcacagtagctggaagccagctagctggtctgttgtacctcaaaacaacttgttctgtttatttggagcttggacgatgatgttataaggtagtgttaggttcaggggcgagactgctgggacaacctattagtctgacaacggtagattagagaagtatggagaagcatcgggtatactaattgacctattatcgcttactggttggctttgttgtacattacgtactaggtagacttaaagaagttaagttaagtaaacttaaactaaagaaaacaaaagaaaccttttaaa

SEQ ID NO: 14125 - DNA, 527 bp, Setaria italica
  Peptide Sequence Number=SeqID_80099
ctctgagttgaccaagagcaaggccttcattcacataactaaagtactccaactctgatacctgcgagtttgctattaagagcgaccaacctactggcatgtactttgaaaagtgtcacctgttgggttgtaacggcacgtttatcctttgtccccgcaaataccaaattgatcgtggctgaacccctagcatctttcctataactcctagtgcctcttgtgtgtctctgttctccttataaaggtgaaacctcaggaacttccccaggtgataaggccaggatgtagagcctctactatcaaacggcctgtcatctctccagcctgaaccgtccatgcctctcatattcctccctctcccaccgcgtggccctgatcccaaccgcaccctaatacatttctgaatcccatcaccgtgctcaaccgtatccgtgatcaggaacttgaaattcctcttgatgaactcgtgcacctccaaacgatgagccttatcggcatctgctgagagaatgattggcgacaaatcc

SEQ ID NO: 14126 - DNA, 725 bp, Setaria italica
  Peptide Sequence Number=SeqID_80100
gccgcggttggtggtcaggaggagatgccaggaggaggacaagcagcagcagcaggagcaagaagtggcggagggaagcggcgccgacgagcagcagaagagaacgttcctgagcctggaggaggccggggctggtggagatgtccggcctcagcacgcacgagcgcttcctctgccgcctcaccatatcgtcgctgaatctgctgagggtgatatcggagcaggagggcgtcccgatagaggagctcaacgccgggcgcgtctgcgactggttcatcaaggacaagctcaagagggagcagggcctcggcaccgccgttctgcagtgggatgaccctggcctctagctctagctccatcctaagccggaggtcgtcttgctgcacgggaagaggaggatgcaatgcacgcagggctacggttgaatagaggtttttgtgctgtcagtgccctctgctggatgcacttgactgaccaaggagatgggcttgatgacatgttcgcttattcagtcttcaccatacctgtattctgtagttgcattgcatgattgcatcatcatacctgaagatagcattagacctgtgtgtcaggctaaacttccccatcagtgagtgatatgatcatatgagtatacggttcaggccctttttgggtgagcaaccaaagctacaatacaagaacagtgttgtacgagcttctgataaaaaaaaaaaaaaaaaaaa

SEQ ID NO: 14127 - DNA, 297 bp, Setaria italica
  Peptide Sequence Number=SeqID_80101
gtttcccgggtctagtctagtcttgtcctgaccccggtccagatcatggcgcggtccagcccgagcagtttcggcgagctgctggagcgggagctgaacacacggctgcagctgagcccggacgcatcgtccgtggtctcgtcgctgtcgccgcagtccccggtggtgcaggcggcgcagcagcggccggcgaagctggggaggttcctgcaggcggtgagggcgctgtgcccgaagattatggtggtggcggagccggaggcgaaccacaacgctgcgtcgttcctggagcggttc

SEQ ID NO: 14128 - DNA, 613 bp, Setaria italica
  Peptide Sequence Number=SeqID_80102
cacgtgctcgccttccttccaccgctgcccgccaccacctgatcttctccacagtaggacgatgacgaagcaggcacagctgctgcacaagatccgacggtacgacggcattgcgcaggcagtcgaccccgtggatctcgaggcacggttcaccaccacctccgagtccggcgagtccgtcgacgcgagcacgcatcccgcaaccacgagctcctgcacggacaccaccagcagcgcgacaacgacgaagacggcgtcacgccacggcgaggagcaccaaagcgtcgagcagccatcacaagagccggaagagcccgacgagtaccgcctgctcgcgcggctgctcctggaagacacggtggccgtcgtcgacgaggtctcgcaggtgcttctgctcgagttcttcacggagggactcgaccgtctccgttgttcctcggcggccggatcggtggtcggggcgatcatcagtccgcgggtggacgacgagcgcgacaaggtggcggcggaggcgctggtgcgcgcggccgcggagtggctgcggggcgcggggcccagtggggcatcagggacgtgatgctctcggggaaggcggcgctggaggacatggagc

SEQ ID NO: 14129 - DNA, 265 bp, Setaria italica
  Peptide Sequence Number=SeqID_80103
ccgcggcaacgccgccatcgtcgtacgaccagtcccggaacgccaacgcgttcgcctccacgtactcgcttctcagcctggtgaacgcggcctccatgggcggcggctccgcggccgccgccatcgacgagctcagctcgctggtcgggcacggcccgccggcgtacttcaaccaccaggccggcggcagcttcctccccctgccaacgccgtcgtcgtcgcagccaatggcgctcgggacgctgccgatgtcgctggccgccat

SEQ ID NO: 14130 - DNA, 285 bp, Setaria italica
  Peptide Sequence Number=SeqID_80104
gttcaagtccaagtcccgccgcccggtcatcctcctgcttgatcgtggagattgcttcttcgcgctcaaggcgtggaacgcgcagcgcgcgggcgcagcggcggtgctgatcgccgacagcgtggacgagcagcttctgacgatggacagcccggaggcgtcccccggcacggagtacatcgacaagatcaacatcccgtcggcgctggtgaaccgcgcgttcggcgagtccctgaagaagatggcgcagaaggtcgccgccggcgacgccgccggcgaggaggt

SEQ ID NO: 14131 - DNA, 683 bp, Setaria italica
  Peptide Sequence Number=SeqID_80105
agctcgtgagcttcccagatggtgtctggtgtcaatgaatcttgtccatgatcctgcctctctattataaactctaagcttacagccatcacggcaatcagaagaataaagccgcccgttgaatgaaatgcttggattccgccaaccagcgaccatttcattaccggtggctgaccacattttagatgctggtagatagacctcactcacgacctggcgatgagaattgagaccttttaggaaccacttgccatcatgtactactccaatggagggcaccattcctgtgctcatttcagcaatgcaagaccatctattcctgtttggatcatatacctcagcagacctcagagttctttgtatcccttcacactccccaccagcaacataaagacagttgtttatgacacaagaaccaaagcagtgccgcttttgcagcatatctggagctcgaagccatttgtttatccgagcattgtaaaatacaacccgcctcatagacccatgtactgggtctttgccgccaaataagtacaggtagcatccattgagaacagcacaaccaaaaccaacaacttctgaatactctggtggaactggaggcaatgacttccagagctggtttactggatcaaaggcataccaagatagcttctgatcacgatcccttttgaacacgtacg

SEQ ID NO: 14132 - DNA, 1329 bp, Setaria italica
  Peptide Sequence Number=SeqID_80106
tttttttttttgtcagtgagatggataacataagcaatgataaaaccaagtaccatattcagatgtcaaactgtacttaatttaagactaacactggaagagtcattaacttaaccgatatgcagttagctaagatgaaatttatgtaatatatcctaatatgtaagctactgcactaaacaaaaggattaccagcaactctagagtttctagttctaccatttccaccatgtcatcaccaaatcctcgctggtttgatgcccatctcaatttccttaagctccagctccagctccagccgctcattttccagctgcatcctttcattctccagcttcatcttctccagttccctgtccttctccttgctggatctcagccacttcaaacggctctgctcgagtttcagcatcccctctttaatcttcagacgttctctctcaatttgagttgcattcataccacttagattcttctcagcagcagaaccaccagcaccctcagcaaacattttattcatgtcaatggcagcaacttctgacagatgagacccacagtgtcccccctcatggtcatgcttcagcttcttgttgccatgaactctgtggtgaagatgatcttcagcactggcctccagatcatcattgaacccgtcatcatcgtcatcgtcatcaaaaaggaacatctgatcatcctcatcatcatatccaaacgagcacttctttccctgttcatccggactcctaagcgccacacgcagcgacctctgaagggccggatcatcaagcaggcagtgccggttatggttgtggtaggagcacatctcctcgtagtgcaggtgctttgagttcaggtgtttcttggcctcctccttgagctttgcagataggctcacctgttcaaggagtgccggtttcttgacgatctcagaagccataccctggccaaggatctctgtgagccttctgtacctcttgttgaggtcgttgaacttatcctcgcactgctgcggtgacacggggaaccccctctcggtcatggccgaggagacgagcctccacttgcccttcctcttgagcatggcgtgcttcttcctcccgctgctggtgccgtggtcggcgtcgatgtcgtcgtcgatgtaggagacggccgaaacgagcagcttcaccatgtcgctggtccacttgacccggtgccactgggaggccggggccgccgccgccttgccgcggccgtggtggccgtcggcggcggcctcctcgtcgctcagggaggccttcaccgcattcccgggctcctgcatctggttcgcggcgggggcagcgaacg

SEQ ID NO: 14133 - DNA, 1442 bp, Setaria italica
  Peptide Sequence Number=SeqID_80107
aagaaaccttacgtggagccatacatgcttctaatctgtacagtgtaagcattcagcacaaagaattcttttgctggaagccaacgtatcaacatattagcaccaacaactcaatgaggccaaatgatgtgattgaggctcaggacatggtgcctgctaaaggaaaccgcagttgctcctcaagtgttcaatccactccagaaattgagaagaagtatgtgcatcgtgtctatgatgccatagctcctcatttcagtgcaacaagatttgctaaatggcccaaggttgcagaattcttgaattccctgaggccagggtcagttgtactggatgctggctgtggtaatggcaagtatttgggctttaaccctgattgtttcttcataggatgcgatataagcccacctcttattgagatatgtgctgggagagggcatgaggtgttggtcgctgatgctgtcaacctccgtacagggataatttttggggtgatgcagcaatttcaattgctgtgctgcatcatttaagtactgatgaaaggcggaggaaggccatagaagagctgatccgtgttgttcggagaggtggtctggtgctcataacagtctgggctagggagcaggaagacaagtcattgctcaacaagtggactcccctttgtgagaagtataatgaagagtgggttgatcagagcagtcctccagtacgcagtcaatctgcaactcttctggaaagcattgcagaaactgatgaagatgctggtgtaatgaagcaagcagatgatcgattgaaaaaatgtcacgattccatggaggataaaaccattgcagcctgtagtaatacagatactgatgagaaggagacaaaccagcaggagtacttcgttccgtggcacctaccatttcaccgagctgaaattggtggtgcatctgctgctgctcttgagaatggatttgcaaagaaagatgagaagaagggcacagtggtctacaatcgctattatcatgtctttgttgaaggagaacttcaaagattagcctctggcataaagaacactgctattgttgaccagttctatgacaaatccaactggtgcattgttctcgagaagctttgagctgcagtcaaaagggatggcagaagtagtcatctgaagctggtatttgtaaggagcgtcagtggtaggcgagctaactgttttgagctcaaaatgtatgaggctgacgcaaccaaccttttgttcgatacttgccgattctgcatcggaattgttaagacttatcttacgtcagattgctcaatattttgagggccatctggacttgtaaattttttttgctgtatcacgttgatgtcataattcataatttagcatggttgcttgtacagttttgagtttcgttttttttacacaaaatgaagccggtcgtttgatctctcaa

SEQ ID NO: 14134 - DNA, 1115 bp, Setaria italica
  Peptide Sequence Number=SeqID_80108
ttcccgtttcgttcggttccgagtcccggaagagcagagcgagagcgacatgggcacgctctcgccgccgccgcgtgccgtctcgctcctcgtcctcgtcgccgtcctgttcacgtcgacgggggccgtgacggcggccaccgctacccggcgccgctacgacgccatcttcagcctgggcgactcgtacgcggacacgggcaacggccccgtcgtcttcggctggcattccatcgccaaccccgtcatgcggccgccctacggctccaccttcttcggccgccccaccggacgcaactgcgacggccgccttgccatcgacttcctcgccgagagcctgggcctgccgctcgtcccgcctttcctggcgcgcaatggatccgccaccagcttccgccgcggcgccaacttcgccgtcggcggcgccccagccctcgacaccaccttcttccaccgctgggatccacccggcggcagcgtgttcccgctcaacaccagcctaggcgtgcagctgcagtggttcgagtcgctcaagccctcgctctgcgccacacccaaaggttgcaaggagttgttcggcagatcgctcttcttcgtcggcccgttcggggccaacgactacctcctctccttggccgcgaagagcgtcgacgaggtcagatcgttcgtcccggacgtcgtggggaccatctccatggccgtcgagaggctgataatccatcacggggcgacgacgctggtggttcccggcgtgatcccggtgggatgcgcgccgccggtgctcgtcacgttcgccgacccagacccggtggcctacgacgcccggacaggctgcctcaaagcgatcaacggcatcgccgcccgccacaacgcgctgctccaggaggccctgcgagagctccgggacaagcaccggccggccggcgtcaccatcatctacgccgacttcttcgggcccgtcatcgacatggtcacgtctcctgctaaattcgggtttgaaggagatgttcttacgctctgctgtggagggccggggaggttcaactacaacaagcaggttttctgcggcgatcgaggcgcggtcaagtgcagggacccgtctgctcgcttgttct

SEQ ID NO: 14135 - DNA, 604 bp, Setaria italica
  Peptide Sequence Number=SeqID_80109
taactatctcccttgatatcttctaatactattccagaagtgtcggtggtgtcaatatttggttttctgttgatgatttcgagcaacctctgtgctgcggacttcccttctgcaattgcagaaatagatggtgatgcgttacctatagccattgaaccggttaaaatcgcaaatacgacattgatgacctgccctccagtatatcctttgccgattattaacttggcgccataccagaaggctagagagtaactgcagaagacaacaaaaaatatgcagcctattccaagaccagtgacaatcccttccgtgagagtagccttgtatgccttttttatgtgattgttgtacattgcaactgctttcttctcaccattgaaagatacgactgttcttatcgctccaatggtttgctcgacaacgttccctgcatctccatatgattcttgtctctttccagatatttgagctcgcagtcgggagacagttgcaaaggaagaatgcttgggggtatgcacgcaagcacaacaagagccagcatccagcctcttacgaatccaatgataaagccaccgacgaaggttgtcaaaagctgtatgtactt

SEQ ID NO: 14136 - DNA, 460 bp, Setaria italica
  Peptide Sequence Number=SeqID_80110
gacatcaaagacatatgactggatctgctccctggtgttagtaagcctgtaaaaggcatcagaggccttgtcagcaagggcacggtattgcacagatgccacaacattgacgaagacattatcctttgtctttgtttcgcagcggacatcaagctgctgaacacgcagtgaaagatacccagcaatctgcttgcctatgcaccatggcaagaagtggcacccaggccctaggatctcatcaaactttccaaaagattccttgatggctacggttgattgatccacttgaatcaatccaagtgcttgacccatgtcttatctatgtgcatacaagcttagcgaggaaaggcaaggtttatcagctccagggctttcttgctcttcaggaggtagaagcacaatatatagccttgtaaatacaagtggatattttgaaggaagtgggaggtgggtacatcat

SEQ ID NO: 14137 - DNA, 1523 bp, Setaria italica
  misc_feature (12)..(12): n is a, c, g, or t
  misc_feature (34)..(34): n is a, c, g, or t
  misc_feature (49)..(49): n is a, c, g, or t
  Peptide Sequence Number=SeqID_80111
tcggttcgttcnctttttagtttttttttttttnttttttttttttttntttttttttttttttttttgatgaaggcgtttcctcagcctcgccagcttagatagttccaaatagtacgatgacatgacgaatttttacagcaacaggcacttatcctttactggcacaatccatgcaatcctatattccctctagataataaacacacgtagcagacagaataaacaaaagctgtaatgaagtgcaagtactcatcacattactaccttatccctaatttttactcaattcacaagatatgtagaattgtagtggctctgaacttctttactgatgcgaatgtcaaaggcgcttttcgatgctctctcacaccaacttggcctgaagcgacccgtcccttatttgtgccgcgatgtccttgacggcaccaggtccatgagggatgaagacagaagaggacttggaagaggccccgatctccttcatggtgtcgaagtactgggtcaccagaaccatgtccatgacgtcctttgcagaggtcccagggacattctcagagaaggcgaggacgctgtctctcagcccatccactatagcctggcgctgccttgcgatacctagaccggccaagtacttggattctgcatcaccttcggctctcttgatctgcaggatcttctccgcttcagctttctcgttggcagccacccttagtctagcagctgcattgatctcattcatggctctcttcacatgctcatcaggctcaatatcaacaatcagggtctgcacgatctcatatccatacatggacattgccttttcaagttcatcttccacagctttagcgatttcattcttctgctcaaatgtatcatccaagttcatcttaggaacactagccctgatgacatcaaagacatatgactggatctgctccctggtgttagtaagcctgtaaaaggcatcagaggccttgtcagcaagggcacggtattgcacagatgccacaacattgacgaagacattatcctttgtctttgtttcgcagcggacatcaagctgctgaacacgcagtgaaagatacccagcaatctgcttgcctatgcaccatggcaagaagtggcacccaggccctaggatctcatcaaactttccaaaagattccttgatggctacggttgattgatccacttgaatcaatccaagtgcttgacccatgtcttatcttcttcctccggatgaaccccaggcgcaggcgataactgacgaagggcttggcctcgtttcctccgcgcgctcctccgtcgattgccttctctctttctccctcgatcgaccggtatttatggcggaatcgctgccgcgtctgcgaggggaagggcgattggaagaggattgctatggagtatggatggcaaggaaatttgggacggaattgctccaagtttccagttcccgtgggctgcctgccgctggctgggtggcccgaccctgctcggcgggggaggaggtgaacaac

SEQ ID NO: 14138 - DNA, 1059 bp, Setaria italica
  misc_feature (1003)..(1003): n is a, c, g, or t
  Peptide Sequence Number=SeqID_80112
aaccggagcgtcgaggcgctcgcgaccgccgcgctcgtgcaggccatccgcgaggcgcaacagccccggacgctgcaggaaatctctactgctagcaatcttcctcagaaagagataggaaaatacatcaaaatactcggagaatctctaaaactgagccaacctcttaacagcaactcaattgctgttcatatgcctcggttttgtagcttgctccagctgaacaaatctgctcaggaacttgcagctcatatcggtgaggtggttgttaataaatgcttctgcacacggcggaatccaataagtatatctgctgctgcaatataccttgcatgtcagctcgaagacaagcgcaaaactcaggctgagatctgtaaagtaacgggccttacagaggtcactctacgcaaagtgtacaaagaactcttggagaactgggatgatttgcttccccctgactatacaccggccacgccaccagagaaagctttcccaatgaccaccatttactcagggcgctcgtcaagcggcaaggatctgtatcaggataagatattcgatagtattaagcaaaaaggccctgagcctgcagagcccgatcacatggtcattgtgaaagaagaggaagacaagaaaatcagtgctcttggtcgaccgcctgcaaaacttgagcctcatgagttgagcaaggcattctggccatcaaatgcccctttctcaacatctccaaaatctgatcgtgaaaagactgaaactagtgttcgtgggttcaaccttaatgaggtatcatgtgcaatggattctgatagagcagataccacagtgaagccaaatttcggcgatcgatcgttaaatgaatcaaatatgcttccatctcccaataggcagcctttaccatggcagcttaagcagggggcgcctgcaactggtccatattctaggcttcgtgatcagcacctgggcctggaccttgtagctgctctaaaggggattggaaaaaggngtgctggggaggtagtgatggccgggataaggaagggaagtgaatagctgcagctg

SEQ ID NO: 14139 - DNA, 509 bp, Setaria italica
  Peptide Sequence Number=SeqID_80113
tgtttcagtaaggtctcctctttcagcagccttctcaatttcctcctcaacatcttcaccagctcttatgaaacttgaaactaaaatcctagctttgcgaacttcttcctgtgggtaagctttcaggcgcatgcctatttcttggtattcacttgttattctttcctcctctgcctcctctttctgccgatatgcatgccattccttagtcctttcccgctgacgggcttgccactcctcgtcgtagaactcgggcggcatcccctccagctcggcctcctcggcagcagcagcccccttggtcttctccacagctgatatggggaagagggacctcgcggggcggagagggctcaggcgcaacggaatggggctccgccggccggggacgtggggaccggcggagaggagtaagggcgaggccggcctcggccggagagaggtgggcagcgcgggcgccatggccgccatatcgcgcgagcacggccgacgagtccagcactgagcag

SEQ ID NO: 14140 - DNA, 604 bp, Setaria italica
  Peptide Sequence Number=SeqID_80114
ttttttttttttttttttgactcaatagtactatcatccaatggctaatatcaaggccaaccagtttttaggcaacaagtctttccgtattgaattattgttgatacagcaagttccagttaatacccacacatggatacatcaaggacatcacaggaatatcaggccactactggtacctgaattccaccattcctttgattccaacaccagagagtgctgccctgagtatttatgcatgacgaatcgatgtttcgtgtcgcctctgaccatgggatcctaatatggctaaatctacgagcaagtggtaatactgaattatcttcatttccatacaattgttgcacgaaaagacatgctggatcattcctccagctcgatcattctccggacgtcatcaattaccagccaagatttgtgcccgccgatcacctcggcctgtttctgggagtcactccacagctgtatagaaggcatctttgttactccagcacggttcacaagcttttgtggaacagcattgacatcaacacagtagaaccggactcttggatagtattctgcagccaacttctcaagcttaggcttcaaatatatacatttt

SEQ ID NO: 14141 - DNA, 994 bp, Setaria italica
  Peptide Sequence Number=SeqID_80115
tttttttgattatagaagcttcaatacccatttgttttgtcaatgagaaggaagagtctgacatccccaactggggcaaaaacacgtacgtacaacctactacgccaccagcagaacgcaacattctccaggttctttacacgcgccaaccgcccgttcgccgccatggttccttggctcacgcacacgaaacgcggtaaaaccccaaacccaccggcaccacgagcccgacggccgcgcggatcatcatcagccgatcgatcaccacgagcccgacggcctcaaaaactaaaccaatccgagcccgcgttccaacaccacaccacgcgcaaaggaaccaccactacccaaggcgcccgagcgatcggcctcagcttccaccgtgccctcgccgtccgccggtgcgctcgtcctcgccgtgcccggtcacagctcctgttctctggccaggtcgtcggcggacggggagcccatgagggagccgtgctcggcgaggaacctctcggcgatggcggcgtgcacggcggcgccggtgggtagcacgtcctcgtcgatcatgaagtacggggagtggccggtgtgcacggaccccagcgtctcgttccgcaccccgatgtagtagaacccggcggggactgcctgggagtagaaggagaagtcctcggcgcccatcatcgccggcacgtcgcggtaggacccggggcccaggagctccgccgccacgcgccgcacgtgcccgtacatgcgcgcgtcgttcaccgtcggcgggtagaagctctcgtcctcgaagaagtccacggacgccaagcacccgtgcacccgcggctgcgccgcgatcacctcctcgatccgccgccggagatggtagaagctcgcgttcgagaaggcccggaacgtgccgcccagcaccacgccgccgtcgccggtcccgttcacgacggccaccgactacctaccttagtgtagttcctagggggttccgtccttcgtcggt

SEQ ID NO: 14142 - DNA, 1365 bp, Setaria italica
  misc_feature (1248)..(1248): n is a, c, g, or t
  Peptide Sequence Number=SeqID_80116
taataactgatgctgagttggaaagattacaacaagcattgaggattctttctgatgctgaaaaacagataagactctcaagtgagcgttcgacatggttcactgcagctttactccagcttggctcgggtcataattcagaaataacccaatctagaagcagcagtaagcaaagcgctaaagcaaccagtgaaaccatgatggaagcagtgagagaatcctctgcgagcaggactacatcttatcctttattcgctttccgtgattcaaagaaagcattggatctcaaaacaaccagcgggcactccagtcctcagggcccttcgttgtcgtcgaggatgaaacccaatgacaactttatttatggcgaatgtaggtctgttgatagagcattactggattctgctcaaacaagtattccttctgaacaaaggaatacaaatagtggaatctcagataaccttacccgaatttggatgaaatgcatagagaactgccactccaagacattgcggcagcttctctatgatcatgggaaactagcatctgtcaaagaatgtgaaggcaccattattactttcgtagcatttgaggacaacgatataaagtttcgagcccaaaggtttgttagcagcatcaggaactcaatggaaactgtactgaaatgcaatgtggaagtcaggatttgtttaattcaagaatttctcgctggaggactacagcatcaggtgtatccagatgaaacaggcgagtctgatgttttgagttgctcaacaaacagtgagcgtctgaagggagttttgaacctgtcaggtgctggtggtggactacagtcaagcaacgttcccatgataatctctgaaggaaattcagggatacatagaacacgagggcaggaggttgctgttgaacagttgaagacggcagctcttgatgagcaaaggttagagagtgcatggctccagactgctgaaaaacacacacctggtacgttaaatcaagcaagaccggagagaaatcaagttcttccacaaactgtgggtcagcatcatgggaggtcctcaatgaccactattgttccctcgaggcatgctgacaaggatctgactaatgaattgaaagccttaaagatcagtgacagccatggttcccagaaatatcagaatgtacagacagagaatggttatgcatttcaccaagcctcttgcacagaaataaccatttggcaaattgtgacaatgagagtgnggtttctgagtctggagcaccaggttgccatgggctcttcccatgctggaaaactgaaaaaacaaaaagaagaaagggaaaagggcagacacggttgagctcatcttaagtttggca

SEQ ID NO: 14143 - DNA, 805 bp, Setaria italica
  Peptide Sequence Number=SeqID_80117
ttctatgctaatgctggtgctgcagactcatcacttgatccattattgtcagtatcatcctcaggtaagatagcaaccaattaaatagcttctacaagcactaaacaaggcctaaaaaaataccataccacaatcgatctacacgaatggacttgtaagttactgtgcacgcatccgcctacacatccatgctccagcagatgctctctagctctaacctccctttaacctcgtcagtcttcacctcattcctctaagcagtttagtgaactcccataccgacatagtgatctccctgatctgccacctacgacatctgccatgcccccgcccttcatcagtctagtgaactcctgatcagggaatgcttcctccgctgcggtcgagattgtcgaaccttccagggttgcgagtacgctcaaggtcgtcactctttccaagcccgcggcggcgctcggtgtcgacttcccttccacggccgcgtcattgagctcccgcagtagtgccgagttctcgccatcggctcgtagaagcttcgccactgcctcgccagggctccactgcctccgatgcctccactgcctcggctgcccgctttctggatccgggatccggatcggcgggagcacccctccaccctgcaggacgaagatctcggggattcctctgtggtggcgcgcggcggcggcgcggggagctcaaaggtccccgacgggtggcggcgataatctcggggcccttcggcgacggcgatgaggggattaggcgagagagaccgacgatgaaagagagaagaaagagaatg

SEQ ID NO: 14144 - DNA, 242 bp, Setaria italica
  Peptide Sequence Number=SeqID_80118
aaagccccttcggccgcgccaaatcaagtagaggggacgggccagccgctcctgtgtgcgtgtcgtgcgagaaggcaacctgcaagcagctggagcgcagctgccgccgcgcaccacgttggcaccgagcagaaggtggttgttcttcttaccgagatttcaggcttccagcgccaatttgttgctgcgatcaatatgtagtataggaagaaagggcagctattttctgtctgttctgaatt

SEQ ID NO: 14145 - DNA, 470 bp, Setaria italica
  misc_feature (1)..(29): n is a, c, g, or t
  Peptide Sequence Number=SeqID_80119
nnnnnnnnnnnnnnnnnnnnnnnnnnnnngttggcaccaacattcctgcgaccacccctgcaaatggcaaataaatagatattccaataacatactagcctgatatggccttcacttcatttggtggagggcatcaccatcccacagaagtatatattgttgcattctgcaggaggcccggcctggctacagctcaagtccaagactagcccaaaactacgaaagagtaatgacatctgaattagcaaggctccagggaactacttcagaactacatgacgacttcagaaaacccccaagattagcaaggtaacagcataagacagacagcagtaagcattcagaaacttgttaacttcggatgctttcacggtcctccctctccttcctcgtgcttcacttcaacggtacaaggtgctctccaccagtcctggaccgcctcttgttcaagtgcatggtaacctcaactg

SEQ ID NO: 14146 - DNA, 1823 bp, Setaria italica
  Peptide Sequence Number=SeqID_80120
tttaagtttacttagttacttagttcttagtttaagttcttatttcttagttcgaaagagtaatgacatctgaattagcaaggctccagggaactacttcagaactacatgacgactcagaaccccaagattagcaaggtaacagcataagacagacagcagtaagcattcagaaacttgttaacttcggatgctttcacggtcctccctctccttcctcgtgcttcacttcaacggtacaaggtgctctccaccagtcctggaccgcctcttgttcaagtgcatggtaacctcaactgccatgatgcggctaaattgtcggccttcaggaggtaacctgttgccagaaactaccatcctacgttccacatcaacagagaacacatactggcagttgttctcagccacagtgaggtagacgacgccgtcctcctcatcaaggaggctaagaatggggcacctgggcaccttcttgggcagcttcagctcttcgtaggttggatcagcccacacatcaatgatacggaaggatccgcctttcttccatactgagtttgagatgcagagagtccatgttgtgagggtgatcaggtcgtcaatgtcgctggctggattcatgtgaacgaacctgacagtgtcaccacgaacactgcacatggagctgaagtcccttggcctcccccggccttgctcaggatgccatgaccgggagtatcccttgggcaaggatatgaaccgaaactttggatcatccataaccttgtcgcagatcaggatgcccttaaggagatccacccagcatatagaattgtctcccagcgcgaacacgacatcagcacagaaaatgtaagcagggtcagacgggaggggaaacgggagcacaacctccttgttgatccactggcctgcgacggcgccggaggaacaccacgtgaacagagtagcctgtgttgacgaggtgcggtggtagaggagctcggcgagcacgtactcgctaggcgggtcgtggcggaggacggcggtcccggctccgacgccacggtgggtgaactgcgaggcggaggacggcggcagcggcaggacggcggcgagggagttggccaaggagtcgtagaccaggtagaaacccggcggagggaacgtgggccggtacggcccggcgtacatggcgatgatgttgtggtcggcgcccgctatggatgcgccgctggggaactggttgaaggtgtcgcgtgctccggcggacacgctgagcacgagggaggcgactccgggggggtgggggatctcgaggtggggctcgatcccatccaggattgcaaggtagagggcggcttcccaaccgccgaaagccaccagcttgcgcaccgcgctggggttggaggccctgcgctcgcgcaagatgtcctccgccggccactccagctctctccggtaccggaggagcccctcggcgaccgccctttgctgcgccgccgcccgttctttcgggctgactgacggcgggaacgggatgtggccccagaagggcgggtgcgacggcccgccgttttccacgatcaaggctgatacctcgtctatgatcgggatgaaggcatcaaccaacaccatgaacggatctggcggatccactgctccgttggtcatggacggtgtgcggggcgactgtaacgagataaaataggatctgaagttggatctggggtggtgcgagcggtatagaggcgcggccatggcttcgcagcggatgcggcggcccccgggtaggggaggagggatatctcgaggaggaagaggggagcgcaagcgcaagacggcggctg

SEQ ID NO: 14147 - DNA, 273 bp, Setaria italica
  Peptide Sequence Number=SeqID_80121
gtcgaagacaagtatatcatggtcgtcgaagcggtaaagatgaagctgtcggcggtgcccttcccaacaccgggactaaactctacgacggcaaccactggatcggaaagacggcggacggccgcctctgcttcttcgcgatgcgggagcagcttactctcgtcaagtgggttctcgaagcccctggggaagtgggcggagcagcagcacgtcaacctgcgcgcgtcgatgcacccggcgttggtcggcgacctcgcccaaatgaagctctcc

SEQ ID NO: 14148 - DNA, 402 bp, Setaria italica
  Peptide Sequence Number=SeqID_80122
gcaggaaccggcggcggcctcgcaggcggcgtgatcggagtagtgctggcgcggccgcggcggacgaggcggcggcggaggaggagaaggcggaagcccccgtttcagatgccgtttccactcaagcaggttctgcaacgcaagcaagttgccatgtggaaacagtggcagcacatttgggcgatagtgtgctgcagactacaaccgagtcgataatgaactcaaataaaacaagaaagagagattttcaggctggaaataaggtgctaaaagtttctgctgcggatggtgctgcctgctcttgtcttgcccgccatgaacattctgttggacaaattgaagcctcaaggagcaagttatataagagatctgatagtaagattccaattgataattgacact

SEQ ID NO: 14149 - DNA, 264 bp, Setaria italica
  Peptide Sequence Number=SeqID_80123
ttcttactgtcaatgcactgattcatacaccaaaactctgaagaaatccatggccctcgtgagccatagaagcccatttgtgcagcttgaggaaccttttgcagtcttgttttgaacttcttcctgaaccatggtgtacaagtgctcatactttgatgggtctgaagaatacttgttttctagtcttgtgatattgccaccaatgtcactctttacaattgccatagcagctccaaatttatccaggacaggcaagatttgctt

SEQ ID NO: 14150 - DNA, 146 bp, Setaria italica
  Peptide Sequence Number=SeqID_80124
cttttgcagtcttgttttgaacttcttcctgaaccatggtgtacaaggttcctcaagctgcacaaatgggcttctatggctcacgagggccatgaaatttcttcagagttttggtgtatgaatcagtgcatgcttgactcatagga

SEQ ID NO: 14151 - DNA, 237 bp, Setaria italica
  misc_feature (179)..(179): n is a, c, g, or t
  Peptide Sequence Number=SeqID_80125
gatcgcaacagataagtttagtaatcaatggatagaactctttcaggtgcgatcagatggatgttcgtggagcgcttggcgatctcttcagcaaacaacttactccacttatgccctgaagcacagctctagttcttctattgcatatatctcttgttgttcatcattggcatttttgngcaagcatggagcactggtaggagcttgacatccttaaggcacatgtctggcgcaaca

SEQ ID NO: 14152 - DNA, 1191 bp, Setaria italica
  misc_feature (1)..(66): n is a, c, g, or t
  Peptide Sequence Number=SeqID_80126
nnnnnnnnnnnnnnnnnnnnnnnnnnnnnnnnnnnnnnnnnnnnnnnnnnnnnnnnnnnnnnnnnngggtaattgtccgtagctgtattgtggacgaattcaaaccaatatttcaggacggcgtaatagttataattaatgctggaatctgcctataagattgttgcaaaattcttgtaaaatttcagcctagacaggaaacttttaagagtacatgagttccacatcatcatgtatgtaacagggtatgagttccgaaggtaaattttttgagtactgtcgtttcactgtgtaagcagccatggcaatcatgctcacagacttattattaccctgtataattttttgggggggaggagaagatgaccacgggaggcaacatttgagttttcacaagacatgtttattttgctgtaactgctgcagagattgctctatgaagccttcatatcgtcaagaccaacactcgccagaaagtcatgattttctttgagaaatggtgaaaaggttgtgcaaaatttctcaatatctgcattgatgtcacccgttccgctgatgacctccataaatttatctctgttaggagcaagcttcatggccaccgtaaaactagaactggcaagccagccatgaaatttcttcagagttttggtgtatgaatcagtgcatgcttgactcatagtccagtctggatgctcaagcaggttacggaacaactcaacaaggaaatccatggccctcgtgagccatagaagcccatttgtgcagcttgaggaaccttttgcagtcttgttttgaacttcttcctgaaccatggtgtacaagtgctcatactttgatgggtctgaagaatacttgttttctagtcttgtgatattgccaccaatgtcactctttacaattgccatagcagctccaaatttatccaggacaggcaagatttgcttgcagacttcaaggaaaggcttggtgagaatgactccgttttctgccttgacatgcttcatcccttccaaagagggagtgaacaccgtctcagccatctctgaaccgttcacggatccggcaatggaagctcccttctttcaccccggcgttccctgtcggcgaggagactgcaggagggaggcccgatcggggaggaaacgaatatatcccgcagctgcttttactgacgcagcgagagcagaa

SEQ ID NO: 14153 - DNA, 2445 bp, Setaria italica
  Peptide Sequence Number=SeqID_80127
atgcttgtggaatattttcagtcctgttgctccgttttagagagagtctgaaggggaaattggtgtcttctttcctctgataattttgaggtctctagatagctctgatagccccctcagccagaaggctagtgttcttaggatgttggagaaagtttgcagagatccccaaatgcttgcagatgtgtttctatgactcagtgtgagtcttgagggaccaaatctttttgaactcatggttagtgcactctcaagaattgcacaaggatctcaaattgctgatactaactccattgtgtcatctcaaacagtttctgtaaaaggctcgtctctccagtgcttggtgagtattctgaagtcattggctgattgggagcaacttcgaagagattcctcaaagcaagggagcactgttgaatctcatgaagaggatgcttcaaggagcttgacaaccgatgagacgaagggccaagaggatggccggaatcagtttgagagagccaaagctcacaagtcgacaatggaagctgcagtctcagagtttaatcgtaaaccagcaaaagggatcgagtatttattgtcaaataagttggttgaaaataaggcgtcatctgtagctcagtttctcaagaacacttccagcttggataaggttatgattggtgaatatttgggacagcatgaggagtttcctcttgctgtgatgcatgcctatgttgactccatgcagttttcagggttgacgtttgatgctgcaattcgtgagttcctgaaaggatttcgccttcctggtgaggcacagaagatagatcgcataatggaaaagtttgctgagcggtactgtgctgataatcctggacttttcaaaaatgctgatactgcttatgttcttgcttatgctgttataatgttgaatactgatgcacataatccgatggtgtggcctaagatgtcaaaatcagattttgttcgtatgaacactgtgagtgatgcagaggaatgtgctccgaaggagctcttggaagaaatttatgattccattgtcaaggaagagataaaaatgaaagatgatttgcatgatgcatcaaaaactattaagagacctgaaacagaagaaagaggccgtcttgtcaatatcctcaatctagcccttccaagactgaagtcagcaagtgatacaaaggcagagagtgaaaagatcatcaaacagactcaggcacttttcaagaaccagggacagaagaaaggtgtttttcatgttgcacagcaggttgagcttgttaggccaatgcttgaagctgtaggatggcctttgcttgcaacattttctgtgaccatggaggaaggtgacagtaagcctagggttgtatcatgcatggatgggtttcgagctggtatccatcttactcgtgttcttgggatggacaccatgcgctatgctttcttgacgtccttagtgaggtttacatttttgcatgctcccaaggagatgcgtagtaaaaatgttgaggcactgcggactcttcttggtctagctgacacagatatggatgctttacaagatacttggaatgctgttttagaatgtgtttcgagacttgaatatatcacttcaaacccttcaatttctgcatctgtaatggtgggatcaaatcaaatatcaagggattctgtagtccaatcattgaaagagttggctgggaagcctgctgaacaaatctttgtaaacagtgtaaaactgccaagtgattcaattgttgaattcttcactgccctttgcggtgtttctgctgaagagctgaaacaaacacctgctcgtgtttttagcttgcaaaagcttgttgagataagctactataacatggctcgtatacgtctggtgtgggctagaatatggtctgtgttggctcagcattttattgctgctggaagccaccaggaggagaaagttgctatgtatgccatcgactcgctaagacagcttggtatgaagtacttggagcgtgcagaactaaacaacttcacatttcaaagtgacatactgaagccttttgtcattttaatgaggaatagccacaactcaaaaatccgtggtctaattgttgattgcattgttcagttgatcaagtcaaaagttggcagcataaagtcaggttggcgttgcgtattcatgatattcactgcagcggctgatgacgaggatgaatcaattgttgagagtgcttttgaaaacgtagaacaagttatcttggaacattttgatcaagttgttggtgattgcttcatggattgtgtcaactgtcttattggttttgcaaataacaaatgcactcctcgaattagtttgaaggctattgctctcctacgtatatgtgaagatcgtttgttattcattgatattctacttgtctagcggcttgtattgtacgtaggtattgtaattct

SEQ ID NO: 14154 - DNA, 437 bp, Setaria italica
  Peptide Sequence Number=SeqID_80128
ccactaagatcgtggatgataaaatagaggaaaaatacaaggcgtttaagcaattcgatactgttgatgatcatagtgatcattatttttctaagccagagttaagaaaggtccaggtggtgaaaaaggtaagtttttttacatgccctctctaccacttgttgccttaatttagttcagtgctaaagttctttcaacagccatcaaaagactgggcgaaacgtattcagcatgagtggaaagtactagaaaaagatttgccagatactatatttgtgagggcgtatgaggatagaatggacctgcttagagctgtcattatgggaccagctggcactccttaccatgatgggctcttcttctttgacatttacttccctccacaatatccaaatgtaccgccaatggtgaattaccgtgctggtggtctgcggctt

SEQ ID NO: 14155 - DNA, 1167 bp, Setaria italica
  Peptide Sequence Number=SeqID_80129
atctttttttcttgtataaatttctttctctcgtcagtctacgccgcactcatccacccaaaccctcccccaccaacctcgccggaaccctaagggcggccgccggcgcgggggatcggcggcgatcgcattgctgcgcccccgatggcgacccacgcctccaagagttacctgtgcgcgggcagctcgtcgttcgatgatcccgacgtggttgaggtgtccccggcgaccgccgcggccggggggtgggcctcgggccaccataagaggaagcggagccaggttgtacctcatgaagtaatcgaaattgatgatgatgaccctgatggagttatgattattggtgataataaagcatcagtggacaagaataagcaaactgttgtataccctatggattgggcaaagcatggcaagagtagtttggttcatgaaattcctggcccaagcacatatgctccaaaatatgccaatccatgggttgacaacctgaaaatgtttcaagacgatgcagcttacaactattctgatgagggatttgatgaagactatgcatatgatgaagatgagtatgaagatgatggttatgatgcttcacttgttgaaagtgagtataactatagtttgtcttccaagtttgatagcttggatattccacttggtgtggaggcttccttaccgtggactcagacgattgctattgagattgcaaataagaccaaacccactaagatcgtggatgataaaatagaggaaaaatacaaggcgtttaagcaattcgatactgttgatgatcatagtgatcattatttttctaagccagagttaagaaaggtccaggtggtgaaaaagccatcaaaagactgggcgaaacgtattcagcatgagtggaaagtactagaaaaagatttgccagatactatatttgtgagggcgtatgaggatagaatggacctgcttagagctgtcattatgggaccagctggcactccttaccatgatgggctcttcttctttgacatttacttccctccacaatatccaaatgtaccgccaatggtgaattaccgtgctggtggtctgcggcttaatccaaacttgtatgtcagggatttcttctccccatgaggtgtgttagcttgcatagcataaccaagctcattgaaa

SEQ ID NO: 14156 - DNA, 1194 bp, Setaria italica
  Peptide Sequence Number=SeqID_80130
agaagcacttatcttagacataagattataatttagcttttatactttttagaagcatgagtggaaagtactagaaaaagatttgccagatactatatttgtgagggcgtatgaggatagaatggacctgcttagagctgtcattatgggaccagctggcactccttaccatgatgggctcttcttctttgacatttacttccctccacaatatccaaatgtaccgccaatggtgaattaccgtgctggtggtctgcggcttaatccaaacttgtatgcttgtgggaaggtgtgccttagccttctaaacacatggactggcagtggatgtgagaggtggaacccatccaattcaactatgctgcaggtcttggtctccattcaggctttggttttgaatgccaaaccttatttcaatgagcctggttatgctatgcaagctaacacacctcatggggagaagaaatccctgacatacaatgaagatacattccttctatcatgcagaacaatgctgtattctcttcgaaatccacccaagaattttgaggattttgttgctggccatttccgcgagtatgggcgcagcatccttgtagcttgcagagcttacctggacggtgcccaggttggatgccttgctggggatggagtgcaggatgtcgatgagggtgataagagctgctccgtgaggtttaagcaatcactgaagagactgtttcaggaacttctgatggagttcatcgtgaagggtgcggactgtgacaagttcctcgctgaaaaggggagatctggagcttctgcagcggccgcggacaccacattgaggctataaggcagagtcatcgtgcgctaagtaataattttgccattcaagctaccgctcctatcctcggtctgccgcacagcaagttatgctggaagatctaactgctttctgtaggtagcctatgtaaatatccgtctagcccgcctggtaaaaaacataattgccatattcgtgcgcttagggacagtgttttactggagtgatggcccgcaagggcatttatcggcggagccctcgtccgcagcttgtgttcttatatgattgtggtctccgtttggatattaaaatgagatctgtcgggtgatccctgccttaattcgatctttgggtattcttctaggtccctagtagttgtatttacctaa

SEQ ID NO: 14157 - DNA, 488 bp, Setaria italica
  Peptide Sequence Number=SeqID_80131
tttttggtaaaagagcaagaggccaacagaacttattaacgatctcagagatttcccaggaagctcaacacatgggttcagttgcacttgcatcagagcaaagtcacaggctcacagcaataaaacctacattagacatgacatgatcctaagaggactaacacctaaacatagcacaggcacggtttagagcttctatcacttctgcgcactcgaagcatctgccttgtcctggcttcttagccttggcagccttccaggcagagttgtgagaaactgtctcctcaacaaccttgggtggtgcaaagttgaagtctgaagcggatatgcggttcttgtactctggatttgcctccagaaacttatctacatccccggcacaccgtgcacgcttcccatttggcatgacatagtaagtgtccattttactgaaatcacgcctcataatcactagcctctctgtcttcttggttgggggtcttttggtt

SEQ ID NO: 14158 - DNA, 432 bp, Setaria italica
  Peptide Sequence Number=SeqID_80132
ttgtccgtacgttggttcgcgtattctcacatagtgggcgacggcgaactgccgacgtggtcgggatggctgcggcgggcggcggcggcggaggaggaggaggagcgaaagcggcggtggcagagcagatagcgcaggcggtgcggtccacctccaacctcctccagctcatggagcagtcctcccccgcgcaggttcacttggccaaacttcccaagaatctcttggcaaaagcatcttttgcacagaacacagaacaggtgctacaccaactaccgcaagtaatttcttccttggatgcttatatggacaggagcttgcaaagtgcctctcaaattaagacagtcacacagctcttgtcaaatatggagaacactcagctgagatccatcttgccttcctctcagatgaggaaagatacaaagaataccg

SEQ ID NO: 14159 - DNA, 454 bp, Setaria italica
  Peptide Sequence Number=SeqID_80133
ttcaggcagaagagcaattggttaaataatctggtaattctcacattcagcagaatgacagcaatactcttaactgaaagaagtttgaataacatctctagtcctagctttcagttcaaacattcagcagaatgacagaaagtagactgacatgcttcaccactcactaagttcaaagctaggatttggcagaataggttgtgaccagcgcacccaagcacacgtcagaatcatattacatcaatcaatctaaacatgcttcaagtcttctcactccgcatcctctatctccgcatcctctggaacacctcggaggtacataacattgttgcacctgatcaaaatctctcccaggtttccagagaattgcccatcaatgtactcctctgtgttagcaagctgaaggttcatataagaatccacagaaacaagatatcctttgtactcccacccc

SEQ ID NO: 14160 - DNA, 728 bp, Setaria italica
  Peptide Sequence Number=SeqID_80134
atattacatcaatcaatctaaacatgcttcaagtcttctcactccgcatcctctatctccgcatcctctggaacacctcggaggtacatttcatttggcaggcagaagagcaattaggttaaaaaatctggtaattctcacattcagcagaatgacagcaatactcttaactgaaagaagtttgaacatcatctctagtcctagctttcagttgaaacattcagcagaatgaaagtgcagtcttaactgaaagcagaatggcatgcttcatcactcataaagctcaaagctagggttcggtagaataggttgtcaccagcacacccaaacacgtcagaatcatattacatcaatcgatctaaacatggttcaagtcttctcactccgcatcctctatctccgcatcctctggaacacctcggaggtacataacattgttgcacctgatcaaaatctctcccaggtttccagagaattgcccatcaatgtactcctctgtgttagcaagctgaaggttcatataagagtccacagaaacaagataacctttgtactccataccccacttaagtttgacaattacaggcttccctgtcaggttgttcaagaaaggttttgggttaactggcacagtcgccatcggagcagacgagcagcggccgcctcaggcgcgaggtcgaggcgagggcgaaacggagagtagctagcgaggcgtcgagtacgtacta

SEQ ID NO: 14161 - DNA, 1661 bp, Setaria italica
  Peptide Sequence Number=SeqID_80135
ttacttgtgagcacagacaaaaagattaacggtaataacatcacggatcacagacattgcccttcaggtatcaaatcaaggatgctaagtaatcgacactgttcctcctaacgttttagacagttgctaatctgttccccatggtatgcttacagagttaccttaaaccatcacagtaccagaattctatataatgccaaacgaaaccgtcaatatgacatctagtctgcatcactacatatgggggaaaaagttaaacctcagatgaaccagaaaacacgtacatgacattaagctgggttcaaagcttcaacgcagctgcattttcctagcaatgctgggtagtgggcaccctctaatgacagggaacaagcatgcagagaagattgagattggtgggctcttcttgtcatccatatgggtgataccgtccatatccaccagcaaagctccccttattcccgtcaggtgtgctagcagatccataaccacctagagcaggatcatatgccccaccataggtggcaccaccaaagccagaactaccaggggcaccaaagctctgatcagcatcaccaccaaagccagaactaccaggggcgccaaagctctcatcagcaacagtgcgtctatagccactcaagtctccaccagcataagctccaccaaaacctcctccatataacccgaagcgactgggataaccaaacgaagatgcagctccataggcccctaatcctgcatagtaacgaccatatccaacaccaaactcacccatcccaccgtagctgccgagcctactagcgctgaaacctgcatcgctcctataaggaccaaatccaccaccactgtaactgccataagcattggtcaatccaccatagttatcaacagaagggtggtccctagagccactatcatatgaagacctagaacttctaccacgccctgatggaggtggatttgaggatttctttggttctgctttcttgatctccacctttgaaccagcaagatcgatcatatttccgtttgctaataaatcatctacaacatcctcagaagcaaaaactataaatccaaagcctctagagcgttttgtttcacgatcaaacataatctggtggtctaccacagtcccatatcttgcaaagaaattcttgaaatcatcttcagttagtgctgagggaagcccaccaacaaatatctttctagtcttgaaatccttagagctagactgcattgcaccttttggtattgttcttttaatctcaactggctttccattgatgacatgagtttcctctatcactttatcaacaacagcagggtcagagtatgtaatgaagccgaaaccccgtggctgagatgtgtgccgatctttcattattactgaatcaactatttctccatactggccaaaatgcctcacaaatgtagcatccgtggtgtcccgcggcagccccccgacgaaaatcttccccgggttgccaccgccgtcgccgccgccgcctccgcctccgccgccgcgccccctggttctcgtctccgccttccccatggcggcagcgttagggttgcgtacggaagctcggcagttcgcccttgtggtttcaggatttcagtcgcagatgccgtatgagctcgcggctaaggaaaac

SEQ ID NO: 14162 - DNA, 617 bp, Setaria italica
  Peptide Sequence Number=SeqID_80136
cgggctccgtgggcacgccgccctccttctcgggcgccgccgggagcacgccagcgcccatggacacgccgcgcagcaggcgcagaacgtggcgctcgtcatcggaggcctccttcctccggatggcgtacccggccttgcggccgttgcagtagacggcccagacgtactcctccacgagccggcggcgcgcgctgcgggtgtcgctctccagcgccagcttcaccaccccggacgagatctcccggtgcagtgcgctcgtcagcatgggcagctcgatcaggaacagcggcggcgcgcgggtatcctcgtggatggccaggctcacgcgcccgcgccggtgcccgaacagcgtcaccgtcgtggcgtggtcggccaggagcgcccggttgtgcttgccgagcagcgccaccatcttgcacccggaggatagcatgggcatgagcttgaacatcttgaagatcccgccgccgccgccaccgcctcctccgctgtccgagatcttcgtccggcgtccattggtggacggccggagcagcgcgcggaaggaggggccgtccatgaaagacggcatttttgggagtgagttcgagttggtgcagtgcagcgcggtgttt

SEQ ID NO: 14163 - DNA, 242 bp, Setaria italica
  Peptide Sequence Number=SeqID_80137
tctcaccacgctcccttcttcttgacgccttggtaggatctgaaactgggagagcaacttcggaagtcctagaccttgcacacagcatccgcatggctgctgggaacaaactggggaaggagaagtcatcacttggatcacccttaagtccagtcagggggttcctttggaagtatctcaggtaaagccaactaacatacatcccagacaccaaagttggtaggaagttgatggaatcaggc

SEQ ID NO: 14164 - DNA, 748 bp, Setaria italica
  misc_feature (668)..(668): n is a, c, g, or t
  misc_feature (701)..(701): n is a, c, g, or t
  Peptide Sequence Number=SeqID_80138
cctatcccctgtgtgccttgcctttcccctgttgcgtgtctcagatcatattattggttctgtaaactgaatgcactctccaggacacaaatctggagagttgcgacggtggagggaacccgtggctcctatttaaggtgttgggctggagaaagttctcaatcttcagccgtgccatggccgtgagctggggcttcagtatcaacagcatgatcggcagccaacctttcttccagcaccctctcaccacgctccctgtaatatttaattgaatcagtgagccttaaactggtaatatttctttttgagatgtcatagctctcaaattttcagtctcacagcaccttagctttattttttagaggagcaccatatagctttattgaagacacaagtaactggtttatgccatagtttaacactactgttctgatactagcttaagttgaattataaatgtcctaccttaactattacatcccagacaccaaagttggtaggaagttgatggaatcaggcacgatgaaggccatgatgcttgagaaacatacaacaaagaatggcatccactttgcttttatttccagaaaaagcacatggggagctcaaggtttggtaagagctgcttcagggccacaagaaagccagcaaggcaaccgtggaaaccngaaagtggtgtgacaaggaagctctcctttccngtgacatagtagagtccaatcgcaatgcagaatgcaaggatgccaac

SEQ ID NO: 14165 - DNA, 501 bp, Setaria italica
  Peptide Sequence Number=SeqID_80139
cttcggaagtcctagaccttgcacacagcatcctatcaaacagattggcgacagggtccgtcactggtcgcatggctgctgggaacaaactggggaaggagaagtcatcacttggatcacccttaagtccagtcagggggttcctttggaagtatctcaggtaaagccaactaacatacatcccagacaccaaagttggtaggaagttgatggaatcaggcacgatgaaggccatgatgcttgagaaacatacaacaaagaatggcatccactttgcttttattttccagaaaaagcacatggggagctcaaggtttggtaagagctgcttcagggccacaagaaagccagcaaggcaaccgtggaaaccagaaagtggtgtgacaaggaagctctcctttcctgtgacatagtagagtccaatcgcaatgcagaatgcaaggatgccacgtatggactgtcttcacggctgggtacatcgaacaagttcttccaggggct

SEQ ID NO: 14166 - DNA, 1582 bp, Setaria italica
  Peptide Sequence Number=SeqID_80140
ctagttcttcttagttttttttttttttattttaaattttcaatgtttctttttctcatgtgaaccctaatatccactcaaatcatgttaactagaaaaaaaatcatctcaacgttgatcctgacaagcaattcttctttctacattacatctggctgggaatgccactcttttcttcttttactgtaacaataataatcggactagaacacaatttaaccaataaatcttcgcaaacgaagaaacaaaaaaggagtaagacatcatattattggttctgtaaactgaatgcactctccaggacacaaatctggagagttgcgacggtggagggaacccgtggctcctatttaaggtgttgggctggagaaagttctcaatcttcagccgtgccatggccgtgagctggggcttcagtatcaacagcatgatcggcagccaacctttcttccagcaccctctcaccacgctcccttcttcttgacgccttggtaggatctgaaactgggagagcaacttcggaagtcctagaccttgcacacagcatcctatcaaacagattggcgacagggtccgtcactggtcgcatggctgctgggaacaaactggggaaggagaagtcatcacttggatcacccttaagtccagtcagggggttcctttggaagtatctcaggtaaagccaactaacatacatcccagacaccaaagttggtaggaagttgatggaatcaggcacgatgaaggccatgatgcttgagaaacatacaacaaagaatggcatccactttgcttttattttccagaaaaagcacatggggagctcaaggtttggtaagagctgcttcagggccacaagaaagccagcaaggcaaccgtggaaaccagaaagtggtgtgacaaggaagctctcctttcctgtgacatagtagagtccaatcgcaatgcagaatgcaaggatgccacatatggagttgaccaaaataatgaacttcaagaactccttgcggccccatactggttcgatgtcctttccgcagaagagaagaccaagagaactgccaatagcccctggaagaacttgttcgatgtacccagccgtgaagacagtccatacatacggaattgtctttgaggggatgatagcgaggtagttaagcgacgaggggaggagctggagcaggacgtatccgccgatgagcacgacgacgaggcccttgcaggtgcgggtgaactccttgccggggacgacggcgggcggcgctccggcctgttcttccccagcggccggagccgtggccgtcggctcctgcagtggctggctctccatcatcactgttcctcctctgcagaaggctggagatctcccgcctccccggctaccaatctctcgctgcctagtttggtggagacgtggagtggtggcaataagaaaggagagggaagggggagggttgttgggggtcactccaccactccgctccggtcaacccaacccagctgcttcctccctcctcaaagcttcccttgtcttcctccgcgtcgctcggctcgtgtgctcagccagtaccggaaagcgagc

SEQ ID NO: 14167 - DNA, 510 bp, Setaria italica
  misc_feature (367)..(367): n is a, c, g, or t
  Peptide Sequence Number=SeqID_80141
agaaggattgataaacaagtatccttactggaacaggacactaggcgcagaccacttctttgtcacctgccatgatgtaggtgttagagcatttgaaggacttccattcatggtgaaaaactctattagagttgtatgttcgccgagctataatgttgactttataccgcacaaggatattgctcttcctcaagtactacaaccatttgctctacctgaaggaggaaatgatattgagaacaggacaattcttggattttgggctggtcatcgcaattccaaaataagagttattttggcacgattctgggagaacgacacagagcttgctatcagcaacaatcggattagtagagctatcgggganctagtttatcagaagcagttttaccgtactaagttctgtatctgtcctggtggctctcaagttaacagtgctcgtatatctgactcaatacactatggttgtgttcctggttagtatttctactaattgacatgaaatgaaat

SEQ ID NO: 14168 - DNA, 760 bp, Setaria italica
  Peptide Sequence Number=SeqID_80142
ggcgccgcgctagccggcgctgccgcggcatcccgagcggtccttaccccgcacgcggctgcaatcaagtcccgctgatcagtctcggcgcccgtcgagaagctcctggaggagggcagtggcttcgaggcctccgaggagctcccttccactggaagcttggaaacagaggtagaagaaaaggggaactcggaattggttcctggaccgacagagcaaactgccagtgggagtgggactgaagaatttgaagaggagaaacatgcagaagtagaaattgaagagagttctgggtctacgaagctggtggaggcgagtacccttgactctgtagtcgctgacgatttcagtgggcatgagcaaacagctgaaaatggcagcatggtggaaaccgatcaagttgagaaccatactgcagttgtctatgaggaaaatgcatatgaccaaactggagatgataattatgtgcaatcagctcagagtatagatccaattgggtccgtttctgaggaaagttttgatgatgattgggaggccgacagatccgacagcatcatcgaagaccaagtggaatctgagagttcaattgataaggtgatcgaggagagaatggggcagctggagatcagcaggaaggctgaaagaatgcagagaagaaacagaaagtgtcgatgaaaccgttggagttggcagaggagcttgagaagaggcaggcctcgtttggtcaacactggaaagaaggagcagctgcccaacccat

SEQ ID NO: 14169 - DNA, 476 bp, Setaria italica
  Peptide Sequence Number=SeqID_80143
cgcgaggccatggaggaggccggcgtcaagggcgtcatcaacagagctgcattgggacactgggtgttcaagagcaagagcagccagaacagcaccagcccaaggggagcctgcaagggctacatcttcgccatggaggtcactgaggagctcgagtcatggccggagcaggacacccacagccggcgatgggtctcgcccggcgaagcctaccagctctgccggtacgactggatgcgggaggcgctcaccgcgctgctggagcggctatcggtgatcgagccggtggccgcagcggcggcgtcggccacgccggagctgaacgaccaggccggcatgtacatgatgctgcaggcgacctcggacggcgcggtggcgctgtgctgatggacgaacgacgctgccgctgctgctgtggataactgatgaacgcagctagtcagcagccctcccccaccttcaactgcaaacatggc

SEQ ID NO: 14170 - DNA, 576 bp, Setaria italica
  Peptide Sequence Number=SeqID_80144
atcggctttctcgcgacgatgagctcgagcatgacgacgccgaagctgtacacgtcgctcttctcggtcagctgctgggacatgtagtactcagggtccaggtaccccagtgtgcctttcacttgggtgctgacgtgccccctctcgctgtcggagaccagcttggagaggccgaagtcggcgaccttggccgtgaggtgctcgtccatgaggatgttgctggacttgacgtcccggtggatgatgggcgggtcggcgagctcgtggaggtaggccagcccgcgcgccgcgcccagcgccacccggagccgcttcttccagtcgaggtgcaggccgctcttgccggagaggctgtcgcgcagcgtgccgccggacatgaactcatagacgagcatctgctccccctgctcgaagcagaagccgacgaggccgacgaggttcttgtggtgcacgcgggagagcagctcgatctcggtcttgaactcgtgcccgccctgcatcgacccctgctgcgccctcttgatggcgatgaactgccccgtcggcagcatgcccctgtacactcaggagctgcca

SEQ ID NO: 14171 - DNA, 2189 bp, Setaria italica
  Peptide Sequence Number=SeqID_80145
gttctgttactgctctattccataaccaacagttagtagcacttaagagacagatagatttgctcttgatgtttcttctaatcatacattagaacaacaccatacaaaatcactagtccccaaaagtattaaagtacaatagaaaaaattctccgtatctctacatattcgtcaagccacttgctgggggatgaagaaaaagggtcgtgccaagagaacccgaatccagaaaaatcagctactttggttcgaccctggactggaaagaataccccccactgtagtcaaacgagtcggtgctcacgtccttgtccttctttgggagaggatcattgtaaggatggcgaggagcccccttggtgacgtcgaattcggtcgcggacgtcgaggcggacgtggaggagctgctgagcccctcgctctgcagcatcacctcgatctccttgacgacctcgctcatggacggccgggccgtggccacctcgtcgacgcaccggagtgccagctggaggaacttgctgaacgcggcgaggtggttggtgttcatgatcctggcgtcgatcatgtccttgagcccgcagaactcggcgtcggaggcgtcgaacatcctcttggcctcgcggacgatgtacttgcccttctcgatcggctgcttcgcgacgatgagctcgagcatgacgacgccgaagctgtacacgtcgctcttctcggtcagctgctgggacatgtagtactcagggtccaggtaccccagtgtgcctttcacttgggtgctgacgtgccccctctcgctgtcggagaccagcttggagaggccgaagtcggcgaggttcttgtggtgcacgcgggagagcagctcgatctcggtcttgaactcgtgcccgccctgcatcgacccctgctgcgccctcttgatggcgatgaactgccccgtcggcagcatgcccctgtacaccttgccgtagcccccgtacccgagctcgttcgcctcggcgaagttgttggtgctccgcttgagctcctcgtaggagaaccacctcgcgcccttgagccgcggcgcgccgcccctctcctcgctccgagcccacgacgcgaaagggccgccgagctcctccttggccttctgcactcgccgcctctgcacgaacgcgtagacggccgccgcggcgagagccacgaacaggacgccgcagccgaccgctatcccgatgatcacgcccttgctcttcgacgacgagccgccctctgggaacgggtacggcgaggcgatgaagtagtaggggccgaactccttgggcggcttgaacgtctggttgctgaggtcgaagccgatgcgcatgacctcggagcggttgaagtaggcgccgctgccggaagggaagagcttcacctgcacctccatgtaggagtcgctgttgaagaaggggtcctgcagggagacggagcccggggtgagggccagcttcgtccacagcatgctctccagcgcctggaacgccgtgccgttggtcacgtcgtggaagaagggcgcccggaagtacatgatccccctggtacgggtacgcgcacgagcagctctgcgggctcaggctctgccccgccgggcacgtccccgagaagcacttcaccaggctcgtcgagtagggcaccgacagccctttctgcgtcccgttgcagtagttgggcaggtgctcgcacaccgggttcccggccagcgcgagggtgccattgtagctggaggtcaccgtgacggaggagaactcattgttcttgaagctcacgaggctcagctcgccgctgatgctcctgcccaggtccagggtgccgttgagcgcgttgtcgtcgaggatcacttgattcaactgctggtcgctgaacagccttggagacacggggccgtagagcctcccggactgtatgatcagagctgagagctgtggcagcctccaaaaccacgctgggcacggggaaggatcaaatgtgttgttgctcagatcaacgtaattgagaagatccatcccagatagatctggcaatgttccagtgagctggttgtttgtcttaagttgagctcatttactttggtgaggttcttcagatttgaaggaactggaccagagagggagtttctgtccaggcgtacaacttcaagtgtactaacatatccaagagagtctgggatactcccg

SEQ ID NO: 14172 - DNA, 432 bp, Setaria italica
  Peptide Sequence Number=SeqID_80146
gtgctgcatttctcgtaccaaggtagttctcctggataagttcagactcacggtacagaggatggctgcagcaggtgttggtccaaactaaaggaaatgtaacctttgttgcagacctttgctgaagtagcagctcatattttgagttgaaaaggaacacactgaaagccctgtggagcagattctcagattcaatcttttccatcagatggcagttgtactttgattcatggccaacaacattgtcctgctcatccaccaaaatgcacctgcgagataaccaagcagcgtggtcacaaaataaattttgacttgaatatcaccaaaacaagtaactaataaataactactccttcggttccaaattgtaggtcgtttggacctttttaggtgcatagtttttactatgcatctagatataggccctgtttg

SEQ ID NO: 14173 - DNA, 723 bp, Setaria italica
  Peptide Sequence Number=SeqID_80147
cccagggagaaagttgcttatgtaatatgtaacgataagatctacagggagtcacagcatctaatcgcaaccttaagagctaactgccatatatatgatcagagaaataacatctacaagtatttaatgcatcatcctaagcaatggttgtttgtctttatttgtgattcaaggcatgaacccaacttccagcagatctagtgttataagctaccagagtaacttgggacttcatgagtttccatttcaaacataacattaaaccaaaaaactggaaatttaaaacctttgccaggtgtagataaaaattgagtagcgcgacaaaattgaaaaatatatcatactaagtcgcaagcaggtgttggtccaaactaaatgaaatgtaacctttgttgcagacctttgctgaagtagcagctcatattttgagttgaaaaggaacacactgaaagccctgtggagcagattctcagattcaatcttttccatcagatggcagttgtactttgattcatggccaacaacattgtcctgctcatccaccaaaatgcactcgtcctcgaacatgagccgcctctggacggcgtccatcccggcgtcgtcgcccgccgcaccggccatgcctgcctccctctctcgggtcgcggcggaggagagagatggaggagcgtttgcggctgccgagagcgtgggccgtggggagcgtgagcgctgcggggagcg

SEQ ID NO: 14174 - DNA, 879 bp, Setaria italica
  Peptide Sequence Number=SeqID_80148
aagcagcagcctattcaaattacaggaaatcctatcgaagctacaagtgcggaattggtaccaatgacaccatatgacgggacgaacaggtcaaacttattgctgtttattcggccgaggtataaacactggttaaacaaacgatctggttctcaatagggccaataggcacacaggagcaaaccctcttaggtacgagcgacaagcatgcggcagagcaacgtcgggcgacgaggtcactggagccacgtctggcagtggcccctcaatccttcagcttgtggatggtctccatgtccacgacctcgctgagggtgcccttctccacatgatcccaccagcgcatcaggaagttgtcgacgatcagccggaaccagggggagagcttcatgccgtcctcgccggcgtccgccttctggatcagctccttcagctgctcgcggttcacatacttcacgtccgcgacctcatctgggttcggctgcagcttcacgtcccggaccatgatcaggatggagtcaagctcatgctcgccccattttccatcagatggagccttgtagagcatccgaccaacaggggtgaattggtcaaccggggcatcttgagctgggatgcccagctcatccaggagcttcctctgtgctgcatttctcgtaccaaggtagttctcctggataagttcagactcacggtacagaggatggctgcagcaggtgttggtccaaactaaaggaaatgtaacctttgttgcagacctttgctgaagtaaaagagtggaaagatacttataatcaacgttttgaagattaataggatagtgacaatttattatcccaaacattgaatccagacaattttctgtagctactcgacatg

SEQ ID NO: 14175 - DNA, 372 bp, Setaria italica
  Peptide Sequence Number=SeqID_80149
tctcatgtagaatcccttctgaaccccaagcagtggaaattccgtgctactactataaagaatgtccgtttatcttgctgtgttgctgggcatatcaaagtagctgaggcaggtcaggatatacaggaaacgatggatgatttggtgaagctgggcctggatccttcttcagatgaatatcagtttattagaattgctcttttaaatggtgccagttgtttcaggtgtaaagtttggtgtcgattgcctattatcacaccctgccaacatattttgtgccttgattgtgtagctcttgatagtgaaaaatgcacattacccggttgtggcaatcattatgagatgcagacccctgctgtgaggctagaaaat

SEQ ID NO: 14176 - DNA, 1092 bp, Setaria italica
  Peptide Sequence Number=SeqID_80150
tttttttttttggtttctaaaaatggacatttccttttagtcaaacaagtgattcataacaaaacatgtttggactccaagcattcacttgcaagcaaagcaattatgatttgtagtgcaagggaatgatcaaaaggaagaaacagaaaatcaagaatttagttagtgctatcgcccaatcaataagggcggctgctttagatcctgcctacacaaagctgagttgcgccagatagctgctttcagcaaaatcatggaggctccgatgaggcctgcctccttcattctcagtgctgcttattcctttattcaccatttttctgcaggcactagaatcctgcagaagtttaagcatttgctcttcaatggtaccacgcatagccaaagtttcgaccagtattggacgtgttgcccccattcgatgagctcgactaataacttgttcctccatactcctatcccatattggttccatgagaaaaacatgggtcacaaaactcagatcaagccccagtgcagcagttccatccatgactagagccatacatgttggatcctcttgaaacttggttagtgcacttctcttactccctaaaggcattggactatacattcccgcatatgttattccagcaatagtcagctgctgctcaatcacatgaatatgctctagaaactgagaaaatattataactttgtccaacattgcctgtggttgacaagatagtgcattagcatgaccagcactattggttatgttattcccatgattcatgtatgtttctcgtaggcttatcagcttgtcaaccaaataagaaactttgctgctagatgttgattgccagtcggggtcccaatcatcctgcttatatgaaggctgcaactcaattagatccttgggcactggccattttggttttggattttctagcctcacagcaggggtctgcatctcataatgattgccacaaccgggtaatgtgcatttttcactatcaagagctacacaatcaaggcacaacaagatttaggcatgcaaagttggatccaatcctcatggggtggttcggcacataactaacaacacaatgc

SEQ ID NO: 14177 - DNA, 2666 bp, Setaria italica
  Peptide Sequence Number=SeqID_80151
ttttctcagagctgcgattgtttggatctacatttcctgatacagcttcttcaagaaatttcaacctaacacctagctcacagactctgtccctcatcgcacggtaatgttgatcgagccaaccttggatgggctcttcttctatatctgcagtcagttcacgtaatacaaacttcacagatccaactttggatgtcccagaattaacctttttcgatttttcttttccatcagggcatagtatacttcttttggcagatgagacaagctttagggcgcgaatcatatcttcaacagcatcctctatggcacgcaatggcaacctgtaaggcatgcaaatatggacatcatgcccttgaacaacccagtctcttttggatgatggatcaacctttgcatcaagcaaacttccattgctgaaaggaatacaggatatctgtatgcgggtgctctttagaactctagcaccattgaaagtaagagagagaccctcagacagtacacctatcttggcattttcggtaaagatggattgcacgtgcatgtttgcttcaacaccatctgcaagttcagcagatacccttaacacatccacatcgatggcaaagattgacccttttctgttagacttctgaggtttaattgaaccagctgtcatgttgtccttttcatttgctttgatgttggcaacttcagtattgataagcttttcagacttgtgtaacttgttgagatttaggaaatgcttaaagcgaaggaaggtctcaaatagtgctaaatgagcatcaggttcccatctcaaattaatctctgtagcaccaaagagggaacaaacagcaagttctgtactgccacttgatcggcgaacaattttagcattctgcatatctagtaaagttactttgacaccagaactatgatcctcaggtaattcctcatagattgtcttcacccgttccagttctacttctgttgtctttctctccttgtctatacacatagagagatgagatattaccaaagatgctgagaactgcaaaagacggttgctgcctggtaaaactgaagttatacttgccctacgtggtgtgccatcagcagaaacactaacaattacttgaccaccttgagagccatagttaacacgctttggatcgtcaattggcatatttactatgtttgcatcaccacagtaggaaatagagaatttctgtaggcttaatttcaatattttcacacctttcgttttcttttcccctctacgctccaattttttttctttaacacttccggcagatggccgaagactcttaaatagagtcctaaatgatatcaaattaagcaagagtgattccaaatgcttgtagccaaatttcacttctatatcacttatatcaatggacaaaacaagagcatgcctactagtttcaatcatatcttggacatcactttccctgtatccccagtcaaggctaacccgagcgatatgcattagggaaccagagtaagtatccacaccaaatctgttatccttcaagaattctctatattcttcttccatgtgcactagcagttcaccaagttctgcgtgtacctgaatccccttgcttgcaatattatttgcaaacaaatgtgatgactgggagcaagcatggtataatgccaatccatcaatattgtaaagcatgacagccgtttccggagcagcgactgtgcaagtccacaaaattggcttgaactcccctttttgagaaatttcttgattgcagtctcccttagaaggcttcattcctttggttctcaaagaaagaagccgcatccatggcatcagtctgattaacataacattgcattgcgtcccaccaagcttagcatcgatctcagctctgactggaagaaatggatccacaggaacatccaaagaagtgtttgcgacaactttaagaatctccaacagagagctagtaccttctctaactaaatgaatttcactgagatcaatttgaacatcgaagtgtggtgtagcttcttctaaatcatcctgtggtagggactttgcacaagtaaactgaatccctgtaatgttgttgtcaacactaagtccctcatgcaggtgtctaaacttcacatcaagcttcggcacactgaaggtaaccttatctggaaatgtgagcatttgttctttaaagctggtagaacggatttgctttttgatgtatgtttgattgatgaagtatccatgatagcatctccagtgtttgaagagacggtattatattctggaattgtatgcttcttgcgaaacaacctttcatcaatgttggcgataacatgcccacatttcaattccaggttaatgattttgatacctttctccttttcatgaccaaagtcacaagtaaccaacagatcttcacaaacaaacggggccaagcatttctcagagttagatacagaagcttgatcagactggaaagcatcatgcagattacaactgcccatcggatcagtagtcaagcttaaatctccaaagtgtacattcaaaggtaaaagatgcaacttgacaccaagaatatggttaggcccagcaacttttaatgtatccagcgttagttctttgatgtcaacagcaccttttggtaccttgattatcagatctgtcacag

SEQ ID NO: 14178 - DNA, 594 bp, Setaria italica
  Peptide Sequence Number=SeqID_80152
taaaaaactaaaaacgacttctcagggggtggctgggcttaaacacaatgccaacaacaccacggcgaatacctagatgtgtacacatggccaagaaactgatgagcacctggagccgccacaaggaaggaggactgatgataaagtgcaacgatcaagatgaactgaactgacgttggtggtgggaactgagagatggaaatcaagagcagctgcatgcgatgcagcgattcttgctctaaggatgggtctatgagatccgggaagggtttattctgtatgttcttagtttcgtgccagcattcatgctactggaggtactgtgatcaagaatcacagccatcaagatgcactgatgtgggaacacagggagaaggtttcctctcttgtttagcccatgggaaggcttgtttactcttgttcaagtgttttggctattcttgtgtgcatgtctgaacaaaatgtgtgatacttacttgagtttctcgattaattcattctgtatgatgggctgtattccttgtacttagcgaacttgtaatcaataatacttaggactaggtagacctaatagaccgactagaactaaccgaa

SEQ ID NO: 14179 - DNA, 468 bp, Setaria italica
  Peptide Sequence Number=SeqID_80153
gtggaggaccttatgttcctctctgaattccttttaattgtgaattgtgaaagcctggagaggatcttgaatcttcccaaggtgcgacatctgcgggtaagttgctgtccaagtttaaggcatgtggaggagttagacagtttggagcagctgtggctggacgtggatatgcaggacctcgcttctcagggggtggctgggcttaaacaccaatgccaacaacaccacggcgaatacctagatgtgtacacatggccaagaaactgatgagcacctggagccgccacaaggtatgagcaaaactgattgggcattaatttagttgctccgctagaaatgatttgtgctggcacagacaaattattgtactggcgagcgtgattagcacccgccagtatagtggttccttgtgcctgcgggagtacccgccaccacagtgactactatgctggtggacaataatgtcgc

SEQ ID NO: 14180 - DNA, 456 bp, Setaria italica
  Peptide Sequence Number=SeqID_80154
ttctcgcgtctctgtggctgtacaggcagatcctcgacgccattgaggcgaacgattacaacaacttcaccaagcgtgcctacgtaggcaaggcgaagaaattgatgtcgctgccggttgcatacgcaagagcagctgttgcatcatgatccgtctgtatatcagatgttctatttttgttttccttttttctctcaggttctcttttccttttttttgctcctttcatttttgggagatttgttggctgttgtatataatcagcttcagctgcctgcatggcataagcctgtctgtcacacgcagtttttagttcaggggactcgtttcaggcccctcaatactcagctagctcctgttacgacatgtaatgaaaaaagaaggttagaattcaagaagcattcctcttgttatggataacctcagagacctttcaggtgatgttgttatgttact

SEQ ID NO: 14181 - DNA, 575 bp, Setaria italica
  Peptide Sequence Number=SeqID_80155
cagccacctcctgcagaactctcaacctttcttccaaattctcaggccatcagataacaagccatcgatgactgcacggctgtaccagcactcatcctgcaagagcatgtactataggtcaagcaagaacagatttttttttcccttcactatataacatcgattgtagaagctgaaattatatacttttggtcacattcgttaaggcataagtgaggaaaattcaaatgtataagacagatactagctaagaatataggagaatatacagatattcaactattcaagctagtttccttagccactgaactgaacatcccaaccaagttttttgtgaggaatatgcatagccaacaggattttaactgcttttgtttcaataaactcaaaaccatttctgaatatttacctttttaaaacaatagtctggaactgcatgttcacatgaaagaatactaagttgcttggttcaaaatggaatagatgatccataagtttcaggtcagttgttgaatatcatcctcgtgttgctgcatccctctccttctctgtagctgccctcgcccccttctttt

SEQ ID NO: 14182 - DNA, 549 bp, Setaria italica
  misc_feature (546)..(546): n is a, c, g, or t
  Peptide Sequence Number=SeqID_80156
gtgcggaccaacggtaaacattttcgtaaatacatgtgtttgtctgttctcttgcttacaactgtcacaaagtagttttgtctcgatgatcttttcaaaaaaaaaaaaagttctgtctcaatgtcgagtggtggcagttcttcagcaggctcaagtcaggggctcaggcttgaatacaagtgagacagcaatcaagttctccgcaattagctgttgtgacccattcttctgaaaatgcccgtctgaaaaaatggcagccacctcctgcagaactctcaacctttcttccaaattctcaggccatcagataacaagccatcgatgactgcacggctgtaccagcactcatcctttttaaaacaatagtctggaactgcatgttcacatgaaagaatactaagttgcttggttcaaaatggaatagatgatccataagtttcaggtcagttgttgaatatcatcctcgtgttgctgcatccctctccttctctgtagctgccctgccccctcttttctcacgcaacaacagtcgaacccccccccccncca

SEQ ID NO: 14183 - DNA, 2307 bp, Setaria italica
  misc_feature (2279)..(2307): n is a, c, g, or t
  Peptide Sequence Number=SeqID_80157
aaagaaaaacaaaggcaccgcagctcggcggagaggaaacttgctggggacctcgccgcccgcgtcggtcaaaggcggcggcgatcctgggacggcctcagcccgcgccgtcgatccggtccgctcgcctccaggttgcagcttaaggtctgtggaagatggggacctcatccggtgctaatttccaccagcagccgccaccagcccaggggatgctgcctccgagacatggcccgcgcccctccgggctacagacctcgctctcgttggcctcgtcggagcaggtgggctcgccggacatgcaggagcctggctcgaactctgacccgggccacgactccgccaccgagagcgccagttccagggacacatggcctgcagagccaaaccagagcaacggcggcactgctgccactggtattgtgagtaaggctgtggagaaggagaaggaggtggcgaacggtgtggccaagctgcaggttatccgcggaccctcgtcccgcgtgggtgggatgcttctgcaggaggttgcgagggagagggttgatttggttgctgagaagatgaaggtgatgccggaggagcacttggaggagatcaagaacgagctcaggtcgattctggagggcactgggggttctcaacacatcgaggagttcttgtacctgcagaagcttgtccaggacaggactgatctgacaccatccatgctttcagtggcgcaccatgtgcagctggagatccttgttgcgatcaagactgggatacaggcgtttctgcaccccagtgttaccatcccacagggtcgcctagtggaggtcttcttgtacaagaggtgccggaacattgcttgccagagtgctctccctgctgaggactgcaggtgcaacgtgtgtgctagcaggaacggcttttgcaacctctgcatgtgtgtcatttgcaacaagtttgatttcgaggtcaacacatgccgctggataggatgtgatttctgctctcattggacgcatacggattgtgcaattcataatggtcagattggaatggggcaatcagtgaaaagcagcattggccatgctgagatgcttttcaggtgccgggcttgtcagaggacctcagagctgctgggctgggttaaggacgtcttccaacagtgcgctcctggttgggacagggatgcactgttacgggagcttgagtttgtttgtaagatattccgtttgagtgaggacccaaaaggtagggtgttgttcaggaaatgtttggatctgattgaaaggttgaggaacgctcctgctgattccatcaatcctagggtgatactacaggcgctccaagagcttgagatggattccccaaagatctctgaaaatgaggattcaggacgcctgatcactccccaggaggcctgcaaccgcatagcagaggtagtccaagaggccgtgaggaagatggagctcgtcgcggaagaaaagatgcgactctacaagaaggcccgcctggcggtggaggcctgtgaccgcgagctggaagagaaggtccgggaggcgcaggagctgaaggcagagcggcttcgcaagaagcagcaggtggaggagctggagagcatcgtgcggctgaagcaggcggaggcggagatgttccagctgaaggcgagcgaggcccggcaggaggcggagcggctgcagagcatcgcgctggccaagtcgaagacggcggagcaggactacgcgagcatgtacctgaagcggcgcctggaggaggcggaggcggagaagcagttcctgttcgagaagatcaagctgcaggagaaccagaagccacccccgccgcaccaggcgagcagcagcggcgccggaggggaccccgcgcaggcgatgatgctgtccaagatccaggacctgctcaagaacgtccgcagcttgccggccaagtcggaggggcactgagcgccggaaacaagagatcggtaaccgtatgtgtgatgctgtgctgatgcatgctgattccttttcatcagtgtaaagtgttagcagaggagtttgctgtggggggagttgtcgtgatgccattaggtgtgttggttggtgcttatgatgtgccgttgtagtttacgtatattaactcggtcgttgttcgaaaaactgttaaaattaagtggggcaggtacgaaactgatggagcaaacactgatggttctctctctatatactgtccctgaccaaacatgtgtatactttgtgagtaaatataatcttgcttgctgacggacagtaaannnnnnnnnnnnnnnnnnnnnnnnnnnnn

SEQ ID NO: 14184 - DNA, 287 bp, Setaria italica
  Peptide Sequence Number=SeqID_80158
tcgtcgcgggtacggccctttccttgccatcttccacctctccatgcgctaggggcggcttggcgcaaagggagactcggacctggggaggagacgacagacgagaccgaggcgaccgcgaccgaatcgcgtgtggggcggtaggccatcgaggcgatccgcggggggcaaggaaggaaaggaggaagagcagagcggagtgggttggggtgggggggacgcgcggcgtgaaggatggacgcgaacgggcgcggggagatggcgacgtcgcgggcgccgctcctggg

SEQ ID NO: 14185 - DNA, 353 bp, Setaria italica
  Peptide Sequence Number=SeqID_80159
tccttgagcacctcgaggaagaaggggtggatccggcgcggcactccactcagggatgacgtacggcgcgcgcgggcgctgctgcttctgccgctccgctggcggcgcggccgcttcctccatctcggtgtcgccggaggaggccccgctggggttcggcacctcctccgctgacgagtcgctcgcgctggggctagggccagcgctgccctccgccctcgcctcgggctccggtaccggcggggcgggctttgggggcggaggcggaggcatagaggaggatggagtagggccaccgcgcccctccacctccgccgcggacgacgtcgcctgggactccgcctccggccgcg

SEQ ID NO: 14186 - DNA, 265 bp, Setaria italica
  Peptide Sequence Number=SeqID_80160
gatcgcgagcgccgcggtgtgggccgcgatcggtggcaagtcgacaaggaggtcgcagacagcctccatggcgtcccgggccatcagcggagaaggacgcccggggaggagtcgtgcccagaagaggtccagccggggacaagccgcgaagaggtgttcctccgtctccggtgaaggggcagtcgggggcgtcaagcgcgccatggcggtgaagcagcgccctcgtgcgcgtgcggccgtggcgaagaatccagaagagaaccgg

SEQ ID NO: 14187 - DNA, 435 bp, Setaria italica
  Peptide Sequence Number=SeqID_80161
ccggaacgtgccgagcacgtcggcgacctcgtcggactgcggcaggtcgggtccgaagagcgggcgcttgccgcggagctcggagacgagccattcctggcgctgctcctcgggccactcacggtaggagccgatgccaaggtgcgtggtgatcgcgtccatggcgtccgtgtggcgctcggactcctgccggatgtcgagcttgacgagggagagcccgaaggtggagacctgccgcatgaagtccaggaggttgccgtcggcgatcagcttgtcgccacagtcgcacagtgaccggtagcacagctcaagaggctccaagaactgcttgacattgacgaatgtcttgtcttccgggatgttagaaactccgtgcgacaagatctgccgagcacgctcgcaggtgttgtacagcttgtccctcacatcgccgag

SEQ ID NO: 14188 - DNA, 682 bp, Setaria italica
  Peptide Sequence Number=SeqID_80162
aaacttaaagtaaacgaaaccaaacaaagtaacgaacaaacaaagtagaaccggtaagacaacaagactacaagaaggctccaagaactgcttgacattgacgaatgtcttgtcttccgggatgttagaaactccgtgcgacaagatctgccgagcacgctcgcaggtgttgtacagcttgtccctcacatcgccgagcacgatccggtaaggttctcgcggggaaatctgattccaaaactcgatgtagtatttggcgtactcccgcgaagattgccggtgcagttcgtcggcgcgggctcggagctcgtcgttgcagcgccacatagagagctcgaacatcaaatccgccatttttgagaagtacatgttggcagccatcatcctggccagcaagcatacgtccctggtaacctcaggtgtgactctcggattgccgtcgcgatcaccgcccatccaggaggagaactggatgagcggggcgtcgtaggggaggcgctcgtcgatgccgatgttcttgagcgccgtgtcgacgcggcggagaaacttgggcacgccgttccagatggtgtcgtcgaagtagctcatcccagcccgcatctcgtcctgcggcttcggctgcgcccgcaggatctcgtccgtcctcaacgccgccagaatctctctctgcagggcctcgtcg

SEQ ID NO: 14189 - DNA, 414 bp, Setaria italica
  Peptide Sequence Number=SeqID_80163
ctgaacccattcctttgcactgtgagcatgctactatccgaagatcaccacacctcttacacatacctagtgaccttctttgggaggaggcaatgaatccgtcgaccttgggcgcagcgatggtggcgccgagcagcaggccacccaccacgaagccagcgatctcgctgcccgtcagcccatccatctctccctctccctctctgatatcgccctcaattgctgcaccgtccaaagtaagcgacaagttatctcaccggagatagaagcttgcagtcgtttgggtggtaggagccgtcgggcctcgctcgtcaatccttggtggaatggtggcgagctgcgacgggcgtcgtcggccgtggagcttcttggaggaagaggctgcggacagccgtgatgcccagctgcgcgtcg

SEQ ID NO: 14190 - DNA, 283 bp, Setaria italica
  Peptide Sequence Number=SeqID_80164
cccgaatcgggaacagttccaccattgttggccggcgaacgagctctcctcgttcctcggagatcttgatccggagctaatataagccagggtgcctcatccgatcacctacttccatagtcggctaccgcctatataccacgctcgctcgcccctgcttttccgtacctgcaacgtcttggagtcttgttgtagcccgctgcttgcgccctcactgactgcaaccagcagaacgaagcaagcatgggttgggcggcggcaatggcggccgccgtggtggcgg

SEQ ID NO: 14191 - DNA, 493 bp, Setaria italica
  Peptide Sequence Number=SeqID_80165
ggccaacaatgggtagatggcttagaagctaagtaaagcatctaaagagcatctaagtagataaagtgcacataggcatatagatagataaatagcacacccaacacacacatgacttagtctatcaatctccccctaagtcttgcgtgtcttgagcggcaattggaccatcctaatcctagagcaaagttcctgaaacttgatccttccaagggacttggtaagaaggtcggcgagttgatccttggtgttgatgtagttcgccctgacactcccttcctccaagcaacctcggatgaagtggtacttcactctgatgtgcttgcttcgctcgtggaagacgggattctttgccagagccagagtggacttgctgtccaccctgagctccattgctagcgtccttgctaaggagatcaccgagcagccgagtgagccaaagagcctgacttacgatcaggacaaatgcatattagtaccattcaatgaattt

SEQ ID NO: 14192 - DNA, 266 bp, Setaria italica
  Peptide Sequence Number=SeqID_80166
cggcttgggggagctcagccgccgcctttgcgttcgccagggttttagcgaggaagacgcacgggagtgggaggagcttcccgagagaggtccagacggagagggagggagggagatggccgccatggttggagcgcgcagggcgctcctcgccgcccgctactcccctcgcggagcgatcgcggcatcggccgcgcccgtccccccctaccggcgcgtagattcgctgcccagacttccagctgaaagaggttgtgtgccatctt

SEQ ID NO: 14193 - DNA, 1136 bp, Setaria italica
  Peptide Sequence Number=SeqID_80167
cgatgatgagaagacatttgcagaagctttggtttttgttcaggattctagcttatcagtttgcttccatagcacaggtcatggtgatccatcgattctttctattgaagttctccaaattgatgacaatggctataactttggcccttcatggggaaaggggacagtacttagaacagcgaaaaggttgagatgtggctctggaaagtctgcttttgatgaagatctgcatggtatccattggggtggggacagattctggttaggattacaaactttatcatccagttccgatgatcagtctatatcaactgagaatgttatagcagagacattgatagctccgaatttttaccctcggagcttataccaatcagctattgtgggcactgataggcaaccgagcttgtctttcgaaatggatgttactccaaacaagaactattcagtatggcttcactttgcagagattgataatggggtaactgcagaagagcaaagagtatttgatatactcatcaatggagacactgcatttaaggatgttgatatagtccgcatgacaggagagcgttttactgcacttgttctgaataaaaccgtagctgtcagtgggacaacacttaagatcatcttgcaacctgtgaaaggaacccgtgccattattaatgccattgaggtgtttgagataatcgcagctgaaaagaagactttgcctcaagaagtgagtacattgcggacattgaagggttcacttggccttccacttcgatttggctggaatggtgacccctgtgttcctcagcagcatccatggagtggagttgattgtcagtttgacaacaccaaagggaattgggttattgatggattgggtcttgacaaccaaggtttgagaggggttatacctggtgacatatctaagctgcaacatctgcaaagcataaacttgagcggcaatagcataaaggggaacattccaacctctgtgggtaccatctctgcactgcaagtactggatctgtcatacaatgagcttaatggatctattccagagagccttggccagctgacatcgctacagatcctgaatctgaatggcaatcgtctgtcaggaagagtcccagccagtttta

SEQ ID NO: 14194 - DNA, 268 bp, Setaria italica
  Peptide Sequence Number=SeqID_80168
cgccgacgaggaggcggcgaaggagctctgctgccaggttgggctcatgaggagctggaggcgcgtctccgccctcgggcgccggccgccgccgagcaggcgccgcttgagcttggtgttccagtggttcttgacgtcgttgtccgtcctccccggcagctgcgcggcgatggttgcccacctgctcccgatgctgatgtagaggctgcagatcagcctgtcctcgtcctccgtgaagccgccgtgccggatgttgggccggaggtag

SEQ ID NO: 14195 - DNA, 989 bp, Setaria italica
  Peptide Sequence Number=SeqID_80169
tttttttttttgatgagaacaaaaaatcctcgtgtttcgtcttgagaggacgagtgaatcagagcaatggaagaatatcatgtacattaacaacaaaatgtgtgtgtgatcgaaccacacaccctagccaaagaacaaggggaaaaaatcaactaagcaacgaatttgaaggaacggcctgcttccttccatccttccttcccgggctaatcacagctttgaatcgaaaagctcttagcaatggagaaaattttgaattcgatcagaccaacgcccccgaccggtccatggacgtgacggacatgctggcgctggaggagctgttcccgaacccgccaccaccacgatcgccggcgctgccctcgcagagcgcgaacgccgtctcgaggttggcaacaatgtccgccatggccggccggtccttgccctccagccggacgcagtgcaccgcggtgtaggccaccagctccacggcctcggcctcgtgctccgcgggctccggggcgcgcgggtcgagcaccttggtcagctcgccggcgacgatgctgggcacggcgtggtccaccacgctgacggggctcccgccctcggcctccttgaagatggcgcgccgccccgtgagcgcctccagcatcaccacgccgaacccgtacacgtcgctcttcaccgtcaggtggtggaggccgtagtactccgggtccatgtaccccaacgtgccggcggccttcaccgtcaggtgccgctgcgactgcgactgcgtctcctccgactccgggggccccatgagcgacagcccgaagtccgagacgcgcgccgtccagttgccgtccagcaggatgttggacgacttgatgtcgcggtggatgatgggcggcacggcgtacgagtgcaggtactcgatgccgcgggacgcgtccaggaggatcttgatccgcagcttccacgacgacgccaccggcgactgctgcgccgccgacccgggcttgggg

SEQ ID NO: 14196 - DNA, 791 bp, Setaria italica
  Peptide Sequence Number=SeqID_80170
cacatgcacttggtcaaaaagttcaaaatcaatagagacaggtgccttgatagaaggtagaggaaaacaactgctgaacgggccaaatatttcgacacagtaggaacaacttctacccagttggagcagataatagagaagagagtgatgttggaaaggtaagccaaactgcatcaagccaaaggtgtcgcatcgctaacagtagagctgctgctactgagagctcgaagaaagagcaaactggagcagctaggagaatgtttgcacatgcactggggttattgtctgcagtttaaggaagttatggtgcactgcctaaactgaagtaaagatatgagatgagatgccatgaattggagaagcttgccaatgtgtgctatgactgcgctcttttatcctgtcatgcatatggcgtacgatgcacctgtgatgtttggtgctcttttgtgttcatctgcttctgcgagatggcttttgtgatgttggtagcagatggaaggtcttcttggttggatgttaactattggagtgacacaggtgatctggggccttggtaggaagaagagtgtctgccacattcttgatcgaagagcctgaaggcctaagctcagttggggaaagagcttcatagatgcacagggcatgccaagctgagccgtggccgtggccgtgcaagtgtttcacaggagtggaagaaactatgccgtcctcgccactgatacccttttttcccaccaggctgttgcaaataagtagtacttttttgtttaatttgcaattttgactcttga

SEQ ID NO: 14197 - DNA, 683 bp, Setaria italica
  Peptide Sequence Number=SeqID_80171
agcaattatcttttgctggtttatgttaacttaagcttctgcttcgcatcttttcttatgcattttttgtacatttatttatttgtttgtttattttgctgcatcaaccctcaggaggcaatttgaacaagcaaacctagaagcaatggatgaatctgccgaatggagaatgaaatatgacaaagaatttgagaaaaccaggcagctgcaagatgaactttcaaaggttaaggccacattggctggtacagccaggcgtcttgagttgttgcaaaaggataatgagatgtggaagcggcagactgaatcactgaagcagaagtgcaattgcactattccattgaaaaccatgcaagattaaggatgtggctagggttttttcaacttatttggttgattagctcaaagtcttttttgtttgttcagcaccagagggaggaaagctagattgaggtctgggaattggaatagatgaattgaagaaatggctgccatagtagttggtacgtttactactgatggtgaacttcatacttcatcggaagtgatcggttgcccgcccatgagtagcaatgcagaataccgtaggcacaacctatgatataggcggttagctccttatttcattaaggatttcaagtttttagtaattttggattggcactctctacctgtaaatcagt

SEQ ID NO: 14198 - DNA, 273 bp, Setaria italica
  Peptide Sequence Number=SeqID_80172
agcggctcgacggccggacagaggcgccgtgcaagagggcgggcggtgttgctcgttttaccttagggattgtggacggaaggcgtgacgcggtggcgaagcgatgccgtgacgaggacgaagacgtgctcgcggttcgacttggcgtcggcggcgagcagcatctccgcgcgacgcagggacagctccggctcgggcggggtgaggtcgcctcctcctcctcctattccccctccctcctccgtgtcgtgtggcggcggtggaggggatccg

SEQ ID NO: 14199 - DNA, 320 bp, Setaria italica
  Peptide Sequence Number=SeqID_80173
caaaattggcagactgcattgacgtattgcagattgacaattcctgtttatgaaagagtttatccaccatctcatccaatgatcggattacagttctatacttgtggaaagcttgaatggctgctcgagtgcacagaggatgctctgaaatctttaaccagggcagcagatatacttggaataacacacggtacaaaatcccagttcatgaaggagctctttggcaagctagaggaagcaagggctgaagtttcttttaagctatcctctattttccatcatagttgccctgcagtccctcatgaaaattgcttacttaa

SEQ ID NO: 14200 - DNA, 391 bp, Setaria italica
  Peptide Sequence Number=SeqID_80174
gcaacctataggcaaagatgaagaggtgtcgataagctacattgaaactgcagcagtcactaagaagagacagaatgatctgaagcagtacttcttcacctgcacatgccctcgctgtctcaaggattctgaggaggatgctgtacttgagagttatagatgcaagaaccaagcatgtgatggctttctactgcctgagtcaggaggaagaagttacacatgccagaaatgtagcatttccagagatgaggaagagataaaaaagatgacaagagaaatactactgttatcagataaagcgtcttcatttgtttcattaggaaataccactgaagcaggttctatctacgagaaaattgagcagctagagcagaacctctaccatgctttc

SEQ ID NO: 14201 - DNA, 1628 bp, Setaria italica
  Peptide Sequence Number=SeqID_80175
tagtacaattaatcagccaagaaccttacacttccacgcctaacaagattttagtcagatcaagctgtgaccattgtttcgcctctagcaacctgaggaagtgctcggcttgtcgagtaacttggtactgcagcagcgattgccagaaagaagaatggaaactgcatcagctcgagtgtagagtgatggcagcgcttacggaggatagaaagaagatgcttactcctacaattcgtttgatggtgcggctggtactgaaaagaaaattgcaaaatgagaaggccattccatcttcaaatatagataactacgatctagtggtctattttggagtctcatatatcgaaggttgatgaaaatcaacttgtactctatgctcagatggccaatcttgtgagcctgattcttccttcgcttgagcttgatcttaaggaaattgcacatactttttcgaagtttgcctgcaatgctcatacaatatgtgatcctgaacttagacctcttgggactggattgtaccctgttatatctataattaaccacagttgtgtaccaaatgcagttctgatatttgatggtcggacagcttatgttcgcgctctgcaacctataggcaaagatgaagaggtgtcgataagctacattgaaactgcagcagtcactaagaagagacagaatgatctgaagcagtacttcttcacctgcacatgccctcgctgtctcaaggattctgaggaggatgctgtacttgagagttatagatgcaagaaccaagcatgtgatggctttctactgcctgagtcagggaaataccactgaagcaggttctatctacgagaaaattgagcagctagagcagaacctctaccatgctttctcaatcactttgctgcacacacgtgaaacattgctgaaggtacatatggagttacaaaattggcagactgcattgacgtattgcagattgacaattcctgtttatgaaagagtttatccaccatctcatccaatgatcggattacagttctatacttgtggaaagcttgaatggctgctcgagtgcacagaggatgctctgaaatctttaaccagggcagcagatatacttggaataacacacggtacaaaatcccagttcatgaaggagctctttggcaagctagaggaagcaagggctgaagtttcttttaagctatcctccagtcgtgggcatgatgagcaattttcatgagggactgcagggcaactatgatggaaaatagaggataaaaaacatcctgctatcttggagacaatgttaaaaaataggaaaacattgtggagacaatgtctaggcatataaatagcactgttgggataacaacctgctcttcccaagcttcattgtggtggaaatggggatatagcatctggtgtaaaatggatcatattttttattaattgtcaacatgtggcgagttgaactccatgatatcttcatgttccaaattggacagtctacttcacatgtcacaggaagaagcaccagtatgcgtgagatttcaccttactttgtgagaatccaaaacgcaactactgatactttcagactggtgaaaataaattttggaccaattggactttccatg

SEQ ID NO: 14202 - DNA, 580 bp, Setaria italica
  Peptide Sequence Number=SeqID_80176
gatggctgtcatggccgctttgaatcgtgcctggttgtggtgaaaggattgtttttttccccctgatatggtggctgtggacgcctgtgatgcccttgctcgaggttgaaggattccacggtttgatggtctgtgctgtccgggagctcgtcgtcggcggtgggaggcaagatgtacgccgtggggaaggtcggcagcctcatctcccgcagcgtgtacaccgtctccggcccattccacccgttcggcggcgcggtcgatatcgtcgtcgtgcagcagcaggacggcagcttcaagaagctcgccgtggtacgtgcggttcggcaagttccagggggttctcaagtcgagggagaaggtcgtcaacatctccgtcaatggcgtcgaagctgggttccacatgtacttggacagcaatggcgaggcttacttcctcaggaacgcggatccgaatggtgaggaaggagagtttgtgtatcacccgcatcgtcgggagatgagcgggaggcaccgatccaggaagctcagctgaggaagtcgaagagcacttcgtgtgatagctcaacgatggaggctgatg

SEQ ID NO: 14203 - DNA, 270 bp, Setaria italica
  Peptide Sequence Number=SeqID_80177
aggactcaggtcagcatctcctctcctctcctcccctcccctcccgcgatttttagagctcgaacccttccagatctcgctccgttccggcagccggactacttctcgcgaattattagagggataatggcttgtgtgatcctgtggatccatggggttcagatgctgagctcagctgcgcttaaagctttttgtgcttgccgcgatttgggagctgaaactcgggctatttcggggaggaacaacctttttgtgcttgtcgcgattggg

SEQ ID NO: 14204 - DNA, 268 bp, Setaria italica
  misc_feature (24)..(24): n is a, c, g, or t
  Peptide Sequence Number=SeqID_80178
ccacaaacaccgagactatggaanaccttttatgcattgtacatgtgcagattcatgtggttcatgatcatgaatgatagctatgcaatttagccgtgatgctgactcacttcatggttaaggaaaattaacatttttcagtaatgctataaatttggtcacggtgatcagatattatgttgtggtcagtctattcactattcaggaactatatttttttcagtgtgtaggaaaaatttacgcctgaagttgttgcattttgtttgag

SEQ ID NO: 14205 - DNA, 1993 bp, Setaria italica
  Peptide Sequence Number=SeqID_80179
ttttaatcatgtaaaaatcaacatataaacaagaggcaaccaggtcatcgaaagagctacagcaccaagcacgcatgggtgaacgctgatgaacgcagcaactgtcctttttctgccccagaaccagagctcataagttactgtaccatccaagcgaacgttaacacagcctccaaaattacacatagaccctcataatacacacccagctctgaagaatgcaggaggcttctttgacgtggatcccagccgggcagccttctcccgccggacaacaaaagtagttgcacttgccatcccttcccctgccacccagatgctccggggcgctgcagttctttggagctcgggctcacacagttgtgtaggccacatactcgccgtcagtgtagctgagccgccggagcgagccagagtgcaaggaggggaccaggatggcgtcggggatgccaccggctggtgcgccaccatccgtggagggcaccgtctcaggttgaggagctgtggtcatggacttgagggcagcgttcaaccccatggatgacggctcggtagcgatcgttaaatcgaagctccttgcgtctgagctcatcgcggcgcagactcctgagacgacccagggcgggaggaccaggtcctttatttccatgctgtagcagatattgccagccgtggaggcaaatgctgatcccggttctgtgtcaaacccacccgaagagagcagccccatgtctgctcgcctcatctccctacatttcacctctggaatatgtagacagccattttgaaatggctgcggtgaatataaaactgggacgtctgcagcagataaagaattcagcaaggacttgtagttcaacagaatgtcgtataagccatgaacactctcattgccactaaacataaggagtgactgtgtggtgttgtccacatcagatagagcatctaaatggagtgcctggccaagattgcgcctttggatttctgaaagttcaatcaggtcatcttcagtagcctgctctacttcagtattgcaaagaggcatggaaaagcaaacaccatgtttccgcagtaatgcgcgtaggccacgtgtagattgtgacaagtaagcattacaggactgttttttctccaaatggcttccaccaatgaagagagcaacaaattgtgtcgtataaacatagaatatattcagcatattcttccggaacatgtagtaaagattttgaaatgaatcttcccagtcctgatgccttttgagaagaaagtcgctttctcctcgtgcagttgatgagagcatagcagatatgatggaggaaggcagcaaagattgcggatatacccatgattgtagtgccttcgagaacaagaattcttttttgctctcaggctttgggcactctaaattttgacacccacgaggacaagtctgacctatagctccagtgatgctgctcctgccaaaacttgtattgagcttgtgacaccatttcacagacgacgacgaaacaaactgcaaactagtctttaaggtaaaatccaaaggagctcttttccctggaatggtgatcttagaagggcacaagtctgaagacttcaacacagcatcaccaacttgtacagtagaggagctgagcccagaagccacaaaagcatcacgagttccaaaccctttaagtactttttccatatcaaacttgttagaaccagtctgcttctcatcaccaacatgaagctcagatacactccgcagagcattttcactgcatttctcaactttcttgaaacctggctttgctccctccgtcgttgatggcacagaagaatccgacgtagcagagtccccattaccacatggaagagaagatgatgcaaaatttgaagctgttgaagcatcaatagacttacaaatcttctcattgctctgcaaggcatccttacagttttccttcccatggtttcttgcttttctcacagggaagacctctgtaac

SEQ ID NO: 14206 - DNA, 864 bp, Setaria italica
  Peptide Sequence Number=SeqID_80180
aggtagggtggttgggcgtcaagccacgccttggtttcaaacgtctttggggtgtggaggtggatgccacaggatgcatcatttggaaggcgattgtcaaggtacaccgatggcatggttgggccgaccgtcttggcaccccatgcagaagtcaagtagtctgcttcctgtggctccaagtcatagaacgagttgacaagcacgtggtccacggtgtccaaccccacgaactggttcatcagcaactccaggagtcccgggggacggttcttgtcgaccatgaacgtgggcaggtcggtcagttcgagctgggacggcagcccgtccagctccggcggcaactcctcccgcaccggcggcggcgggatcctgccagcccgcaggtgcgtgtacagcacgtccacggcgcacgtctgcgtgaggaacgcggcgcacgccgcgccgtgccgcctcgccacgccctgcgcccacggcaggaacgcgtcgtacaccaccccgtgcaccggccggcccagctccgactccgaccggaggagctggtccacggacccgggcccggcggcgttgagtcgctcgaagtaggggccgcggtgccctcctacctcgccggggccacaccgtcgcagccgtccgagaagacagcgacgtgcaccgagctcggggttgccggcctggcggagttgacgacgaaacgggtcgcggcgagggtgcaccggacgccgctgtggcttgcgaggcgcttgccgaactggagtagcgggttgatgtggccctggaccgggaatgggacgagaaggacgtggatgcttctttcgttgtcggagttccccatggctatctcaacgtgtgataatgtgttatccg

SEQ ID NO: 14207 - DNA, 1378 bp, Setaria italica
  misc_feature (1342)..(1378): n is a, c, g, or t
  Peptide Sequence Number=SeqID_80181
cctctcttctttccccttccaatggagtcctgtagcttccgccccgccaccgcgccttcccccttcccctcggcgccctcctcctcgtcttcatccccgcgcgccccgtgccccaatctccggtttcctagaccaagaaacgggagacaggttggggtgcggcggagggcgtccggatttgatgccttcccgcccctccctggcaaggtcttcgttgatgaggcaattggagctgaatatggggaaggcttcgaaacatttcggatggatggaccactcaagatcgatgtggattacctgaatgaaaaattgcaagaatgcttccttcaaaggataaggcatgccatgaagccggatgaagcgtttggtctaatttttttcgtgggataatgtcattgctgatacagactcgctaaagttggatgcttggagacagcttgctttggaggaagggaaggatatcccaagtgctgctcatgtccgaaagagtatacttcatggtgctgctgaccatgttcttagaaaggttttgtattgggcaagagaggaagataaaatggaaaaactgaaagcacgccttatagagctatactacgaaaacctgttcaaactggatacgcccgtagaagggttgagagaatggttggatgctgttcagacagccgggataccctgtgctgtcgcatcatcccttgacaggagatgcatgatcgaagctctggatcgtatggcgctaagcaaatatttcaaggcgattgtgactgatgaagatgacatggagtcgatagcaaataggtttctgtcagcttctatgaagttggatcgtaaaccctcaaagtgtgtggtgtttgaggacgacccaagaggcgtcacggctgctcacaactgtaccatgatggcagtcgcactgatcggtgctcatccagcgtatgagctggtacaggccgaccttgcgatcgcaaagtacagcgagctctcagtgatcaacctcaggaggctgtttgctaacaaggggataagcttcatggacctacagaaacagataatcgagaaggcgcctcccaagaggaggctgacagtagacaccatcttctgattgattcttcccttttggctcctgtctgccagtattgaacagccagagccagccgcagcccggtcgttccgtgctgttgtatataaagatagtgctgatgtaggttatctgccctgtataccccttggcctgactaaatgtggtagttgtatcgtgatgacatccatgaagagaactgctgcaacaatgctgatgttgttgcaagctggcattgcccgatttattcatcatctatatctagttacnnnnnnnnnnnnnnnnnnnnnnnnnnnnnnnnnnnnn

SEQ ID NO: 14208 - DNA, 479 bp, Setaria italica
  misc_feature (441)..(479): n is a, c, g, or t
  Peptide Sequence Number=SeqID_80182
gctgcacagcatcagcgacaagtgcggcgacccctacatcctggagcagaacccgcacgtccacgaccccgacgacgtcttcccagggctcgtcatcaagatcacgccctccaggcccaggtagaccacccatcgatcgccccgtcggctgggcatctgtgactgagtgcaagcacaacacacgagtgttctgttggagcaaatcaagaaggtccattgctctgtctctctgcatagcagagtgagttgtagcaatgcagaggaggtagctaggaacaggatgtagcggctctgaactctgtagcggctctgaactctgtagcgtggtttggttgacttgacttcctgtgtgtatgggacatcacttgtgaatagagaagttcatgagatgaacatatcttctctgctagaaaaaaaaaaaaaaaactaagagacacgacnnnnnnnnnnnnnnnnnnnnnnnnnnnnnnnnnnnnnnn

SEQ ID NO: 14209 - DNA, 540 bp, Setaria italica
  misc_feature (510)..(540): n is a, c, g, or t
  Peptide Sequence Number=SeqID_80183
gcgggcagggcgggggaggactaggcatggcgttgcggtggtgcggggcgcggcggctgtcggcgcggccgtgcgaggagatgtacgtggtcggggacggcgagacgctgcacagcatcagcgacaagtgcggcgaccccttcatcgtggagcggaacccgcatatacacgaccccgacgacgtcttcccggggctcgtcatcgcgctcagccccaccaagaacgcctaagctcttgtgtgctgcgcggttgtacgtgcgcacggcggggcggagacgaacaggaactcgaagggttctgttcttggtttcctattctcgatccttttctttagtttgctccgaactgattgatccttctttatcaaaaaaaaaatgtttgatccttgtgagcgatcttaacaacatcgccgacctcttttctggaggggaggaaatggtaagctgtgtataaagtatacttggatgagccgaccctgttttctatcttatttgtattttcttaaacgtnnnnnnnnnnnnnnnnnnnnnnnnnnnnnnn

SEQ ID NO: 14210 - DNA, 1001 bp, Setaria italica
  misc_feature (1)..(24): n is a, c, g, or t
  Peptide Sequence Number=SeqID_80184
nnnnnnnnnnnnnnnnnnnnnnnntaaactgaggggcatcagatttctcaggtctcataattcaagcagcacaggtaaatcgactacacatgtccgtcaccaaacatgaaatgctgttgagaatctgagcattggttagagatctaatggcctagcctggcagagcagcgacaacttcccctacgcgcttcattattataacgagacatcttgttctgggcgagaaattcagtccaagtaataatcttcacgttccaaaaaacacagtatggaccgttgctgagagaaaaagaagcagagatccttacaccatcagctgcgcaatgtccttgcggaagacgccctccatcagaaccttcctcttcgcggtgactgacgggaacggcgagtaggagaaacgcctgcactggctgctcgcgctgattctgttgggctgcgtcatcgtgggcaggacggggaaggacttgggtcgaatgttcagccgcgagaacagcatttttccattggagtcgtggggggaagttttagaggtggtcttctgagctcctgcgctcctacttgtgcttgaaaaatgcttgtattgctccgagctgccatttggtgggcctggaagacggggacgaatctctgctgatggcttcatgcgatcaagccagcgaaggatcgcgtttccgaggttccgaccaacctctatgtccctctgctgaatgttcttgtgcactgacactgcaacattgaacacatcccgtgtgcgcctgtagacgaagtcccggatcctggggtggttgggcgggatgaggcggcgctggatgcggagcgcgaggcggtaggtgcgcctgaggccgaggaagtaggcggtgatcgccgtgagctcccacagcaccatctcttacgtcctcggcgcgcctgccctgatcctcctccttcgctggacggggcgggaacgggcgggccggggccgcggagcagcctcaccgccggcggacggactagcggcgggc

SEQ ID NO: 14211 - DNA, 2631 bp, Setaria italica
  misc_feature (50)..(50): n is a, c, g, or t
  misc_feature (2602)..(2631): n is a, c, g, or t
  Peptide Sequence Number=SeqID_80185
cttggtcatggtgtcgattgtgatgtatcgcagccaaaactcatcgatgntctttctcatatgaacattgagctggtagcatgtggtgaataccacacttgtgctgttacactatctggagatctttacacatggggggatggcacctttaaatttgggcttttaggtcatggaaatgatgtcagtcactgggtaccaaagcgcgtgaatggaccactagagggtatacatgtttcatcaatttcatgtggaccttggcatacagccctagtaacttctgctggacagcttttcacatttggagatggatcttttggggttctgggtcatggagatcgtgaaagtatctcagtccccagagaagttgaatccctcaaagggctacgcacggtgcgggtggcttgtggtgtttggcacactgctgcagttgtggaagtaatggctgggaattcaagttctagcaattgttcttctggtaagatatttacatggggtgatggtgataaaggtcgcttaggtcatggtgacaaggaaccacgatatgtcccaacttgtgtggctgctttggtggagcccaatttttgtcaggttgcttgtgggcattgcttgacagtagcccttactacttctggccatgtgtatacaatgggcagtgctgtctatggtcagctggggaacccacaagctgatggtatacttcctgtacgtgttgaagggaagctacacaaaaacttcgtggaggagatttcatgtggtgcatatcatgtagctgtcttaacgtctaggactgaggtgtacacatggggcaaaggtgcaaatggccggttaggtcatggtgacactgatgataggaatactcctacattggttgaagcactgaaagataagcaagttagaagtgttgtttgtggaattaacttcactgcagcaatatgcatccacaaatgggtatctggagttgatcaatcaatgtgctcaggttgccgtcagccattcaacttgaggagaaaacgtcataattgctacaactgtgctctagtattttgccattcctgcagcagtaaaaaatctctgaaggcttcattagcaccaaatccaaacaagccttaccgtgtctgtgatagctgctacagcaaactgacaaagggacttgagacagacatgcattcttcagcaaagcgggctgctagtgtaccaggattaagtgatacaatcgaggaggatctggaaacaaggtcaaatgctcaactatcaagattatcttcaatggaatcttttaagcatgtggatagcagatattccaagaaaaataagaaatttgaatttaatagcacccgtgtttcccctgtgccaaatggaagttcacattggagtgggcttaacatttcaagatctttcaatcctgtatttggatcttcaaagaaatttttctcagcatcagtccctggatctaggattgtttctagggcaacatcacctatttcgagaagagcaagccctccacgatccacaacacctacacctactctgggtggtctagcgtctccaagagttgttgcaaatgatggaaagccaacaaatgatgcactaagccaagaggttctgaatttgaggtctcaggtggagagtcttacgaggaagtctcaactgcttgaagtggagctggagagaactaccaaacaattgaaggaagctatttccattgccggggaggaaactgcaaaatgcaaggcggcaaaggaagtaatcaagtcactcactgcacaattgaaggggatggccgagaggttacctggaggagcagccaagaacactaaactgccacctcttcctggaatttccattccaaatgacatttcatctgtgggtacagagagtttgggcagcccaagcagttctggagaacaaatcacaaatggtcataatggattgcttgcttctaatggaccaagttctgttaggaataagaccagtcatgcagaagttggcaagaatggaagtaggctaccggatgctgaatcttgccatgaggctgaatgggtggagcaagacgaaccaggtgtatacattactctcaccgccttgcctggaggtgccagagatctcaagcgggttcggttcagtcggaagagattcagtgagacacaagcagaacaatggtggcaggagaaccgggcaagggtgtaccagcagtacaatgtccgcgtggttgacaaatcaaccgccagtgtcgataatgacattccatctaactgacattagattgacctggagaaacatagttgattacatgcggagctgaggccatgtacccgacctacgtgaaggctctcttgtcagtcaagctcggttgctaacgtggctaccattttacctagccccttgaaaagaggaggtttccgctcccaggaaaacaggaaggattttttcttcggttttacataataattctttactcttacccctttctttcttttttgttccttgtgtgaaaagtagagtgcttgagcagaagtaatgtaaatgcttagtagcagcaggctaatctatcttgtaaatgcataagcaagcatcaattttagaatgtcttggaaattttacnnnnnnnnnnnnnnnnnnnnnnnnnnnnnn

SEQ ID NO: 14212 - DNA, 1037 bp, Setaria italica
  misc_feature (1021)..(1021): n is a, c, g, or t
  Peptide Sequence Number=SeqID_80186
gtggagcccggcctcgcggagggcggcggcgcgttcggcgccggcgccgcgccgccagccccgccggcgtccaagaagaagcgggtggagggcatgccgtccaagaacctcatggccgagcgccgccgccgcaagcgcctcaacgaccgcctctccatgctgcgctccgtcgtgcccaagatcagcaagatggacaggacatcgatcctgggcgacacgatcgactacatgaaggagctgctggagaggatcaagctgctgcaggaggagatcgacgagcagcagcaggagacgccgggcgtgctgagcgtgttccgggagctcaaccccaacgagatggtggcgcggaacacccccaagttcgacgtggagcgcaaggagggcggcgagacccgggtggagatctactgcgccgccaagcccgggctgctgctctccacggtgagcaccctcgagaacctggggctcgacatccagcagtgcgtcgtcagctgcttcaacgacttcggcatgcacgcctcctgctctgagatgcagagggaaaggatcagcgcggacgcgataaagcaggagctgttcaagaacgccggctacggcggaggctgcttgtagagggctgggccggaggaggaagacgaagaaccgaagaagagctcgagcagcaggcagcaataaatttaaattaagcttaagcagcagtgtagtggtggtagcagcagtaattgcagtgaagagtagtggaaaaggcaggcaggcagaggcaaagatttgggaggcctttttgcaatccaatctccccatgataaccaacccatgttgtgtagtagcatgtcctactagcatcatatgcagatgcaaagtgctgtggtgaatcttctcctactatcttaacaagagcaaagctcgctgcctttcctttctaatgattgatcgtaatcagctggttgcgcttttctcagcacttcctttaatttggtgttttttaataatgggcctgttataaacaaaaaaaaaaaaaaanaaaaaaaaaaactaaa

SEQ ID NO: 14213 - DNA, 400 bp, Setaria italica
  Peptide Sequence Number=SeqID_80187
gcagcggtcgcgccagaccctggcgccggcgtcgtcgtcggaccagccggggcaccgcccgtggtcgtccccgagcaggcgttggcgggcaggtcgcacgagctgggcagcagctggccgagcgcggacccgagaccaccgagctgggccgccggccccgacgccatcgcggcgcagaggcacggcgcctgggactggaacatggcccgtatctgggcgcagcactccgccggcggtgacgaggagttgctggtgaagaagcccaggcacggcgccagggtggcctgcgccggcgggcacgcagccggcaagctcggcaccgcgggcgcgccgccatcggtgtcgtcgtcgtcggctgcggcaccggcagtggctgcggctgcgccgtcacggcgcacat

SEQ ID NO: 14214 - DNA, 399 bp, Setaria italica
  Peptide Sequence Number=SeqID_80188
tggggatcggtaatgccgctgtagcggccggcgaggatgatggagatggtgggcgcgacgaaggtgtaggagcccccgatgacggcggggaggcgcgtgccgaggaagctctggatcagcgtgttgatcccggcgacgaacagcagcgtctggatgacccgcgccttctcctcattgccgccgcccatctgggggacgagcgcggtggggatgatgacggtggtgccgagcatgacgaggtagtgctggaacccgaggaggatggcctccggccatggcggcgggctggtgaggcagtaggatacggcggggagctggtccctgacggcgtgcggctgcagctcctcctgcttcggcgccggcgccgccatctcagggagctctttgttcgttggcttg

SEQ ID NO: 14215 - DNA, 1378 bp, Setaria italica
  Peptide Sequence Number=SeqID_80189
aacacggaatagggagctttttccactaccattggggcctgtgatcaacaggttagagcctgactccaatcggagcgtcaaatcatcaaccaaaacattcccagagggtgtcaccaccttaacacctgaaaactctatataatttgcctcgctgatataatttgcagcagaagaattttgagtcatcaatctatcacgaacaccagatagctcacgggagacctccagtaactcatgaatacgattagcatagccactgagaatatttaagcgccttgaactgatagaaagggtcccaagagactgaaatagtgatattatcacactggtgtggtatcggagattgctcaacatctctgcccgtcctaaggtggatgattcaggtctaagattccccgcaaagaaaggttcgataattaggataactcccacagtggcaccaagatacttcagaagaaaatcttgaatcatgccaaaccaccagttttcatggagaacaacattcaagtgcttaacaagtgccccaaaccgctgcataatatgcgatgcttctctgttttcaccaccataaaatgccacactctcggcatgtgttctcaatcgtgaatggacctggcgatattccccctctagctgttgttccatagacttcagcttaccaaaagcaggagaaaattttctaattgtaccaccagcacctataacatatgccagaatccacaatacatatttcggacttgcataagagcagaggcgccagatatatattaacgcttctgcaattgctgccagatcatcttgtacaaggtcacttagttccgagcagaactttggtatatcacttgcaattctttgctctgggtttgagatccgatgatcaacatgcgagatcttgtagtacaccatgttctcaaaataatcagcatggacaagatccgtcaaaattttcttgaagcgcaagcctaatgaccctgtcaagtactttgacgtctgatatattgtggattggagaaagcatagaagaagattttcaataatcagatgtgtaaaggttggaactcgccgaaggaatgcagctctgaacaaatacccttgtacttttgctaatctgtggccaacagctgtacgcaagactgctgttattatcaagccaagaaggtaatttgatccattcggaccaatcttcttaagtaagatggcggccagaaaatgtaaggacttcaatccacttttctttttccttggtttaaccaatttaccatcaataccattttgaccatttctgtctttagtcccggtatgtgcatttccatcgctgcaagcattttctttctgttgtttattccatcggcctgactgggtatatgctaaagttccg

SEQ ID NO: 14216 - DNA, 902 bp, Setaria italica
  Peptide Sequence Number=SeqID_80190
agttacaaagacgaccgtaacactcagcagaattaacagcacgctctagaaggaaaatgaattggggtaacgaagaattccagaaaaaatcgccagaaactgatctggaacagctaatatttacaaaactggagtttcatgatcctctgcgatttgagcaggcacattgaacttttctctcttctgagacaagccgcattgaccatttgagctatttgaagaagaatttccagatctccctctcagggggctcagagacaaggtgcacgccgaatatgccttcttcatccaccaatgctcgcagctgccgcaccgcactgcttgaaccgatgtagttcttcctggcagcaagataaagcactccatatggtggccgcaggcacttttttatgagcaaatagaggttttgaagagaacttgcagagtaagggatctcattgactaacactatgtcatatccaccatctcctgtgctggtctcatttcccctctcccaggcacgactgctcgatagttttcttgatcttcttgatgaagtttcatggcaaatattgtttccatcctgactgttgtacccatccaaaaggtcatcttcacagaaccctagccctatacctgaggatgcatccacatcatcttcctgaattattgacagaactgtgtgcagctcctcccactccccagcatagaaatgaatatcttgaggtagttgttgccgtgatggagtaagggggcttccttgatggtgattctgcttgtcttgagcctgttcaaggttagcaagcacattcggtattgttttgcaccttactacttctgcactaggatcctgaaaatgaactgttgtaactcccttcaggcaagcaaatatgccaggaagcccgtatccacaaccaagctgc

SEQ ID NO: 14217 - DNA, 365 bp, Setaria italica
  Peptide Sequence Number=SeqID_80191
tgtaattaattttgtttaattaaaaattttggtctaattttcacagctaaaatctccgcgcacaattcaaattccaaaggattcatgctacgcgatttgtttaaaaattgcaatttttgactgttctcatcgaatctgatcctgccatggcgccccgctgacatgagttgactctcccttcagcaggtcggcatggggaactcgactctcacagacatgacgctcctgcccggcgtcgagcctatagtggcggggctggccgctggatcctcctcgccgggccaggaggccaaggccagagagccatgaagtccctctacctcaaggttcttcgacaccgcgcccgacggcaagtcccgcatctg

SEQ ID NO: 14218 - DNA, 304 bp, Setaria italica
  Peptide Sequence Number=SeqID_80192
gctcgctcggcgccgtcgccggctcgccccctcctccccccctccgttctcggctccgacctcccgcccgtctcccatcgagaccggcggctcggctcccgcccgcgcccctcgccggcgccgctgcccctcgagtcccaagtctccagatcggctcgctcctcgcctctccaggtcggcatggggaactcgactctcacagacatgacgctcctgcccggcgtcgagcctatagtggcggggctggccgctggatcctcctcgccgggccaggagggcaaggccaagaagaagcccatgaagt

SEQ ID NO: 14219 - DNA, 1041 bp, Setaria italica
  Peptide Sequence Number=SeqID_80193
actagggaacgaagaaaaatcaagaaagcttttgagattttgccagctgatcgaatgactgcaataataaggtcggcatggggaactcgactctcacagacatgacgctcctgcccggcgtcgagcctatagtggcggggctggccgctggatcctcctcgccgggccaggagggcaaggccaagaagaagcccatgaagtccctctacctcaagttcttcgacaccgcgcccgacggcaagtcccgcatctgcaggctctgcaggaaaagctactgcatgaccacagccacggggaatttgggaaagcatcttaataaccgccaccctggttatcaccaacttcctgagggccccagcttccctgcccagaataccatacagactaccatggttactagaagcaggaaacctcatgttccagtgcgagctcgggcccaagcacagcctcaagttcaaactcaatctcaaattcaagatcaagctcaagctcaagctaaagttcattctcaacctaaggcgaaaccaactgttgatattgaccatgtcaactggttacttcttaggtggcttattggctcctcccttccaccttccaccctcgaagataacatgcttatcgacagttgcaagtacctgagctcgtctgtcaggctctggccaaaagaaaaggttcaagagattacccttgaagtgttcagaagtatgaaggaggatgtcaaagcatctctgcaatgtatcagttagcggcgaactgatactctggacttttggacttcatatgagaaaatcttatacatgtccatcaggtgccattggattgatgaaaattgggtctcacagaaagttctacttgatgtgtgtcgtatcccatacccatgcactggctccaagatcttgcaagttctaacggatgtcttggtgacatataacattgattcaagagtccttgcttgcacacacaataacagccaacattcaatagatgcttgtcatgagctcgaacaggagctcaagtacccgtaaactcctacttttgtta

SEQ ID NO: 14220 - DNA, 274 bp, Setaria italica
  Peptide Sequence Number=SeqID_80194
ccacggttcccccacgacgccggcgatgggcaagcggaagcagcgcggcggcggcggcggagaacccgccggggaaggcgaagcggccacaggcggcactggaggtgggcacagcccgtccactgtgttcgtctccaacctgccctataccttcaagtcctccgatctcgaggcggtgtttagcgaggtcggcccggtgcggcgttgcttcatggttgcggagaaaggatcggagacgagtcgaggctttgggttcgtgcaattcgcaactgtt

SEQ ID NO: 14221 - DNA, 758 bp, Setaria italica
  misc_feature (70)..(70): n is a, c, g, or t
  misc_feature (170)..(170): n is a, c, g, or t
  Peptide Sequence Number=SeqID_80195
attttttaattcttcaatatctgacattaattgccccacttcagaacgatttagcaaaagtatctggctntccaatccctctatgacattaactttgtcttccaacaggacttttatttcactattcttcacagtttcctcttccaacattactctcagatctttgttcnccttcaatagcgccgatgataaactttgagatctctctaactctgatcttaaaactgtgagtacagcaccattttcaaccagttcttcctcaagtgccttctgttttcttaacatgttttccattgcatcagtttttatatctagttctctttgaacattgctaagggcagtagatatttcatcagctttgtctttcatatctttcgcgtttgaggtggactcttgcagtagtttgaggtcaaaagacaatccttctgctatattaatcttcctgtcaaactctcttctgagtgatgcataatctgtaatataatcagattgagaaaagtcaggtttgctgctaccgcattgacatgtatgcgactctacctgctgacaagcagacccagaagtatttgcattgaggtgctggaactgctttgtagatctgcctttttcttctataagtgatgccatgttaactatatatgaccttgactcccttatacatctcttcaagtcttggccaaaagtataatctccgagcaaagagcaaagagttctactgtagagaccctttgcattgccggaacgaccccttattgtag

SEQ ID NO: 14222 - DNA, 200 bp, Setaria italica
  misc_feature (188)..(188): n is a, c, g, or t
  Peptide Sequence Number=SeqID_80196
ttgctgctgctgctgatgctgctactatggcgagaatgcttcttgtgaaacttcagagatcacgttttcgaaaattgttgggggcaaagtacctgtatgtttgagctattattctttcctcgatcgtgtaacttctatctatttttatgtgttcgcttttatttcatttacaaaaaaaaaaaaaaaanaaaaaaaaaaaa

SEQ ID NO: 14223 - DNA, 1960 bp, Setaria italica
  Peptide Sequence Number=SeqID_80197
tccaatccgcacctcgcgcatctcccggccacctcgccctgatccggttcccaaatccttcaccttcgtcgccgtcctctcctccgagccaaatcgatcgaagcgaagccgtgatcctgtccatgcgcggagcgtggtagcctcgtcccttgggggatcatctcgccgtcgcctccctcccttcgccgccgtttctggtcgccgggatcagccgagttggatctcgaggcataaaacagcgttgcgggcgtccggcgaggatacgatgcctgcggtgctcgccgcgttcgccagcctccgcgcggcagcagccatcgcctccggaaactcgtccttcccctgctcccaccgcctcaagcatcgttttagtagtaattttagtagtagtagtagtagtaattgtctttgacctttgccttcccctcgtcgcacacgcccctcagtccttacctcgtgttgtttgaggtttcggtctcgatctggttgtgctcgattcgaggcttgtttggtcgtgcgggttccgtgctcgatctcgcgcgcttcccggtttgtcggaatttggtgtctgggtccgatctgcaggttcgaaaggaaagcaatttggggtgttggtcgtggtgatcgccgttcttacaaggaaagagaaacttctctttgtaatttgggattaagcttgtggatgggcgagcctttggcagacttcagtgctgaatgtgttagcagcagctcatgtctctgctgcaacacctctgaaaagccaggttgtgagcacagctatgcttgctggaaagatgggcaagatgatttggtggttgaggaaattggaatggctcttactgaagtgatgcaagcctatggtaatgaggacaacgatgaaggatcagatctggatgaagattctagcgatgctgacaacgatgacccagttctttctatggaatctgattcaactgatgatttagtggatattgactctgaattggtcatatcaccagcctctccaagtggtgatgcatcggaatcatcaattagtaaatcagttgatgacaagtcttcaattcatggcattccaaggttggtttctgcaatgaagggaacccgtgcaaagcagggaatcatgacaaagttgagtgtttcatgggctcctgatgtatatgatcctcctgtgacttctgcctcacatacagtgagagggcaccagaggagttcaaggaagggccactacaaatacaagccctccaagagcagcagtagcagcagtcgcagtagcagtggcagcaaaaaggacaagaagcattctcgccatagtagcagcatcagcagcagcagcaaaaaggataggacgcattcgcaccgcagtgccagtagtagtggcagcaacagaactgataccagtagttctcattatcgcaaggcacacagtggtggtgggatcaacagcagaactgtgacttgtgttccagaatctgctaaggtatctccattggtgctagctgaaagtgccgcactgccagagatagttcctgtactcaagactatggaaccaatcaaatacgctaccagctgcggcaaggagaagccatttgcattgctgtcacgccagttttccccggcaaggtataaggggatgttctccttttggagccaaaaccaactggcttcttaatcatcaatcgctgctatgggctcagttgggagtcttcgatgcaaatcattgtggtatcagtgaggctcatccttttggattggttctcttcgttgctctgtttattctgcttgtttgtgaaacttcagagatcacgttttcgaaaattgttgggggcaaagtacctgtatgtttgagctattattctttcctcgatcgtgtaacttctatctatttttatgtgttcgcttttatttcaaaaaaaaaaatgttgtattatttgcacgttattacattgtggggattggttcaaaa

SEQ ID NO: 14224 - DNA, 647 bp, Setaria italica
  Peptide Sequence Number=SeqID_80198
tgaaaatatatttcatgttgtacatattatccatgatagctaacttagaggtttacttgtgctttaataaaagcaggtctattatttgaaatgctaagatcaactaggaagaattcgaaatcaacatggaaggttcttatcatggataagtttacagtcaagattatgtcgtatgcatgtaagatggcagatatcacagaagaaggggtttcattggtcgaagatttatataaacggaggcaaccattgccgtcactggatgccatatatttcatccaaccaactaaagaaaacattgtcatgttcctatctgacatgtcaggaagaagccctttgtacaagaaggcatatgtgtttttcagttctcccgtacataaagaattagttgctcaaataaagaaggattcaagtgtactacctcgtatcggcgcacttagtgagatgaatctggagtactttgctattgattcccaggtaaccatcttccttcaaatggatcatttaggttgctgacatagtctgttgctgtgatatatatatgctggaattgggaatacatatatctcataaattggctcatcttgtatcatgtatcatatagctaggattggttagaatggaggttccatatttgtttaacataagtc

SEQ ID NO: 14225 - DNA, 1025 bp, Setaria italica
  Peptide Sequence Number=SeqID_80199
taagatggtttggaggttccccgatgttattgttcctggattaaattttggtgataactttgttataattgttatttcttaatgccaccatccatttccaacaagaacttcaatgcttgacctgttggcaagttggttccaaccaactttttgcttacattgtatgaaaatgcattgttctatatatacattacaggaattcccccgtgtacactaccgtgttgccaagacaattgatgcttctacaatgacaacactacgagacttggtccccacaaagcttgctgctggtgtgtggaattgtcttgcgaagtataaaacgacaatacctgaatttcctcaaacagaaacatgtgaattacttatagtagaccgttcaatagaccagattgcgccaattattcatgaatggacgtatgatgccatgtgccatgatctgctatgtatggatggcaacaagtatgttcatgaggttccaagtaaaaatgggtcagcaactgaaaaaaaggaggtcctgttagaagatcatgaccctatctggcttgagcttaggcatgcccatatagcagatgcaagcgagaggcttcatgataagatgaccaacttcgtttcaaagaacaaagcagcacaactgcaccaagcaagaaacggtggagaagtatctacaagagatttacaaaaaatggttcaggctcttccacagtacagcgatcaaattgacaagctttccctgcatgttgagattgcaggaaaactcaataacataatacgggagcaatgtctgcgggatgttggacagctagaacaagatcttgtgtttggcgatgctggaacgaaagaactaatcaatttttgagaacacaattgggtgtaagtcgtgaaaataagttgcgcttgctgatgattattgcagcacttaacccggagaagttcgaaagcgacaagggtgcaaaattgatgcagttggcaggattaatctgttgatgacatgattgctgtaaataatatagcgttgcttatgtggg

SEQ ID NO: 14226 - DNA, 2532 bp, Setaria italica
  Peptide Sequence Number=SeqID_80200
cttggctggtggcggccgacgacctcttcgagaacagggaaagactcttcctcctcgttgcttccccctgcccgcactctgacgcggcaatctcgcgccccgtctcccgcttccgctccgcttactcgtcgttgccgtcgtgctccgatctccgccgccgcggccgctgcaccaagtcggggctgagtgatctctccggctgacgagtctaggccgaggcgccgtcgccggcagcaggaggcggggaagatctccggcgccatgtcgttggattcggacacctcctcgcagggcggggaccacaggagcttccgccatatcacgcgagatcgtctattatttgaaatgctaagatcaactaggaagaattcgaaatcaacatggaaggttcttatcatggataagtttacagtcaagattatgtcgtatgcatgtaagatggcagatatcacagaagaaggggtttcattggtcgaagatttatataaacggaggcaaccattgccgtcactggatgccatatatttcatccaaccaactaaagaaaacattgtcatgttcctatctgacatgtcaggaagaagccctttgtacaagaaggcatatgtgtttttcagttctcccgtacataaagaattagttgctcaaataaagaaggattcaagtgtactacctcgtatcggcgcacttagtgagatgaatctggagtactttgctattgattcccagggtttcacaactgaccatgagagggcattggaagaactttttagcgaaaatgcagaagggtctcacaagtacaatgcttgtctgaacacaatggctactcgtatatctacagtatttgcatcaatgagggaattcccccgtgtacactaccgtgttgccaagacaattgatgcttctacaatgacaacactacgagacttggtccccacaaagcttgctgctggtgtgtggaattgtcttgcgaagtataaaacgacaatacctgaatttcctcaaacagaaacatgtgaattacttatagtagaccgttcaatagaccagattgcgccaattattcatgaatggacgtatgatgccatgtgccatgatctgctatgtatggatggcaacaagtatgttcatgaggttccaagtaaaaatgggtcagcaactgaaaaaaaggaggtcctgttagaagatcatgaccctatctggcttgagcttaggcatgcccatatagcagatgcaagcgagaggcttcatgataagatgaccaacttcgtttcaaagaacaaagcagcacaactgcaccaattcatgcttggtgcagttgtggagaccctgcatgttgagattgcaggaaaactcaataacataatacgggagcaatgtctgcgggatgttggacagctagaacaagatcttgtgtttggcgatgctggaacgaaagaactaatcaattttttgagaacacaattgggtgtaagtcgtgaaaataagttgcgcttgctgatgatttatgcagcacttaacccggagaagttcgaaagcgacaagggtgcaaaattgatgcagttggcaggattatctgttgatgacatgattgctgtaaataatatgcgttgcttatgtgggcctgatacaaaaaagtcctcaggaggaggttttacactaaaatttgatgttcataagaagaaacatgcacatcgaaaagagcgaacatgggaagaatcagcatgggcgctctcccgattttatcctgttttagaggaattgattgagaagcttagcaaaggtgagctgccaaaagatgaatataactgtatgaacgaccctagtcctagtgctcatggagtgccaaccagtagctctgtccgaacaagtccagctcactcaatgcgatctagacgaacaggtggcacatgggccagacctcgtggatctgatgatggatattcaagtgattctgtgttgaagcatgcatccagtgacttcaaaaaacttgggcagcgtatatttgtttttgtaattggcggtgctactcgttcagagttacgtgctgcacacaaactttcgtccaagctgaagcgggaggtcatccttggttcatctagccttgacgatcccccccaattcatcacaaaactgaagttgatgtcagcagaactgtcacttgatgatcttcagatataaatagcgtcatacccacttggaagttggaatggtgctgttcaatgttcaccgtaaattgtatgtatcctttttattttcttcataattcttgtatcagctcgtgtgtgaggcagcatcatattcatttggtagaaagtgtatcatcaacactacctgtagtcttgattgcgaaagtgtataatcaacaccacctgtagtcttgattgaatgaatgtacataatagtgggcaacagctctaaccatacggaaaatcttttttaagattgggccaatgatttgttggtttctttatccacatatgttgaactggttacatacactgtaatgtaattgtatgatggtagtagtta

SEQ ID NO: 14227 - DNA, 961 bp, Setaria italica
  misc_feature (865)..(865): n is a, c, g, or t
  misc_feature (904)..(961): n is a, c, g, or t
  Peptide Sequence Number=SeqID_80201
atatatggatatgtactagaataggaatagttacaagaacaataggactgtgcagctcaatttttcaatgctgaatgctggttttgaaccaaatgagatcacactagtgagtgctgtctcggcagttgcaggatctggcacattggatcaaggtagatggatccatgactatataatcaacagatcaatcagggttactgataacctgagtgctggtctgattgatatgtacgccaagtgtggaagtattactgatgcgttgcagttattcaatcatgccagtgataagttctcttcaatttccccctggaatgctatgatatgtagtttagctgtccatggttatgcgcacatgtcacttgacctgttttcacatttgcagaggaccgacattaaacccaactcaattacattcattggtgttttaaatgcatgctgtcatactgggatggtaaccgaaggaaaacaacatttcgagtccatgagagaatttggaatccaaccgacaatcaaacactatggttgcatggttgatcttcttggtcgagctgggtacttggaagaggcagaacagcttgttgcaaagatgcccatgaaagcagataatgtaatttggggcagcatcctttcggcagcaatggcacatggtaatgtaggcttaggagagaaagctgcagaagaattggcaaagctcgaccaagcccatggtgcatccaaagtagccttgtctaacatctatgcctatgctggtcgttgggccaatgtttcagttgttaggaaggaactcaaggatgaaaatttggagagacaatcaggaagcagtggcattgtatagtaatgggataaagcatttcttcaattttanctctaatgggaagctggtgatggcacctcgttactaccnnnnnnnnnnnnnnnnnnnnnnnnnnnnnnnnnnnnnnnnnnnnnnnnnnnnnnnnnn

SEQ ID NO: 14228 - DNA, 232 bp, Setaria italica
  Peptide Sequence Number=SeqID_80202
tctcttcatggctggacactgctgctggctggcgttggtaggcaccgcatcacatgagcaaaggtggccgatggtcctcggatctctggaaagccccacccaggcttccaagcgatgttcatagtaagcgcggcccgtgaacggcagctgccactggccatgctgcttccacctacagtcaccatccctgatcacgctctccgctgtgtcgaagctgagggtggccggggca

SEQ ID NO: 14229 - DNA, 328 bp, Setaria italica
  Peptide Sequence Number=SeqID_80203
ctaaagtttagcacttatgttgacaaaagacctatttacccatgttggaggagtgagaaggaggagagagagaggggcaagggaaggaattttggataaggggaccacttttagcccctttagtccattttagcacctcttgaggggctaatggattagtgggggggactaaaaatttagccccctccattttagcctaggtgtttgggagcactagtggctaaaagtgactaaaatgggggtgctaaaatttagcacccctctcccaaacaccccctaagtacatataccactgcggccctttttctggaaaatttcccccttttaa

SEQ ID NO: 14230 - DNA, 302 bp, Setaria italica
  Peptide Sequence Number=SeqID_80204
ggggcaacagaggccgggcgcggaggagagagaggagcgcgggggaggaaagaggagaagggtaccggtggaaaaatggaggagggggaccacttttagcacttctagtcaattttagcacctcttggagggctaatggattatggggggctaaaatttagcccctccattttagcctaggtgtttgggaggaggaggggctaaaagtgactaaaatgggggtgctaaaatttagcacccccctcccaaacacccctattgtagtctgcagtattcaattggctctctcaaatatttgacct

SEQ ID NO: 14231 - DNA, 494 bp, Setaria italica
  Peptide Sequence Number=SeqID_80205
cggatggatctcccggtggtagaacgccttgacgatggtgatgatgccgacggcgtacaccgagttggagccagtgttggcgaagatggtgatcaggacgtgctccttgaggttgaacggccccgggttcagggagaaggaccacttggtgcccctgattctgacggccttcttggggaggcaggcggccatgagcttgccgagcggcagcacgacgatctggaccgagagggaggagatgtacagcgggttctgccggtagccgaagaactggttggagaacgccagcagcgcgcaggagatgagccccaggaaccatgtcctgaacgtcagcgccggcaatgccgggttgtccgtgatgggcacggtgagccggacctcctcgattgggcagtcgtcgacctcctccgcagaatcagttcttccaccattggtgcctggcctggcatcccggccgtccaagtggctgagctcgacttgctgaggctccattc

SEQ ID NO: 14232 - DNA, 432 bp, Setaria italica
  Peptide Sequence Number=SeqID_80206
gtattaagtgataaaaggaggagtaatatactgaaattactctgccagttgtatcaagtttgctcatactcatatgcatgtggcttgtttggatctacaactgccaagccaaacaaaggaacaagaaaatctggaagaagatgatatctgaagctttgagcacttctgatgaacttgtggatggaaagtttccctttattagcttccgagaaattgtactagcaacaaacaatttttctagctccaacatgcttgggcatggaggtttcggcaatgtttataagggaacattagagtgtggtaaaccaattgctgtgaaaaggcttagtaagggttctggccaggggatattggagttcagaaatgaagcaattctcattgcaaagttgcaacacagaaacctagttaaattcttggtttctgcatacatgg

SEQ ID NO: 14233 - DNA, 567 bp, Setaria italica
  Peptide Sequence Number=SeqID_80207
acggaccagttcacgttctccacgatggctgggggtgttctctaggctggggctgctggagcacgcgaagcaggcgcatgctggcctgatacagaaagggttgcctttggacattgtagggaacacagcgctcgttgacttgtattgcaagtgggggaggatggaggacgcgaggaatgtctttgagaggatgcctaagaggaacttgatctcttggaatgctctgatagcaggatacggctaccatggcatgggggataaggcgatcgagatgttcgagaggctggtagctgaaggtgttgtgccaaaccatgtgacgtttctagcggtactgaatgcatgccggttctctggtcttgttgacaaagggaagaggattttccagttgatgactcgaaatccaaaaacgaaaccacgggctatgcactatgcatgtgttattgagctttttggtagagaaggcctgctagatgaagcctattcaatgataaggagagcaccgttcaccccaaccgctaacatgtggggtgccttgctcactgctagcagggtccataagaatatgca

SEQ ID NO: 14234 - DNA, 471 bp, Setaria italica
  misc_feature (397)..(397): n is a, c, g, or t
  Peptide Sequence Number=SeqID_80208
cccaggatcatcagcgccgcggccacgggccgaccaccatcgctttgatgccgccgaggaagaaggcggcgcagaaggagaagaccacgtaggcgacgcgcagcgaatgctgcatcgacgccatgggctccgcgtagttggccgccacccacgccttcgccgagtccatcgatcgtcgccgccgtcgggcgactgcagctctgtcggaggccttccctcacatccacggcccccgcgcctccgcctccgtcgccgccaagaacgaacgggcgaaccacgcctccgccgctggaatcaagaaaacgaagcgactcccccaaactatcgccgcgccccttttgcggaacggacggagagcacaagagaaagaggcggacagggaaaagagcgccccctntcctctcctcttctcgctttcgctggcgggaatccgagaccggccaagcaggcggaggaggcggccggcgcggg

SEQ ID NO: 14235 - DNA, 318 bp, Setaria italica
  Peptide Sequence Number=SeqID_80209
tggttgtcgcgggggacagcgatgacgtgagggacgacgacgccggcgatccgaacgcctcggccttgacggacttcgctgctggctcggccccggcggcgtcgtgttgcagcttccgtttgttctgggacgcctgcggcggcgggggcgcgaggaagtcggcaccgcgggagccaacctcgttggggaagttgaggatggccttggcgccgcgcatccggaacgcggcgcggtcgtaggcgcgcgccgcctcgatggcggtgtcgtaggtgccgagccacacgcgggagccccgcttcttggggtcccggatctccg

SEQ ID NO: 14236 - DNA, 2216 bp, Setaria italica
  Peptide Sequence Number=SeqID_80210
tttttttgtaacgaaaaatgtttccatgttattgagagaacctagtgcaaggtaaccaatgacagattacaaactccaccgggtagaggctcccatctaatgaaatggactgcaagccaaactgaaagagaacggcactagggaccatatgcatctacatataaagttattaggatccagagagagaaaaataagtctaaggggaaaaggatgaactttacaacttgcacatgggagattatagatgactctccactaaaagaactccaattcaagatagtctgaacctttctcagctgctgatgtagccttctggcttgacgaggctactgaacgagggatctcgactggcttggggatatctggtggtgtggcgcaccttatcagtgcccagttaacaccttcgaagaaggggtgctgttttatttctgtggctccacgcttataagctaatcgatgctgcggttccttgatgagcaaccccctaataagatcccttgcagcgaaactcactactggtgattctgggaaccttaagggctgtccaactacattgaacaaagtcgccctattgccagaacctttgaatggagtcttgccaaaaagaagttcatacaagaatatcccaaatgtccaccagtccacagcacttccatgcccctcgccctttataatctcaggtgccaagtactcatgggtgccaacaaaagacatagaccttgcatcagtcggctctgcaacaagctcaggaagtggtctgacctgatttgccaagtctgcctttgccttcttctcctttttctctttcttggacttggaggagaaaaagcgaggagagaagcatgtggtcgtcgtaacacaagatggctgaatgcaggctggctcaatgcacacaggctgcacacagtaagctggattgcccttttggttatcagcactgggattagaatatctcagaagtgcagggctcacagcacatcggagggacaaatcaaaatccgacagcatgatatggccatcttctctcacaagaacattctctggcttcaaatcacggtatatgataccaagcatgtgcaggtattccagagccagaagaacctctgctacataaaacttggcagcttgttcggggaaatacttgccaggctgcttttgccttagggtatgcaggtcacctccagggcagaactccataaccaagcatgagaacttgtccgtttcaaagtgagtatacaatgttggaagaaaaggatggtccaggcactgcaatatctccctttcagtctgtgccctcagcagctttttgcggcttgctagagatgccttgtccataattttcatagcaaagtagcatttcgtgccactaagctctgacaaatacacgctgccaatgtcaccacagccaagcctcttgagcagcctgaaatgacctagacctactgagccttcttttgttcggaccgcctgaatggcttcccactttgagtcattcgatttgtgaggcttgctgacactgctgcatatgctgctgcaggtgctctcatcgctcacatcactaccaccactggcccgatagaggctactcttgccgctctcaatcatatcagcagcttggtcgctgaccttggcgctcccgcttgcttttgacaggctgctccccctgtcgctgcatttagctgacactgagctatccttaacgctaccccgcagcgagctcttctcagcatcttcactgtcatccagcttcacagaaccatcagcagaatcgctgatatccttgctgctttctctcaccccaatggatgtaggcgcatcgccgtccgtgatttcactcagcgaagcaggccccagtttgctggcgttctcagccgattctttggaatgtccttgggaagtcaatggtgcggcgttacccgcgacggttttgccgcatttcttctccgcgatgacctcaggagcggcagccgaagccatcacgacacggacgcaatcgagaattccctatggagaccaccacgcccctcctgccatcgccgcggcgactaaccaatcaggaaccgcggaggcaaaatccaatccgagtaggtgcggtctcggggaagttcgccgtcgccactcgcctccgcctccgccgccgccgccagtgggttcgggagggatcgaggagggtggttccccacggggagggggggtggcagcgcagtggaggggaa

SEQ ID NO: 14237 - DNA, 418 bp, Setaria italica
  Peptide Sequence Number=SeqID_80211
cggtcgaggcgcgcggtcgccaagccgcgcaagcagcggcgggatgacgactccgccgatgaggaggaacaaacgacgcgcgcgtggcgacgtcgtcgttccggaggagtactttcgcgtgcgggtggcggcgacggcgcggccctggccgcggtcggcacggtggtgacggtgaaggtcgtgatgaggaggaaggacgcggagaagctggcggcgaggctgaacgcgcgggagcgcaaggcaaggatggccgagctcaagggcgagctccgggccggcggggacggcggcggcgcgtgctggagtccgcagctggcgccgataaaggagaactagttagcttcagcgcacacaccggtggtgtgacacgactagtttgagcgccggaggttgcttagaagtcagaagtacagcagga

SEQ ID NO: 14238 - DNA, 463 bp, Setaria italica
  Peptide Sequence Number=SeqID_80212
ccttgggctcttccgaactttggttcgggccttgggttgcctcgaccacgttcagctcagcaagagggtgtccttcttcgcgttccaggccgagatcgtatgttccgtcagcgaggttagcttctacactagatgcatatgcataagatttcatttataaacgttcacaatgtaggttgcatttcgtaaacattgtaaaatctcacggtgcacttcgaacacattcacctagacaagtttaacatttctttccttcacacaacaagtttggttggaatgaaaatatggcttttgtttgatggtgattgtgtacacatataaggtttgaataacttagaattcatcaaagaaaggtggtggtcatttttgtgttgttcatcattcatttggaaagttatcttgtttctgaattttaaacaacataactaagcatttaagaattttaaatctaaaacaacatgaa

SEQ ID NO: 14239 - DNA, 481 bp, Setaria italica
  Peptide Sequence Number=SeqID_80213
cagatttgatatggaatgagcgcaccagacaggaattgaaggaagcattgcaagctgaagttcataaccttgacgtcgagaaagaaagaactgatgacattgtccctggaggttcggtcactgaggatgctggtggtagtgacaacttacctcctgagacacgcaggaatttcttggaattatgctgaattttcagttcgctacccaagcttgttcaaagaagtctgtgtggggcaatactatttgcggctgctgcttgaaagtgggagtaactatcgagcacaagattttccactgcgtgatcctgttgccttttttagagctctataccatcggtttttgtgtgacgcagatattggccttactgtggatggtgcggttcctgatgagctaggttcatcagatgattggtgtgacatgggaaggttagatggctttggtggaggtggtgggtcttcagtaagagaactctgttcaagag

SEQ ID NO: 14240 - DNA, 266 bp, Setaria italica
  Peptide Sequence Number=SeqID_80214
gtttctgatgcacacgcatgttcccaaacactaggtaaggacagcagtgatgatgtaaatttttctcaaggcaaatcaccaacatcaaccataagaaggaaaactggtctaaaaccaaaacaggtgccccggaaacctgttcgacaaaaagaggcattatcatctcttgatgctgatagtaaaccagctgaaacaacagaaagtattgaaccaaatgcagctgtgcgtccttagggaaatttcgatcagctggctgttttggggcc

SEQ ID NO: 14241 - DNA, 1370 bp, Setaria italica
  Peptide Sequence Number=SeqID_80215
gccgcggcgagggccaccgcatacaagcacttctgcgcgggcgagaccgcggacgaggccgcggccgtcgtgcgccggctgtggcgcggcggcatgggcgggatccttgactacgggatcgaggacgccgaggacggcgacgcgtgcgaccgcaacgccgccgggttcatcgccgccgtcgacgtcgccgcctcgctgccgccgggctcggcgagcgtgtgcatcaagatcacggcgctgtgcccgatcgcgctgctggagaagacgagcgacctgctgcggtggcagaagaagcacccgtccttcagcctgccgtggaaggcgcactcgttcccgatcctgtcggactcgagcccgctgtacctcaccgcgtcggagccgccggcgctgacggcggaggaggagcgcgagctggagctcgcgcacgagcggctgctggcggtgtgcgcgcggtgcgtggagcacggcatcccgctgctggtggacgccgagtacgccaccgtgcagccggccatcgactacttcacgctcgtcggcgcgctggcggtcaacggcgaggcccgctcggcggacggcgagcgccccatcgtgcacggcaccatccaggcgtacctccgcgacgcgcgtgaccggcttgaggccatggtgcgcgccgcggagcgggagcgcgtgcgcctggggctcaaggtcgtgcgcggcgcgtacctgacccgggagacccggctcgctgcctccctcggcgtgccgtcgccgatccacggcagcatccaggacacccacgactgctacaacggatgcgccgccttcctcctcgaccgcgtccgccgcggctctgcctccgttatgctcgccacccacaacgtcgagtcaggccaactcgcggcggcgcacgcgcaggagctggggatcccgaagggagaccgcaacctgcagttcgcgcagctgatgggcatggcggacgggctgtcgctgagcctccgcaacgccgggttccaggtcagcaagtacctgccgtacgggccggtggagcagatcatcccctacctcatcaggcgcgcagaggagaacagaggcctcctctccgcctcctccttcgacaggcagctgctccggaaggagctggggaggagggtcaaggccgcggtggtgggacgtgagtgaagcgaacttcggagcccgagaggctgtgtgaaactgccaagctgggacaagggcgagttgaaggctaagctgtaaatacacccttcggtcttcagacattgatgtatccaggacttttgttgaataatcgaatgaatagaataatctcattctgtgatttccaagaaaaattaaaaaaaaaaaaaaaaaaaaaaaaaaaaaaaaaaaaa

SEQ ID NO: 14242 - DNA, 574 bp, Setaria italica
  Peptide Sequence Number=SeqID_80216
gtggagccggtgctgctgaaggcggcgccgcgcgttctcgaggaggggaagggagggaaggaggacaccaaggcgaaggagagagcggcggcggaggcgaagggggaggggaaggtggcggtgtgcgtgcgggcggcggacatgcccctgccgctgcagcggcgcgccgtccggatcgccgtcgaggctgtcgccgccatgccgcggctccagagcaagcgcctcgcgctcgcgctcaagaaggattttgatacaacatatgggcctgcttggcactgcattgtcggcacaagctttggttcctatgtcactcactccttgggaggtttcttgtacttctccgttgataaggtctacattcttctcttcagaactgccgttgagccacttgcccatccagaatgagacctgaaatctgtttactcacaagtgtagatgcagtgcaaattgtaattttgaacagaagttgtactagatgaccctcagcgctccatgcttcgttggtactagaggtaatttatctgcccacaaattgtagaacagccaaagcctctgtagcttctactttgtaccg

SEQ ID NO: 14243 - DNA, 270 bp, Setaria italica
  Peptide Sequence Number=SeqID_80217
ctccaccgcatccctctcgtcggcaaaatggacctgagccacgacccgggccccttccgcttgccccctcgatctccccctccagagccgaactgaaactccgctggttgggggtccttcccttgcgacggattcgcggcaccgctgccggagtcgtccagctggaagagcagcatgagcgtcttccgcagcttgccctggtccgcggcgccggagccctcggcgggctccgcggcgccgacctcgacgatctcggcctcgggctggtcg

SEQ ID NO: 14244 - DNA, 262 bp, Setaria italica
  Peptide Sequence Number=SeqID_80218
gtcgctggcgtcagcgcggcggccgggagccggccgtagatgtctaggaacgtgcagtccatgagcttggcaacctcaccaaacctggagagcgggtgtgccgcccatcgccagctgaactcgccatcctcccacggcaggctgagcctcctcgccgacagcgcgtagcacttggcgccgctcgccctgtccagccacagcctgcacccggcgtctccgtcgacggcgacgccgccctcgcccctacgtactaagtaaggta

SEQ ID NO: 14245 - DNA, 348 bp, Setaria italica
  Peptide Sequence Number=SeqID_80219
gctcctcctctgttcttcatcttcttcttctttccatccgccctccctttctggtaagactcgggcggtttcttgctcaatagaagtagtggtgtggcatcctcgtagccgtcgcagtaactgcacgaacacgcgtgccgtgtcctctcgtcgctggcatggagcgcgtgtccggggggcaccctgcaactctgcactcgagttggaagcctcggagggggccggccgttcacgcgtgttgggcttttggaaagggggggaaaatggtggctttttgtgtgtgagggatggattccaaccggttgcaacaaaaccatggaatttcgttcaccttttctctcataggag

SEQ ID NO: 14246 - DNA, 1793 bp, Setaria italica
  misc_feature (1771)..(1793): n is a, c, g, or t
  Peptide Sequence Number=SeqID_80220
cgtggacagaggcacagagctgaccttgtgaggctgtgactgtgagggagggagcaggaccggagaactcgaaggctcggcgagctccaacgccgtggagtggaggacaaaccagaggagccggattcggcgcgcaggaacgacaggatcggcgtaggatgtggtgcgcgtcgtgcttggcgtccgcctgcgcgggctgcgcttgcaacctctgcacgtcggcggcgtcggccgtgtcccgccgctccgcgcgcctcgcctactgcggcctcttcgccgcctccctcatcctctccttcctgctccgccagttcgccacgcctctcctaaagcacatcccatggataaatgcatttgaacatacaccaccagatgaatggtttcaaatgaatgctgttcttcgtgtaagcctggggaacttcttgttttttgcaatatttgccatcatgatgattggtataaaagaccagaatgaccggcgagatgcatggcaccatggtggctgggttgcaaagattgctgtctgggctgtactcattgttcttatgttctgtgttccgaacattgtaacaactatttacgaggtactgtcaaagttcggatctggtttgtttcttctagtacaggttgtgatgcttttagacttcacaaataattggaatgactcatgggttgagaaagatgagcagaagtgggaaatagctttactggtagtgactgtggtttgctatctctctacattcgccttctctggtgtgctcttcatgtggtttaatccctctggtcatgactgtggtctcaacgtgttctttattgtcatgactcttattcttgcttttgcatttgcaatagttgctttgcacccccaggtcaatggaagcattatgcctgcttctgtcatttctgtctactgtgcatacctgtgctacagtagtctctcaagtgaaccggatggctacgaatgcaatgggcttcacatgcattctaagcaggtttcaatgagcgctcttatacttgggatgctcactaccgtactatctgttgtgtactctgctgtccgtgctggatcttccactacattcctctcaccaccatcgtctcctagatctggagccaaaaaccctttacttggcgacgaggagacaggcaaaggcgttgacaaggacaccgaaccgcgccccgtgagctattcctacaccttcttccacctcatcttcgccctcgcaagcatgtactcagccatgcttttgactggctggacgagcgctgcatcggagaagtcagagctgatggatgttggatggacaaccgtctgggtgcgcatctgcacggagtgggtcaccgccgcattgtacatctggaccctcatcgcccctctgctcttcccggaccgtgatttctcctaggcacccatgaccacgagctgtcccgtagtgtgaattggctgtgattgtggatataaataagcagaagtttgggatagaacgagtagcatctgaatgttatctggcatgcagctgtagcgttgcgtacctgtttatgtggccattgtacaagaaaatatctaggccaagatggttgcggatattgagtcatgtatagttgtacgccaagttgtgacgggctgcttaacgtaacggtgacaattactagtgattaagtgattgccgatggagtaggatctggtgtatccgtgcatgtagagtatgtacacctgctgattgttgtttgtttactgagctgcacggatgtttgcattttttggaatagnnnnnnnnnnnnnnnnnnnnnnn

SEQ ID NO: 14247 - DNA, 1804 bp, Setaria italica
  misc_feature (122)..(122): n is a, c, g, or t
  Peptide Sequence Number=SeqID_80221
cggttcccatcaatcaattcacagaattacagaaaatttacaaatgtagtccggtcaacgcatcccagtaaacagagaaaataagcacgaaccctccattagcgtctcatttcaaaataacngaaaatgtccactagtgctgtacatgcagaaaaacgctgcaaacacgaggtagatgtaagttacaaacgttacgtcgtcagcctaaatttcagccttttcctcttcccggaggtgccaaaccaagatctttgcatagctgctcgtcaggctgcagcgtctttggaacagcgccaaatgcacaccgggtgacttccagacctgagagagcttggtgcaggtaaactgacgcgtcctccaagttctgtttcagtctacgagttctcaggaacgccggcaacgaagccctcgaggttggatgggtcctggactccggcgcacgtgggtttatatcagcggcctcgatgaacctctcagttgccgcctcccatgacaactcgtacctctgcgtgtctgtcaattgagcaggctgctctgatagggcattcagcgttagctgtacaaactcttcttcgttgttatagatacggcagttggggaactgcttgaagaactcatttgatgggtgattggcacatatgacaatctttcccattgccaaggcttcagcagtggtcgtacagaccacatctgtggtgctggggttgatgaatactttatactcgtggaacaagggatctgcatgatcacgaccaggatgaacattgacagtcaaacttaaacgattggcagattcacggacttcatcagaatcttctccactaccatataaatccacttcaagaccagctaacttggtctgatatttggacagcaagtcaagaagctccctgtatcccttactccataccatcttcccgatgtagtatgccccttttgtgaaggctttctccccactctgcagctgcctcaactttagtttgcctacctcaagaaattttggactaacaccatggacgttgcatataacagatctgggcagatcttgagtggcacctgacaacctgataatcttgtggcaataaattcgagttacccaggtgttggcatacttgaggaaacaagcaatcacttgcccattcttttctctccttacatatgccagataatttgtgtgaacgattcctatcactcgccggaatttatttttccaccttcgcccatggtggtaccaatttagatgctcaggctcttccaatactgcaatgtcagccacttcgtctggaatgcattctgtaatatctccaacagggagaatgctcctcatttctgtagaaaactgcatcatgaaaaggtaggtcaagttatctttaatacccataaaagagactctataaaaacatgatgtaaaataagaatattgctgaatggaagcaaacagcagcaaggtctacatatgcaccagacactgagagaagattcactgcacgcttataatagctacaggaaagggactagtcttgtaaaaatacgaactaagtactactaggtatcctcaaggctcacatagtcacattggatgaagcagtcagtttgaaacaacttcactcaggtttactagaaacttcccccgggtagaatttgatgctgaaggatggcctaaagtcaatcctctcctcaatccagtgacgaacatagctctcatgctccaaaggcgagtcaaacacaatcttattaggataaactaactcttggtcccttacgcaaagccaggggatcaccaaagtgacataaccttaaaaaa

SEQ ID NO: 14248 - DNA, 792 bp, Setaria italica
  Peptide Sequence Number=SeqID_80222
catgctatgcttaattccaccaatctgcaaataaatcgacccaatagtggcgcagcggcccgacggggcccaggtcactttgcaatgcttgcgggatccggtatagaaagaagaggaggcaagagcttggcctagaccacaagcagcagcagcagcagaatcagcaacagcgacagcaacataatggtgaggcaaaaactgaagtaaaagacagtagtagcaacagcagtagcagtgggagcagcaacttgcaggcggtgcagaaacggaggctcctaatgggtgtggaggaggctgcgttgttgctcatgaccctgtcttcctcacccacatccacattgctacatggctaagaaccctacaactccaaatcaacgatgtacatacacacatacactagccaacgattccaatccaaccatacaaagtttctcagtttatcttcaccaggataagatagggaggcgaggggccctatctcaagattctgtgatcctgtgatggggttggattagtgcctacctaatgactccatcctctttgttctcctctgtttcgccgtaccgtagatcctggtcatgtcagaagcatatctgttctgtgatttgtggtaggctccatgatctgttgatctcactcccccacacatctttttctctatccttttcctttttttcttttgttttttgtatgtactttgatgttgcccctttgtgagggattgacgatcgaaaggagatgtcatccctcttctgaaataaaaaggtgaaaataataataaaaggctttttt

SEQ ID NO: 14249 - DNA, 398 bp, Setaria italica
  Peptide Sequence Number=SeqID_80223
atgatgtgggtaaagataccttcaaggaaactaaggttgctgaatctacaccatctagtgccaaacctacgtatactcagcaacctgctattactccatcaaggcaaatacatgttggagaagctagggacaaaagcatgcaaagtagagaaactattcctgaacaacaaaaaatggtggatagaaagacagggatatctggagagcaatcatcagatcgtcagaaagcaattcgtccaccaagacaggtagcagcagctgaggatgctccaaccggtgacacaatacagtctccatacattcctgacagttccaatgaatctagaggcacctttgaagaagctataggtcctggctctacattacccaaagcacaagctttggatgctcaagattct

SEQ ID NO: 14250 - DNA, 982 bp, Setaria italica
  Peptide Sequence Number=SeqID_80224
ctgtttccaacctcggctacactcaacactgtcttattttctggagtcaaggaaagggctttacacagccagctgcaattgcaaaaggagctgtagctaagcattatgttccattcttcccaatcacaaagctcaggggaaggcgcactagaattcgacattgcaattgcaggctggagcaaccaaatgagcatctgggaaacgtcataacaaaaacttgatgcataaagttcgtgaagcccctttgtcgtcctctcaggacccaagctgaatcagcacaggcatggaatccaagtcctcgttcatccctatagaatgatgagcaattcagcagctcaacaatggcatctcatgaatccgccttcgccatcgcctccaccctcccagcaaggagcttctcaacgtactttcccagtatatctgcctccaggttcaccttgtcgccaaccttcttggtgggcagcacgatgttgtcctgcgtgtagcgcacgagcatgaagtcgaaccacccaccctcgtcgtcgacgctgacgacggtgaggctggtgccgtcgacggcgacgaagcccttgggcacgagcagcctgaggatctccggcggcgcgcgcacggtgacccagagcgagtcgccgtcgggccggaacgccgcgatctcgccggtcccgtccacgtggccctgcacgaagtgccctcccatccgggacgacggcgtgagcgcgcgctcgaggttgacgccgtcgcccggggcgcgctcgcccagggacgtccggcggagcgtctccggggccacgccgaaggtgagcgtggaggccgccgggtcgatcgccgccacggtgaggcaggtgccgtcgacggccacgctgtccccgagatgcgtcccggcgaggaggtccttcgtctctacctccaggtcaaggcctggagcctcgccgccgccgccgccggacggcgcgagcggcgggccgaggcggcgcacgcggcc

SEQ ID NO: 14251 - DNA, 297 bp, Setaria italica
  Peptide Sequence Number=SeqID_80225
gagatgtgtatgtgtaaacatcaggagtaagtccttttgctaacatctcatcgaacaattccctggcttcatctaaatatgctgctttgcactgtccatcaatcaatactgtgtaataggctacatcaggttcaatttcattgtttttcatattgctcagccacgtcttatgctttgatctaagaattaagctcctcgtgtccttagcaattccctgccactgtcggtacagggtcttccttaggtggacatccaatagcactgtgtatgcaactacatcaggcttgattcctaaaa

SEQ ID NO: 14252 - DNA, 588 bp, Setaria italica
  Peptide Sequence Number=SeqID_80226
tgtgatctctggtgacaacccaggttacattccaagtatattagatatccagttgattgatgaggttgtgaaggttagcaccgcacaagctgtcgattctgctagggaactactactaagaagggcttgctggttggtatttcttcaggtgcagcagctgttgctgctattaatgttgccaaaagacctgaaaatgctggaaagctgattgcggccattttccccagctttggagaaagatacctctccagcatcctattccgtccaatatacgactcggttcgaagaatgaggaagaaatagccagccttttacaacttcaagcgcatggcgcttccttctctaaacctgacaggcttccaaggcatgacaaacatgaaagagtgaccctggtagattgcaacaagcagggttcaaagttttgaaacgctcccgctgagtgcgctgatcatagagcttggtagctgcgcaggtcaattgagctgcaagcctgcagcttggttcaggacagactgcctcacaagtttagaacctgcctctacaacctcagtgaaacatgcagaaatggatgctatagttagcttagaa

SEQ ID NO: 14253 - DNA, 355 bp, Setaria italica
  Peptide Sequence Number=SeqID_80227
aatggagcttagttgcatcgattaagaaacaatgaagcagtatcatgataacatattattctcaaactatgtgatgaatgcatattggcaaccattatctgcattttttttctttgcttgagtggtcattgcacctattcaatttatggcgaatcttttgtttgctcaagtgccattagcgcaaatgtttaatgcgaagtcactcatgcatccgaggccttgaggtgaaattttatcatatctactgatctgagtgaaaaatgttgtctcagggaagatgcagaaagcactgcccgacctcctcaaggaatatgacatgccagcaggccttctttccctacgttgtattgttctt

SEQ ID NO: 14254 - DNA, 933 bp, Setaria italica
  misc_feature (911)..(933): n is a, c, g, or t
  Peptide Sequence Number=SeqID_80228
ccacgctccgaagaagcaacagcagatatccccgacgacggcgagcacaccaaactaaccgcatcctcgtcagtgtcagttccttccatcccgttctccaatctcctccccgattcgattccagtgacgcgtccgctcgaaccggatcgagtcggggggtttggatttgggggcgaagggtagggaggaggagagggcatggaccaggtgctcaacaaggtggggagctactggttcagcaagagggccagcaaggagatcgactccatcggcagcgacatcagctctatctcaagcagcattggagggtcagccaaatggatggtgaacaaaatcaaagggaagatgcagaaagcactgcccgacctcctcaaggaatatgacatgccagcaggcctcttcccacgtgatgcaactaactatgagttcaatgaggagacaaagaagctgacagtgtacatcccgtcagcttgcgatgtcgggtacaaggattcatcagtcctgcggttcttcacctgtgtgactggctacctcgagaagggtaagttttccgacattgagggcttgaagaccaaagtgctcgtctggaccaaggtgaccgccatcaagaccgagggcccaaaggtccatttcaccgccggcgtgaagaagacacggagccgcgacgcctatgaggttgtcagggatggtatcaccatagataaattctagaggatgcttgcatgagaaatgtaatgtaattaaatttattcagaaaatgattctccccctatgttggtacaccaaaaatctaaaatttgatgtggtactgcctgttctgtcattgtctacagatggatgtctcgtgtcatgatgtttctgataaaaaaatgtggagcataagttcaacccgctgattcgtcattgtgagnnnnnnnnnnnnnnnnnnnnnnn

SEQ ID NO: 14255 - DNA, 515 bp, Setaria italica
  Peptide Sequence Number=SeqID_80229
ttaattagtaactaaaattaaggtagtaaactaacttccttgtaattgggttgttctaaaattcacaaaagcctccatatgcaccaccactaactcgaacacggtcccataaccatgtattgcttatgtgcttcgagatgacataggcacttccattgagctggtatccactttggtaaaggtttccagctttgccaacataatttacctgagttgggacaacaatggcttcgttaacatatggtagtcgagaaagccatggatcacttccaagggatgggctacttgggagtgaatcaagaaatttagcaatatgttggcttgatttttcaagatttttcccatcacttgttaggttgatcaagcagccattcttggaaaaaatagactttctcatctcctcaagtgaagatgatatgctgtcccaatcttgatcaatcttagtttccaggtcccgcagattacttcgtagtattaacttaactaccttacccttatttttgtttttcttagtt

SEQ ID NO: 14256 - DNA, 423 bp, Setaria italica
  Peptide Sequence Number=SeqID_80230
caattgtgtttcttacaaatggcttatcaaagcaatgaaaagattcacacaaaagaaacaaaaaagagaataaaccaagaaaccatatcatagaggtaaacctacaataggctaccgcagagtaatgcaatatgcctaggaggaagtaatgataaattccattccgggagacagctgacttgacaatctgcatatatgcatataccataaagaatattacctaacaccacccatttgttcagaaatccatccagctgcatttaacttagcgtccattctagcagctgctatgccatggccactgccctcaagcgattctccattcttgctttactttgagaaacaaactgcttgaacctctgttgttctgtgaactgaacatcttgaagaatggtatacatctgaaatacgagaaaaaatgtt

SEQ ID NO: 14257 - DNA, 3472 bp, Setaria italica
  Peptide Sequence Number=SeqID_80231
ttttttttgcaatccatggacagggtgtattcaatatggaaaacccaaaacaatttgagcaaatctcattctctcctttttctattctgtctgaatcattgtctacatccgacttgactgagctataagcttacatggggaaacacagcatcgcaagccgtgagaagtctagcacataccaatgtgcttcgctcctcgctctgaactaattattgcctcccaaaattgcatgggaaaagagaagccaggattcggttacagccattggcgtcgagatgttgctcccgccatgtgttacactggcagacttgcagtcaagggtgaaggcctgaagtggaaatttcgaagaagaagaaacacctcacgactaatcctgcaaaggcaggagcggaggacctcacaggcacttctttacttctgggaatacctgcttctccttgtttgcagcttccacatcattaggtgatgcaacagcaaccacaaccccgttgtctttgatgctttcgactgcatcagcaaactccctgaaatccttcaggtttgttgatagtatctcttcacgtctttgttgacgttcctcgtccgtgatgcccagtaaatatcgcactagactgctgtaacctttagcatccggtagctggtaggcgtcaacatcgccaatggttccaataatagcttttgcgagcgcatcatcatccatttctagctctctaaggaattttgctgtctcatcatagacttctagtgttttcagtaagtttgggtcacgatatgacaaataggagaacactcctgaatgggtgtcaaaatcacaaaagcctccatatgcaccaccactaactcgaacacggtcccataaccatgtattgcttatgtgcttcgagatgacataggcacttccattgagctggtatccactttggtaaaggtttccagctttgccaacataatttacctgagttgggacaacaatggcttcgttaacatatggtagtcgagaaagccatggatcacttccaagggatgggctacttgggagtgaatcaagaaatttagcaatatgttggcttgatttttcaagatttttcccatcacttgttaggttgatcaagcagccattcttggaaaaaatagactttctcatctcctcaagtgaagatgatatgctgtcccaatcttgatcaatcttagtttccaggtcccgcagatactcgagataactaacaccacccatttgttcagaaatccatccagctgcatttaacttagcgtccattctagcagctgctatgccatggccactgcccctcaagcgattctccattcttgctttactttgagaaacaaactgcttgaacctctgttgttctgtgaactgaacatcttgaagaatggtatacatcagattaaacaagtcttctactcgtgttgccattgcctttccccgaacgatgatgcgagtaagaggatcttctttacccctaactggtgatgtgaatggataaactgatatgcctccagtttttcttccaattaattgattgagttgcacgaagtccatgtcttttgttcccatctccagtaaggattggcagaacaatggtaacaactgtagatgctctttcttcatcgaacccatgtcaaatacaacttcagagtagataacgtcattggtgaagagatcgtgttgcaaaaccttgacaccgtttatctctccaacctctattggtacatgaataggctttttggggatatcttgcaatgataaacaagggacagccttgagagcctctggaggatcaggtgtttcttgtttttcctttagctcctttgtagcgcgtgccaactctgcaagatcctcctgagtcatgctagctttcacttgttttagaatttctttctcagctgcttcatcacgtgatgctttctctggatcaggctgcatttcaactgtgacacgatgtgtattattcaaaataaatttttcaatgagtggtgagaacacagcttttgatccctcctctgcaatgcgcgctttcaattgctgcaatggctgttcatatttcaaaggctcaaaagggtccatatcatatatccatttggcaatcgaacgaagcatcagtgataagcctcgagggaatgatcctgtgttgttctccctaagagcaaattcgattgtgttcatggaagcctccactgcttctgatgcaaaaccttcttctgccaaattcttcaaagtctgcataaccaactcttcaactttttgaatgttatcctctgatacacctttcaggcctatactaaattgtggttgaaggagctcatcctcaacaccaccccccacaatagcatctcctaaaccactctcaagaagaatccgtctaagtggtgaagcaggagtccccagcaatagatgatccaggaaaccaagtgcgagctcagtttctacatctagtggttcctccgacaacagccaattagtgcacaccatatatttctttgttaaatcaccttcttgaccagcagggtacttctctatgactctcactggttctttgaatagcctctgtggccaaaccttcgattcattaggagcagggctggcttcaaactggtcaaggtattcacttagaacacgcagccgctcttttgggtcatcatcaccgtagaaccagatcctcgcattgcttggatgataatacttactgtggaactccttgaattcttcaaaagtaagctttgggatttcatttgggtccccgccactatcaacaccatatgtgttctcgggggaaagtgcctgctgggatacacgtcccattatgttatcgggttgagagtaaactcctttcatctcattgaagacaacacctttgtacgttatctcttcttcagggttgtcaagctcatagtgccaaccttcttgttgaaatgtttggaagtcctccacacatttagggaaaaagacagcatcaaggtatacatctaccaggttgtagaaatccttagtgtttgttgatgcaactggataacatgtccgatccggatatgtgaatgcattcaggaatgtatgcaagcttccttttaggagctcaacaaatggttctttcaaagggtatttttttgatccacagagaacactatgttcaaggatgtggggtataccagtcgagtttttcggaggggtccggaaaacaatgccaaacactttattctcatcgtcgtttgccacagacatcacttcagcacccgtcttcttgtgcttgtaaagaacagcagttgacttgcactcatctataatctgttcagagaccttttcaaatccgagctttgcagcatactcatgcacatcatctgtatcatagggcacagggagggcgatgtagagacggcgggcgcggacagcctccgcgccagccgtggcgtggcggccggccagtaccgcccggagcagtgcagcggcgcggccgcg

SEQ ID NO: 14258 - DNA, 2769 bp, Setaria italica
  Peptide Sequence Number=SeqID_80232
aatacagtagcagctcatcatattgcaccctcttattcatgaagctttacaattcccacaaaagaaaaaaggatccaccacgtacttgtacagtaaagagcttaaataaaaccccacctgcaagtaccaaatacgtatacaatgtccgactctttttttttctttccttgaaaaaagagaggggcagaacacaaataaagtcggaagatgcaatttatttcaacagaaaaatcaatctttgtctagatacatagtacaacacaacatctcgccttccaaccatatggaccaaaccttccttgctcatctgttcaagcattagatgatgctgagccaaaccagccgtgtgaattatgcagccaatctgggagggctgtgatgagatgcagctttcgcgtccaccaagtttgcactccccgctcttgccacaatctggacatgctcattgctttttggttcactttcttgaaccacgtgctgctgcaaggtggtccgagacaaaatcaaaagctctagtgtcatctttcttggaattgcttgtcactgcaacatgattttgcggttgactacttgaattgaaaatatctggaagcactgatgcatttccactattcattgaatcgaaaggtgaattcccaactccagcattgaaatttccaaaattttgcagtagctgctgctgctgagcaagaagaatccccatggcaccataatttaactgttgcccaggaaatgactgattgagcatcatatgttgaggcaagctgtactgcaagggaacctgttgctgttggtaaaaggagttctgaccaagaatgccattcaatgctgcagcacctgccatgttgctggtctgattgtttgtgtcaaagaactgcgagccattgaggttgctattgggctctgctttaacagcatgctgaacctggtctgttttattaaggttcaagccagccatcagatcattgacagttccttggtcagtaacacttccttggatgaaaggatcagggttgctgccaaagatatccggtaattcatttttgtttgatgatgagctatcaggcatggcagctgatgatttctcttctactgtcaaccctgagaacagatcattgttctccttagtctctgcctcgtggaatgatacatctgcaaatggatcacttccattactatcagcagggacacttgtatcagcaataggttcaccaccaagcaaatcatcaactgaagaaacatatgcactgttcccagtgttctgtccattgctttcctgtccagaactagttccgagatcatcttgattgcctgtatcaattaaatcaggcatctgaacaggtggggcattgcagcttttgttgctgaaagatttgtggtcccagtaggctgttccccgatcagcatattcaagacctttgaggctttctctctaagagaaacctgtggcagctcagagcatttaactaccgaagctgtgttctcaataaaatatgaagcgatgatagaataaggatcagtatcctgtttccgtacaatggcttccaacacacaaatagccttcatgcgaacctgccataatggagaattcagtttgttttcaagtgcacggctcaaagcgactgcatccaatttggaagcttctgtcaaaaatatctgcagagcatctcgtgtaggttgcaatcgcacaccacttgcagtaacaattgtctccaaaagtctctcttcgcgagtcttaatccctggttgacttgagctagtatcatcagtcggtgcagaactggaaggagttggaccccaagaaccagatgccacattcttggaagcaccagatgaggcacggctctcactttgaatttcacttggatcataccgaccgtatctttcagattctgtggtcaaagacctacggaggttagggctcttgtatgtgccaccattatcatttgtcatcattgcatgtgctgcagcaaagttgctcaaaccctgcttaatggatgcacttccaatacccactacctcgctgagttcactaaggaaagacttcttgtcatccattctagatggttcatagtttgtgtttccaaagccctgtatacgcttgccaagactttctgttgcaacagcaggtttagggtcctcggtggagaaaattgcagctatagcctcgttcgcagtttcacggacagccttattaagggcatctcctcttaagggatcagggtggcctctgtagtgaacaagttggcgcatagcagctgagtgcctttgcatctccctcttgaaatcagtaccagattttccaactgagtatttgatcaaccgtaaggccttctgcttgacgagggggctcttgttgtcgaggcgcttgaggacgaagtcggcgacctccttgacgatgctggcgtcggaggcgcgcaggagctcgcagatctcctcgagcttgtagacgggggcgaccttgtcgtcgtccgccgtgacgccgtccaccatccgcgagcgccagtaggactcgaccgcccgccggctctgatccatggctgcccctgccccgatcggagacggaacggatcggagggcgggggcgatctgggagggcagggagaggggggtgggcggccgtggaccgggtcccggcgtggacgaggacgggagccgggaggggagggttggtttcgactcgaggggtgagcggcacgtgccgccggagggagagaggacggaggaggaggaggtggatctgtggaaggttctaatggcgggtcagcc

SEQ ID NO: 14259 - DNA, 256 bp, Setaria italica
  Peptide Sequence Number=SeqID_80233
gggggcagagaacatggaggactactagaacgcctaccagtcttggctactacatgttgcaggagggccgtggggtgaagagatcagttcttactatttgttgaggcaccggacgtcgtcggcgccgccgaggtatcagtcgacgacgaaacccatcacaactccggcgagcagagccgccgtcgttgctgctgcgagcgtcgccttcgcgagacggtccagctcggctgcgcctgctgcggccgggttcgcgcgg

SEQ ID NO: 14260 - DNA, 390 bp, Setaria italica
  Peptide Sequence Number=SeqID_80234
cactagtgccaggaacgcatacacacaaagcatccattgagccaatggcattcctcaccaccaacgcatccttcatccccataatggtggcagccgtgcctcgccgaaacctcatcgtggtcagggctgccgccaaacccgctgagcaccacgagccagcagccaagcccgacggtgcttatgccggtgggcggcgccaagccctgatgttgttagccgctggcgctgcctcaacagccgtcgtgagccgatccgcgagagctgatgagcctacagaagtgcccggagggtgggtggaaataaaagacgtcacgaacccatctgtccaggacatgggaagatgggctgttgctgagcacaacgcaaagacaggggagaagttgcagttcc

SEQ ID NO: 14261 - DNA, 339 bp, Setaria italica
  Peptide Sequence Number=SeqID_80235
gacgtggtggactgcaactctgcaatcctgacgtcgatgccgttcctcaccgctgtgaccctgtccctcccggtctcgcaagttcctcaatccatcggctctccccgtcacctgcgcgtcagatcggcgaagcgaggtgagcaggagcagctcggaaccagatccgccgccgcatctggagcggagcccatggagacgccgccgccgttccaggagtccgccaactgcgatgtctgccgctgcaccttcagcaccttccgccgccggcatcactgccgcagctgcggaaagacgctatgtcacgagcattcttcgtaccacatggctctgccgcagtac

SEQ ID NO: 14262 - DNA, 522 bp, Setaria italica
  Peptide Sequence Number=SeqID_80236
cacttttatgaagatgccaagggcaccacctgtccgtagcatgatgtccttcagtgttttaactccatacttcaaagaggaggtgctcttttctccgaaagatcttggtagaaaaaatgaggatggtatatcaatattgttctatctaaggaagatatttccagatgaatttaggaacttccttcagcggataaactgtaaaccaaaggatgaagaggaacttaaagaaaggatggaggagatctgtcattgggcatcttataggggccaaacactctccagaacagtgagaggaatgatgtactacaggaaggcacttgaaatccaatgccttcaagatacaaaagatcctgctaaatttggccgagacacatcaatagaatcctatcaagagttgcagtctgatagtgaaatggcacaagctattgctgatatcaaattcacctatgttgtctcatgtcaaatctatggcatgcagaagacgtccaagaaaaaagaggacaaaaaccgctatctgaatat

SEQ ID NO: 14263 - DNA, 244 bp, Setaria italica
  Peptide Sequence Number=SeqID_80237
atagcctgccgctcttctgcttcacaaaagttcagctcccatgcaaattagccagtaaaatagcagtcacatttctaccttttatgtttctcttgtggaacttagccagctgatgatttggttacaggattatccggaatacaatatgatggtcttcataatactgaatttctgaaccaaactgaagaacacaatgaggttgaagcaaacaattgagcttaccatctaggtgggggcgtcagta

SEQ ID NO: 14264 - DNA, 1415 bp, Setaria italica
  misc_feature (1383)..(1415): n is a, c, g, or t
  Peptide Sequence Number=SeqID_80238
cagttctcactgaccttaagctcattgtacaagaaagcctacatatcctctgacgggggatggttcatggatgtgttcaatgtgacgaatcaaagtgggcagaagataatggatgaatctgtgcttcaagggataaaagattacatttacaagtctattgcacctggttcttgctttcttccttcacggaggagggccattggagtcgagccttcctccgactacaccttgatagagctaactgggactgacagacccggtcttctctctgaagtgagcgctgtgctcacaaatctggactgtaacgtggttaatgctgaggtgtggacacataatgaaagagcagcagcagtcatccaggtcactgataggaagtctggattagcaatttcggatgcagataggcttggcagaatcaaggagtggcttcgcaatgtgttcaaggggaggagtagagatgccaagacaacagttgcaatggggataacccacacagagcgacggctgcaccaaatgatgcttgaggatagagattatgaaaggtatgacaaggatagggcgaatgccaaccccatgcccatggtctcggttgttaattggcttcagaaagattattctgtggtgacaatgcggtgcaaggatcgaccaaagcttctcttcgacacagtttgcacgctaacagatatgcaatacgtggtttaccatgggagtgtggatactgagggccctgaagcgtaccaggaatattatataaggcacattgatggatcacctgtcaattcagaggccgagagaaaacgaatcatccaatgccttgaagcagctatagaacggagagtatccgagggcctgaagttagagttgtcaacaggcgacagagtgggtctgttgtcagatgtgacacgcattttccgtgagaatggtttgacagtcacaagagcagaagttgcaacaaggggtaacaaggccatcaacactttctatgttcgtgacacagcagggagctcggtcgagctgaagacgcttgaagccatacggcaggagataggccagactgtgcttcaagtaaaagggcaccctgagcacccgaagtcaccggcgcaagagtcgcctactaggtttctcttcagcagcctcttcagaccaagatcactctgaaagactaaaaacttggtttgaagtctgagcagcccaacagttgtgaatacagtatgttctgtagcagtgtccaccattgtacatatttcctgatccttagtgtagttagagctgtaaatacctccagtcctgttgacatggttgcacccgattgcaagtaccatgattcagattgctgtaactactgtcctttgccatctctagcagcagtccaaatgtcttccnnnnnnnnnnnnnnnnnnnnnnnnnnnnnnnnn

SEQ ID NO: 14265 - DNA, 287 bp, Setaria italica
  Peptide Sequence Number=SeqID_80239
cgggaagaagggcgaggacgtcatgcccggggagtccatggaccacacctccttcatacagcagtggtccgactacatcatttgagttgagccctccgtcgagctgcagaagacctcgtcttgcttgctagtgatttcgttgtctgtgtgtgcttgcgttagttgtaaacttgtaatggtgcagaatagcactgtctttgtctgtgtgcctgtgttgtcttgctcgtctctgaggcctggagtccggatggatgtggtgaagttcactctgtaattttcgaagcaga

SEQ ID NO: 14266 - DNA, 439 bp, Setaria italica
  Peptide Sequence Number=SeqID_80240
aaaaaccaaaggaactacggactaacgaagttaggtagtacgagctcgagccgtgctcctgagcctgctcgtggtcggctcgtcgacagccctcagccctgcatcggttttctattataactgcgctgcgcgtctgcgccgccgcctctgctcctctgctgcccccttcaaatcgggcaccacaaccctggagactgggagtagaggggggagccgaacgaattgggatcgaatctgttcctcaattaatccctcgattagagctgccccgccctttggaaatcctctgatctggtgaactgagtatatttcagtcagtggaagaaaggaatttggtcaattaattttaccacaaagtggaaccgggcaatatgacatcactagtactagcttcataacctgatgagggattcactagtactagtggcgccactgatag

SEQ ID NO: 14267 - DNA, 2520 bp, Setaria italica
  Peptide Sequence Number=SeqID_80241
cccatcctgccggttgcctcctcacctcactagatccgccgtccgtcgaccagcggtaggcgtcgaccaccatggagtaggtgcctaagcttccggcctccgcctcgaaggcgccaagaacacgagtccacgcgccgcgacgggctccaacttccacgacggcgacgggcgacggtggcgccgccagcctgtttcgactcgcttcctcgtctcctgctgacgaccatcgacgagccgagctcgggcttcgttcaagccaaactcgagccttcctggctggaagctcgaaggtcaaaccaggctcggctcgagttggtgtcgagctcgagccgtgctcctgagcctgctcgtggtcggctcgtcgacagccctcagccctgcatcggttttctattataactgcgctgcgcgtctgcgccgccgcctctgctcctctgctgcccccttcaaatcgggcaccacaaccctggagactgggagtagaggggggagccgaacgaattgggatcgaatctgttcctcaattaatccctcgattagagctgccccgccctttggaaatcctctgatctggtgatttggggtcggagccttgttgtcttcttaatgtgtgctttggggacttatattggtcatgcaatttagtcaaaaggtgaactgagtatatttcagtcagtggaagaaaggaatttggtcaattaattttaccacaaagtggaaccgggcaatatgacatcagtaggtctactgaatccctcatcaggttatgaagctagtactagtggcgccactgatagattgccagatgagatgaatgggatgagcataagagatgaaaaggaagttgaagctgttgttgtcaatggcaatgggatggaggttggtcataccatcgtaacatctgttggtggaagaaattcgcagccaaggcagactattagttacatggcagagcgtattgtggggcaaggttcatttggagttgtcttccaggcccggtgtctggaaactagtgagagagtagctataaagaaagttcttcaagatgtgaggtacaagaaccgtgaactgcaaacaatgcaagttcttgatcaccctaatgttgtatgcttgaagcattacttttgctcaacaactgataaggaagagctttacctcaatttggtgcttgaatatgtgccagaaactgttcaccgtgttattaaacattacaataaaatgaatcaacggatgccgttgatatatgtcaaactctatatgtaccagatttgtagagctttggcatacatgcataattgtgtaggagtatgccacagagatataaagccacaaaatattctggtgaacccacatactcatcaactgaaattgtgtgattttggcagtgcgaaagtcttggtacgaggggaaccaaatatttcatatatctgttctagatactacagagctccagagctcatatttggtgctacagagtacacgacagctattgatgtgtggtctgctggctgtgttcttgctgaacttcttctagggcagcctgtttttcctggggatagtggcgtcgatcagcttgttgaaattatcaaggttctaggtactccaacacgagatgaaattaagcgcatgaacccaaactatactgagtttaagttcccacaaatcaaagctcacccatggcacaagatcttccacaaaagaatgccatctgaagctgtagatcttgtttcacggctcctacagtactcaccaaacctccggtgcactgcattggaggctttaatccatccattctttgatgaactacgtgatccgaatgcccgattaccgaatggtcgttctcttccccatctcttcaattttaagcctaatgagttaagaggagtaccgatggagtttctcatgaaattaattcctcagcatgctaagaagcaatgtgccttcttaggaatatgagaaagcggttcagaatgctcacaaaaaaagaaggaatcatcaaatgctgtgttgaaaactgcagagtagcatttgcctacagtattattggatgggcaatgcatgctgttatctttcactctggctgtcatgtcacgtgtttcttctatcactgcagcgagccctttcaccacattctgtaaagcagatgaggacacaaagcgagtggtcatcctttcatgtggtctgtatattgatctgccccgaccttgaggactcgattctttgcgtatcttattcttcgttttttggagatggattctttgcatatctgtatcaccaaatgaagaaaaaagaactcatgtgtatgtttgatctgaattctttttcctgagcctgtatctgttttcagctaccattggagttgaagccttttaatctgtaatagtcatgagcaaggaaagatcatctacagatggtgcattttccagtctaagctattctttatatttctattattcttttgtgttcaacatcggttcctattaagtaatgcataaattagttaaaaaaaaaaaaaaaaac

SEQ ID NO: 14268 - DNA, 400 bp, Setaria italica
  Peptide Sequence Number=SeqID_80242
accttagacaactagagtacatgtgtattgacaatcggactagattaccagaacgctttgggaatctgatgtctctgcagatgttattggcacagttaacaattaggtctccaatcatgctgcatgatttgggcaagctgaccgagatgagaactttgatgattcgcttcgataaatgggatgagagctttgaggaaccttttgtccagtgtctatcaaaccttgtaaatcttgactcactgaagatatttgcctgccataatggactaggttcccgtattggcatgttaatactaggtcctcagcagctccgatccattaacataggacccggcaccatctgtagggtgccaagatggatgtcatcgctctcttccctgaccgacctagatatcacatt

SEQ ID NO: 14269 - DNA, 1092 bp, Setaria italica
  Peptide Sequence Number=SeqID_80243
ctgctgcaaaatttccttcttccaactcccggtagtcgtagtaccacaaccaaccttaagccccaactccactttcaccaactcgagaaacctcgaaaagcaagcgacgaaggcaagatacgccgcccccacccaccggctccggcagagcccacggcgatgcagcagcagatgcccatgcaggcgcccgccgctgcggcggcggcgccaccgtcggccggcatcaccaccgagcagatccagaagtatttggatgaaaataagcagcttattttggccatcctggaaaatcagaacttaggaaagttggctgaatgtgctcagtatcaagctcagcttcagaagaatctcttgtacctggctgcgattgcagatgcccaaccccaaccaccacagaaccctgcaagtcgcccacagatgatgcaacctggtatggtgccaggtgcagggcattacatgtcccaagtaccaatgtttcctccaagaacaccattaaccccgcaacagatgcaagagcagcagcagcagcagctgcaacagcagcaagcacaggctcttgctttccccggacagatggtcatgagaccggctaccgtcaatggcatgcagcctatgcaaaccgaccctgctgccactgctgccagcctacagcagtcagcgcctgtccctgctgatgggcgaggaggcaagcaggacacaactgctggggtgagcacggagccttctggcaccgagagccacaagagcacaactggagcagatcacgaggctggtggcgatgtggcggagaaatcctaagtcgaacagcctggtaggtgaataatgccttgtatactagcaacgaaacgaaaggactcttgaatgacaactactagtccttactgtgtggtttagacatgtcatatcgatccatgtataacaaaatttagattggtgatgatgatgtaatctgtccaagattgttactgcgttcttacattgctgtagccatcattgaataattttcaccagcctgttgtcctagcgtattttaaaacctttactaggacaaccgaagaagaccaacaaagaagacaacaaactaggaagaca

SEQ ID NO: 14270 - DNA, 313 bp, Setaria italica
  Peptide Sequence Number=SeqID_80244
atggaattggtctcgttccgacggagagaagccaagataagccactatttttggcttctcgcgcggggaggaacgcactcagcgcattttgcggggcttccgcctggcttttgcttgctagccgttttgacggtgcctgtttggcatggtttcatcaaaaaccactcgaaaagtcaatggatgagccgtgctaaaggagccttaatggggccggaaggaaggcgcgaaggatggtgctgaatgtgtggaccggtcctcgtctccgagtttgactgctctgttctggtgaccgagatgctggagcattggaggg

SEQ ID NO: 14271 - DNA, 487 bp, Setaria italica
  Peptide Sequence Number=SeqID_80245
gcccaaggcaattccagagggatacaaactgtgctggccctgcaacatggaagcagcatgaaatcagtagcttgcatatgccacttcgacaagtgaaattccgtagtcgcattgaagaaaataaagtgcagcagaggtcttgaagaaagggaagagatgaatgctaagtctctaactggtgcaggcacagaaggatagtaatccaaaagaacaaatcgcctaaaaaggatggaacagtaaagcaaactaccatgagcatggtattttcttagcgtccctgagcattcatattatctgaagaagcagcaatacaggaagctatcattgtacaatttcaggtttgagcgcatgtactagtaaggttaatcttgtacccaaattgaagttgcccagtgaaagtaactattcaaaatcgaacaaaattgaagcattcatgacagaaatgacacacttccggccataataggtagctagcacacagttcatc

SEQ ID NO: 14272 - DNA, 252 bp, Setaria italica
  Peptide Sequence Number=SeqID_80246
accacggcggccgcggcagaggcaacggcggcggggaccccggggcggcggcgaggcggcgctgggatctgcccggcaaggcggccgagaacattgcaatggggaaagaagttgtagatatgtctacagatgaagaatcagactgtgtagttatatgtccacctaacggaaatgttgatcatggggaagttgtgagtggcagccatgatgaagattctccagaaaggcaagagaccccttatgccatagact

SEQ ID NO: 14273 - DNA, 559 bp, Setaria italica
  misc_feature (520)..(520): n is a, c, g, or t
  Peptide Sequence Number=SeqID_80247
ttttctagacataacatatatctaggtgcatagcaaaagctatgtacctagaaaagccaaaacgatttacaatttggaatggagggagtaaaatagattgcttccagcatttacattagcccgtttcctgagctgcttacagaactgtaacttcagcaagagctggaaaaactaagaagacaaccgttgctgttgcacctacatttgtctgtgataatcgtgctgagaagagaggagagttttatacaaaactagaagaaaagcggaaggctttggaagaggagaaactccaagcagaggccaggaaaaaggaagaggaagaagaagctctaagacaactaaggaagaacttggttgtccgagcaaaaacccatgccaagcttctaccaagagggacccccaccaaaggttgaacttaagaaggtgccccaactcgtgctaggtcaccaaaaattgacacggagaaagagctgcagtgacactcctcatacacccgagggaggaaatggcagcgcagtangctgccggttgcatcgtcacagcattgggaactccaaag

SEQ ID NO: 14274 - DNA, 1657 bp, Setaria italica
  misc_feature (72)..(72): n is a, c, g, or t
  misc_feature (1640)..(1657): n is a, c, g, or t
  Peptide Sequence Number=SeqID_80248
gataatgcatatgaatatatagttgtcttttcttagttgtgaatgattgatggagtgcaatattatattgcngttttgactctattattgtttctgttattcttttatgatttggaatgtaagacgattccagatagttataggcaaggcggaagagaacattgcaatggggaaagaagttgtagatatgtctacagatgaagaatcagactgtgtagttatatgtccacctaacggaaatgttgatcatggggaagttgtgagtggcagccatgatgaagattctccagaaaggcaagagaccccttatgccatagactcacatatggacagcaatggccaggaagacgtgcctgtaaaccaagactcgccgaagctgattcatgagcaggagtcgtctctcaccaattcaccagcaaagcctgctatagctggacagcaagggtctagccgtactgttgctgagccatgcactgtcgcagctgaaaggaggtcatctagagctggaaactgtgctccagtttctcatcccaccagcagcggggaaaaactttctgataaaagtagctcatcaccaagaagcatggcaaagaagagtccatcagtcacacccaggaagcctctccaatctgacaatacttctcacagtcaagaagaggactcatattctgtcacttcttcaactgtaacttcagcaagagctggaaaaactaagaagacaaccgttgctgttgcacctacatttgtctgtgataatcgtgctgagaagagaggagagttttatacaaaactagaagaaaagcggaaggctttggaagaggagaaactccaagcagaggccaggaaaaaggaagaggaagaagaagctctaagacaactaaggaagaacttggttgtccgagcaaaacccatgccaagcttctaccaagagggacccccaccaaaggttgaacttaagaaggtgcccccaactcgtgctaggtcaccaaaattgacacggagaaagagctgcagtgacactcctcatacacccgagggaggaaatggcagcgcagtatgctgccggttgcatcgtcacagcattgggaactccaaagatgttggcagcaaggcacaatgttctccgaagggctcttcgaagactggatctgctacaaaatccagggccaccaaatcccgggaagacctgaaggctaccatgaagaaagttggacagcaaagtgccacgaatgtcgctgtaaaaacctaactcatgaggcattctcactcccatgcaatttttcattttaatttatacctcacatcaccaaaaagatggcctcacgccccgacaacagtgtgtttgttgctggattatttttccattgtccttgtaagaaccatgctacaagagaccatgtgctgttccgtgttgtaaatttgttgaggttttgtaaggagtaaccgagtcggttctgcaagaaccaagctggcagccgatgagctgttggagtgagtgacacttgaagttgtatggtggcattggcaaatcctatgtattgtatctgagctgtaacttattgtggccattggcacagcgactgtgattgttgttgcaaaatctgatcagttcatcattcaagtatacttatgcatttagnnnnnnnnnnnnnnnnnn

SEQ ID NO: 14275 - DNA, 652 bp, Setaria italica
  Peptide Sequence Number=SeqID_80249
tgcctcaggcttttaggcgcgctgtcatggttcctgtgcatgttgcccttgcagctggtttaattttccagacgtgggttctggagcaagcgaagtacactaaggatgctatttcgcagtactaccggttcatttggaatctcttctacgctgaatatatcctcttcccgttaatatagatttagagcctagagatctggtacttcagcctggtctacagccaaaatgatgggagtaactgatataaaacgtgattgttgtgcatatcttgtacgggaacaacaaagctgcagtgttacaaggatcctgaagtagatgctgaagactttgttggagccacggaagcaggctttggtaacaattcaacagagtcccgttctgtagggccttgtttgggagggcttgagcatagaggactgaagttgatggaagctcaggctctggccccaaacaggtggtggtggaacggccaagccaagctcgtttcttgtcactcgaggttaaagctagtatgcgagacatattgacggcgtgccctctcacgaaaactggctagggaccattagtccattggtatcatacgcttggcttactgagttactgcgtatatatttcttgagcttcagctgaaactgttgtatagtaggaacca

SEQ ID NO: 14276 - DNA, 1355 bp, Setaria italica
  Peptide Sequence Number=SeqID_80250
gagggccacacacaattcaggaactgctttgggatccatagctttggttgctagagccttgatagagaattcccacctgataaattggtggttattatttaaagcattctatgggcttgtagcgttaatctgtggcaatggttacatagttgggatcaatcagatctatgatgttgctattgacaaggtaaataagccatacctacccattgctgccggcgatctgtcagttgagtcagcttggttgttggtaatattattcgcagctgcaggcttttcaattgtcctgtcgaactttggaccattcattacctctctatactgccttggcctatttcttggaactatatattccgttccaccattcagactgaagagatatccggttgctgcttttcttatcattgcaacggttcgcggtttccttctcaactttggtgtgtactatgctactagggctgcactaggtcttacattccaatggagctctcctgttgcattcattacatgcttcgtgacactatttgctctggtcattgctataaccaaagatctccctgatgttgaaggggatcgcaagtaccagatatcaactttggcaacaaagcttggtgtcagaaacattgccttccttgggtctggtttgttggtagcaaattacattgctgctattgttgtagcttttctcatgcctcaggcttttaggcgcgctgtcatggttcctgtgcatgttgcccttgcagctggtttaattttccagacgtgggttctggagcaagcgaagtacactaaggatgctatttcgcagtactaccggttcatttggaatctcttctacgctgaatatatcctcttcccgttaatatagatttagagcctagagtgttacaaggatcctgaagtagatgctgaagactttgttggagccacggaagcaggctttggtaacaattcaacagagtcccgttctgtagggccttgtttgggagggcttgagcatagaggactgaagttgatggaagctcaggctctggccccaaacaggtggtggtggaacggccaagccaagctcgtttcttgtcactcgaggttaagctagtatgcgagacatattgacggcgtgccctctcacgaaaactggctagggaccattagtccattggtatcatacgcttggcttactgagttactgcgtatatatttcttgagcttcagctgaaactgttgtatagtaggaaccactgtcttttccaccgttctggacgactgaaacttcctccatgtgtatgcctgtaagctgtaacttggctcgcacaaagctttatgctacagaacttgctgcatcataggaaaaa

SEQ ID NO: 14277 - DNA, 271 bp, Setaria italica
  Peptide Sequence Number=SeqID_80251
tctcctgagctcgaggtactccccggcggcctggtcgacctcccccttgtcgagcggcctctgcgcccgctgcagcgcgagcgtgcgggagcgcgtgcggacgccgagcagcgcgccgccggggacctccatgacggcgacctccccggacagcttgcccttgcgcatgtacttccccatggccctggtcccgtgcgtcctccgaaccgaaccccccccctgctgctctcgcggttcgctcgaagctttctttgctcggaagcgagggggg

SEQ ID NO: 14278 - DNA, 808 bp, Setaria italica
  misc_feature (1)..(72): n is a, c, g, or t
  Peptide Sequence Number=SeqID_80252
nnnnnnnnnnnnnnnnnnnnnnnnnnnnnnnnnnnnnnnnnnnnnnnnnnnnnnnnnnnnnnnnnnnnnnnnaagaagacgtgcaaattattaactgaagttccatgaaagtacatagtctagatcggatgcatgcacgcatgcacgacccaaaggtcgtcttattcattcattaacttattatttctttcccgtacgtggccatgataatgcattactgcaccatcgttcgaccaccgttcatgggcagaaggtgaccctgtagttgctgttgccacggcacgggtggttcttggaattgtcgctggggaacaggtacgcgtcggggcagcgaggggcacggcactgcaggttcctgccgttgctgcaggagaagtccatgggcaggttgtacccgtcgatcaccgagatgtcgtagaagtcctgcttgtcgccgctcccgatggtgaactcggccagagtcagcggcggctgcccggagagcgtgcaggagagcgcgccgccgcagtcgcccgaagcgcaccggccgcggccgttggtgaaggagcagccggtgcggccccagatcctgccggaactggtgccagcgggcacgtcgagggtccacgtctgacctgagttgagctgcctgccgccgccgacgggggtcgccgccggccacaccgtgtaggggcagttgttcttgatggtgaaggtggccgcgctggcgccggcgacgaaggccgcgaggaggaggaagacgacgacagaggaggccgccattggtacgggacaactactggttggtctgctgtttggttcttgtctt

SEQ ID NO: 14279 - DNA, 276 bp, Setaria italica
  Peptide Sequence Number=SeqID_80253
agtccggcccagacgccgtgcgttcactctcctgttccccttcgcttcccgaaacaacagcgcatcagcaaggcggccatggcgacggcggcggcgcaggcaaacccggcatcgatggacgcgcgcgggtgggacgaggtatcgtatcgccgtggcatcctacgtgcccgcgacctctcgtcgcgcaccctcttccgcgccgtcttcttcgaccacagcgacgacccggaacccgacgtcctcctcgccgccgcctccagcgacggctccctcgcc

SEQ ID NO: 14280 - DNA, 1388 bp, Setaria italica
  misc_feature (1)..(12): n is a, c, g, or t
  Peptide Sequence Number=SeqID_80254
nnnnnnnnnnnngtcatcaaatcgttcgagtttttgcattgatggataagtgaaaaagttgcgacccatcaaacacatgtgtcgcctttgcgcataattatacagcgcatccctttattcaggttatttccatacacatgcatatcccagcttacccacgcttcgcaaggtcacacaacacgtcacctacatgatgccaacacacatgtatagtctacagcttgcgggctccactttcacacacaaattaacatgtgcaccaccccttgttggcccctgtcacgccacgctcgcccgtgcgctacacgccgagcaaccccctggcgatgcggccgtcggcgccctgcgggaagaagccgccgtgctgggctgggttgccggtgccgtacacgatgccgaggatctcctccggcgtgcggtcgtaggcgagcgagaggtggtcgccggcgatgacgttcccgacggtgagcccctcgggcccctgcccgggcgccaccaccagcccctcgtccttgacgcccctccgccccagatcgttccgcaggtccgagatgtgcgccgtgacctccgccaccccgacgccgtagctcgacacctgcgtcatcccgcgctcgtacagcagcgtccggatcaccgcgtcctgcgccgactccacccccaggagccccgccagcagcttcctggcctgaggggtgaagagcttggggttggcgccgacgtagccggtgaggccgacgtaggggatgatgtaggaggcgatgaggaagttgacgctgttctcgtaggggttgaagggcgggtccagcgtcgcgttcagcgcctgctcgatcaccttgccgaagttggccgcgctgatgtccagcagcggccgcgggaagcccctcaccgtctgcttgatcgccctgaggtgcccgacttcctggtagcagaactgggtggcgatgtcgcggatgaagggggtgaggctggcggactggccgccgatggagggcggtccaccgccggtgaggttggcgtcgatggcgtccaggccgtacccgagcgcggaccagcagaagaactccgtctccaggtactcgaggttcagtgggaactccagcaggtccacgtccgactgcggcagcatcgacccgggggcgccgaagaacccgcggtacggcggccgcgcccactccttgtccatgtcctgcgcgcgcgccaaggcgccgcacaggagaaccgccgccgcggcggccacgacgaacgccggcgcacccatcgtcgccggccggctagctactacctactggtaagatgcgattgctactagctttagccactgcacgcacacgtcacgacacccagcacgatcgcgctcagctagctgcacgtttgttgacttgtgcgtt

SEQ ID NO: 14281 - DNA, 452 bp, Setaria italica
  Peptide Sequence Number=SeqID_80255
aggagttgtccgaaagacgaggcaccaactcagggggtggtagttgtttccttgcaagggcgtttgaggagtattcatcggttaaacgcaacgaaaggcaataaaggcctttaggaatagcaattgcagcatagtgtttgtttagctgctctgataaccttgatgatctcaattccttatccatgctctccatcgttgccttaagtttaaaagcaaatgaccttaaatcataatcattattcttcatatcccagataaattcatcaaaagattctggaaccttcaaatcaacaggaccttcctcagaatttatctcatcaagcatcgaatacaaatccctcacaagcctcatggaaccatcgttgcccctaccaagaaggcgtggacctaaccttcttcccagaccaatctagggaggagcacttgtgaacgccctcgagcgtcatgacggc

SEQ ID NO: 14282 - DNA, 283 bp, Setaria italica
  Peptide Sequence Number=SeqID_80256
ggcggcggggcgcaggagcggacgaagcgccggctgacggcggagcaggtgcgggagctggagctgagcttcgaggaggagaagcggaagctggagcctgagcggaagagcgagctggcgcggcggctggggatcgcgccgcggcaggtggccgtgtggttccagaaccgccgcgcgcgctggaaggcgaagcagctcgagcaggacttcgaccgcctcagggccgcgcacgacgagctcctcgccggccgcgacgcgctcctggccgacaacgaccgcctcc

SEQ ID NO: 14283 - DNA, 318 bp, Setaria italica
  Peptide Sequence Number=SeqID_80257
gcctcatgtgtctcttctggatcaatgatttggttgtttggtccaatcctgtagtccgggaaatggcccttggggaagttaacatcggatgagaccaaatcgagtgcctccttctgcacgccgtctccagagtcatggatgacccttgtcatgtgtggttctcagcaaaataacgaacccaaaaatccacgtccccgattaatctccacccaaatccaccaggacagtggaggagcggccggcggaggatccgccacggagagagcgaggcaccggcggcgtcggacgctgggagcttctaggctccgcaccccccgt

SEQ ID NO: 14284 - DNA, 738 bp, Setaria italica
  Peptide Sequence Number=SeqID_80258
cgccgcccccagtcatgagctccgccgccgctgtgggactgaaccgccgcacgcgaagccggccgccgtcggtcgcgtcctcccgcaggtccgatgatcccaccgccgccgccgccgccaacggcaacgggaatgtctccgccaagtccgcctcccccgaccatgcctcaggggagaggacggtcaagaagcttcggctgtccaaagcgctgacgattccggaggggacgacggtctcggaggcgtgcaggcggatggcggcgaggcgggtcgacgccgtgctgctcaccgacgccaacggcctgctctccggcatcgtaacggacaaggacatagccacgagggtgattgccgagggcctgcgggttgagcaaactatcatctccaagatcatgacaagggaccctttgtatgtcatgtctgacacacttgctattgaggcgctgcagaaaatggtccaagggaaatttagacaccttccagttgtggaaaatggtgaggttattgcgatgctggacattgcaaaatgcctctatgatgcgatatcaagactggaaaaggcagcagagcaaggaagtgcactagcggctgctgtagaaggggttgagcgtcagttagggggcaatatctcagcttcacaaaatctcatagaaactctgagagagcggatgttaaaccttctttatcaaccattatcacggagaatacaaagtatatgattactttctctgatttgtc

SEQ ID NO: 14285 - DNA, 486 bp, Setaria italica
  Peptide Sequence Number=SeqID_80259
agtcaagttccataaccatcacaaataatttccggagagacacaagtgtccttcctgactccagcgatgaataatttagggaagaatcaagatcagatgctgacctagcttctccttcaaaaggtatgctatcttcaactgcatctttagcttcagggtgatactggctcagtagaagatgtatgcagttctgtacaaaagatttgaacacgagctttcgtgatcccagaagcatatttaacagagattccctgaagatcacccagtctagtgactctttgtatgcaatacggcgaggtacaaaatctgcttcaagtgtgttgacaagatactggaacaacatcatattctcgatagccttgattccattattatcatccgtggcattggttggttcaacaatggtctcaatcagcaacgagaatctcaaaggatcaaataggtggtctgagctccttgaatttcctccaatctcactactaacag

SEQ ID NO: 14286 - DNA, 1757 bp, Setaria italica
  misc_feature (1707)..(1757): n is a, c, g, or t
  Peptide Sequence Number=SeqID_80260
aaaagaaagtaaagaaaattaaaccaaaattaaagtaagaattaaacgaccaacggaatactactatggtagaaaaaaaaagatacatcgattatgatatcacagatattctacaaatgatgggtcgtgcaggtcgaccgcaatacgaccaacatggcaaagctgttattcttgtccatgagccaaaaaagagcttttacaagaagttcctctacgaaccatttcctgtggagagtaatctgagggagcacttgcatgatcacataaatgcagaaattgtttcaggcaccatcagcaacaaggaggaagcgattatttatctcacttggacttacctatatcgcagattggttgttaatccagcctactatgggttggaggatactgaaacaaacaccttgaattcttatctctcaaggttagtcgaaactacatttgaagatcttgaggacagtggatgcataagaattgatgaccactctgtaaagtatttgattttgggaaaaatagcttcacagtattaccttagctacctcactgcttcaatgtttgggtcaaatattggccccaatacatcgctggaagcctttgtgcacatactgtcggctgctgcagaatttgacgagcttcctgtacgccacaatgaggataacttgaatcgaacactcagtggaaatgtcccgtatccagttgatcaacaccaccttgatgatccacatgttaaagccaacttactctttcaggcacatttctcaagagtagaattaccaattagtgattacgccacggacttgaaatcagttcttgatcagagcatacgtattatacaggcaatgattgacgtatgtgccaatagtggatggctttcaagtgcgttgtcttgcatgcatctcttgcagatgatcatacagggtctctggtttgagagggattcatcactctggatgttgccatccatgaatgatgatattctaggtcatctcaggagtagaggagttttaacagtcccagccttgctggatctttcccgtgaagaattgcacaggctccttcaaccattttctgcgtcagatttgtaccaggatctgcaacatttccctcatgttgatgtgaaacttcagcttcagaatgaacaggagcggtccaaatctcgaactttaaacattagagtgcaattgaaaaattcacggcgttcagcatcaagagcatttgcccctagatttcccaaggcaaaacaagcagcttggtggctggtactggggaattctacaagttcagagctgtatggtttgaaaagaattagttttgcagattgggtggttaacactcgcatggaattgcctcagatgttcaatatccaggagacaaagctgattttggtatcggattcctacctaggttttgaccaggagtactctcttgagcatctcacgaagtgttgagaacttttgttcagagttcggagctgttcggcccacagtgttttgtatgttctctacaaaggtggcactgtgttgccactgccagtgtacataattttccggaagccataaacacgtcgagtgtcctgatcgagaatgcagcaaccgttcactgtctccaccagggctgagctgttaattcttgtattttcttttaagctcgactcatcaagttggaagttgaacatattccgcgcaggaacatagtttcaaatttccaataacnnnnnnnnnnnnnnnnnnnnnnnnnnnnnnnnnnnnnnnnnnnnnnnnnnn

SEQ ID NO: 14287 - DNA, 296 bp, Setaria italica
  Peptide Sequence Number=SeqID_80261
tttatttttcctttcttcagtttagcttgtagtgcgcgcacccgtattgcactgggccggtgtccgcgtccattccgtgctgccttttcctctctgttttacctcagacaaaaggttcgccaacaaattccaagctctgcttctcttcggtcttctcggagcttcaccttgtctgcgtcaactgcgtgaccaccggcctagcacgagcaggggcggcggcaccgacgcgtccccctcccaggcggttccttgctcttcggtgaaggcttcccgagccgccgtgctgccaatgtcac

SEQ ID NO: 14288 - DNA, 419 bp, Setaria italica
  Peptide Sequence Number=SeqID_80262
cgatgagaatccttcagctgataggtatagcaacatccgcatttcccacagtgatagaagttctctgcaccaccagttctgtaaaataatgatagcttaagactgataggagaaaacaaaaggcgaatatttcagaaagcttgttgcgtctatgcagatgttacactacttgcctacatatgccacatccatcacagtgaaattggttctttgatacatcgtcatcaaagaagttgcattttgcacagaagtatttaccaaaacatgctccacaatttgaacaatcttgatgtacatcctgttctttattgcagagagagcagataaccagcttgatctcgtggcgaggaaccacgtggcgttcgtggttattgacctccagtgaatccttggcttcattgtgacagtgcctgcaatca

SEQ ID NO: 14289 - DNA, 572 bp, Setaria italica
  Peptide Sequence Number=SeqID_80263
agcacgctgacagctttcgtcgagtcgaatagatactcaaagcatacagggcagttatgatgcattgctccgtccacgcaacgatgagaatccttcagctgataggtatagcaacatccgcatttcccacagtgatagaagttctctgcaccaccagttctacatatgccacatccatcacagtgaaattggttctttgatacatcgtcatcaaagaagttgcattttgcacagaagtatttaccaaaacatgctccacaatttgaacaatcttgatgtacatcctgttctttattgcagagagagcagataacctgtcatgtccaagagaaaaggtagagtagtaggagtaatatcactatatatgccagaggagtgattcagacgatttagagtgcaaacaaagggacagtgattgataattccatatccataatccaaatgtgtcgaagaacaaactatatctgtatctactcgtgcaaattggtttacgctaggcttacaccatattatttttggtttataatgcgaatataggttgttttgcagtctcctttagtagaccaggctaa

SEQ ID NO: 14290 - DNA, 708 bp, Setaria italica
  misc_feature (632)..(632): n is a, c, g, or t
  misc_feature (694)..(694): n is a, c, g, or t
  Peptide Sequence Number=SeqID_80264
cacaatggagcacgctgacagctttcgtcgagtcgaatagatactcaaagcatacagggcagttatgatgcattgctccgtccacgcaacgatgagaatccttcagctgataggtatagcaacatcctatcatagaaccagccccacaaatagtacacaatttaatatgaacattaaatcaggacttgtcaaaatgcttagttcaaaccaattgtaccgcatttcccacagtgatagaagttctctgcaccaccagttctgtaaaataatgatagcttaagactgataggagaaaacaaaaggcgaatatttcagaaagcttgttgcgtctatgcagatgttacactacttgcctacatatgccacatccatcacagtgaaattggttctttgatacctgaaacaccagggaagaaatacttctgaaatggcatattcaaaatagcttctgttttttcatcaacttgacagaattcaaattataagcttacatcgtcatcaaagaagttgcattttgcacagaagtatttaccaaaacatgctccacaatttgaacaatcttgatgtacctgtcaacaaaggaaatgatttccatgtgatgcacagctgacgctgacggcacctgaaaaacnctattcctgctttgtctggtgcacttacatcctgttcttattgcagagagagcagataaccngcttgatctcgtgg

SEQ ID NO: 14291 - DNA, 1384 bp, Setaria italica
  misc_feature (23)..(23): n is a, c, g, or t
  Peptide Sequence Number=SeqID_80265
tgatgagcgcggctggttgatcngaaagaagaacccaagggacagagagcctcctctctctgagaaggaagtgcccttaccatcataagtgattttgcaagcagacatcacttatgggctgaaagcgaaaagcagcttagtggcccatcatgtcgataacccaatacgagaagggccgagcatatacaattccactattccaggcacagcaacgcaaacgacggtgaggtcaactagctgttctctggggaaggagatcaggagagtacatggacgctgtctacaggcctatagcttattgatcacaccagctcctgtgcagcatggtttatttgcttccggtttccctcttggcttgttctcaaactctggagcatgcagctggaccgcccctcgtctgccgggtgttgtaggaactgcaacccgggcacttgtgcgccaaaatgtggaactgcacgttcgatgtcattccacaatcgttgcagaggatccatatcatcttcttctgacaaattgccggcatcggggaggctgcaacctcttgatcaagctttcgccatatgtcagacatgtcgcaagcagacctcaagcaaaccgggcacgagaactgctgatgagctctcatctcgtacaggcattgcagatgaatcgtgtgtccacaatggagcacgctgacagctttcgtcgagtcgaatagatactcaaagcatacagggcagttatgatgcattgctccgtccacgcaacgatgagaatccttcagctgataggtatagcaacatcctatcatagaaccagccccacaaatagtacacaatttaatatgaacattaaattaggacgtatcaaaatgcttagttcaaaccaattgtaccgcatttcccacagtgatagaagttctctgcaccaccagttctacatatgccacatccatcacagtgaaattggttctttgatacatcgtcatcaaagaagttgcattttgcacagaagtatttaccaaaacatgctccacaatttgaacaatcttgatgtacatcctgttctttattgcagagagagcagataaccagcttgatctcgtggcgaggaaccacgtggcgttcgtggttattgacctccagtgaatccttggcttcattgtgacagtgcctgcaatcaaatatctcgccacagcacggcgcccttatcttgcatttcctcttgtagtgcacgcacccgtattgcactgggccggtgtccgcgtccattccgtgctgccttttcctctctgttttacctcagacaaaaggttcgccaacaaattccaagctctgcttctcttcggtctttcttcggtagtctttctacctttgttcttgttcgtttcttaactttgttcgtt

SEQ ID NO: 14292 - DNA, 1444 bp, Setaria italica
  Peptide Sequence Number=SeqID_80266
gcagtgacatggcgagttcttcctctgatgggttgttcaggttggcgatttgtctcggagcgtcctggtcttggcgcacgggggacatgccgacgaagtttgagatgaactggcgctcttccacttccacattggtcacacctgcgtcctccccttcagttccagaggctggaacatcatttcgaggcagctgctcaattttgatccccagaggctcgaacatctcctccaccttttcttccgggacaggagggactactgtggaagactccccaacggcagagttggctgcagccaccagcgcaagcctttgctgctgcacggcatcttggagtgattcattggttatgataagatcaagttcaagacggtccagaaggcggccaagatcaactccgctggtccaattttcagggccatggtcacatgtaagctttagcctcccacggtttgctgtgccaccccatattatcccaataggacgtggcttctcaccatcctggccggtcaggataataaggcttccactatcaccttccaaatcgaatgtttggcgattctcaccaacaacaaggagatcagtgaagaagcttattcctttctcatcattgtattcaagggcataagccatcacagttccagttgtgtgaccagaacttctgccgattttgcatacttgcctccctatgaggctattaagtggacactgcagatctataaccttaacatccccaatgtcaccaacacccctaaccgtagtcgtgacagtcttgatgtcaaaatcatgagcaaatgggatgaatgccccgtcagcccgtacaaatgtctctgcaggttcattagagcatggcatgtatgtttgggaattagaaggttatgtacatcatttggaatcatcagcaaaaaaaatataaggtagatgtactgcttgggtagcatgacggaaaataggctttattttatttgttcagaaaaaaggcccaacctaaattttttcaaagtaaaacttaatgctgctttgtttgcaagtagtaacctgaagagcaagttgatgttaatttgactgacaaagttcaataaaatcacaaatgtcaaaccatgcttgatatgaatagattaataaataatggcatcttgtgaaattttaaatagacacaaaattaaccaagcaattaaagctgtaagtaatattgtatttcctatattaaccaggtaatttgtaactgctctacctgggtttgttccggcataaattccataccaaacatcatctgtgatgaaagatgttgccctttcgacagctccaagataaacaccaggcccaaggttgggtggcaatgggtgatacatcttctggtttgggtagtccaagtcaactgcaacatgccggttggtgaggaaacctatctgcttgttgccagttcgccgttttacaatggcaccc

SEQ ID NO: 14293 - DNA, 2160 bp, Setaria italica
  misc_feature (1)..(32): n is a, c, g, or t
  Peptide Sequence Number=SeqID_80267
nnnnnnnnnnnnnnnnnnnnnnnnnnnnnnnntgtttaaacaacttgaccaataatgataggaaaaagtgatcaattcatcactccgtgcattgttttatgatgataggggattcagcattgtgtatataaagtctcatgagcacagcaaaactgcagggatactacctaaaatcctacaaatgctgaatcaagtttcatcatggtacatgatagtgcttttgccaggaacctgctggtttaggctaaggctgctggttcagtttgctgaaccgcaggagatcttcggactacttctggtttctgaatgtagggatgctgaaatgaccccttcacttctccaggtcgaggtcggcctctgtgtcagtgcgtagccgcttgggctcccgttcgcctaggtgcagtgacatggcgagttcttcctctgatgggttgttcaggttggcgatttgtctcggagcgtcctggtcttggcgcacgggggacatgccgacgaagtttgagatgaactggcgctcttccacttccacattggtcacacctgcgtcctccccttcagttccagaggctggaacatcatttcgaggcagctgctcaattttgatccccagaggctcgaacatctcctccaccttttcttccgggacaggagggactactgtggaagactccccaacggcagagttggctgcagccaccagcgcaagcctttgctgctgcacggcatcttcatttgggataaattctgtcagttgtgtgtcattgaaaaaaaccaaaaaacatacagattcaatttctgtaataataattgtgagccgtgcaatgaattttgtagatatctgaacgggcaattgaaaacgagaataacacagagagcagaaagccaggaaaataccataccttggagtgattcattggttatgataagatcaagttcaagacggtccagaaggcggccaagatcaactccgctggtccaattttcagggccatggtcacatgtaagctttagcctcccacggtttgctgtgccaccccatattatcccaataggacgtggcttctcaccatcctggccggtcaggataataaggcttccactatcaccttccaaatcgaatgtttggcgattctcaccaacaacaaggagatcagtgaagaagcttattcctttctcatcattgtattcaagggcataagccatcacagttccagttgtgtgaccagaacttctgccgattttgcatacttgcctccctatgaggctattaagtggacactgcagatctataaccttaacatccccaatgtcaccaacacccctaaccgtagtcgtgacagtcttgatgtcaaaatcatgagcaaatgggatgaatgccccgtcagcccgtacaaatgtctctgggtttgttccggcataaattccataccaaacatcatctgtgatgaaagatgttgccctttcgacagctccaagataaacaccaggcccaaggttgggtggcaatgggtgatacatcttctggtttgggtagtccaagtcaactgcaacatgccggttggtgaggaaacctatctgcttgttgccagttcgccgttttacaatggcacccaaagttccaaaagtgtcctgacttgcaacctgagagcctgaaccaatgcattcatcactaccgcacaacctatcaacaagctcagtgaacatttgctcttttggagtttgagctggtgcaccatagtacgagaactcaacaacatcaacatcacaccaaacacctcctggaccctcaacaattgcaggaaggcattgagtcggattaagccacttcttgtgaactttgcgagcaacaaagacaagaatcgcagggatatctgtcagaacccctttcctgatgcggaatcccactgccgtcccaaggctaaaacatcgcaatatcttgctatggaaagctcttatagtcattaagtcaagcaagctatttgcttgctggcccttgggcaacttgccagacttgggaagaagtccttttgaaaggttgccaaagtagtttgcacgcccctcggccgcacaatgctgtaggtttgactgtgctcccatctgtgggccaggcccaagcccaagccctccctgcatgtcctgtggaccaccctgcaacatctg

SEQ ID NO: 14294 - DNA, 333 bp, Setaria italica
  misc_feature (27)..(27): n is a, c, g, or t
  Peptide Sequence Number=SeqID_80268
cttcaagtctttgattaggtttgttgnggttttcacctggatgggtggatgcatgtgcggatcgtgtgtttagttgcgcacgaatggtctactaaacaaagttgtataagaaactgccgcatgatagtgattaaatacgaaagtaaagcaaaactgtaaactcatatgactttttcactgttgcacgtttcgtgcctcccccgagttgccgctggcctgaatctcatgggacagtgctatttgcgagcacttcaattttgggtaggatagttgatgatttgggagaagttgtagaagaagatgatactgtgcagcaggacagttcaccttcta

SEQ ID NO: 14295 - DNA, 429 bp, Setaria italica
  Peptide Sequence Number=SeqID_80269
gcttggtggcttgttgaatatctgagaaacaacctcctggacctttggcacccttgtcataccaccaaccagtagaacctcatcaatctcctttgcggagatgccagcatccttgaggcagttcacacaagggatccgagtcctctcaatgagattgctcacaagagactcaaacttcgatctggtcaaggtaatgttgaagtgcttcgcaccagaggtatcagcagtgataaagggaaggttgatttcagtctgcatagtggaggaaagctcgaccttggccttctcagcagcttccctgagcctttgcagcgctaacttgtccatgctcagatcaatgccgtcagacttcttgaactcagcaaccagatactcaagcagtgcactatcaaagtcctcaccaccaaggaaagtatcaccatttggttg

SEQ ID NO: 14296 - DNA, 1138 bp, Setaria italica
  Peptide Sequence Number=SeqID_80270
aaagctttagagaatcttgattcacatgaagagaccagcagggcatctcaggaatgcactcatagcctggacaaatatggaatgcagaaccaaatgaattcatttgctaaagaagagactgatcaagatctgagtttgcatgaacaaaatgctgagaaaacatctcatgaggctcaaagccacgaagcccctgtagctgagtcaggcgactgtaattctccttccaaagcaattgctagctctgaaagcatcaattctcaggacaaggtcgctgtggtatctgcaagaatccatcgtgaaatggtatgctccaaatctgatttgccatctggatcaagcatgcccaaagaaggtggaagttcttctgatccagctcgaatatctccagagctggaggaaaggcatcatgtggaggttcaggtaaagcttgacacagaggatggtttgtctgtcagtaatgcaaacctagagaggtctaatgatagcccaaacacaactgactgtgacaaggtaaactctgctcttgttcatgagagtcaaaatcatgtccaatcttcaccggcagaacaactcgcagtctgtgcaaaaccttcgagctcagaattagtgaacacaaaagcggatactctgggttttcaagctcaactgcaaaaccaggtggcgaattctcaaacgcatcaatctaataacctttctctgcctgtacaaaacatacaacagcaagggccttcttatacaatggctcagaatgttcaaacatctgcacaaactcaagatcaactctttgcacagtccaatcagggaaatcagcagtatctccaaatgacgcaagggtatgcatcacaaatgtggcagtattatcagcaacaactgtattacctgcaggctcagcacaatcaacagatgcagagtctgcaacaacaacaccttccaactgagcatcttcagcaaaatttcatgcagcaagtgcaacagttgcagcagcaaatggtactttggcagcaacaagtgcagcagcagcagcaagtagtactgcaacagacaattccagctcagcaacctccctgacaagaaaacagggtcagcatccttcttcttcaggggataccaaacatgaccaaaataaacagcagcaaca

SEQ ID NO: 14297 - DNA, 356 bp, Setaria italica
  Peptide Sequence Number=SeqID_80271
cagatttagatcatctacaagattgagccatcctttttctgctttatatcttaacttggcagactcgctcttcggatttaccatgtgatcctcatcaaccaatgcaccaccacaatcaccatatacacttgttgttgaaaggtagcataaccattcaagattaccatggctgagtattctcctaagatcttcatttaaattaagtagaacttacaggatcaccgattccggggatgggtgggatggagatgagcaagtgagttgcttgttgcaaactgtggacattttccaggctgaaattgctctcaatggcatcgaagacagaagcattcatgcccagcatctcgagcctccct

SEQ ID NO: 14298 - DNA, 834 bp, Setaria italica
  Peptide Sequence Number=SeqID_80272
cgatgtatgtgcttggttcgtatctctgaaaattactttcctaactaaaatacctcagccaaatccaactgtaaatttttgtctataaccctctgagagagcagaaagtgtatcattgtaaggtttaatgccccttctctccatcgtttcaatcactttcatggcatatgcaattcctttgccagctatcagagtcttgacaaaaccatcgtatgtaaattttgaccaccgcaatccaagtatttgcatctctagaaataactgctcagctaactgacagttgttaaactgtacgcatgcatgcataagatcgttgaacgaccatatcaaaattctccttactgcactttgtgcaagtctcaatgtctttcgaacagtcccattatctagttcaaccttatcagcaagattgttgcctgcaaataataactcaggctgaacatcagctgaatttttgccagtagccagcttcccttgagatggttgcaggctaaagtctggtaacaatttgagatcttcagattcactcaaagcaagtacaggaatgtctaatcttgatgattggtatcttcttttagaagacaacctcagatgttcagatctttgtgcagcactggttaccatatgctgcaagatgtgatatgcagattggaggtcaccaaacgcagttaaagccctcaaaattctcctttgtgtaataatgcttgggctataatacctagtgcagtccttccagatatcataaactgcaggcagattttgttgtaacactgcaatcttcaaaagctcacagtatgttatttcagacttcccaagaagataattttccattgt

SEQ ID NO: 14299 - DNA, 380 bp, Setaria italica
  Peptide Sequence Number=SeqID_80273
ttcacataggtcatcaaatgactctaaaatcataaagagtgcaaagcttcaaaatcagaaaagaaaatcaatatttttctgctgctgaaggtttattaataatatagagtgatgcagcttgagataccaaccatagttgcaatacatgtaaatgcaaataggggtaacgaggtcaggttactttgagctaatatgctgcgcgtgcagaaacaagatgtgcattgattcaccctagagtcctagactaaactttttatcaaggatcctaccagctaaggtttaattattcgtaagtatacttacatctttagatgggaaagacccagttgcactgttcacatgggcattaaccgcttcaagcttcatggacaaaaactcca

SEQ ID NO: 14300 - DNA, 1085 bp, Setaria italica
  Peptide Sequence Number=SeqID_80274
aggttttttttgttttttttttggttttttttttttcgttgtaccaatctgagctacaaaaacttcccaggatacatcatacatgcatgttgcaaagtccgtacaaagaagctgatggaaataatgaaaagacagtgcttgctcctacagaaacgtggaatgcatctatggcactatgcccccaaattaggaataaaagaactttggcgacatgataacctggaaaaagaattaaacctagcaccgtggtccgtggacttgattgatcccggtactatttattagcgaccacgaggaattttgttttgttggtctccttgttttatttatgtcactctttcatatgtattgccaatctgcatgtgaagccagtctgatgtcaaggcctgagggtattcccttggtgtgtgtggatcgaatgtcagaccaggtgccgtactataaggcggagctggagcatcaaaatctttagatgggaaagacccagttgcactgttcacatgggcattaaccgcttcaagcttcatggacaaaaactccacttgacgctgtagagattggatgtaatttattatctcatcaaggactgatgctttcccaataaccttattgcatccagggacaagatcttgaagaactttcatccgttcacttatcttctctcgtcgtgctctttctgcaaggctatggctgtccgttgcttgacctcttctagccctcacatggatgtagtcttgttttggtggctctggtggtgcaggttttttatcaacagacttgctagcattgcctgaatttgtttcaacttctgtccttattttatcatcactagatgtcatcttcttcaaacgttttgccatttctgggtcagccgagtcccgggcaccgccgctggcggcggcggtgccggaggtggaggcgagcttggacggctcctcctcagctgcaggcgcgtcgcgtcgcggcctcctgcggctggacccgccgccggagcgtccgccgttgcgtccggtcggcggtggtgacgacggaggaggcctcgtggtgcgggccggaggcgggcgggggcgaggtggtggtggtgg

SEQ ID NO: 14301 - DNA, 330 bp, Setaria italica
  misc_feature (263)..(263): n is a, c, g, or t
  Peptide Sequence Number=SeqID_80275
cggcggcggccggcgggcagcacgcggcggtggcgctcagggagcacctctacatggtgaacctcaacgtgatctcgcgcatggtgctgggaaggaagtacgtcgtcgacggggccggctcgccggtgacaccggaggagttcaggcggatgatcgacgagcacttctcactcaacggcgcgctcaacgtcggggacatgatcccgtggctcagctggctggacccgcaggggtacgtcaggaggatgaagaggtcggccaanatgttcgaccggttcctggagtacgtcctggacgagcacaacgagcggcggcggcgagagggcaagg

SEQ ID NO: 14302 - DNA, 1720 bp, Setaria italica
  misc_feature (1)..(52): n is a, c, g, or t
  Peptide Sequence Number=SeqID_80276
nnnnnnnnnnnnnnnnnnnnnnnnnnnnnnnnnnnnnnnnnnnnnnnnnnnntgaaagttccactccaaaaccttggctaccatcatttgctgtaaaagctctaggatacataagtgattgctttgatttcattcattcaccaaaattgggcatacatctcacatgcacaaaactcctacgacttcaatctacccaaacatttgtacgccgggaacaaacttgtgccagcagatttcaaattctattgtgtttgtggcgccacaagcagtgcttttcagtgccataaaatttccttcatttctgtctgccgaatttattagccaccgctggctccgatagtgtgtcccagacctttagtttgccttttgatcctccacaggctaaccagaaggggttgtcatgtgaatatgataccgagaaaatagctccaagctttggattcagagaggcaatgcatgatggcttgttgtttgatagatcccagagtttcaccattttatcagtcgagcctgttgcaagaaaattaggggctgatgggttgaaggagatggatgaaacagccttttcgtgtgcatgaagagtatatgtggatcggccagaagaacttgatgaagctgttcgcttatcgaaagcttgaaccatcccattttcaagacttaccacaaatgaatgttcattgtgtggatcccaagctaaactttccacatctgcttcaacagaccatttatggcaactctgtccaccatctttcatatcattcatggcaactgttttatcaaatgatccactgagaagaacttcaggtgactgtgggcaccaagcaactgattgaaccttgtcatcatgatgttcaagtgtaactgcacatttgccaacagctaaatcccaaattttaacagttgtgtccgcacttgcactagctagaacattcctgacttccttgttccatgcaagaccaagcacagaatttctatgacttcccttcttatactttttcccctttttgccctttgctttcttcttcttttttgaaagtcctcctaaaaccatgtgaggttgcacctcatcaaccatatctaggtcccatatttcaatagcaggatccatggttccaacagcaataaaattccctttgtcaccacccttcagattaaaatccatccaagcagtgcagagcggaaaagcagggagaggaacatcatgatgcacaaacatattttgctcaccatcctctgtttcttcaagtatgttgacctgaagagaaaagacatcttcatcgctgtgtgcacacacaagaagataatcagtaggcttgatcatcttatcttcaatctcatcatcgtcatcgtcatcctcatcgttattgttgttgagataggggtccatgtcattgctgggatagtacaggtcccccattccggagctgaaaatctcgattccttcttcctcgtcgtcgtaagcatccatgttgagctcgcgaagctcatcggcgacgtcgtccacctgactggagcccttggcgagcgccttggcgacggccttggcccgggcgacctcatcaagctcctcctcggcctcggcgccgtcaagctccatggtgccagcatcatcatcctcgtcgacatcgctcccgccgtctccgcccaaggccaaggttttgatggcctcgtcgatctcctcctgcgtgggcggctcggcgacgaccggtacattcttggc

SEQ ID NO: 14303 - DNA, 353 bp, Setaria italica
  Peptide Sequence Number=SeqID_80277
aagatcatctgcagaagcagcacagcatgaaggaagagagcccgtacctgagaagcccaatggccgagaggaacctcaactcgacagcagagaagccatcagcaggacgcaaagactttgggatcgcgaagcagatgttctctgacagcaacactgacacatacagcttcaagcagctgttgtctctcggggaggagaaggagaataaccctgaagctgggcaactgccgccgatggcaaaagcgagacgagtctcattgtgcaacggtggagcttaccagcagccaatgaaccaggcctcgcgccgacaatcgctgataccacttccacggaggaactcgctgatgccaccg

SEQ ID NO: 14304 - DNA, 353 bp, Setaria italica
  Peptide Sequence Number=SeqID_80278
ccaccccgctcatcagcatcgtcaaggacgtgctcaacaacgtcatccccatctccggcgccggcggcgagcagcagccatcgcccgagttcatgacgcggcgggtgtacttctactggtgcacgcgtgaggaagggtccttcgagtggttccgcggcgtgatgaacgaggtggcggagcgggacgccgccggcgaggtggtggagctccacaaccactgcacgagcgtgtacggggaaggggacgcccggtcggcgctgctggtgatgctgcaggcgcttcaccacgccaagagcggcgtcgacgtcgtgtccgggacgcgggtgcgcacgcacttcgcgcgccccaagtgg

SEQ ID NO: 14305 - DNA, 333 bp, Setaria italica
  Peptide Sequence Number=SeqID_80279
tggtcgctgcgcgaggacgggccctccgtggccatcgtgggcgccacgggcgccgtggggcaggagttcctccgcgtcatcacggaccgggactttccctaccgcagcctccgcctcctggccagcgagcgctccgcggggaagcgcctcgccttcgaggaccgcgagtacacagtccaggacctcgcggccccgggggccttcgacggcgtcgacatcgcgctcttcagcgccggcgggggcgtcagccggaagttcgggcccgcggccgtcgcccgcggcgccgtcgtcgtggacaacagctccgcgttccggatggaccccgaggtgccg

SEQ ID NO: 14306 - DNA, 456 bp, Setaria italica
  Peptide Sequence Number=SeqID_80280
tacggtaccgggtacttttcccttaccgtctagtccttccgtccttccttggtcctagtcgtagtcgtcttccgtcggggtaagtcgtccttcgtcctttcgaggaccgcgagtacacagtccaggacctcgcggccccgggggccttcgacggcgtcgacatcgcgctcttcagcgccggcgggggcgtcagccggaagttcgggcccgcggccgtcgcccgcggcgccgtcgtcgtggacaacagctccgcgttccggatggaccccgaggtgccgctcgtcatcccagaggtcaacccggaggccatggccaacgtccggctggggcagggcgcgattgtggcgaatccgaattgctcgaccatcatctgcctcatggctgccacgccgctccatcgccacgccaaggtgttaaggatggttgttagcacttaccaagccgcaagtggtgctg

SEQ ID NO: 14307 - DNA, 363 bp, Setaria italica
  Peptide Sequence Number=SeqID_80281
gccggaaaaaataggtggcttccggctaaacccccttcctctttcaaatccctctcccgtcgccgccggcgccgcctcccccgcccctccctctctccttccccgtcccactccggctcccactgtctaacccaccacaatcgaaccctaaaccccgcgaatctcgtccaaaccctaaacctcgtgagctgccccagccatgccgaaggtctttggcaccggcgtcttcgagttccggcacccccgcgcggcggagtaccctctccccgcggacgccgcccccgctacgaccgcggcgcccgacaaggtccccgcgtccaccggcggcgcctccatcacgctcctcgacatccagcgggaccg

SEQ ID NO: 14308 - DNA, 144 bp, Setaria italica
  Peptide Sequence Number=SeqID_80282
gggagtggggctcagataagagccccctgagccgcgcgacctcctcgtcgcgcgcgcgcagggcggcttcctgctccgcctgcctcgcctcggcgtcctcgagcgccgcgaggaggcccatcttgtcggcctcgagcccctcgg

SEQ ID NO: 14309 - DNA, 1890 bp, Setaria italica
  Peptide Sequence Number=SeqID_80283
ttttttgcgacaaaatgtattttcttgccaaaggcaacgtgtagaactaacggaactcctatattatttgcattggcaaataatgaatttgagtgtttcttgcctagaagttaaacaggtattgaatgaatgaactgtacttatatactattttctttctaggaaactatacttctagtatctctataatggtatatggtaatatcttcctttctttttgtttcctacttgacaaaatgtgtaaagcatctacaagctgatccttgccatatgtacagccaattgagtaacttcacaagagaggttaatggaaaacctgtggcgatgtgtaatactcactttcactgaaatatggtctcaagtcctcttggcacatgaaatccaaaggaaaagaaacaaggtggccccttactaactgcaatctgtccataggatcagtacctttgagatcgccatcttggtaagcttctagtttctcttgggcaacgcccaaatcaattgtggtgtggccaattttgtccctcaagtgagcaaagctttgccgaaattgggcccttgagtcgatgagatcgttgggtacacaagagaagacatcttggtatatcatggtattcgtcttagcagtggccatccagatatttttaaatgtggaatcatctataggatccatgatgtggctaacctctcctggatgaaggccaaggtgctccgcccacagagaaagacgtaggcttagagagaattttccagcttcccaaggtcttccgtccattttagaattaacaacttctttatcttcaatgaccacagcaatctcagaatcccttgatccaagcaagcttctatcatttatgttagctgagccaatcaatgtaatgcggtcatcaattatcattaacttgctatgtacataaatctgactagtgaccaagggacccccatcattcagtttaccatgtgctctaagaccataaaaggagatgtaatcatgtgctttaggtccaataacatcaaatagattctggagaattgaattagggcctctgcagatagtacgatattgccagtgcatgattgccctcactgatgcagctccaccatcatcaatgcctccctggaaaccaggtagaagaggaatgatgatgatggccttaaagcgctttttctctctctcagctcgaagtatacgccgatacaatgcttctaatacacggtttttaatcgtatcatctcctgacaggcccgatatgaaaaattgattctcaatgtatacaaagtgttctgccttttcaatcagagaaaagtaggcattgtggatgcttccttcaatttgagtggttccagctgaccattgaccaacactcctaacaacctgacaacgacaagttgcccttggaccaacttgcccaatgtcaagtactgaagcaacttggtcaccacgctcctgcttttcccaccatttcttgtccttgtgattcctatcatctttcagtgaatcaaaacgcctaatagatgatgcctcaagggaactgtgattgtccacaaaacttctcataggtaaatcctgatgagaaaaatccaactttgcctttcggttgagcaaaggctgactaaagctctttttgtttatgcgatctgaattgttaatatctaaatcagtcaatcttaaatctgcacttgacaattcctgaggttcaagttcttgaggtaaaagcaatggaacatcctgacatgatgtgcgcgatgtcaagactggatttttatcaacatccctatcatgatactgtttaccatcagcctcatcatttgtttctttgcttctacccttgtagtgtggaattaccatgtggtgatgaggcatcagtaatggaattgcttgctcatttagag

SEQ ID NO: 14310 - DNA, 786 bp, Setaria italica
  Peptide Sequence Number=SeqID_80284
tttttttttttttttaccaaaaaagtttacaggtttcgattcattgttttttgtctcctcttcacactgaaggatagaaacaaaaaatcaccttattcgtatcttcaacaacaacaaagtgatcaacattttatttgaggtcacagcactagtaacccaacatgagcaactctctcccatcgtgctacatagagaaaatagtgcccactaaaggtaaaacgaaaaggatgccatatgctcagactaaaaagggagagcaagactatccagctccaagcctcatctctctcctaacaaacttaggctttgatcttcaagcactctgttttcaccatgggggtaaggaaggccagcttgtcagcacagtacatcggggtgtcgatgacctccttggtgcggattgcgttgtgagaaggtgcccttggtgattccaaggcttccctttcatcctccatgatcgtgtcaaggatctttgggagcctagcacgcctgatgatcgatggcagcttcgatggcgcaacctccattgtgattcggccgacgaattgatccatgtatgctatggtgatgagagatggcctataagcctaagaatgtagggagagctgagagaggagggttgaagaatagaaagggtgtgtgttcaagggggcatttggctattgcttagtgttgcttctgttggcgcctgctggctcccaagaggttgtctggaggttgaagaacagaaagaatgtgttcagggggcatcaggctaggctattgcttattgtttgcttagttgtt

SEQ ID NO: 14311 - DNA, 428 bp, Setaria italica
  Peptide Sequence Number=SeqID_80285
gccgggaacaccaaagagaagaagttttgatcctgcaccgatgattgctgatgtcttggagtgggttggatgctttcatatcaaaaagggatcaagagtagtaaaatggggtaccggagtggagatgaatttatcaatagatgttttgattgtatacagctcggcaatgcttcagacaggcataaaagtacatgcttcacgacacatttacaatgtcaacacccatcgtttcagttccagggtgcaccatacttcatattcttaagttcctccagctgctgcatgatatagagattaactaatcaatgccagttccatttacggtgaaatcattagtaattttttgcttcgacttcaaaacaaaactccaaaatcataaacgaaagacagtctttgcaagttcaagatgctagctgtcatgaggaaac

SEQ ID NO: 14312 - DNA, 1122 bp, Setaria italica
  Peptide Sequence Number=SeqID_80286
aggaaacaaatcaattgagaaatacctagccatacaaaaaaacaactatgaagggtaaataagaacgtaaaatgttttcccaaatgaaattcagtgtaggccccaccgaagggagccgagggtcaggccccgaccggaggaggcctaccgaccttttggaaggtggtcggagagcgccggcctgaccacctagcggcggccactggccaggcggtggcgtaccgaacccacatgcgccacagtgacacatgtcgcaggccctcctctgctataggagtcgacgaacgggacaaccgccacgggcagcacagcgtctgccacgacgcacaggacctgccacgatcgcacagcgtccgcctcaccacgcgaagcgggatgatgaagctcaatgtgccagcaggaaccgggacaggacccaaagcggggcctttgtgggggcccacttcgggccatcacgccgggaacaccaaagagaagaagttttgatccggagtggagatgaatttatcaatagatgttttgattgtatacagctcggcaatgcttcagacaggcataaaagtacatgcttcacgacacatttacaatgtcaacacccatcgtttcagttccagggtgcaccatacttcatattcttaagttcctccagctgtctgcatgtttccttgtgggtatctaaaagctcattatacttcaattgcaaatccaacttctctgccttcagcttttcatagtcagaaattgatgggccacccagtttttgctgaacaaactcgactgccgacgaaggcttatcgttctcctcgtacaaggcaacaagaactttggtgagggtatctagcacaccactggattcaagatacttcctgaaggcttctttcttggcttccctatccattccgagggcagatccgggagaagctcgggcgaggacttgcaggttccctcgaggtcggcggaggaaggaacgaaggaaggggggagatggcgagagcttgacgacgaagtgtcggcaggatctgagtatctctgggctctggcctggacagccgctgcttattgctcgtcttccttctcttcggtccgtattttttgcgtaggtgcggtggaaaggtcacccac

SEQ ID NO: 14313 - DNA, 1358 bp, Setaria italica
  Peptide Sequence Number=SeqID_80287
ttttttttttttgcacaaacaaatcataatctggaagcaagtgcaatgtccatacatccggaagcaagtgcgagcgttcatgacacatcaaaagtcctgcatgatccgaggagtccagcatacaaagcacaagcaacaacgagcggaaaatagctatgacacgacactctagactttagttgcatgaaggatataagtcttcactgcatttatttaccctggagagcggcccataaccagttaatttcttcacctttaggcgtagggcgagtttaactacttttgttggcctcattaggctcatcttggtccttgaaatcatcctgagcgaattcatcttgacctttccctttcatgtcctcatctgctaagccaagatcctcaggctcgccctctccctcagcctcaccagcaccatcaactttgagatcacttaacaagtcatccagtttgccaacagacgcattgttgggggcattgtctgcatagctgttgttgcctgccccatagtttccgcctccatatgctggtgtgccacccccttgattgaagctatcaccactgtaactgccaggagtagcattatatccaccagtgtaaccagcatcaacaccaaacccacctcgcccaccttgagaaacaccatagcttcccccagtgttgtaccttgggcccatattaccaccatcgttatagccgccgccaccactggcatagcctccgctaccaccatatgaacctccaccatacccaccacctccgctatagcctccaccaccacctctgccatatcctccaccatatccaccgtcgccatagccacctccaccaaatccaccaccgccgtagccgcctccaccagcacggctaccacggtcatgagcataactgaccctcactatccgaccctgcaaatccttcccatccatgccagtaatggcagcggctgcctcctctgtggatgtgtatgtcacaaaaccaaaccccctcgatcttccggtttcccggtccatgattatcctagcttcaatgacttcaccatagtctgcaaacgcatccctcaggctgtgctcatctgtgccatacgagattcctcctatgaaaagcttggaggaggacatgcatcgaaccgcctggttgagcgacgagctggcaccagtggatcgcttgacaagattcccaaccttctgcaggaacgccatctccgaaattaccctggtgggtgctcgtcaacggcgaacggaccggcgaagacgggcgaagggcgccgctgctcgcccacgccgccgcaaggagaggaaggtcacacggggaggagagccgagagggtcagaatggcagagtgaggcgtaggtcgt

SEQ ID NO: 14314 - DNA, 550 bp, Setaria italica
  Peptide Sequence Number=SeqID_80288
ttttaaaatttaaagttaaacaaacaaaaagaaataatagtaagaacaagacaaaaaaaagaaaaaaaatagaaaaagaacgatccttttctatcagaatttgaataaatagatcgaactacaaccttgcccatatcctaagaaacgctacaagtttccaacatgtatctctcgggctcaaaatgtcacgatagcaactcatgtacacagctgctatccgtctgcctggatcaggccaaaagccattggatgccatctctagcgtccgcgcacacaacagaagccgccaccttcaggttgacaagggatggatcaatagctaggccacattgggttagcctgagcagcagcacttaggttgccatcactggggtttcggtgttctgggcccaggcctggctgtgactgcccaagtgcggtgccaaactgcgaaggtagctggccctgccgaagcccagcctgatgactctgcccttgatagccatacaaggtactggctgcaagggcagagtcatcaggctgggcttcggcagggccagctaccttcgca

SEQ ID NO: 14315 - DNA, 2732 bp, Setaria italica
  Peptide Sequence Number=SeqID_80289
aattctaggctcctctttttgcttcctcgaaaattaatggtgctgctgtgttagatatttcaggtttattgtcacaagatatgtagacagcaaaaaagaaaaaaatagaaaaagaacgatccttttctatcagaatttgaataaatagatcgaactacaaccttgcccatatcctaagaaacgctacaagtttccaacatgtatctctcgggctcaaaatgtcacgatagcaactcatgtacacagctgctatccgtctgcctggatcaggccaaaagccattggatgccatctctagcgtccgcgcacacaacagaagccgccaccttcaggttgacaagggatggatcaatagctaggccacattgggttagcctgagcagcagcacttaggttgccatcactggggtttcggtgttctgggcccaggcctggctgtgactgcccaagtgcggtgccaaactgcgaaggtagctggccctgccgaagcccagcctgatgactctgcccttgatagccatacaaggtactggctgcaagtgggggcattcctcgtgaaccagctccatgcatccacattgcagggttctcattctgctgctgaagagaaataaactgatttccctctttgtaatgtggaggcactgatccatcgaacccaagagttgtggtcgctgatgctgtgctttggttcacagggaaatttcctggcatgttgtttgcggttccaaagcctccaacatagcttgagagcaaagaggctggctgtggtaagctagctagagctttgtactgtggtagagggtatttcacactcgagttgggaactgcagctgctgcttggtggaacatattgctcatatatggttgctgaaaagcagcaggctggatatatgcataacttgggggcagagatggatagccaatcatgcctgcatacccaagaggaagagttgcttgagcatagggatgaagaagatgttgagggagaggaggccctgacgcaatgcttgtgcttggctgagattgagtcaattgtgggttgggtaacccaactgaattggcactctcttggggctgcgtagaaacagttgcattgttcatggacgatgacgacgtaccatgcatcataggagggttagtgagcaatagtgagaaagctggatcaaattcgcgcaatggtgggatcgctggtggcaggagaccattttgtatttgcataaagcttgataaaggagataaattctggaattgtcggttttcctgcaggtaattgtgtgaagcagaatcttggagcgctgcacttgaagttgcataatctgaggttgctgataggttgtattcagtattgtttgtaacatccaggaaattggctatcgtcacttcagattgttgtaccgatgtaacatcaagattctccatgttgctgtttgtcgcggaagcaacacattcattagctgctggagttcctgccgccttgctttcatcctcgtggattctgacaactgtctggtcaattgaatggtcatcaggtgctgccacaacgtccccatgacactcaagaggtttcgtggtcaaagatgcatcaagtgttccagacacaaaactaccaaacgtcaagtgtgcgcagtcagcatttgaaacctgaagatgatcagggattattactgccggattatcatcagatgattttggttcctcgtgtagagtcaactggtcaaattgtttcgtcgtggtagacatatctccattcaaattttggttaggctcaaatgaaaggccattggactgaaagtcatctgttttctctatcaagtcatcaccctgatgagtggcaacttcagtatagtctgatttatctgtattaccctccaaatttgtgctcttttcaataccatcttcattgacatctggcgttgatgaatcttcaatggaaggagctggcacatctgctccctctgctggaggtaacatgtcaattgaggaggcatctttaggtacagagtgcacctcaacagcaccatttggttctgatgcgaaagcagatctgttgtattccttgggtgtatgacttggtgtattggaaatgactgaatcaccaacggctggcatggctgtgctacttgcagcagatctgctcccacttttagcttgaggcctgcccatcttcactatttcagccaaggaaggacgacctggaataccaccccaaccatgctgcacttgagatggaggctgagtggtgttctttgcatcagcttgggcaacattgcctgtagcagaaattgtttctgtaggattgcttgtcctgacatccaaggccgatgagttaagcggagcatgtaattctggttctttcttgatagggcctttggaaacacccattgagtctcgcccacttcgatcagaaccagccttgtatcctcgattcataggtttctggaatgatcgaggtcttgattcctgagaagctttagtctcctttttcttgtcccgctttctcctcacttcatgaaaagtatcttgcgagatgagcctctcgacggcgatgtcggggtccatgccgcagtcgcagagcgtggcgtagatctcgccttccgagcggtcggccaggatccccttgaggctctgcaccatcttcctggaggcggtcgggatcgccgccgcatccgccccgtcaggcgccgcgaagggctgcctcccgccgccgccacggccgccgcccctcatgg

SEQ ID NO: 14316 - DNA, 572 bp, Setaria italica
  misc_feature (1)..(27): n is a, c, g, or t
  Peptide Sequence Number=SeqID_80290
nnnnnnnnnnnnnnnnnnnnnnnnnnntttttttaatataagataaatgaatggtaaaagtattatttggaagaccgtgctaagttctagcatagcttataaacattgatggagggtgtaaaaatacgagaacagctccggtacttttttaaaagaaattacacgaatatcaagcaataagaaataattaagtcaaattttaaatctatatctatatctatatctatacctattattaaagcgagtaacgtctctgccaacaattttcgtccgtcgcgcttgttttgcaaaaaacccctcagaatttcgtggaatcaacccgcagtccaattcttctgaatataggggggctcggttggaaaaaagaggaaagtgagggattaaagggaaaagaccccctccctcgggggatcgagagccgccgcactccgtccggccgtccggctccggggccggcgctgcccagcagtggactggccagagctccctcagggcccgacagtggactggctccgccgccgtctgcacggcctcccccgctctgcaccaggccaagccgcccgccccgccca

SEQ ID NO: 14317 - DNA, 194 bp, Setaria italica
  Peptide Sequence Number=SeqID_80291
cgatgttgtacacgcccatccacggcgagttcttgtacccgcacaggcaccccaggtccgcgccatggcgctgccggccaagtgcggcctcgccacgcccccaactgctcatgatccgatgatccatcgatcgatctggattaagctggccgtgtgtccttggtcttgtgatcttgtcgcttgtgtatcctagc

SEQ ID NO: 14318 - DNA, 710 bp, Setaria italica
  misc_feature (691)..(710): n is a, c, g, or t
  Peptide Sequence Number=SeqID_80292
ttccaaccacaccgtagtaccgcagcaggcgttgcagtcgcgacgacatgaccaccagcagagccctcctggtcgccgccgcccttctcctcgtcgctgctgcgcccgcggcggaggcggtgtgcggcatgagcaacgagcagttcatgtcgtgccagccggcggcggcgaagacgacggacccgccggcgccgccgacgcaggcgtgctgcgacgcgctgggcggcgcggacctggggtgcctgtgcgggtacaagaactcgccgtggatgggcgtgtacaacatcgaccccagccgcgccatggcgctgccggccaagtgcggcctcgccaccgccccccaactgctcatgatccgatgatccatcgatcgatctggattaagctggccgtgtgtccttggtcttgtgatcttgtcgcttgtgtatcctagcagctgcattcgtgcttcagcttttgtgatcgatgtgctcgtcgtgtgtcgtcgtcatatgtatagccatgtgcatggtgtttggactgcttgtgtgtgccactagctttgtccaagcgtactcgatctcgcgtgtatgccgggcaagttacgttgttgtttcctgtcactgtggttttgatcggtccaaaacatcactagtactgcttgtcttcaaaagtatcggaattatttgcacaaggatcactgctagcaagnnnnnnnnnnnnnnnnnnnn

SEQ ID NO: 14319 - DNA, 1296 bp, Setaria italica
  Peptide Sequence Number=SeqID_80293
gccgcaaagtccatccccaagccgctccactgcctcgccgtccgcctcaccgccgagcggatcgccaggcccgagcagtacgcggaaccggtgccgccgccgcgggcgctcgaggaccccgcgctcttccactacgcaatcttctccgacaacgtgctcgcggcctcctgcgtcgtgcgctccgccgtcgccaactccatcgacccctcaaagcacgtcttccatgttgtcaccgaccggatgaacctcggcgccatgcaggtgataatacgccgaatggacttaaaaggtgcacactatgaggtcaaagcatttgaggattacaaatttctgaactcctcgtatgtccctgtgctccggcaactggagtcggcaaacctccaaaaattctattttgagaacaagcttgagaatgccaccaaagatgctagcaatatgaagttcaggaatcccaagtatctatctatgctcaatcacttgcgattctatttgccggagatgtacccgaagctgcaccggattcttttcctggacgatgatgttgtggtgcagagggatcttacagggctgtggaagattgacatggatgggaaagtgaatggagcagtagaaacatgctttgggtcttttcatcggtattggcagtacatgaacttctcacatccccttatcaaagcaaagtttagtcctaatgcctgtggatgggcatatggcatgaacttctttgatcttgattcttggaggagggagaagtgtactgaacagtaccattactggcagaatcagaatgagaaccggacattatggaagctaggaacgctgcccccaggcttaatcacattctactccaccacgaagcctctggacaaatcctggcatgttcttgggcttgggtacaatccaagcatcagcatggaggagatcaggaatgctgctgttgtgcatttcaacggtaatatgaagccgtggctggacatcggtatgaaccagttcaggcacctttggacaaagtacgtggactatgacgatgaatatatccgtcaatgcaatttcgcaccaccatagaaggcctagttatctacgaatccattcgtggatgggaaatcgagaaggttggtaattagaactagactgcccactgaagggttacatatgctgtaagcacattttctgtagagatccaaagagtttgtcgagtacaactgaagggccacaaaattctttctactccctctgttccaaattggaggtcgtttgacttttccaggttcataaagaaaaaaaaaaaaaaaaaaa

SEQ ID NO: 14320 - DNA, 424 bp, Setaria italica
  misc_feature (351)..(351): n is a, c, g, or t
  Peptide Sequence Number=SeqID_80294
ttttaccggttttaccgtttttagtttttccggccgtgtcccaaagatctgctccatcttgaacacacccaggtcactgccgatcctctcgcagagctgtctgtacagtgcaggctctccatgggacttcttgagctctacaacgtacaaagaggggccaagctcaaacacctgggatcacaaacagcataccacttcattgttagcctatctccatacttctcaagtgccatttttttccctgaaaaaagggggcattttacctcggtgcagacaagaaatgaggcagggttcttaggattctttgttccagtgcagttccgcgtcactttgagcttgccgtgccccctntgtacttggaagcccatttcgcttgcagaacgttcaatcttgtcgaacaaatcctcaggtgatgcgttgttgt

SEQ ID NO: 14321 - DNA, 693 bp, Setaria italica
  Peptide Sequence Number=SeqID_80295
ttttttttaagtaccaaccgaaaacaatccattatttgatttcacattctgtttggcattgtttacactgcatgatcctacactattttatcttctcccctatttcaggcgaactgtgatcctacaaccgttcctcgctgcattgcagctgaactgcttcgccttccctagatctcaagctacatcacggcaggggggcagccttggtcacaatgccaccaaaggcgtcgcggatcgattgtccaagctcgcaagatcatcggcaaccggccgtgtcccaaagatctgctccatcttgaacacacccaggtcactgccgatcctctcgcagagctgtctgtacagtgcaggctctccatgggacttcttgagctctacaacgtacaaagaggggccaagctcaaacacctcggtgcagacaagaaatgaggcagggttcttaggattctttgttccagtgcagttccgcgtcactttgagcttgccgtgccccctctgtacttggaagcccatttcgcttgcagaacgttcaatcttgtcgaacaaatcctcaggtggatgcgttgttgtgaatctgatcttcctttgagacacgtcctcttcctcgaaaaaccctgaaagatcaagggatgatgccattccaatcaactgaaaagcgttgatctgatgagtagtcttatccgacaaggtagg

SEQ ID NO: 14322 - DNA, 1161 bp, Setaria italica
  Peptide Sequence Number=SeqID_80296
tgttcctaagtcttcgtctaagtattctattcggtctaaccggtccgttgttccctaaagtattcttgtcttcctattctcttgaacacacccaggtcactgccgatcctctcgcagagctgtctgtacagtgcaggctctccatgggacttcttgagctctacaacgtacaaagaggggccaagctcaaacacctcggtgcagacaagaaatgaggcagggttcttaggattctttgttccagtgcagttccgcgtcactttgagcttgccgtgccccctctgtacttggaagcccatttcgcttgcagaacgttcaatcttgtcgaacaaatcctcaggtggatgcgttgttgtgaatctgatcttcctttgagacacgtcctcttcctcgaaaaaccctgaaagatcaagggatgatgccattccaatcaactgaaaagcgttgatctgatgagtagtcttatccgcaggtggttgattaatttcctctttggctggaagaactacatcaagctgtgaatcttcatcatcgctgtcgaagggaacagaaggaacataatccttctggaaccattcatgcgtcttgatctcagccatggtgatccgcttcattgggttgggctcaagaatcctctgaagaagattttgtgcgccaggagaaaggcactttgggatctgagtgtcacccttaaaaatcttctgataaagaacaacgatattccggtcatcaaatggaaggtatcctacgagcatcatataaagaatcactccacaagaccagatatctgacaaggatccatcgtatcctctattctgcagaacctcaggggcaatgtaattggggctaccacaggttgtatgcagcaacccatcattcccaagatgttgtggtaaagcactgaggccaaaatcagatatcttgatgttgccctttgtgtcaagaagaacattctcaggcttgaggtctctatggtagacacccttttcgtggcaatagctgacaccatcaatcagctgctgaaagagcctccttccttcttgctccgagagttttcccttgatggcaatcctgttgaacagttcgcccccattgacaaactcaagcaccatgtaaatcttggttttgctagcagcaacctcgtgcaggcggacgacgttg

SEQ ID NO: 14323 - DNA, 527 bp, Setaria italica
  Peptide Sequence Number=SeqID_80297
aacccgtacaaaaccaagccggcccgcaccagcaagttgcctcttggtttggtttggaacaaaccaggaacccggaaaaccggaccatgaacagggttagttctgtggtgcttctctgtacccttgcggatgggcagcagtaggacgatcagctaccgaaggcaactccggctctggtttgctcggttgtggaaacatcggctggcccaaagcaactccggcaggcggcggcgactgctcgcctgtccgcttgctgtttggtgtgccgacggccgctgccgctgccaccggctgtcgttggagcatgatggaggacgtgacgccgagcgctgtggcagcgagggcgagcacgcccgcgccggcgaagatgccgtccttgaggtaggggcagaacggcgcggtctcccgcaccacgttggcgttccacgacgctccctctatgagcagcgcccacgcgatcaccgccgctatccatgagaagacggcgcagacgatgccgacgatccgcttggtctccgaagggatgg

SEQ ID NO: 14324 - DNA, 285 bp, Setaria italica
  Peptide Sequence Number=SeqID_80298
ctcgcctccgccgcatccgaccccaccaccgccccgctccgatctcctcctccgccgcgcggcggcggcggcgactcccccttcccgccgagcaccttccccgcggcagctgatccgccgccgcccgagcggttccttcccttcgttccctccctcgtggcctcgtcgctcccccaaccccacgcagggcgcgccgccgtggccgaagaaggggcgatccatggaccggtcgatcaacttccgcggcatcgccgggagcgccggcaacatcatgcagggcatggg

SEQ ID NO: 14325 - DNA, 616 bp, Setaria italica
  Peptide Sequence Number=SeqID_80299
gtcgtccagcagctgatggcaatccggaaactgtgattcatctaccgacaggaccagcttcacggtgttcatgtaactctggtagtgtaccgtcagggcatgtgggtgcccgtaggtgccgggggcgatgtagacgatggggttgccacagaacaagacctgctcggttggcccgaccatgttggagaaggacagcgtggtgtgcgtgaacatgccgtagcagagcgcggctgctgccttgatgccgaaaagtttgaggaccatgtcgccgctccagaaggtgaagacggactccatggagctcttcttcctgcgcgcgaccttggtggccctccgaacgtactcgatggggtcatcgtgcgtggccaggtgggaaaaggggaatcagcatgtagccgatcttgttccccatcgcgcgccgttgtccttgccggactccatcatgctcgccaatgtctgtatgccaggcgtcggccgtaagttgacaagaacagcggaccgcaccgtgatgctgttactgtcgctttcacctgttttacggaagtaataccgagacagcgcggcagatgttattccgaggagaacatcatttacagtacagctcatggcgttcttg

SEQ ID NO: 14326 - DNA, 345 bp, Setaria italica
  Peptide Sequence Number=SeqID_80300
gtggtctgcttcttctgtgatcttccagttattctttggctccgtggggaacttggggtgcaccagaacaaaaggcgggacgttgtaggtgtttgcatggcacacggagagaggcgacgatatcttgctgctccgagcccaagggaaggccacagccgtcgccgtcgcctgtttgcggggttgcaggggcatgccggagattcttcccgaaggcgccgccggccggctcaaaagggtgtagggactcaccattgacatcatctctgcttgatagaatgacagtgtgtttaattatctcctacttatggatggtatatctcgtttttattgttgctgctgctttgc

SEQ ID NO: 14327 - DNA, 2054 bp, Setaria italica
  Peptide Sequence Number=SeqID_80301
aggaggtgaggcgggaggtgaccaccggccgccagctcaccttcgaggagttcgagctctgcgtcggccgctccccgatcgtgcacgagctgatgaagcggacgacgaccgccgcgtcctcgtccgcctccgatcacgccgctcccgcgtccaagccccggaggaagcccgggggagggatggctgcgcggcatcaggcagctcgcgggcagtgtcgcgtacgggcgccgcagcaccgatgagggggagaaggagaaggacaagaaggagcgggaagcgcggcgcctgagctctgccaccgacgacagccttgatggcaccggctcgcgcaatgctgctggaagggtccgggtgcgccagtacgggaaggcgtgcaaggagctcaccgggatgttcatgacgcaggaattggctgcccactcgggctctgtgtggtgcatcaacttcagcctggatggacgatacctagcaactgctggagaggaccgtgtgatccatgtttgggaggtgtcagagggagagaggaagggtgagttgctcggggaagcttcagtgaccaaggagaatggtggtagctgcagcccgtttcttgcagttgttgggaatgattcaccagagattgctgcactgtcattgacctgcgctgatggaggatatgtggacaagaagaggaggccaaggaagcagagcaatcgaaagtctgtaggttctgatcatctagttgtgccagagtgcgtctttggtttcagagacaagccagtttgctcgctcctggggcatgccgctgacgtccttgatctgtcatggtccaaatctcagtacttgatctcatcatccatggacaaaaccgttaaactttgggacattactaccagtacctgtttgaaaacattctcacatacagactatgtgacttgcatccagttcaatcctgtagatgataacttcttcattagtggatcactggatgagaaagttcgcatctggaatgtccgagatcgtaagattgaggattggaatgatcttcatgagatggttaccgctgcttgttattcccctgatggacaggttgcactggtgggctctcacaagggaagctgtcatatatttgatacatctgagaaaaagcttcagtacaaaagtcagatagatttaagaattaggaaaaagaagtctggccagaagaagatcactggcttccagtttgctcctggaagctcctcggaagttctgatcacttctgcagattcgagaatacgagttgttaatggcgatgaattggttcacaagtttaaagggtttcgaaacacgagtagccaaatctcagcttctgtagctccaaatgggaaatatgtcgtctgtgccagtgaggattctcatgtctatgtgtggagacatgacaacagttcccacccgagcagaagtaggagtacagttgatgtaaccaactcatatgaacatttccactgccatggtgtgacggtggctatcacatggcctggttccgaagtccgaggctcgtttggatctcgtagcagcaggcacagtgattcagatggagcagtgaactctggccgagacgtccctgcagagaacactgagcacaattctgatgcagctgataacagatacaatgagagcccagtttgtgaaggtgtggcaagcagaagcaccagcaaacctccaggcgacggggcatccacatcctggcctgacgagaaattaccgtctgccaagagcagccccggtcactgctcctctgatctctgcattggagctatggacgttcagcgccggtccgcgtggggtttggtgattgtcacggctggacggggaggcgagatcagggttttccagaattttggtttcccagttcaagtgtaaagttagcgtgagattatgcagggttgtttggttctttactgtatagatatgggttagttcgtcgacagttttactgaaaagttttctctgtttccctgtctggttggatgctgattgtgctccaagaaccacactatcatatgattaacactatcactgttgatataaaa

SEQ ID NO: 14328 - DNA, 346 bp, Setaria italica
  Peptide Sequence Number=SeqID_80302
ggtgtactggtacatgtatgtggtgttcacaaagctaatagaaaagatgcagttacgagttcttgctagtagcgaaacctgtaagttttcatgtcacttgtgaattatcctgctcgcatattagaatggtataggaggatgatcttatggagttctaaacatagctttggtgttgcaattagcatttaggattacttgcagtactaatatgtctgttggatatgtgtagctttatgttaactgtgtttggaatttgatatgttaaagacattaagagaatgtagtaatttattagtctattggaaatgtcaactgcaattttacaagcttagagaatatacacttt

SEQ ID NO: 14329 - DNA, 1316 bp, Setaria italica
  Peptide Sequence Number=SeqID_80303
ttaagtaagaaatttacaaagggactttaatacaattaaccggaacaattataaggcgataaggaatttcagatgaatgagtttgtagtgcagctaggtcagtaaattaacacttaaatattacttcagtaaccaaatactgcatggcaacgccgcaagcttgggaagagtttgcaggattggagtactatttcgatacagttggagcttgctttgaaaagagagttcggtgaaaccagaaatgtcctgcaccatgagaacatgtgcatgagagtatcaaagcaacttcttatttggactcaggagcatgcgtactgggttgcctctcggtttctcacgttgggtttcgaacttgacctatattctccaggcgaatactgtatggtgtactggtacatgtatgtggtgttcacaaagctaatagaaaagatgcagttacgagttcttgctagtagcgaaacctcacgaagaaaagggaaaaagaagaaggatcattcaaaggactcagcacgggatacaacattttcatcgtcttgtttattgcttcaatgctatgttttgctgtctgaaggactctcaatgatgctagctgtcctcagaaatgaaagtaggtcattccaattaccaagtatctttaacactgaacaagagagattcatgcagcattttgatcttcttcagaaagctcgagtccctgagcacatttcctactacagttttaaggaatcttcttcccaggcaggcataatggatttggtgaaatacaacttcttcaaggaaactcggaagatcatcccctccctaaggggtagctttgcaagtgaaccagaaaagcttgcggagctccggcggatagagcaggtggctgagcacaacaggatagccctaaacattatcagccaagttgggccaggcgatccatctctgagggtctcgtttgagtttacacaccaccctcactttgcagtggcagttgtgaagaggtcatgattcaagtttggcatagacaatttgttaccccctctccatattgatagtgataggtaaaaattcgctccccaacattcctcatgttgctagcatgtatgtgttcattagttcttcagagcgcaacaatacatgctttaggctgtacaccatgcaacaattttgtagacgagataagaaaaatcaggtgccgggaaaaagccctcgcccctggccttactctataagcaagttttgataaattcgggtgactatacagattctgtgtaattcgagtgataatttgtcactggtacatttagttcaatggaagttttacttgtgcagtg

SEQ ID NO: 14330 - DNA, 258 bp, Setaria italica
  Peptide Sequence Number=SeqID_80304
tatttcggtccatatccattttcctttcttgttacaataaagaataatgccaattgaaagtagaacacattttaggtagattttacaccttagacactgactgttggtctggatgggtgctacaccttatcatttgatgtgtcatgttcttgtagtctgatattttcacacttcagacaatgctatatcctttgccaacttggggatgggggacagattaaggctgcctaactactgacttaatagcttcatgttcag

SEQ ID NO: 14331 - DNA, 1085 bp, Setaria italica
  Peptide Sequence Number=SeqID_80305
gtgcaagggagttgagaacaagaatcataggaacatgcaatttgcagtatgcagacgctgcccaactacataccaccggaagtgcttgccaagtaacatcccctttgaaacgaagaaaggtcccaatggctacatgcaaagggcgtgggatgagtgggagggaccagatggacatgttattcctcgtgatcgtattttgatctactgcacgaagcatgagatcataaaaaagttaggaactcccaagaggaatcacatcatctttccagatgtcaaaaaactccgtgtacccaaaaggcttgtagatccacctaatgaaaaaggtatacctgaggaagaagtgctcaagaacgcctcacctgaaccatctcaatctcccccggcagttgcaagtgatcagaatcagtgctcctgttctggtcccttcgactcatttgcaccagaatccttgtttaggcatccatatccaggaacttgtggttggcttggtgactgaccatctggcatccctcaccctcccttattaataaacctaacagtaatatgttctttgcaaagtgcatgtaaatgagtagcttgcgcatgcttcagactacctgttctttctgttggattagtttggaaagttagtgtgacatcttgtggaactagattgccataagctcaatgattgtgccgcaagctaaagatcctggttatgacttagaatcagaggttttcagatatttttataaatgctcatatgatggcaagactgtaatgtgtcatctttatttggcaagcctttcaagatacaaccctgtctacctgccaataatcactgtgctgtatgatcaatgagaaacatctgatcatatcctttctcaatgctcgttgacgatattgccttgctgttgtgtggtacaagctttaggctggaggagctatccctcagtctatcgcgaatttgatttctgattggtttactactttcctagaaatttaggatttacaatccagtgttactgcagctctggcaggtaagggctacggagaaaagaagttctcacatcagcagaaataggtggttgctgcagtagcgagaa

SEQ ID NO: 14332 - DNA, 479 bp, Setaria italica
  Peptide Sequence Number=SeqID_80306
taccgtcctagtctaccccgcgcgccatacacccgcgccattgcagcagcgcggcgagcgcgaggcgcgaggaggtggcgcaggcccgggacacggccggccagtgccgatcgaccaggaaggcgaggcgctcccggctgccgcacgccgccgtgtgggcccacgccaggatgtgcttctgggacagcacccacctccacgcctgcttccacagccccaaatccgccatggaagcccgcaagaatccggccggaatgctcaatccagagagcgcaagaaccccatctcccccccaatcgaattcaaaaaatcgaccacaagagccgcagcaacagcccgctggactcccggtagcaagaatcacctccccccaaaccaatcgaatagctccaagaagaggaataaccgccgcaactagctcaagaactcgccaagaaccaccgcaccctacgggggcggccagatgatacccgcgcaca

SEQ ID NO: 14333 - DNA, 2150 bp, Setaria italica
  misc_feature (2136)..(2150): n is a, c, g, or t
  Peptide Sequence Number=SeqID_80307
ccggcctcgatccgcagtcttgggcgggctcctcctcaattccttcccccacccctttgggttttcatccccaatccgcagcagagtctgtgcggcggggcggagaggagagcagagcagagcagagcagcgggggcggcggcgccgccgcgcggaggaaacgaaaggcaaccacgcacgccggcggcctggttgcgtgcgccgccgtggttcgtgggggatccggtcgtcgattcaaccactgcggagtagcagctagctaggagaatattttctcaagctccggtcttggggctgcatcggtcttcccgatgtcaggcccatcatctgcatgtgagggcacctacctgctgttccatgtcgagaccctgctctccggcggcgtccgcgcctccctctacaccgttgcgcttgcatactgcttcatcggcctgtctgcgatcaccgctcggttcttcaaatccatggagcagatcatgaagcactcccgggaggtggtcagcgtagacccgcacacgaacgcccccgttgtcaagcaagagaaggtgtggaactacacgattgcggacatcgccctccttgctttcggcaccagctttccacagatatccttggctacaatcgacgcaatccgtaatctgggccagctgacagcaggaggtctaggtccgggcactctcgtgggttctgctgcatttgatatgttcccaatccatgctgtctgtgtgattatgccaaaggcgggctctaagaagaagatcacagacttgggcgtttggctagttgagctgttctggtctttctgggcatacatttggctgtatgttatcttagaggtctggacacctaaagtaatcaccgtctgggaggccttgctgacagtcttgcagtatggattgcttctgcttcacgcatatgcacaagacaaacggtggccatatgtgtcgatccctttgtatggtgtcgatccctttggtgagaggtgacagacctgaagattgggttccagaagaaggcgcttcagttgattatgacaactgtaatgaaactagtgagattctccctggaagctctgataaggacattgcggatatattctctgggcattcctaccataatgcagagtatcataaagtccctgaaaatgatatggagtgctcatcaacaatgaataattttgtgaagaacacacgagaggacacatcctggcgttctctatggcggcaacaatttgtcgatgcttttatgttggagagccctgagtcaaggaagatggcatccgtctgcctgaggctcatcagaatattttggaacttgctcattgcaccctggaaactgttttttgcttttgtacccccatatcacatcgctcacggctgggttgcttttatatgctccctgattttcataagtggtattgcctatggtgttactaagcttacagatcaaataagttgtgtcacaggagtaagtccatatgttatagcattcacagcactagcagctggaacctcatggccagatctagttgcgagcaagatagctgccgagcgtcaagtcaccgcagactctgctatagccaacatcacttgcagtaactcggtgaacatatatgttggcattggcgttccatggttgatcgacacagtgtacaacttctttgtctaccgggaaccactgtacatagacaatgctgctggtctgagcttctcccttctagtcttcttcgcgacttcgtttggctgcatcactgttttggttctacgtcgcattataattggtgctgagcttggaggccctaggctgtgggcttggataacatcagtgtacttcatgatcctttggatagtttttgttgtgttttcctctctaagtttatggaactatacagcctgaaaaacaaaggtagtggattttcctttttatatttgatagtgttggttttcatatccgcacacagaaaacgcttatggcggcaaagtagtgtacttcgactagggattgtggatatatgtatttgatccatgtaatgattatttaatccatataatgtatatataggagagtatagtggaagtaattgtgctggaaagtaaaagaaaacagttgcacaattcttgaaaattctctaaaaannnnnnnnnnnnnnn

SEQ ID NO: 14334 - DNA, 326 bp, Setaria italica
  Peptide Sequence Number=SeqID_80308
gtcggagtcggaggcgaactcaccacaccggcggccggttagggttaggccgtgagcaaaaatggcggctaccagtcgccggcggagcctctccccgccagccaactgtaggccgcgcggctcccctccggctaaccataggcggagccgctccccccggccaccgcatcctcgccgtccttcccgccggatctgatctccgaggtcgcgaggcgcctcactagcctccaggacttcttcgccctccgcgccgcctgccgcacctaccgtacttcccgctgaccccatacaacctcgcctcccaagcgccgctcctcctcgtcccg

SEQ ID NO: 14335 - DNA, 261 bp, Setaria italica
  Peptide Sequence Number=SeqID_80309
ctttcttacatttggatcatgttcaacagaccgttgccatgcagttcttgtccagcaaggactacattaccatggatgttgcaggaaacaccctgtccagtaaggtataaactcctccaccaagaagaaatgcaccactgccaaaaaaatgttagttcaggacatatctggaagggggggaaggcaagtattagaagacggaatgattgataataatctcgacttcagataacatgtttttggaaatactgagacacgcaa

SEQ ID NO: 14336 - DNA, 234 bp, Setaria italica
  Peptide Sequence Number=SeqID_80310
gggttgtttttatctgcggttcacacccaccacaaagtcctcaagaaagataacaagacgatattctcacctgcaatactccagcaaaggaagctgcaataagaagaggtgcaacatagccggtcgtatatgtcaacaacaagcttcctccaacaattggatcctgaaagaaaaagctcaaacaatgggtttcaggaggaagaatgtaattatctactgtcttactaatacaag

SEQ ID NO: 14337 - DNA, 438 bp, Setaria italica
  Peptide Sequence Number=SeqID_80311
tttttgtatatttgaacatgataaaataatccaggaataaaattttaagtcagagtagacctccaggctctaatcatcgaggcccaaacagtctactaaggtcaagatgttttggttgtcccgagccacatggatgttgcaggaaacaccctgtccagtaaggtataaactcctccaccaagaagaaatgcaccactgattgggtttatccatgctgagtatcttctgaatgacagcaaactctgcaatactccagcaaaggaagctgcaataagaagaggtgcaacatagccggtcgtatatgtcaacaacaagcttcctccaacaattggatcctgaaagaaaaaagctcaaacaatggtttcaggaggaagaatgtaattatctactgttttaacttaaatactaaaagttacttacctaattagtaattaaaaa

SEQ ID NO: 14338 - DNA, 1218 bp, Setaria italica
  Peptide Sequence Number=SeqID_80312
catttaaccaggcacttaacagaaaacattcagataccagttagaagtagatacctgatgggtttatccatgctgagtatcttctgaatgacagcaaactctacagaaggcaattaacttaattattggggcacaaaagtagtataacaaatttggtctattgctgtggtgctattaattaagttttaagagcaattcaaagttcctatcttgttgggttgtttttatctgcagttcacacccaccacaaagtcctcaagaaaagataacaagacgatattctcaccctgcaatactccagcaaaggaagctgcaataagaagaggtgcaacatagccggtcgtatatgtcaacaacaagcttcctccaacaattggatctcttgaagtggccacatatcccagaagggtagctagaacaggtgtactgcaaggtgatgctgccaatgcaaatgtaagaccagcaagatatgcttgtacacttgaagggaggttagctgcagcagttcgtgggtcaaaatcactgaaaaacgagggaagttgcaactcaacaacctccagaagattcaatcccatgacaatggccaacccagaagcagccactgggagtccttgcccaacctgcccataagcctttccagcaaaagaggcagcaacaccaagaatagctaaggttgttgccagtcctaatgaaaatgctattgaatttccaacaacctcagcctggcctttcccagaaccgaatgcccctatatatcctagagtcaatggtagaacactgagtgtacaaggagacagactagttacaagtccagcgccaaaaatgactgctaagctagtgaaactgagagcagatagctgatcctgaacagcctcattagcctgctgcccagctgaaaacagcaaacctccaaaccaatctccaatgccaaggtcagccaagaggagtcctgatgatccgtgcataggatccaatatctcagtagcatttgcagcgccagcagcaaccagactgcccactgccacagaggtcagcagcatggggcaccgacgaaggagcgagcgcttctctgccgcctccgatttgagtccacgaaccacaggggaagaggaggtgccggaagcagcagaagcagcctgggctgggagacgaaggaggggtgagctgctcgctacggtcacgggacgcgcggccatggcggagagcatggtggtgggc

SEQ ID NO: 14339 - DNA, 1052 bp, Setaria italica
  Peptide Sequence Number=SeqID_80313
cgcctaggaatttatgtgtgagaatataatgtgggctcaaatacctgtctgttaacttaatatgcaatttctgttacaagcatgttggagtaagctacaattgtcaagaagttgaatgcgacggcctcacagccagctgaagtttcgcacagttgatatttgaacatgataaaatatccaggaataaaattttagcagagtagacctccaagctctaattatcgaggcccaaacagtctactaaggtcaagatgttttggttgtcccgagccactgtacataactatacacattgttagcataagttagctactttacttcttacatttggatcatgttcaacagaccgttgccatgcagttcttgtccagcaaggactacattaccatggatgttgcaggaaacaccctgtccagtaaggtataaactcctccaccaagaagaaatgcaccactgattgggtttatccatgctgagtatcttctgaatgacagcaaactctgcaatactccagcaaaggaagctgcaataagaagaggtgcaacatagccggtcgtatatgtcaacaacaagcttcctccaacaattggatctcttgaagtggccacatatcccagaagggtagctagaacaggtgtactgcaaggtgatgctgccaatgcaaatgtaagaccagcaagatatgcttgtacacttgaagggaggttagctgcagcagttcgctgagtcaaaattacaatagacgagggaagttgcaacttccccttccgatccaaaaaaatgttagttcaggacatatctggaagggggggaaggcaagtattagaagacggaatgattgataataatctcgacttcagataacatgtttttggaaataggtgagttcagtagtttgcagagccatcacatgcaagtgcatatgaaatctgaaagttgatgaaaacttgtcatatgtcataaggcttcagtttcagaatcatgactagaaaacacaagatacaaatggatattcaatccaacatttaaccaggcacttaacagaaaacatt

SEQ ID NO: 14340 - DNA, 540 bp, Setaria italica
  Peptide Sequence Number=SeqID_80314
cgtgtatttgcaatcaaatcatagaagatgaaacaataacaaattataatctcttgcttcggtattaattcgaagaagatcagacagtttaacacgtcggtttttcacactgggaacaaaggttaatactgactgaatacatagtgctgagttggtagaatcatgcaagggatcaaacgctcacggacggaacctatctgactataacgacgtcctcgtcatcttcctcgtcaaatatccttatcttaggggtcatctcaaggcagtagtcatatgaaccttcttcatcagcttcgacgccattgtcgccaacaggttcgcactttaccaccgccttgtcaggaatgacttcagcgccgatgttgtcgagcttcaccaccagtttgccaggaatgattttgacagtgtggctgctgaggtcatctttgtctccacggaaaaattggccgacgttgtggtcgacaccgtggagtttggcagaaggcttgtcaagcgcaaacctgtccacatcaatctcgaccttaaggagactcgttccaa

SEQ ID NO: 14341 - DNA, 248 bp, Setaria italica
  Peptide Sequence Number=SeqID_80315
ccggtggaggaggagcggcggcgcatgcacgcggtgctggtcgacgagctcgccgtccgcgacctagaagaggagaggacgcggctggagcgcgccgtgacggccagcctcgcccaccgcgggaagcttctcgcctggctgcacaagacgagcccggcgcctgatccgggagtggccgcgtccaccgcacgctgccgtacctcgagggctggagcgtgccgcgctccagcctcgccggcctcgtgcgg

SEQ ID NO: 14342 - DNA, 763 bp, Setaria italica
  Peptide Sequence Number=SeqID_80316
accgtcagtaaattggtgaagaaagcagaaccgttccttcagttgaaagaaaatagcaggagcaatcgtgttcagtcctccctcccaacaagaaagagcaaattcagctaaaaaataacaattttggcctgtctttgccaaagacattgttcttgccgaaggtgatttagtaatgattatggtatcaaccttttgatccttgtagggaggaggaggcgcaacagctgacaatcttctacgggggaaaagtggtcgtctttgacaagttcccctctaccaaggtcaaggacttgctgcagatcgtgaacgccggcggcgacagggccggcgacaccgctgcaccacagccttcacagaacagtctctctggtaattctacctccccctcttgcagttctgccacggcagggtagtgctacgactttggtaacttgttgacggattcatgaactttgttacgcaagcttgacggtgacagaagtgtttgggttttgctaacagacatgccgattgcgaggaggaattcactccataggttccttgagaagagaaagggcaggataactgcaaaggcgccataccaagtcaacagccctgttggtgtcgatgcgtccaagcaagcgactggagagaagaaatcttggctggggctgggccaagaagtggcagtgaagcaggagatctgagcttggctggacgtcaatcagtagagatctcagattcacggatggtgctcgtcgtagcttcgatcaggttaaggaaa

SEQ ID NO: 14343 - DNA, 1298 bp, Setaria italica
  Peptide Sequence Number=SeqID_80317
ccgcgagggatggaggaaagggtacgcgagaccttgtcggaggccgcccgcagtgaggtgaataggcggaggaagggaggacgaagcttggacgacgtcggcgggttgttgtttctggtgagctgagaggatgggagcggaaaagcaggaggagcagggcgccgacaccggcatggccggacgtgcgacgccggcgagggagaagtccagcttcgctgtcacgtgcagcctgctgagccagtacctcaaggacaagaagggcgggctgcagggccttggcggcctcggcatggcgccgccgccgccggacgcagctggagcgttccggccgccgaccaccatgaacttgctgtcggcgctcgacgcgccggcggccgaggagccaaacgacgcggcgaaggccacgacggaggaggcgaaagagcatgatcaacagaccggcgaaaacccaagggaggaggaggcgcaacagctgacaatcttctacgggggaaaagtggtcgtctttgacaagttcccctctaccaaggtcaaggacttgctgcagatcgtgaacgccggcggcgacagggccggcgacaccgctgcaccacagccttcacagaacagtctctctgacatgccgattgcgaggaggaattcactccataggttccttgagaagagaaagggcaggataactgcaaaggcgccataccaagtcaacagccctgttggtgtcgatgcgtccaagcaagcgactggagagaagaaatcttggctggggctgggccaagaagtggcagtgaagcaggagatctgagcttggctggacgtcaatcagtagagatctcagattcacggatggtgctcgtcgtagcttcgatcaggttaagggaaaagaataatttaccgtcggttactgctagtgaagtgaagttaggaatattgttcagctggtggtgatcctacttgcccgccggcttacatgcatagagccataggccccctcgttcgtttgcaagattattgtttgctgctggagctgatatgctcacagcagtttcgctgtttcggtctgtgactgtgaccgtgaccgtgttatgttgcaacggatggttgcctagctcgttatatgttacggaacgttcggcagtgcacgttccttcccatttctcgacattccgtttgtgctctcatgtagtagtagtatgtttgcgctggatcctccgtcgtggaggagacttgtatgctcagtggaagatatttggaccatttaattttatgaatgaacatgtagtatgagtagtaaaaaaaaa

SEQ ID NO: 14344 - DNA, 384 bp, Setaria italica
  Peptide Sequence Number=SeqID_80318
ctttgatcttgtatcctatttcaagtatgttaaatatgtaaagcagtgagaaagcatgcacataaaatcaactggtaaagaaatgtagcacttgaactctgaaaccaggttaaagcaaggtgactgagtagaaccttcttctctgtttctagatattcctcttcaagggatttacgcggatttgtcttctcagatgtttcatcatcctcatgttcttttgcctcttcccttgaatgctgaaagatgatgttttgtcaacttcagaaaatcactcacacatttctccagctcgtcacatgttttcttttccttctgttcgttgtatgaggactggagcttccatgagtcctcaaggaaactgatccagatcttgactatattgga

SEQ ID NO: 14345 - DNA, 2151 bp, Setaria italica
  misc_feature (24)..(24): n is a, c, g, or t
  Peptide Sequence Number=SeqID_80319
acgttttttttttagttttttttntttttttttttgtcaaatgttcaaatgtctgatttctggatttacagctgttacaacagtgttcagtgtacacgcaaaataaaacatattcatggcaaggacaaacaaatagcaaatgccttgcccaggttacacagtttagcccgcatctcctaaaacaggagaaactgacagtgcgacaatacaatcaaacagcattatatacacatcaaccagtgcatttttctgagaaataatacatgtcagtgaagcaaactgtaaccgaattgctttctgttggtcgattcatgatgtcaactcttcagatcctcttcgagttcgtcaaactcccacccgctgatctcctcacctgagtactctttgtcctctttcccgagctctgaccccagggttgcaagctctgcgtcagaatcgaaatgctgctcgggtttcatgggagatttgggtgagtcaacatgtgcagctttcggggtagcaggcgcctgaagaggtgaaggactcagtttggatccctcaacaggtagtggcttcgctttctcagattctatgcttagtgttggcctttctatagactcgaatgattccctcaatttctcaatttcatcaactaaattcttcacctctgggtcatctctcctcgaattagccccttgctcggaataaaacaacctctttatgtgatcaacgatgctgaaagcaattataatcttcttctctgtttctagatattcctcttcaagggatttacgcggatttgtcttctcagatgtttcatcatcctcatgttcttttgcctcttcccttgagtttaagacagccaagttatcaacatatgttttgatactctcgatcaatgggtttaggacttccttgaatgctgaaagatgatgttttgtcaacttcagaaaatcactcacacatttctccagctcgtcacatgttttcttttccttctgttcgttgtatgaggactggagcttccatgagtcctcaaggaaactgatccagatcttgactatattggattccacattacacaaggcgatggattttgagaggtcgtcctcctttttttcaagctaaatatgatttgattgtttgcttcatcaaattggtccctctcttccctagtttgcttgagccgaccagtagcagcatttagtgatatattgacctttttcagctgtgcctcaagctcatctctttgcttctctaattcagtaatctcgtcaagcaattccttttcagcagcactgacttcattctcttttttcacacgaaagttgagagcatcttctttctgacgcctgtgctccaaaatacgttgttctgctttggaggatgaacttgccagggaatctgccaagacctttagtttatccaccttctgagaatgaatctccagggaatctccaggagtaattgatttcttcttcagtagaagttcttcaactctagagcataaccggacttcactaagtgcttctttgaaagcctcaagatttgccacagcaatcttctctgatgttttaacttgatcttcaggtgattgagctcgtgacttctgcttctcatctagctttctctgcaactctagggtttcagcatctatcctcacaatgtcagcatttctctttagtccagaaatgatgctttgggcatattcaagtagttcttcacgcttcaccaggacttcatctttgtattctgaaaatgccttggccaagtcttgtacattgctcatgatttccttgttcacttctttcccaccagtaagacatatgccgaatatttccaaaagcagtgaaacttcctcctcagaaggagcttcaagaatcatggacagtgtaataccttcaagtgcttggctgtacaagaatacatcacggaagttcataggtgctccgtcaatatcagcatcatagaacaaaaccattggtgctttagaagtgtccgtttcaccagaaggatcatgatcttcagaagccttcagatccgaacctccaagttcagcatcaacatctagcaatgctcccaaccaacgttttaacaattcaactctttcacccccacggcatgaaactgctgcctcttccaatcgtgctactgttttcttgaaacttttgt

SEQ ID NO: 14346 - DNA, 935 bp, Setaria italica
  Peptide Sequence Number=SeqID_80320
taagatagaagagatgggccagctactggaactgagggtgctgcgtattgtcttcaacaattggaacaacaatttggtggagtacctaaggaagctgcaaaagattagcaatctatacattgaggtcatcgatggtcgatgcagcattggtggattggatgcctgggttgcccctcaacatctttgtagattgaatactgtacggagctgctggttctcagcacttccagcttggatgaatagatcagtgcttccgaacctctcctttctatggatcgccgtgagggagctgcagctaaaggatctcgagatcctcgggaggttgccagctcttcgctctctagaactggaggtggaccatgcgaaccttggaatacatgggagattcgatgttggtgctggcttgttcccgtgccttgtacactgcaagttttggggatttgtagagcctgtcgtatttcggcaaggagctatgccgaggatcagagagctttatctcgagctgttctttatgtgggaagcaaaagaaaccaccaccagcgatggcggtctcgacatgggcataaggaacctaccattgctgcaggatgtgttcatcgagttgcgatctgaagtggccagcactgaggaggtggaacatgtaaaggctacactgaggcgtgcagctgaatttcatcccaatcatccccgccttactatactctgatgaagtcgataagcaggtgaagatgcagactacatccagtgctcaattgccacatgcagctgaactacatcttggtgaaccttgacactaaaagattcagattgataatggacgtgagaaaatatttttcattatcgtcaatcgccaacattgcaagaattatgatgctcgctgatagacagttcaagcaaaactgaccctggttgatgaattctgcacagacagaacg

SEQ ID NO: 14347 - DNA, 1868 bp, Setaria italica
  Peptide Sequence Number=SeqID_80321
ttgttgggaaaaccctcgcctcttcgcttctcccctccccactgatcgacggaggcccgccgccatggcgagcgacgaagaggacgagtgcggctacttctacgacgaggacgatgccgaggaggacgccgccgccggcctcggaggagggcgccgcgccgccgccggagccgccgcgccgactactgggccattacacaagagtcccttcccactgcacagaaacaagacctgtgtacagtgatgaacttgctcaatgtaaaacaacatcaagcacgagctctcctcatccaccaccggtggaagatggatggaatctatgattgcttagataagggccgagagcgcatgctcagagatgcaggtattgtgctgcaggagaatactattatggcagcagctggttcaacaccatggagaattgtgcactgcaatgtgtgttttgaggacattgccgtgggtgtagtcttgaccatggactgtgggcattgcttctgcaatgattgttggacgcagcatttctatgccgccgtagaaagcggcaaaaagcagattcggtgcatggaggtgaagtgcccggccttctgtgatgaggaccacgtgcgacgtctccttggccagaaataccccgaaatggccaagcggttcaatcgcttcctgctcgagtcctaccttgaggataacgactctgtgaagtggtgccccagcgccccaaattgtggccgtgcaatccgtgtgggtgctggtgagcgctactgtgaggtggagtgcccctgtggcttaagcttctgctttaactgcatggcactggctcattcaccttgcccgtgcaccatatgggagaaatggaacgccaagcgttcagagggagagagcatcaaatggatcctcgctaacaccaagagctgccccaaatgctttaaggccattgagaagaacggtggctgcaaccttgtccgctgcaattgcggccagtgtatgtgttggctctgcggtggagggaccggcgtggagcacacgtggaccagcatcgcgggccacagctgcaaccgttacaaggaggattcccgcgggaagaccgcggataccagcagggagcagatgcagcgttacaagcactactacgaccggttcaagatccacggcgactcgtgcaacacggagaagcagaagctggggccaaccctgaaggagcgggtgaggctgctggaggcggacctccagcgtccgctgacgatccgcgacggggactggctgatccgggcgcaccggcgcctgctggtgtcgaggcaggtgctgtcgcggtcgtacgtgttcgcctactgcatgttcggcggcgacctgcggatgcagccacacgggcgggcgggcctgggcgtggcgcgcaacctgttcgaggaccagcaggagcagctggagcagcacgtggagcgcctgtcggcgctgcttgcgggcgcggacgtggcggcgatgcccgaggcggagatcgtgcaggcgaagcagaaggccgtcacgctcgtcaagaccgtggagaggctgtgcggggagatgtacaagtgcatccaggacgagctgctgacgctgctcgtggagcccatgaccatcgcggcgtaccggccggacggccccgacaaggccgaggagctcgcggcgtgattggggtggcgcatccccttggcttgcgccacgttctgccgtcgccggccgaccggtccagtgcggcatagcggcagtagacgctcatgtagcgtatataaatgatttagggcgggttaacttaggatgcctgacagtactgaggttaaaaaaaaagggtctgaccatagcagagttatccatctatcaggtatattctcgggtgtctagtt

SEQ ID NO: 14348 - DNA, 317 bp, Setaria italica
  Peptide Sequence Number=SeqID_80322
cacgcttcgtgcttcatccagtcgaaccgaggaaacaatggcgctcgccgccccttcttccctccgccgcctcccggcgcggtctccgtccgcggcctccctcctgcgctcgcgccctctgcgcgagccccgtctccgtctccgccagcccctcgtcgccgccgcggcggcggccacggccccgctcgctgcttcatcctcccccgcggacacggagcggaggaagcacgagctgctgcgcttggttcaggaaacgcggcgcgggttcgcggcggggcccgaccagcgtgccgccatcgaggaggccatcgtgggcg

SEQ ID NO: 14349 - DNA, 378 bp, Setaria italica
  Peptide Sequence Number=SeqID_80323
cactagtcagtgaccctacaagttagacaaacaataggcatagttatgcaaagtcactttacagtcccaaaagcagcagaagagatagctaggatctgatgatgcacaagaactatataactgtaacttgctgtaactgcaagcctagcaccaggtaacacctcaaacaaaactaaacacttaatactcagtgatcgtagagcaagcaacactgacaaactcagcaaaactttgttatgaatagagaataaaaactgtcatcaatcaactagcaatgacaaactcagaaaattgacagctagaatctgatgcataagatggcagtttctaacagaaaaaaaaccggtgaaattttctcgaacacgcaggagagttgtg

SEQ ID NO: 14350 - DNA, 246 bp, Setaria italica
  Peptide Sequence Number=SeqID_80324
cctatcccctgtgtgccttgcctactgttgcgtgtctcaggtccttgggggtcagatgatactcctccctcttcttcgtgtcgcttgatgccttacttcccagccatgaaacggctttccggagcctgtgagagaaagaactgcgcttctcgaggtcgggtcttttaccgatgttgatgtcattctggagagtgacgttgtatccagtagtgttgcagagggtgatagttacttttaaggttttag

SEQ ID NO: 14351 - DNA, 374 bp, Setaria italica
  Peptide Sequence Number=SeqID_80325
cctatcgatgaatgtatttgaaaccagctctccaccattgttaaatacaccaccactttcactgacccaagcagaagtccatgttccatgcctttggatggtaagttgcatgtctctataagtatcttcagcacgatctaggtactttggatccaagatcttccttataagatgaacatcatcccctccaccaagattatatacatggtgagtcaaggcattaacaacaccatggcctgaagtctgaagtagctgagaataatacaaaagtgttctgccggcagactctcatcggtggcaactacggtctgcttgacacacaaactttttctgccaaatcctgattactacagtgctctattatggcatcggct

SEQ ID NO: 14352 - DNA, 236 bp, Setaria italica
  Peptide Sequence Number=SeqID_80326
caacaaaaatctttatttcaagagtaagcttaagaacaagccttagcctcaaactcgggtaaaactatgaaggcgattgatgttggtgctaggtacactggcgaatcaacggcagcaagcactggattcatagctggaacactgccatcatctcccagttccaactggacgccgttgagcagcattgtcttgctcaacggcgtccagttggaactggattcatagctggaacactg

SEQ ID NO: 14353 - DNA, 1998 bp, Setaria italica
  Peptide Sequence Number=SeqID_80327
gcaagcaaaaaaaatttcaagagtaagcttaagaacaagccttagcctcaaactcgggtaaaactatgaaggcgattgatgttggtgctaggtacactggcgaatcaacggcagcaagcactggattcatagctggaacactgccatcatctcccagttccaactggacgccgttgagcagcattgtcttgctctggacatccccgtccttgggggtcagatgatactcctccctcttcttcgtgtcgcttgatgccttacttcccagccatgaaacggctttccggagcctgtgagagaaagaactgcgcttctcgaggtcgggtcttttaccgatgttgatgtcattctggagagtgacgttgtatccagtagtgttgcttaggttgatcaagagaagagtgatgccttgctgttgtcttctacaatgagcataagcacgcaacctacgtggtgcaatgctatcaattgaaagaactccattgcccattagccgatgccataatagagcactgtagtaatcaggatttggcagaaaagtttgtgtgtcaagcagaccgtagttgccaccgatgagagtctgccggcagaacacttttgtattatacttagatgccattccaagctgatctagataccagatgctgttgatgaatgtatttgaaaccagcgggccaccattgttaaatacaccaccactttcactgacccaagcagaagtccatgttccatgcctttggatggtaagttgcatgtctctataagtatcttcagcacgatctaggtactttggatccaagatcttccttataagatgaacatcatcccctccaccaagattatatacatggtgagtcaaggcattaacaacaccatggcctgaagtctgaagtagctgagaataccactgttgatcaaaaaatcctccaggggctaacaggagtggctgggacagtggtgccttatacaattgctgaaggatggatttaaattcaattacatcctttccgtaaagtttagcatcaacttttgctccgattccatgcccactcagctcattgccgaattcccatgagccaactgggtatccctttgagattgtgtattttacaaaatcatatgcgtttgtggagttccatttgcctgcccagatggaacgtctaacgttgtacctcccgtagagtgcattcacaccaaatgtcacaattgctcctgttttctggaataaatcattcagtttgtcccacctatccatactaaggcaaccaactgagaaaccaaacaagccattggacatatttctgaacggggtgcatggactttctgctcccacatcataaacaactctgtcttgcaacgagcctcccaacctaatcctcaaattgtcaaatgcttgaatagcttgagccagaaatgggtgatccaaatccaaattcagaatcgaagactggccccatggacactgattgtagttgcacttctccggcggccaccagtcaattgtagcacagacgtagctctcatccgtctcagcaatcctagtcgagcctttaactataaccgtcgcctcctccggctgctgagccgaagcccaacgaggagcagcatgcagacagatgagcgcaagcaggagcaggagcctcacctccatgtttcgtctcctacctttaccgagcaaaacctcgcatctgccggagaaggacgcgcagatttatcgaggtaagtgtaccctccgacgccgaccgcgccgacgaaacgctcctcctcgctcccggagtcccggccccgggaaagcggcgtgtgggtgggagaccccggaagttccgccgcggatccgggatgccggaggcggactgggagctcaggccgccgatcctcgggctccaaccaacgccagatgagctgccttttgggatgctactgctacgcggcagcagagccgagcgcccgggcgtcggcgcgtcgcaggctgctggtggcttcgcgcacggagcaacg

SEQ ID NO: 14354 - DNA, 753 bp, Setaria italica
  Peptide Sequence Number=SeqID_80328
ggcggtgggtacggcccgatcggcggcggcggcaacggcggcggggtagggccgattggcggtggcagcggtgggatcggacccatcggaggcggcagcggcggcggcatcgtacccatcggcggcggcagcggtggtgggtacggccccatcggtggtggaggcagcggcggcggcggcagcggcaaagacggcacgagcgggtggtacggccactgcccgacgaacgcgctgaagctgggcgtgtgcgccaacgtcctggacctgatcaaggcgaaggccggcgtccccgtcgacgagaagtgctgcccgctgctgaacgggctggtggagctggacgccgccgtgtgcctgtgcaccgccatcaaggccaacgtgctggggctgaacctcaacatccccgtcaacctcagcctcgtcctcaacttctgcggcaagggcgtccccacgggcttcaagtgcgcctaacgaccatgcatgctcatgcgtgcgcacgtcgtagaatccaagtgcaaaagcacgcgttagcacgtgacaaatttgtctgcgtgccaacgtacctgcatgagggattggtaataagcgtgtcattgtcattgctaagttgtcaatgcattgttagtttcgtttcagtttcagctagcattattaagttgtcagtgtagcatgtagtgtctttgcatttcagattcggagggtacatggtgtccaggtaaagttcatggttacttgtacttctccgtttcgtatttg

SEQ ID NO: 14355 - DNA, 639 bp, Setaria italica
  Peptide Sequence Number=SeqID_80329
taccctcggagtatctttgggttctgccacacagatttccatgtttgtggtaccattgagtgtccttgtggcttggatcatgggagtcccaatggatcttgatttcaacttgcttgagactggttgtttgtttcttgctatattagtgaccacctttaccctccaggacggatcatcgcattatctgaaggggctgctgcttctgttttgctacatcgtcatcggcatatgcttttttgttttgaggcagcgtggaagtggcggcaacgacggtgtggatctgggcataggaagcaaaacatggaggatttaggggtgcctgagctgacaggttggactgcatttcccattgagttgtttcggagttaatggtgtggccttcatatgcagttttgcatggagcactggaggagggcctgggtgttaagtctgactgaagtaggctacttactacatgggtatgaaagaaagatgctgcttttcatgcagctgggctatgcagaaaaaagaagcaggacatcgcaaaagcagttaagcaaatcattcggtacatatattatagctgaagtcgagatatgttgtagagtcaagtgtaaattattgctgttgttccaaccaaggcaaggtgtcgttctttga

SEQ ID NO: 14356 - DNA, 1835 bp, Setaria italica
  Peptide Sequence Number=SeqID_80330
ccttgggccgtcggccgggaggagcacaggtggcgcgtcggaatggactccgccgccgccgccgcggggctcctcgagcccggcgccaaggagctggccgcgcgcagcctcggccgcaccgcccacaacatgtcctcctcctcgctccgcaagaagtccgatctcgccctcctccgcaaggtcccctgcgcgtcgctccgccggctgctcgacaacctccagcaggtcctgctcgccaccaagctcgtcctcctctttcccgccgtcatcctcgcgctcgccgcgcgcttcttccacttcggccaggagtggatatttgtccttagcttaattggtctaattcctcttgctgagcgactaagctttctgacggagcaggttgcattttacacgggacctactgtgggtggactattgaatgcaacatttggaaatgtaacagaggtcatcatcgcaatctttgccctgtatgaaggcaaggtactggtggtgaaatgctccctgctcggctccatcttgtccaacttgttgcttgtcctcggaacttcccttttcttcggtggcctggctaaccttggaaaagagcagccttatgacagaatgcaagcagatgtcagcacaggacttctgattcttggtgcactatgccactctctgccactgatgctgaggtattctgtgagttccggggagcatatgatggtctcttgggatgcaggattggagctgtcccgagcatgcagtgttgtcatgctcctggcctatgtagcctaccttttcttccaactgaagacccatcgccaactctttgagccccaagaggtcgaagatgatggtgatgattcggtctcccaagatgaggcggtcctgggattttctagtgcaataatttggctcggagtcatgactctgatgacagcggtattgtcagaatttgttgtgagcacaattgaggcggcatcaaaatcatgggaactatctgtgagtttcattagcatcatcttgatcccaatagttggtaatgcggcagagcatgctggtgcggtcatatttgcttttaagaacaagctggacatcaccctcggagtatctttgggttctgccacacagatttccatgtttgtggtaccattgagtgtccttgtggcttggatcatgggagtcccaatggatcttgatttcaacttgcttgagactggttgtttgtttcttgctatattagtgaccacctttaccctccaggacggatcatcgcattatctgaaggggctgctgcttctgttttgctacatcgtcatcggcatatgcttttttgttttgaggcatcgtggaagtggcggcaacgacggtgtggatctgggcataggaagcaaaacatggaggatttaggggtgcctgagctgacagttttgcatggagcactggaggagggcctgggtgttaagtctgactgaagtaggctacttactacatgggtatgaaagaaagatgctgcttttcatgcagctgggctatgcagaaaaaagaagcaggacatcgcaaaagcagttaagcaaatcattcggtacatatattatagctgaagtcgagatatgttgtagagtcaagtgtaaattattgctgttgttccaaccaaggcaaggtgtcgttctttgaattaattaacttgttattaggacttgagctgagaggcaagcaaacaaactgggtgtaccaagtaagttgtccgtgaaaagaagtggcatgtatgtaatgctatctgaagaggagcatgcagtttaatttggatgtgcagaactgtgttagtaaaaaaccaaaaaaactaaaacgaaacg

SEQ ID NO: 14357 - DNA, 992 bp, Setaria italica
  misc_feature (949)..(992): n is a, c, g, or t
  Peptide Sequence Number=SeqID_80331
agctatgctggtatcgcacctaaaaaatggtaccctagcaagaacagttacattgatggatctcatgaaattgaggacagcgctgaggcatctgatgcggatttaggttctgcagaagaagtgtgtgagtttatggttcctgcagatgagagccaaattatctgtgcgctatgtggggagccatttgatgacatctattctgttgagaagggggactggatgtacaaggatgcagtgtttttggattaccccaagagagaaggcagctgtggaagcaatgttgagggcgaagagcatgtgcccatagtccatgtaagatgtatgccaagaggctcaaacaacggcatggaggtggactagcatgattgttgtgcacagcagctgaagcagcagctaaactcttctgggggcctcgagatggagggagcctgaaggggtttgaatgaggaaactgtgcagcggcaggcggtctgttgcaacggggctgatggtatacatgtagacggattagtgggaaggtggcaggcagtatcaaaaacaaaattttggtgaagaactgaaatcttccatggatttcctgtagaaatccacatgagtcaaagaataaggccctgggggagcgcgctttggccatatgaatcagaataatcaaaagcttaatatttttggactccatctgaggagaaggatctttctgttgatagaaagaaaagctttgtaggagcatgtcaaaagaatgtattgtttatttacgaggaaaaaggggaagatgccccgcatgtaagtctatactgtgtttctgacgacatactcgctctcgatcttttgagaagtagggatttttgtacttgagaagaaaccgatagtaatagaacatgataggcagggctaaacaggttagttgtgatcgatttgctgtcaacctgtcatcgtaatttttttaacccannnnnnnnnnnnnnnnnnnnnnnnnnnnnnnnnnnnnnnnnnnn

SEQ ID NO: 14358 - DNA, 1336 bp, Setaria italica
  Peptide Sequence Number=SeqID_80332
ctggagtgggtgtcccgtatcatggacgactcgctcgccgagctcccgccgccgccgaagctacctgcggcgcccctagcagcagcagcgcgccggccgccgctggaacgcgcggtgccagcgccggcggcgccggcccctatgcggagcccgacgatatgcgcgctgtcgacggaggcgctggtgcccgtgaaggcgcggcgcagcaagcgctcccgcgcctccgtgtggtcgctgtccggcggcgcgcccccctcggactcgacgtcgtcgtcgtccacgaccacgacgtcgtcctgctcctcgtccgcgtcgttctcgtcgttcctcttcctgccggcggagtcgccgcccccgttctgggccgcgcacctcctcggcgaggcgccgccgcgcggctccaagaagtccaagcacgggaagcacggcaagaacaacggcaagcccaagaagcgcggccgcaagccgaagcaccacccggcggcgtcccatttcgcgggcggcgccgcggcctcaccgccggtccccggcgaccgccgctgcagccactgcggcgtgcagaagacgccacagtggcgcgcgggccccgagggcgccaagacgctgtgcaacgcgtgcggggtccgctacaagtccgggcggctcctccctgagtaccggcctgcgtgcagccccacgttcgtgagcagcatccactccaactcccaccgcaaggtgcttgagatgcggcgcaagaaagagggcgtcgtcctcatccccggcccggccccgctcccggccgccgcgccggccgtcgcgtcgttctaagccggcgctgtacatttttcaccccctccccggtcgaagtattagcatgttgtaccgtacctggattttttcctgttctttcgctttcactatttagtttggctgtactactagctagaactcagaattgtagaagctttattaggtcgaattaggtgtagggattaagatttccatggttttagtattagctaggtttgttagggtatgaatggccatagtacttgtgccagtagtagttgttgagaactcggtgagggtcttcacaagaaaagctgtgcttggcctggcctatgaggattgaggtttggggcgctgctgagtgctgagaaagggaggcagaagtgacaagaaagttaggcgtgccttggcgcggaacaaggaactgactgccttgttgtaatcgaggggggtcagacgaatactagagtgcttggcgtgccgtgccacgtctcgcctgcatcatcacttcaccgttgctggtgcattgtctttctgtcgatagcccattcgatgcttgtattgcact

SEQ ID NO: 14359 - DNA, 290 bp, Setaria italica
  Peptide Sequence Number=SeqID_80333
gggccatggccccctccctcctccatcgccccctcttcctcttcctgctgcggaatcctccctacggcatggcggctagggtttcctagtgtcgagccgttctcctcctgctgtcggagccaaggccaagcgtggcgaagaaggcaacgtcgagcatcaccagggccaggtgcagtgaagaaggtgacgccgaggagctccagggccgggcgtggcaaagaaggcgacgtcgaggatctctagggccagcacccccgtctacctcgccaccgtcctcgagtacctcgacg

SEQ ID NO: 14360 - DNA, 1467 bp, Setaria italica
  misc_feature (1)..(44): n is a, c, g, or t
  Peptide Sequence Number=SeqID_80334
nnnnnnnnnnnnnnnnnnnnnnnnnnnnnnnnnnnnnnnnnnnnggtttacacatcaccattggctcaattcaggcttcagataatgttaccaggtccgacagcttcaatactctagctttcatggggatgaatgataaccagcggctgaactgtggcagcattctcactgattagcaaatgtgaaaatagagccacaatgtgctaagggatatatgtttatcacgacctattcaagaggcatgaagataaacatgctcacatcacagacagggcttccacctttcagtgacaaaggttacatatggatttgttcttagcggctagtatggctgatgtcggcttttggtttcttttgcagcttcaaacctaatgaagtagagatccaagacttgtttgtctctgcaatttcgtcagagcgccagcaacacaatcggccatcttcaccgcctgtccatccaaagatgcccctattttgcccaaggctttcatgggttcctgcagcagggtatacggtcctaacaactcctgtatggcctccttcaaggatagcttccacagaacctattgctcctgcaggatcatttcttagagggaagtaacccagagtccctgcgcttgtgccgccaatcaaccatagctggtcatcaggcagagagtagtgacaatcaacaaaataatcaacatggtcaaggttccacttatcagtggccaaggaacgagcatcttccatattcaactctctagacccgtcattccagtcccaaacacttaatgtctcaatatgggtcaaacaccaaagcttctgatacatattcccaaaaaccccactttggcaacagacgtttccgcattcataacagatagcagatgattgtcctcatcaatgtcaccatcagtgtcaaaaacacatactaatccatccactgcggcggaaatgagtttactctgttgatttggtgcgaatttgacttgtgtcacatcatccatgtgggattcctctaagcatgcaacttgttttgaagttctccaatcccacaagagaacctgggcattagagccagcaacaagtaggttaccacttgatccaccaaaagagaaagtaaacatttcctgtgacgcacttcctcttagcagagatatctgcttaaagtttcttgtatcccacgctctgacagttccatcagaagaacaagaacagattacttgtggtgatgatggaactgagaaggagatttcatgaattgttccttcgtgtcctatacactccccccagatattgtccggttgctggagaataaaacttcagtgcatttgttgacaaggaaactgcgagtgttgagatctcctggcaagaagcaatttggaagacatagtcatctccaaagttggtctggatgctgttcttaaggccgagccgctcgaggtcacgcttccatcagggtttcgggacggggaatcgtgacgt

SEQ ID NO: 14361 - DNA, 512 bp, Setaria italica
  Peptide Sequence Number=SeqID_80335
tttttccactgtggaaatcattcattgaagaattatttcagcgtggccttgttaaagtagtttttgcaacggaaacccttgcagcggggattaacatgcctgctaggacagctgtgatttcttctctcagcaaaagaatagatgccgggcgccagctcctaacgcctaatgaactattccagatggcaggtcgtgctggaaggagagggatcgatacagttgggcatgctgttcttgttcagactccatatgaagggcctgaagagtgttgtgacattatctttgctggacttgagccacttgtctcacaattcactgcatcatatgggatggttttgaacctccttgccggttcaaaagttacccataatcagaaagaatcagatgatctgaaggtcaagcgctctggaagaactttagaagaagctcgaaagctagtggagcaaagctttgggaattatgttgggagcaatgtaatggttgctgccaaagaagagattgaaagaatacag

SEQ ID NO: 14362 - DNA, 335 bp, Setaria italica
  Peptide Sequence Number=SeqID_80336
tccagttgctttgcttctcaaaaacttccagaattagatcggtaaacagacttgaaatgaggttgcatgtttcttgggacccgtgaagctgggtatacatccacaaaacctggtttgttcattacattttcactgaacctactttctacccagctgggcaatctcaaggttcagctgattaacacgctcaagtttatcttcaggaagatgaatccctcccttttcaaagtcaatacgcaaggtagttgctgctcttctagcttcctccgtcagcaggacactttcaccctcagcttttagtatagcattgtataaagtagtgttggtattcaggt

SEQ ID NO: 14363 - DNA, 300 bp, Setaria italica
  Peptide Sequence Number=SeqID_80337
tgacgatggtaattgctaattttcacaccctctgttcgagcaaacatggaacgaaatccaatgcgaatatgcatggataggccgatctttttaccccgagcatcccgatgaatcatgtcatgcgcaggcaactagtgacagtgatctaaagacactgtgtgccatgcatgaaaagactagaccaaactatcaaactatctatgcatgttgacataaaaaatgatgtactaatttcccccccttttaatatctactccagtgtaatgctatataggacaatgtaaggccttgtttgggagg

SEQ ID NO: 14364 - DNA, 478 bp, Setaria italica
  Peptide Sequence Number=SeqID_80338
cgggaagtcgtcggccgcggcggggaaggcggcggacctggacatggagtggcggccggccaccgcgacgtggtacggcgacgccgagggcgacggcagcgacggcggcgcgtgcgggtacgggacgctggtggacgtggtgccgatgaaggcgcgggtggggtcggtgagccccgtgctgttcaaggacggcgagggctgcggcgcctgctacaaggtcaagtgcctcgaccacaacatctgctcgcgccgggcggtcacggtgatcgtcaccgacgagtgccccggcggggtctgcggcggcggacgcacgcacttcgacctcagcggcgccgcgttcggccgcctcgccgtcgccggcgccggcggccagctgcgcaaccggggcgagatcaacgtcgtgttccgcaggacggtgtgcaggtacgggggcaagaacatcgccttccacgtgaacgagggctccaccagcttctgg

SEQ ID NO: 14365 - DNA, 366 bp, Setaria italica
  Peptide Sequence Number=SeqID_80339
taatgctgaacatatgaaaagttaatggaagctgctaaatccaacgaagatatgttgaggaagacttctaatgaactagaactgaagcttaaatctagtgattatgagaaacagcaaatgctggaagaaatatctggtctgaatctgcaggtccagaagataatgaatcttcaagttatggaaaaggggtttgagaaaatgtcccacattaaagaagagaatcttggaatgcaggagattggaggagatgatcaggcagacattcagtccaaaattcagttgctggaaactaagattgcccctcaggcatcggactcttttgttgagctctgtacaacttattttcctccaacgcctctgcaagct

SEQ ID NO: 14366 - DNA, 367 bp, Setaria italica
  Peptide Sequence Number=SeqID_80340
atcacttaaagaaagcagcatcacttcaaaatgcttggacgaagtgcggcaagatatccttgtgctttccagcagcatagattcccatgtttcggctaataaggttcttcaaaggaatgtcattgagctagagagctgcaactctagttcagctttgcagctctctagctcagctttgcagctggaacaggaaaacatagagctgtcagaacggatatctggactggaagcacaattgacttacctgacaaatgagaaggaatcaagcgagctgcagatacatgactccaaagctcttatcgtcaatctcaaagataaagtagagtgccagcaatcagagatggaaagtcagaggctcgaatttaag

SEQ ID NO: 14367 - DNA, 605 bp, Setaria italica
  Peptide Sequence Number=SeqID_80341
atatgaaggagcggctactcaacatgagcttgcagtatgcagaagttgaggctcagagggaacgattagtgatggaacttaaagctacgaagaaagggcgatggttttagcgtgatggggaactatggcctgccgtaaccttgagactgacaacacaggtactgcgtttaattactacactgactgcgcacagtttcgagtgacacctcttaaaaagattgcatcgctcactggcacctcttttcacccatggcctgccgtaaccttgagactgacaacacagatggacaccatcaagccctgttatgtccgtgcggtaacaatgcgacattcgtgtcggattatcatgtgagaatggacgggtaagtgcagagccaaacgccatgtacactggacttggtagctggtgttggaggatgcgcaccaagacagtaaaggtctccgtgatagggtgaactgagcctgtgactgcccaccccttgaggatgcggcccctacactatgagctagcctgcttgctatgatatgatggtctcattttaacctattgatatttatttgtaatggcatgtccttttttttttccttatcttggtatatacacc

SEQ ID NO: 14368 - DNA, 1352 bp, Setaria italica
  Peptide Sequence Number=SeqID_80342
cccatcccccttctccacttccccattccccgaactcgacctcttcctgccccccgcgccaccactcaaccccttccccgccccgtccccctaccctttcctcctccgagacctcaccgaccgcgtcgccgccctcgagctcgccgtcgccgcgcgccgccccgagcccaccaccaggaagtgcacctacgtcaccgaggccggcggccgcaaggtcaagtggacctccatcgagaagccgcgcgcgggggaccggacgctcaagtgggaggccgagatcaagtcccccaacgacgacggattcgaccgcaagtggaagtgggaggccaagggcggatcctccaggaagatcaagtggggcgccgccgtcaagggcaagggctccctccagccttggtcccaagcctacacctgggaggaggacttcgccgccaccgacaccagcgacgaagaggacgagaagaaggccgacaggaacaagaccaagatcgccgacaagcacaagaagaacaaggaaggcaaggttgtcaacaaggcgaagaaatgccccgtcgccaccgtcaagatcgaggagattccagacgacaacgatgccggatgcgtcgccatcagaaaggcttttgctaagggcaatggcaagggaaagaagaaggagctgtccccggaggatgctgcattgctcatccagatgaactacagggctcaccttgctcaccgctcccaggtgctccgctgcctgcgtgatctggctgtggccaaagccaagctcaaggagatcaggtccctcttctataacatctcctacaggcgccgcatcgcgcatgaccatgaagagcgccagaggttctctgaaaagatcattgtactgctcatcaccgtggatgcacttgagggacctgactacatggtgaggactgcgaagaaatctatgctagaggagcttgaagcaatgcttgaggttgtggaccctcagtcaccagggaagcggaggtcgctgagccgcaggaagtttgatctcccagagggtggagcagtctccggtgagaaggcggatggtgtgaacaaggctgtcaggatcatcaatgagggcaagtgatgcagagtagaggcatcaccaccttgttaaccgcgggatatcatgcctgaatcctggtgaaagtttgtagcagcagcatatctatgtcttatcatctaggagaagtcgagacctgagagaactctgcgctttgttgagactttccattaccctcgagggatctacctctgcactttcttgtaactgtaatgttaatgtgtcactgtgaacctgtattatgttgctagacaatgaatttgagctttagaaaaaaaaa

SEQ ID NO: 14369 - DNA, 346 bp, Setaria italica
  Peptide Sequence Number=SeqID_80343
atttcaaggtacgtttagaacaaaaactttttctgcaccacgaatacagaggatgacattccacagcgcagatagatttcataagcatttacagatatatagaaaagtaaattaatacaaactttgccaaccgatgatcatcgccaatgaatttacagcataacttgaattactgggttgacaacaggtaacacaaaagtccaagcacaaaccatcttgttggagaggtctggccaacgaaatccattactgtctgttcacgatctcccggtagactaaatcgataaattcttgcatcagctccagtctacagcccagcattgtccagagacaaagtcagagatgc

SEQ ID NO: 14370 - DNA, 1620 bp, Setaria italica
  Peptide Sequence Number=SeqID_80344
ttttttttttttagacatgagctacactagtaaagtgaggtttttgtccaactcatatatagcagcgatctaggggcacaccgcacatggtcaaggtatcaaggtacgtttagaacaaaacttttctgcaccacgaatacagaggatgacattccacagcgcagatagatttcataagcatttacagatatatagaaaagtaaattaatacaaactttgccaaccgatgatcatcgccaatgaatttacagcataacttgaattactgggttgacaacaggtaacacaaaagtccaagcacaaaccatcttgttggagaggtctggccaacgaaatccattactgtctgttcacgatctcccggtagactaaatcgataaattcttcgctctccacaagtctcagtaatgcatctctgactttgtctctggacaatgctgggctgtagactggagctgatgcaagagatggcgatggatttggtggtggaaacggttggagcaatggagtcccatatggtggagaaggtgaagctgtaggtaatggaaaaggctggagcaagggagcactttgcggctgctgagaggtacgaggatgttgaggtggagcagttggtactgcagaattactgtgcaccattgttgtctgtaaagatgtcaatggtgagaaatgtgatgggtttacaaggcttgcggacctcactataggtccagtgccaccatgaacatcagcaggtatgccagaaattgatgaggcctgtgaaggaagcaaatgatgcaagcctggcgattgcgatgtaatggtactagtaggtgcgtgtgtagacaaaggaatagcaccaaaagattgatttggctgtcctgcaacacctacggaggaggtgctaccagcgttcgcagctgcactgaagaatgcagataagggatcctcttgaacttggttagtagatgatatgatatttgatgtttgcggttccagaggaccttcaaccaatgcgggtgctgcttccagctcttcaaattcactttgagcagagggaatcttcggctttggaggcaccttcgagaatgcattcagtatcctgctaaaaagatttgcaacttcatgacactcctgggagttgtaaaaccaaattccaataacttcttgtgcagcattgcggtacattatataaggaacttggagttggtattcaaaatctcccaagagatcttcaactagattgtctgtattccggcgattcatgactatgaactggaatctgggttgagcattcctcttgacgacgaagagcgacccctcgacatccttccggctccactggttgacgtcggtgtcgaagtcgtagagcgtgacgtgcgctgcggtgatgaggatgtcctcgacggaggggtcgaggcgctggagcacggtgaggttgagcgtccgcgtgccctcgccgtccacctgcaggttcggcgtcaccttcgccctcccgccgccgtgggccatgtgccgcgccgcgccgcgccgggtgagaggggaggggggcggggggggggcggggggggggggtggacgaggcgacgctccggtggcggattgcctagggtttgggattggatcggagggattgggagg

SEQ ID NO: 14371 - DNA, 1003 bp, Setaria italica
  misc_feature (1)..(48): n is a, c, g, or t
  Peptide Sequence Number=SeqID_80345
nnnnnnnnnnnnnnnnnnnnnnnnnnnnnnnnnnnnnnnnnnnnnnnngtttcaggaaatagcagtcacaattttaagagacgatgcatcagcatacagtagcctacgttggacatgatgtttgatgtggttttcattcgacgaaccacatggtccaaactttcacaggcaacggaaatggctcaaggattacatgaatccaaccgctaacactgaagcagcatcagattcccaagggagctgcgcagagagcatgcagagcactgggtgcagattggctgtgcccaaacaagtccagcgcccgtggggtctgatgatccgcttcgtagttcccttccttcacaccatcctcctctgctcccaggatcttgtccgtcaaggagaatccgaaaagcctgcagctgcttctcccgactcccctgtcgacgggcttagcagcagttgctggagctgaggcttcagttgtgttgaaaacctcgcttccatttccacttgcccttggctgctgtgtagatggccacctttcagcttctctccgcactgcaatgggcgcgtatcggctgccatttgcttcttcacggttggtcataccttctaactcaggttgtagtgccgtggtttgattaaccataagaacagaagagggtgaatgcacttctgttgctggcagattaaattgctggagaggatagccttgactaacagttgatctatgcacgtaatcgaacgagccaattctgccattctgtacgcgagcatctaaagcagctccaaggaaggaaggaaccgcctgagacatttcttgaccttgcaagacctctgagaatctgacagattcactgaagcctaggggctggtaagcaaacccattggcatttcggtgccggaacccactcattgcatcattcatcttgcagttccacacatcagcagagaatctcctttcacctaagtattgccatttgggggtatctgatgaatgagaccatgcaacaccatgagt

SEQ ID NO: 14372 - DNA, 732 bp, Setaria italica
  Peptide Sequence Number=SeqID_80346
gtgagtattagcaacaatgacacagacaccaatgattttgaggatgacgactatgatgatgatgatgggaagcacaccgtggcgcttggtcctcaggttcccctcaaggaccaccttgagctcgacaaggatgatgacagcctaaggaggtggaaagagcagctccttggagatgttgataccactaagcttggagagactgcagaaccagaggtgaccatattgaatttgaccatcctaagtccagagcgaccggatctggttctgccgatcccacttgtgctggatgacaaggggtacgcattcgcgctcaaggatgggagcacctacagtttccgcttctccttcactgtctccaacaacattgtgtctggtctcagatacacacacaacgtctggaagactggagtaagagtggaaaatcagaaggtgatgctggggacctacagtcctcagcaggagccttacacatacgaggccgaggaagatacaacaccaagcggcatctttgcaaggggttcatattctgcaaagctgaagttcgtggacgatgatgggaaagtctacctggacatgagctactgcttcgagatccgaaaggattggccagcctcggcctgaaactgagaaagagtgtgaaaacagggtttaggtggcatgtaacaggggatggatattggatagtcctgtgtcttgtgtacgattctcgctgagcgacggcgtggcccggca

SEQ ID NO: 14373 - DNA, 1194 bp, Setaria italica
  misc_feature (1120)..(1194): n is a, c, g, or t
  Peptide Sequence Number=SeqID_80347
cttagcaataatgagcttttacagtctctctatgatattcgccaacaatgggccccttcatacacgaaaaaggtattttatcccggaaccagatgccaacaacctgtgaaaatatagagaaggttattgagaagtatttttcttcgaagactgaattgcgggtggcggtttggcaactcggagaagctatttccagttcatttgaagctgaagttcaggcggattatttcacaatttttcaaatgccaccgttgagtactgcctcgccattagaaaaacaagggagttcaatattcactagcacaatatttggcatatttcaggggcaatttgctgagtcttttgggtaccacgcagagagactcgaggatgagacagtacacaagtaccgtgtcacaagatatgaaggcgatgaggagatacacactgtctctttcagtccagatcaaagtactgtgaattgtagctgctgcctgtttgagagctgtggtatgttgtgcaggcatgctctccgaatttttattatccaaggagtacgtgcccttccaaaagcatatatcttgaaacgttggacaaagcacgcaaaaaatataataacctctgataactatgttgatctgaggggagaccgtgaggatccctcaactgcaaggttcaatgatctctgctgtgatgcagtgaaatgtgcaaaagaaggttcaaaatctgctgaaatctatgcagtcgctaaagatgcactgcacaaggcttttgatgaggtagtacggtcatcaaagaactttcgagggcagcaaaatctgcaaagctgtacaacatcaataaaaaggccaattaagaagtttggtaaggccaaagattcctccggtaaaagcttaaagaggtcagcatctaaaagcccccttatggagagtgatgatattagatgacgaagtacctggaattagggaacagcatgatttttcatgccaccttgtatgtagcaccttgcaatctaataattactaattagattgtagctggctgcaggatttgactattagcagatctagtggctgtaagggtgatagtgaacccttgaacttgagagattaatgctcaagaaagttgtagaacagatacnnnnnnnnnnnnnnnnnnnnnnnnnnnnnnnnnnnnnnnnnnnnnnnnnnnnnnnnnnnnnnnnnnnnnnnnnnn

SEQ ID NO: 14374 - DNA, 344 bp, Setaria italica
  misc_feature (1)..(36): n is a, c, g, or t
  Peptide Sequence Number=SeqID_80348
nnnnnnnnnnnnnnnnnnnnnnnnnnnnnnnnnnnnacttagaaggaagcattcaccattccaagacttgacatgtacaagaaccatccatttccgcgaaaaatatcgccgacggccgccgccacggccaccggagcacgatgaggtgcagaaggaagacgggcacatgcttccctcccccgtcgctgcctgccgaatcagcaggattctccgtggctgccggccgaccggccggcggcttccgcccgcaagggacacggacatgaacgacaacgagaacagaggtgacgaaacgatggcgggacgggggttggttgctaccgtagggagtagggaacaggaag

SEQ ID NO: 14375 - DNA, 291 bp, Setaria italica
  Peptide Sequence Number=SeqID_80349
tttttaattttaatcttccttagaacttcttggtaggtttgatttatcgttggattaaacagatttgataaaaatgggattgtgtgactctccctaatgccttcttttgaactcaggttagtatagagaagataccggttttagttgaaactaatcactgctaagagaaaggaaagagaaatatctgacaggtgtcacaaaccataaacaaattaaacgagttattctttaccagtgtactcaacatttatggggaattttatctgatggtggatcacattgagcgtctta

SEQ ID NO: 14376 - DNA, 342 bp, Setaria italica
  Peptide Sequence Number=SeqID_80350
tgacacttgttggtgagcctggaccagcaggaaaagcacgctacatggccattttggcactggtagaggggcggttggaggggctcgaagcagatggagcaatcgagcacatccgggtcgatccgcacgctaatcccatcagcctccccgccaacaaccgtttccaccgcattccggccgctcccttcggccgtccccgccccgaccaccgcgcttccctccggctttccgccccgggccaccaagattcgaggcttcgggggttcccagccgccggcggcctccgctgggccgtcctcgcgctttctcttctcgcctccggaagcggcggccggagggtcg

SEQ ID NO: 14377 - DNA, 411 bp, Setaria italica
  Peptide Sequence Number=SeqID_80351
attcccatggatgatcctagatgcactatcctcaaagctcatcgcaagagtggattggctcctgccgatgctgagaatgggaagaaatgcaaagtcaagggtgtcaagcaatctgctgattctgcttgcgttgtgattcccgccatggtgttccagatctcagaggaaccattgcatgagttccgtggtcactctggtgacgtactggatctgtcatggtctaacaataagcatctattgtcagcatcaacagacaaaactgttcgcttgtgggaacttggatctgcaaactgtgtcactgtttttcatcacagcaactttgtgacttgtgtacagttcaatccagccaatgagagtcgattcatcagtggatcaatagatggcaaaatccgtgtatgggatattcttaaa

SEQ ID NO: 14378 - DNA, 468 bp, Setaria italica
  Peptide Sequence Number=SeqID_80352
aaaaggcccaaagcaacgctagcctgctcggccttgcaaaaggaagctacattgggggcttgatattaaagaacgatgggaaaggaaggcaaacatgtaaatatctgaagatctaacagcaagagcatgtccatgctgcatttgagtgaaagcagaatgacaaaaggaaatggcagacgatttccacggatcatcaggttgttggtcaggttcacgtttctgtcagcaggcagaacactggagctggaggtctggagcaaaaacaaagatgtcagaactgagcagcaagttagtatcagattttcttggttttgcctaatgttttctccagaagctttagctagactttgctctgtttcactgtctgatttaagctttcgagtgcagggatcttgaaccgttcaaatatacgtgggcctctgttgtaccatcaatgctttcacaggaagtggaagcgataaacaaact

SEQ ID NO: 14379 - DNA, 510 bp, Setaria italica
  Peptide Sequence Number=SeqID_80353
tttttaatagggaaataattctttacactatcatatcatacttctcgacgacagcatttgtgataaacatagtagtagttgcaaggggaaaaggcccaaagcaacgctagcctgctcggccttgcaaaaggttgcagggatcttgaaccgttcaaatatacgtgggcctctgttgtaccatcaatgcttttcacaggaagtggaagcgataaacaaactgtcacacaggaagtaaacgcgataaacactatcctggcactcgaaagcttaaatcagacagtgaaacagagcaaagtctagctaaagcttctggagaaaacattaggcaaaaccagaaaatctgatactaacttgctgctcagttctgacatcttgtttttgctccagacctccagctccagtgttctgcctgctgacagaaacgtgaacctgaccaacaacctgatgatccgtggaaatcgtctgccatttccttttgtcattctgctttcactcaaatgcagcatggac

SEQ ID NO: 14380 - DNA, 669 bp, Setaria italica
  misc_feature (655)..(655): n is a, c, g, or t
  Peptide Sequence Number=SeqID_80354
accaaagcaggaggcggcggggagaagcggaggcggcgcaggagatggcgacggagacgacgaggcgaagaggaaggaggaggcgcttgcatccagcaggctcctcaacccgggattcaagccctccaagctatcccaggaccggctcgacaagtttaaggaattacacaagaaacggttacagataaccgaaaagccaaagtataaaagaaaaccgaaaggaaccactgggagaagtaccaaagtaaccaacgattataaattcatcgacaaggatgaatctgctgttagttctccaagagatgtataccatacttcgtcagttacagtaatccaagaggatcctgcacaacccctgtcaagggacaaaaggaagctacattgggggcttgatattaaagaacgatgggaaaggaaggcaaacatgtaaatatctgaagatctaacagcaagagcatgtccatgctgcatttgagtgaaagcagaatgacaaaaggaaatggcagacgatttccacggatcatcaggttgttggtcaggttcacgtttctgtcagcaggcagaacactggagctggaggtctgatactaacttgctgctcagttctgacatctttgtatcagtatttttcttggttttgccttaattgttttcnccagaagtctttag

SEQ ID NO: 14381 - DNA, 476 bp, Setaria italica
  Peptide Sequence Number=SeqID_80355
ggtggaggagacagtgaacagccccaaatagctgaggcctgagagcttcgaatcataccttagcttctatgtgtggcggaggggagatgcggcccatggtggtggccgagatgcggccagcgggtcgtggccgtctgaccggaggccggtaagcgagagcggccgcgcatcgctgctggacagggtggggtgcgtccccgtgccgcgacgactgctcctcgtggcatgccgcggacgccggccggcctccctcctcgagcagaccgggggcacctcgttgcaagccgtggcagacgaggtggatctgaggaggatagagatacggggcactgggtggagcaggcgaagtttgatggcagccgggtagggaggggaggagatccggcggcgcccgccccggcctggggcggataaggtccggcggcgcccgcccggccgtgggggctctgccgctctgggcggacgcggggaggcgc

SEQ ID NO: 14382 - DNA, 517 bp, Setaria italica
  Peptide Sequence Number=SeqID_80356
agcgcttatggtattagttgccaaactgtaagagcaaatgagtcgatacacttataatttttggctaaaccccaacattctaatatttagcaatgtgtacacaagttttaagtttttaactgcatgacagctgtgcaaatcaaatcagaagttttacaagcaatgagcaattacacttaaatataatgctcataaaaaaggcacgtgttcaatttatgtaaagaaataaatggagctacaaagaacaaatctaatacagaaaatatatcaatggggtgatagtgatgactttccagcaaaagtgaactgctattacttcagatcaattagaattaccatgcaaagtgagtagaacttaatattagacattgaccacaccagaaacagaaatgggcaaaatgtagacatgcacaagaaccaccagtcagacaaagatgaagcatgtaagttttcattactgaacagctacgcggagttgaattacaagctagcatatatggaaggaacagctataaaa

SEQ ID NO: 14383 - DNA, 2218 bp, Setaria italica
  Peptide Sequence Number=SeqID_80357
ggctcacagaggaacgaatatacaagaacaaatgaatagtatcatgtcgttgctttccagtttcagtcctttcttcacggccgtcccactcccacggcctgttcctgatcaccgccgctccgaccacacttctcgcaggagctcgtacctggcattcgccatggaggctgctcctgctcctgctccttgcctggcgctgaaatgcgcggcgccgttgctgcaaggtgaaggtggagcgctcctgtcgtacagggatgccagggggctgtcgaggtcgtccagatcgtcgtcgctggtgtaacctctcctctgcgccattgagctcctccggtccagctctgggttcccgcaaccggtgtcggccactttctccgcaacgtcctccagagaaggggggcagtacaccaccggagcggcggtgaccgggaatgtgctgatcacttctttctccatgaaccgctccatcatgccctcagaactcagctcctccagaaccatgccaggaacaggatcagggcagaactcgtcaggagtgaagttgcacagtattcttgttaccagtggaaggccaatggaagggcagacctctttcctgatggatttctcaagcagcatgtccttcgggagcatcagaagatcactcagctcattgagtagcttaaaacaatttgattcggctgcatctcttcgctcatcaccattatgttctgcatcttgaccatccttttcagattcagcaccatccatgccaaatgtgtctgtcaaccatctggaccaattcccaacagaattcttaagctgagcgcctgatccaaagcttaagtccccagctggaatcggcagaactcttgagtccacgattgggtcagatataggatcagatggtatttcattcgctgattcacgaaggatggcgttaaacatagcaacatctaaacgggctacacaatgctccatcaccaattttgccaatactggtaaacatccacactcatgtccactagcacgaagaggacagattctgctgaaggcatcacgaaatgcagttttccagagatcaatagaaaaattcccatgttgctgatcacccaaagaaggccctaacaacctgctgatcttcggagttgacaaatcttccactggggtttgcatgtggggtgtcattgcctgccaccacacagactcaacaatccgagaaaagatccaagattctatcttctccaatgctgacaagagagtgccactttcccgccaatcatctggcatctgcataatattgggtctagcatgcttagcattggagctacttttccatcgcattggagcgaaattcccatcaagcttctttgcattaccatttgtgctgaaagacttcataactggacctgattgtcgtgaagtaccaaaggtttgtgcaataatttctcttagcacaactatgtttgatagccagaatgtcaaccttgaaacatcattgccacaagactttgcaacaagcacaagcccagaaacagaattttcttgcaactgaagctttcttatctgaggaccaaaattttgatgcatgaatatacaacctagacagacggcgagctggtgtatgcaatagatgtgatgaacaaccatgctctggcaccacagaatagagagaaacctcaagggcagcaacttcacgtagctcctgctctaacttctcaatttttgaatccaattcctcattcctttcataagaaactgaatggccattatgaactatgttttcttcagtttcagcgatttcatcatcagtactagtactctgatcacattttggagcttcatccaatatatcgatctcttttgcctctccaacagctttaccatcagtctctctgccctcaatggcattatcatcagttaccttgtcctcaatgaccttagcatcctttccatcctcaatatccatatcattcttcgttccatcctcaacggccttatcatcctgcgttccatcctcaatggctttatcatccttcgttctgtcctcaatggccttattatcctccgtcccgtcgatggctttatcatccttgtttctgccctcaacgacttcatctgtggctctgccttcaacagctttatcatccttggcgctgccatcaactgctttatcatctgtgggtctatcctcaataacttttcctctgtttcctcagagacatcagatgaagaacaagaa

SEQ ID NO: 14384 - DNA, 787 bp, Setaria italica
  Peptide Sequence Number=SeqID_80358
gaatttacgattttcataccatcaatacgcaaaattcttgtgaagcaccatttgcggtacagaaaatgggatgagatcgaaaatcgactactgaggcgagagctactcatcactgaaaacttgtctgtacaaaagtacacacaatgtccacctgatgtcattagtgacccccttgatgattttgatggttcaccttctgagatagctgatgaaacacagcgacaatcaagaaatcatcaagtcaatgatgttcgcttgcggagtgccggtgaggcttctcagaggagtactagggaagactgggctgaatggatgaggcatttcagtattgcacttctcaaagagtcaccatctccagctttacgcacttgtgcaaggctagctcagcttcagccttctgttggtcgcgagttgtttgctgcgggttttgctagttgctgggcccaaatgagtgaatcttcccaggaacaactggtgagaagtctcaagacagccttctcatctcaaaacatacctcccgaaattcttgctacactgctgaacttagcagagtttatggaacatgatgagaagcctcttcctattgataccagactgcttggtgcacttgctgagaagtgtcgagcatttgcaaaagcctccattataaagaaatggagtttgaagctgtgtgcaacaagaagatgggtgcaaatcctgttaccgtggttgaatcccttattcacattaacaatcaactgcaccagcatgaggcagcttagttgggatattgacttactcgcagcag

SEQ ID NO: 14385 - DNA, 417 bp, Setaria italica
  Peptide Sequence Number=SeqID_80359
taactttgtaatttccttgttaaaatccatgcgttcatgtttcgaaaaagaaaaaaatgagcatgctctggttacaagacattgaacagaggacaatcttgggagaaatggtgaggtggcaaacgccaaattcgaacgcaagctatgatattcccatgagatcattttgcacgatggtctgtcgagtctttttaacaaatgaaatggcggtccatcgagaaatcactttcagcgtggccggcatgcaattgcaatggctagtggtctgaagtattttttttccgtagcaagcataacatggactcctcaaacatagctttcagttgctttaagttttgcattattgtaaactctgcccaccaatgtgcgtgcttatcttgtcacagtttcccttttaaataacctaattcccggata

SEQ ID NO: 14386 - DNA, 650 bp, Setaria italica
  Peptide Sequence Number=SeqID_80360
cccaattctttggcaacagctatgcatgcctgtgcataagagccagcagcctcgttggttctttctgcttgtcgtgcagagtcatcaactccataaatgtctcggattctcgctgtctcgtaaatcggtgggggagtgatgagtatgatagcagcggaggtccatcgctccttgaagtaggcgcagatggcgcggaggttggtctggtactcctcgagcgggacgttctggtgcgcctgcacttggtcgggcagcgaggcgtcgttggcgccgaagaagacggtgacggccgccgggtccgcgtccgccgcgccctccatggcccgcggcagcaccttgagcgcccaccgcgtgttgtacccgctgagcccgcgcagcaccacgtccgcctggcgggcgaagcggtcggtgagcgcggcgccccatccgccggactggaaggactgctcggtgatggagtcgccgaagagcaccagccgcggccgcattgtggatcgctcggatcggggaatccgccgcgcgggctcactcactcagtcacagagcgcttcgcttcttgggatgcggctttggaggctgtgcggcggactggcagtcgccgtggcggctcgtcttcttcggcgccaacgacgcctcgctgcccgaccaag

SEQ ID NO: 14387 - DNA, 529 bp, Setaria italica
  Peptide Sequence Number=SeqID_80361
gctccttggccaagggctcgacgacggcaaccagcttgacgaatcgttctacatggagagcctaggactaatgacgacgccgacggaagacggcgggcgggtactaaagatggagcccgacagcatcgtggtctcccacggcgacatgggtgctctcggtcgtagccctgcggaggtgaagccggaggaatcggccgagaaggcgtcggcggcaagcaacggcgtcgccgcggacgcgcagttcttgaagaggagcctggatctcagactcaactacgaggccgtcatcgagagctgggggagctcgccgtggaccgacggccagcggccggacgtccagctcgacgacttctggccccatcacgcccaccactcgggcgtgtggatggccggaggaggacggactaggtggggaggcgttgacgccgcggacggggatgggcggcggcgggcgggaggcgcgggtttcgcggtaccgggagaagcggcggacgaggctgttcgcagagatacggtacgaggtgcggaa

SEQ ID NO: 14388 - DNA, 1158 bp, Setaria italica
  misc_feature (77)..(77): n is a, c, g, or t
  Peptide Sequence Number=SeqID_80362
cttcctgtgccagggctgcgatgcgtcggtgcactcggccaacccgctcgccaggcggcacgagcgcctccgcctgngcccgacgtcgccgatgcacccactctcggcgttcgagggcggcgcgccgtcgacgtcgacgctgatgtcgaagaagcgccagcaggtcgcgccggcggcgtggtccaggcgcaaggcgcgcaccaggaggccgcaggtcaagagcgtcgggcagctgctgtcgaggaagctcatcgtcgtgccggaggtgaccgtcgagtcgtcggaggagcggaaggccgaggacgaggagtcggaggaggcggcggaggagcagttgctgtactgcgtgccgacgttcgaccgcgccctcgccgagctctgctcgccgccgccgatcgatgacgactcgccggctgctgccccatgctgcagggaggacgccgacgacagcaacgtggagcatgcaaaggcggcgccggtggctgcagaatcgcccgtgcagcagctcccggacagctttgccggcttcggcccgacggacgccgaactcagggagttcgccgcggacatggaagcgctccttggccaagggctcgacgacggcaaccagcttgacgaatcgttctacatggagagcctaggactaatgacgacgccgacggaagacggcgggcgggtactaaagatggagcccgacagcatcgtggtctcccacggcgacatgggtgctctcggtcgtagccctgcggaggtgaagccggaggaatcggccgaggtactggacatagacttcaactgcagctcgcccacggtgatcgataatgacgaggactactgtttcgaacagaaggcgtcggcggcaagcaacggcgtcgccgcggacgcgcagttcttgaagaggagcctggatctcagactcaactacgaggccgtcatcgagagctgggggagctcgccgtggaccgacggccagcggccggacgtccagctcgacgacttctggccccatcacgcccaccactcgggcgtgtggatggccggaggaggacggctaggtggggaggcgttgacgccgcggctggggatgggcggcggcgggcgggaggcgcgggtttcgcggtaccgggagaagcggcggacgaggctgttcgccaagaa

SEQ ID NO: 14389 - DNA, 1561 bp, Setaria italica
  misc_feature (1511)..(1561): n is a, c, g, or t
  Peptide Sequence Number=SeqID_80363
cgaggggaggggaggggaggttcgaccacgaccgccgccgccacgagctcgcggaggaccatgccgagatccagggggtccgagccgccgcagcgggcgtcgccgcgcgcgccgctgcacctcaagacgacggcctgctccagacgaaatggcgcgcaccaccgccccgtcgtcgaccggaccagccccaaggtcggggaccggcactcgccgcgcagccctctgcccgagaagaagcgcgcggcggggacgcgggtggcggagctggaggcgaagctggggaaggtgcaggacgagctcaagaagctgcgggagcagctcgtgtccgccgaggccgccaagaaggacgcgcaggtagcgctcgaagaggccaagaagcgcgtcggaaccaaggggagccccgcctccgcggccacctctcctctctctgcgccctcggcgggggtcgagagcgcgaagaagacggaggagctgaaggtgcctccaccggcggccgaggaggaggaggagagcagcataaactctccggcgactgatgtgtttgaggttgtccgggctgagtcgggggacaaggagaacaaggccgcggccgccgccgcagatgactgcgaggcggtgagctgcggcgagaaggcggcgctggctgagaaggaagaggtggtggaggaggaggagaccaagaagatgatcgaggaggagagcaaaaatgcagctgtggaaatcgacggcgccgagaaggagagcccggaggtcacggagctgaaggccaagctggcggagaaagacacggagatcgccgccctcagtgcggagaacgccgagctcaagaagcaggccttggacgccgcggaggcggcgaagaaggccgaggaggacgccgcggcgaaagcgtcccaggccgagcacgatctgaaggagggcgcggcgcgggaggcccggatgggcgagcagctgaaggcgtcggaggccgcgcgggaggcgctggacggcgagatgcgccgcctgcgcgtgcagaccgagcaatggcgcaaggccgccgaggccgcggccgcggtgcttggcggggacaaccacctcaccgggctggccggcaacggtaatgggtggggctcccccgcaacgatgcccgacggtgacgacgacgaggggttcggcggcaagcggaagggcgccggcatccggatgctcggcgacctgtggaagaagaaggggaacaacaagtgaaggcctgccgggaaatgtgggattgctatcacagattcgcaatggtgagctcgctcagccaaccagcttgaactccatgccttccttgcattagcttagcgccatcattttaccgcgttttggttcggattctgcttatgtttgtatgatgatgagatgatgctcgatcgtgagattgaactatgtctgtaacgcccgatgctgcattcctgctgctacctcactgtaaggagcaaccaagatggtttggtgtttacctagaaacaaaaaaaaaaaaaaaaaaaacnnnnnnnnnnnnnnnnnnnnnnnnnnnnnnnnnnnnnnnnnnnnnnnnnnn

SEQ ID NO: 14390 - DNA, 346 bp, Setaria italica
  Peptide Sequence Number=SeqID_80364
gatgggggtttttggttccccaactggcccctacgttgccggtacaagcatgccaagctacctggggccaccgcctcctgttgaggaagttctacagaagattttgcagatgcgctctttcaacagatacggtcagaatagaaacaataactataatcagcagggtgagagacctcaacatccacagggttctgggttgcctaaccaaaactcagcagaaaatgctactgctacggctccaccaacttgtggacaacaagcacaaattacgaatcaacagccaccacagcagcagcagaagccaaatacaaatgaccaggtccaaggtgcttcaaatggccatcaa

SEQ ID NO: 14391 - DNA, 250 bp, Setaria italica
  Peptide Sequence Number=SeqID_80365
tgccatgtccttggagggccttcggtactgctcgagcaaaaattagtttggacccagtgttccaggtcctaaatctttcaccatcgatgaggcaacagctggtgggatggaactaacggcccatgaagaaacagttgcattcatgccagagttcctatggatggaagatgaatctgtcttgagtccatagtttggttcattcttggaggccttctgaggatatggatgagcagcttttcgctttggtcgg

SEQ ID NO: 14392 - DNA, 780 bp, Setaria italica
  Peptide Sequence Number=SeqID_80366
cgcgcggcggcgctccgggtacgcgcccggcgacgaggtgcggctgtccttcatcgtgaacgcgcgcggccgccccgagatcccgctccccgagggcttctacgggaacgcgttcgcctactccgtggcggcgaccaccgccggggagctctgcgggaaggacctcgggtacgcgctggagctggtgaagaaggccaagtcggcggtgacttacgactacctgctgtcggtggcggacctgatggtgctcgaggggcggccgctgttcgcgctgtcgaggacgtacatcgtgtcggacgtgagccacgccgggttcaagagcgttgacttcggatggggggaggccgtctacggcgggccggccaagggaggcgaagggccgctccccggcgtcaccaactacttctcgcgggccaagaacggaaagggggaggagggcaccgtggtgcccatctgcctgcccaaggacgccatggagaagttccagctcgaggtcgaaggactcaccgccgagctctagcggtacggtgtgtcaatggcgtaacacaactagtaaaacgtcacgtacacgtacaccataaatgcgttcatgagtcgggctcgtctcgtggatgatatagctggtgatatattgcactgggcggtagatactatgttattcttatactctacacacacacctgtactggacgtgcgcaaggaaatgtgatcttgtttgtgtgaggtttaacatggaacaatcccatatatccagatgaaccccaactgcatataaaaaaa

SEQ ID NO: 14393 - DNA, 1894 bp, Setaria italica
  Peptide Sequence Number=SeqID_80367
ttttttttgttccacaacaaccagaaccaggatgccaaccacaatggccaatgcatacaaacatccctattcaacagataactttgtttccaaccaattccactgcagacagaagtttcttctgcactgctgctgtacaaggccagcatgcttgcatcacacttcacaacacccatgcaatgctcaaactgcctttcacagttccacttgcccaagcctcaatctgaatcccaaagccactagattccttcaaaattcacacatacttatcagtatgatgaattgatttcccaatcatatgctatgctacactagtacaaaatctacacaaaagggaacagcaccaccaccacgaaaaagagctaatctacaccaacacattccccctcccaaatactccttaacatcctcctcttttaacttgctgctttgaaaagaaccctgatagtatattcctacttgtctggtaaatctccttttttttcttccacgggttttagtgtcagagtggtggtgatgacaatgatcttgccacatcatagcttagcttcaacttcatttggtcgccatgacgtcttttgcacaaacagcaagccttctttatcctgggaataagacatccggacctcccagtggagtgatttcacaatattctccacctcacttattgtttcaatgttgtctcttacaattagccggccttctggcctcaacacccgatccacctccacaacaacaggtaataattcacacctcttcttaaccttggagaacagatggttagcatgcagaagatcataagttcttggataggtgctaaacgactcacaccagtcatgatacagtccaaacagcccacgctcatatataattggaagtgtgtcaggtgaatcaattgggatcacattcatgacccacaccttgagatcatgcaaagctgccgcaaaccctccatatacagctttcatatccataacatttctaacagccgaccaatcaacacccaaaccattcatgtatgaattgctcacgactcgcttccaatgttcatagtccacttgaaaatcttctggggcaggtttcccgtatactccagcctcagaacttttcagccaataaggtggtttctccagtctcaatggccataactccggccattttgaaccacgaatggtaagatctacaggcaacttatgcatacaagtcctcaatgatacgttccacgctgcatcaggatcatcatactctccacagattggagagtttgcttcagatctttcttcatagcagctgttatctgttggctttctgaaaattgctatacccactctattcactctatcctttactttgttgaccattttccagcacattgacctagttagagcagacattgcttcccatatctcaacatcttcaggcaacttctggtatacaggagtagcagaccacacgaagtaaccaccaggacgcaacagtctgtccaattcgagcaagagtttacccccttcaatatgccatggtaccctacagcgtgcacaatgaacaacatcaaagaccctactgggaaatgggagcctttttgtacccatgacagctgatatagcagggattcctctttcaagagcaaattgcacctgagcttcatgctcatctttaggtgcaaatgacatagtgatcacatctctgtcaaatagatatcctccaaagctagctactccacaaccaacatctaaaactacacgagtacgttttccccatgctatgtccttctttgcctcctgaatgaaatcaatgtaatgcaatgcaccatgtttgaactgagttccacctcccggaaaaatgaggtgctccccagaaaccttaacccagttttggtgtcccttgtattcga

SEQ ID NO: 14394 - DNA, 755 bp, Setaria italica
  Peptide Sequence Number=SeqID_80368
tctgcaggtgtgctcccagagttgtgcaccgtaaacgtgaaaaccgcagcagggaagctgctctctttgtaattgtgagggatgaagggcgatatctgacggcaggcgatcttgatttcagggtcaggtacaccatcatatactgtccatgatcttggaaacagggcgtggtaagtgcatttgtcctccttcagcttccaatcccaagatccaataccggctttatcaactcccttgaggagatccgcagtcggcgcagacaacaccgtggagtacttcttcccattcgggcgcgaaataaatgctgaaaactgatttgctaagataggtttctcttcatttgtcactgggaatatctgaaattgctgaaagtaccctctgtagcttctccctatgcttcctgcacctatcccaccgagcggtactccacggtagcagttatccatccattttctcagtggatcataaactgtagctcggccttttgcactatcttcaacttgcaattgcaatgctttgacaatcaagggcacaattgatatcatatccctcatggtcatgctgaacattgcaaccttcttgccttcatcgtcgaatctcctctgccaagtcctcgatggaggtttcgaacaatccatgcccgaaagcaccttggcttgctccaactctgcacttcccatgtcggttctggttgggttgaagctgaacagcaatcagggttctgaacctgaatgctgccacaaaatccggattcg

SEQ ID NO: 14395 - DNA, 397 bp, Setaria italica
  Peptide Sequence Number=SeqID_80369
cttagcaatgtctggcacatctgaagcttttcttcatgctgttgcaaatgaaaaccagcttaagcagtcaaatgatatgctgcttcttttctcggtgatttacataattctgaatgttgttctgattaaatctgctggagctcttgggttaattgctgctaattccatcagtatcctttgactaatgacaacagtatatcattctaatttttcttgaatgcatttttccttgatcaacttcatttgggccttgactgtctgtaaagatatgttgctacgaatcacatattctgcaatgtttatcaaaaactatttcaagggctcattctccttccggcgctgcgtgccagcaggatggggcattttactcatttctgctgtaaccacagttttctct

SEQ ID NO: 14396 - DNA, 800 bp, Setaria italica
  Peptide Sequence Number=SeqID_80370
ggagctactcggctgtggttgtaatcactctaccagtctaccccaagctctctttcaaaaccaaaaagaaaaaagaaatatttttagctaagcatctcctcctagatatatttcaagggctggatctctgtcctagaggctagaggccttgcatcaaagattccagcacattttacgattaccatcaagatgcatcaaggttgtggggggatatgaatcacttattcagttaatgtaaagtgagattagtagaaatcattgagccggcagtttaacgttgccccagcctgttttcctgcttgttcgacagatcaaaagagggaacctgatactgactcctacttgttagccatctacttagacttctgcagtgtcaggaattgatatgtgaaaaagattaaacatgcatgaagctcaaaaaggatttgcttgtattctggagttactggcagaaccattgtatattatttcccagaaaaagaagtactataacataagagtgtacgctgagccggcagctacactcttccgttgtttaacaactttcatccttgtaaaaggacatattaaagtgcacaagctggttcttgtttctttgtcccaggttgtctatggggccttcattttctttggatattgttcatattttcttatatttactgatatgaaaatttctgatctccttccattaaggccagactttcaggaaactgatcctccaagaaggcgagaaatttgtccttgtgtcatttgatactccatacaaccaggctgcatatggtcttgtggataaattaggt

SEQ ID NO: 14397 - DNA, 639 bp, Setaria italica
  Peptide Sequence Number=SeqID_80371
atgaagcgatactaaaggtagcttggatggtagttccatttgccattgtaattacttctattggtagcatatttgtgctaagtgtaaagaaattgaagctatctgacccctatgcgaaagctgtattgatcatcggatttgcttgtattctagagttactggccgaaccattgtatattatttcccagaaaaagaagtactataacataagagtgtacgctgagccggcagctacactcttccgttgtttaacaactttcatccttgtaaaaggacatattaaagtgcacaagctggttctcatttctttgtcccaggttgtctatggggccttcattttctttggatattgttcatattttcttatatttactgatatgaaaatttatgatctccttccattaaggccagactttcaggaaactgatcctccaagaaggcgagaaatttgtccttgtgtcatttgatactccatacaaccaggctgcatatggtcttgtggataaattaggtagtctggttgttcggatagttttcctgccatttgaggagagttcatatactacatttgcccgattggcaggagaaactcccctaaatatatccaatcttgaaggttctttgcttggggctctaaag

SEQ ID NO: 14398 - DNA, 858 bp, Setaria italica
  Peptide Sequence Number=SeqID_80372
agaatagaaaataatagactagaattaatagttcatctgtgctttcaggcacatctgaagcttttcttcatgctgttgcaaatgaaaaccaacttaagcagtcaaatgatatgctgcttcttttctcggtgatttacataattctgaatgttgttctgattaaatctgctggagctcttgggttaattgctgctaattgcatcaatatgttgctacgaatcacatattctgcaatgtttatcaaaaactatttcaagggctcattctccttccggcgctgcgtgccagcaggatggggcattttactcatttctgctctaaccactagttttctctggtagttagttcttgaacagaacacggtttaagcagaccgttcccattcacatagcaattggcatcatgtgcctgagcatctcgtcatttgagatataccgtggcgagaagcagttcttgaggcagatctttggaacactgaatcatcatgacaaaagtcaataattttatactgctcttcccataagacgcacgcagcacgtttcatacacgcagattgtcttgacataaagagaactgtagtatagtggttgtgtaagtcgatggtgcgtattcagcagtttgatttatagacaacagaggaggattagtcagtgggttagataggcaacatatctttatcttttctttaaatcagtttaggttcttatctatttttgtcttaggtaaattcttttttctttttaaattgaagtttgtaatatagtcaaccagacggctcaaacaggtttgaggaacgcagaatatatgcgcgctcgctgtaactttacctgtgataattattgtaactcgttttgcaca

SEQ ID NO: 14399 - DNA, 669 bp, Setaria italica
  Peptide Sequence Number=SeqID_80373
gacagacacagtgatagagaagccccagttattcttcgttactattgtttttatatcatcagcttagcaatgaatggcacatctgaagcttttcttcatgctgttgcaaatgaaaaccagcttaagcagtcaaatgatatgctgcttcttttctcggtgatttacataattctgaatgttgttctgattaaatctgctggagctcttgggttaattgctgctaattgcatcaatatgttgctacgaatcacatattctgcaatgtttatcaaaaactatttcaagggctcattctccttccggcgctgcgtgccagcaggatggggcattttactcatttctgctctaaccacagttttctctgagagggtgttcttgaacagaacacggtttaagcagaccgttcccattcacatagcaattggcatcatgtgcctgagcatctcgtcatttgagatataccgtggcgagaagcagttcttgaggcagatctttggaacactgaagcatcatgacaaaagtcaataattttatacggctcttccctttatgtcaagacaatctgcgtgtatgaaacgtgctgcgtgcgtcttatgggaagagcagtataaaattattgacttttgtcatgatgattcagtgttccaaagatctgcctcaagaactgct

SEQ ID NO: 14400 - DNA, 707 bp, Setaria italica
  misc_feature (1)..(1): n is a, c, g, or t
  Peptide Sequence Number=SeqID_80374
ngggtcccgccgccgcggcgccccctgcggcggcggccggagccgccgtgatgggcgtcttcaagtacaatttttgctgcgcagttcctctcaagggttattccattcgtgttcaacatctggtttgtgcgccagctcggcgcagatgacggcgcggtgtcggcattcgcattgcagcttcctctattcatgaactgcatcttatttttaagccgggaggggtttcggcgtgcatgcttgcgtaatgattcccagagtgatgtgttgactgatgaagcggtactaaaggtagcttggatggtagttccatttgccattgtaattacttctattggtagcctatttgtgctaagtgtaaagaaattgaagctatctgacccctatgcgaaagctatattgatcatcgatcgaaactaagtcatcttgcatgcactaaatttatcttataagctcttgtgttcaccttttctgtattcatgctaagcataataattgatctttgatattcctttgagaataaaatctcatgccaatgaacctgttccttagttgtatcaactgggacaaattaataggctgaaggcataatcagcatctagaatctaattgtttgatggttctattagctctgcacacttgctagcagaagatagatattctttcaaggaaataatggctttcgatgtgccttcttccagaggttgcag

SEQ ID NO: 14401 - DNA, 1785 bp, Setaria italica
  Peptide Sequence Number=SeqID_80375
acgattaccatcaagatgcatcaaggttgtgggggatatgaatcacttattcagttagtagaaatcattgagccggcagtttaacgttgccccagcctgttttcctgcttgttcaacagatcaaaagagggaacctgatactgactcctaattgttagccatgtacttagacttctgcagtgtcaagaattgatatgtgaaaaagattaaacatgcatgaagctcaaaaaggtttgaggacagatagtgcatgaaaacctcttgccctttcactttacatgctgttacaccttgtcttcttacactttcatatgttaagagctgacaaattatttttaaatggcaggatttgcttgtattctagagttactggccgaaccattgtatattatttcccagaaaaagaagtactataacataagagtgtacgctgagccggcagctacactcttccgttgtttaacaactttcatccttgtaaaaggacatattaaagtgcacaagctggttctcatttctttgtcccaggttgtctatggggccttcattttctttggatattgttcatattttcttatatttactgatatgaaaatttatgatctccttccattaaggttatcgaacctgatggactacgataaacagttattgcacatgtgcatgttgtttacaggccagactttcaggaaactgatcctccaagaaggcgagaaatttgtccttgtgtcatttgatactccatacaaccaggctgcatatggtcttgtggataaattagggagtctggttgttcggatagttttcctgccatttgaggagagttcatatactacacttgcccgattggcaggagaaactcccctaaatatatccaatcttgaaggttctttgcttggggctctaaagcttattatgctaataggtttggtgatcatttcatttggtccaagttattcatatacccttctaaaactactctatggggacagacacagtgatagagaagccccagttattcttcgttactattgtttttatatcatcagcttagcaatgaatggcacatctgaagcttttcttcatgctgttgcaaatgaaaaccagcttaagcagtcaaatgatatgctgcttcttttctcggtgatttacataattctgaatgttgttctgattaaatctgctggagctcttgggttaattgctgctaattgcatcaatatgttgctacgaatcacatattctgcaatgtttatcaaaaactatttcaagggctcattctccttccggcgctgcgtgccagcaacttctactggtagaatacaatttacaatttaggtaccaaagttaattacaataataccttactaatttggaacaactgaatcatcatgacaaaagtcaataattttatactgcttacttcccataagacgcacgcagcacgtttcatacacgcagattgtcttgacataaagagaactgtagtatagtggtggttgtgtaagtcgatggtgcgtattcagcagtttgatttatagaaaacagaggaggattagtcagtgggttagataggcaacatatctttatcttttctttaaatcagttaggtctattcttttgctaggaaatcttttctttaaatcagttaggtctattcttttgctaggaaagaaagtttgtaatatagtcaaccagacggctcaaacaggtttgagggaacgcagaaatatatgtgcgctcgctgtaacttacctgtgataattattgttaactcgaatttgt

SEQ ID NO: 14402 - DNA, 627 bp, Setaria italica
  Peptide Sequence Number=SeqID_80376
attttatactccatcatccatagccatatctcccaaaccctgacaaaagtgaacatgtaagtgtgatatactctactcctatcctatgtacagtgcacgctcttcaaaacccctcttggaggtactccatcttcatgccaaactcaacctgcttcgattacgtgttacaccgacccactagcgctgcttgatcggtagctcagccagctgcaacaatccagagacaggagaggggcgagcaatgcaaacccaaatcatctgctgcacttccatggatttctccctagctagctactccggccgcacgacagccgccgccgcaccatcgctggacttcctccggcctcgtctgccggagctccccttgtcgttgttgctgttatcctccggcggcgcgacgtagacgaagggcccgacggggcagtcgtcgagcgcgaggagcggctcgagcgcgtcgacgacggcggacatgtgggggcgggactttgggttgaggctgacgcactggtgcgccaccgcggcggccttctgcgcggcgcgggccgagtactggcccgccaggttggggtccatgacgcggtccagccgccgcgcgtccgtcaggtagggccgggcccactccaccag

SEQ ID NO: 14403 - DNA, 370 bp, Setaria italica
  Peptide Sequence Number=SeqID_80377
ttaacaaataaagggaaaccaaagaaccgaaacccggaaactttagggactcaatccaagcggcttcggaatttgcggtacgaaatcagttgcctgagaagataaagcagcagatgttatctcacttctgcctacagttcaagacagaggggctcaaccagcaagccatgctaaatggtctcccgaaaggaattcgatcaagcatagcatacaacttattctttcccatcatacgacaagcctacctctttcatggagtatccaataatttcatagcagaactggtaatatgatcaatattttggctaccattcaaaattattattttaactgattaaacttctttggcattaggtaatggaagtgcagg

SEQ ID NO: 14404 - DNA, 583 bp, Setaria italica
  Peptide Sequence Number=SeqID_80378
catcttctgctgaatggtcagataaacttttctccgctgaaaagtacttgtttccctcatgatcactatctacaaaggaaacaaagccacctgtccattaaagaagccaactccatctttgtctgcattgctgcacaatcatcttccgaattgcatgaacaaaaatcatccgaagaatcatcactgcagctgctatcactaccgagtgaaccaacagaatgaagatgtcctgaaatctgcaaaaactcttcctccagaaaaagtctgcggtgtagaatgtcctccttgtattgtggaggtgactgaggactaggatatgcattgtatggacttgattctatcaacttgctcattgtattggatggtgttccatttgccagcatatttcttgaaccatcttccaactcagagaaggggtcagtatgtgaagtacctactaactcaaggggaggaggtcgttgaaaataatttaagtgcatcgttagatgaacttggtttgcattcacttcattcgaggattctttgacgattccattagaaccagaatgtgcattatctgtgaaagatgagtccgactccaaaa

SEQ ID NO: 14405 - DNA, 1387 bp, Setaria italica
  Peptide Sequence Number=SeqID_80379
gtagccaagcacaatgcagcagaaaaacgaaaacaaacagcaaacaggggcttgtcgtagcgagttatcctgcttgacaggagtgaaacttcacggaaagcattataatgcactcagctttacatacaaaacatacaagaaacctcgtacaaaaggcacccgcaggacgcaaaacatgtcataagcaaagcaattcatgcgatgcaggagtcgccaccaaatgatgaaaccaatgattgattgctcacgcctgaatggtcatcatgaacctttcccccagaatttctcttccatatcaaaattcctagcttaggcagatacacatcattttcctatatactgtcaatactggaacagttccttgtgcattctgtctagcgcccccattttttaataaggccaggtatctcaacaccgttaggccctattttgttgcgagatataaaattcagtatgtgtgatgcaaattcttcgggtacatcttcctgtatggcatgcccagtgtgccgaaccaccaccatttgaaactttccttgcatctgaccaattgttaaagctctgtccagtctgtcggtgccagctaataacaggatcttttgcactggacaagataagaacttgtctgaaagaccttcataccatcctttccaatacatttctgtttgctcaagaggagtgcgatatgtatagcattcccgtgattcgtcatatttcaaggtagatggaatggacacacgagcagactcgacatttcttaacgagccacctttgacgctccattcaatcgctttttcaatgctagggaaatgctgtgcccgatttgataagatcttctgcatatgaaccagtgaagccattgctgttccctcaacaacatcgacaacgacaagcccatgaagatttcgaatttcttttcttgcagccacatgtacagccactgaaccacccatgctatgcccaacaagtataattgctggtgatgaatctccatacatggtacgtataacggctatgacatcattggtaagagtttcgatggacagatccaaatcattgcttgttgttgatttcccgtgtccccgtagatccatggcaacaacacgggccttatccttcatttgtcttgctgctagagcaaatgaaagccccgagtagccgcctccgtgcaggcagaacactacgggcccatccgatccggctgtgtacacattgaagacgtcgtcggtgccggggatggcgacgctgcgctcctcgtcgaagtaggcggaccagtccagcggcgcgtacttgtggagggagtggctgtgcgtggccgggcggggcgggacagcggcgggggagaaggcggacgattcctcgcctgcggctccccctccccttcctcctg

SEQ ID NO: 14406 - DNA, 713 bp, Setaria italica
  misc_feature (618)..(618): n is a, c, g, or t
  misc_feature (647)..(647): n is a, c, g, or t
  Peptide Sequence Number=SeqID_80380
aggtctttctaggtacttcgtaccttctttgtcgtccgtccttccggttccgtccgtcctattgtacctttcaagcgccgcaacggcggccgcaacaagcacggccgcggccatgtcaagtacatccgctgctccaactgcgccaagtgctgccccaaggacaaggccatcaagaggttccaggtgaggaacatcgtggagcaggcggccatcagggacgttcaggaggcttgcgtccatgatgggtacgtccttcccaagctgtacgccaaggtgcaccactgcgtctcatgcgccatccacgctcacatcgtccgcgtccgatcccgtgagaaagcgccgtgaccgcaagcccccggaagcttcaggcgcagggaggataggcctgctggtgggcaaggaggcccccgccctggtggtcctggccctgctggtgctgccacggctccagcaccaaatgctcctcgcccataggtttagactatcgactgcatgaagtccggcctgttggtagccatgaatgtcttaattcagtatcagtgagtcgtcagtcaggagggtgtggagttgctatgaatgtcttaattcagtatcagtgagtcgtcagtcaggagggtntggagttgctatattagtagaacttttanctgaagtcagaatgttggctaagagaatatcttctcgtttgaactaattgtgctcagctataatct

SEQ ID NO: 14407 - DNA, 506 bp, Setaria italica
  Peptide Sequence Number=SeqID_80381
ttcttaacgttctttcttaacttatttcgtttccgtcgttccgtattcccgttgtagtaagtcgtccgttgtaccgcaagcccccggaacgcttcaggcgcagggaggataggcctgctggtgggcaaggaggccccgccctggtggtcctggccctgctggtgctgccacggctccagcaccaaatgctcctcgcccataggtttagactatcgactgcatgaagtccggcctgttggtagccatgaatgtcttaattcagtatcagtgagtcgtcagtcaggagggtgtggagttgctatattagtagaacttttatctgaagtcagaatgttggctaagagaatatcttctcgtttgaacaattgtgctcagctataatctcacttgaacgtcagtgtcttctatgatattggtactccctttcaatttcatagaagacactgacgttcaagtcagaatgttggctaagagaatatcttctcgtttgaacaattgtgctcagc

SEQ ID NO: 14408 - DNA, 796 bp, Setaria italica
  misc_feature (779)..(796): n is a, c, g, or t
  Peptide Sequence Number=SeqID_80382
cctatcccctcgtgtgccttgcctatccccgttgcgtgtttcaggattacaaggaactctcgacctcttgcgccgcctccggtccgccgccatgaccttcaagcgccgcaacggcggccgcaacaagcacggccgcggccatgtcaagtacatccgctgctccaactgcgccaagtgctgccccaaggacaaggccatcaagaggttccaggtgaggaacatcgtggagcaggcggccatcagggacgttcaggaggcttgcgtccatgatgggtacgtccttcccaagctgtacgccaaggtgcaccactgcgtctcatgcgccatccacgctcacatcgtccgcgtccgatcccgtgagaagcgccgtgaccgcaagcccccggaacgcttcaggcgcagggaggataggcctgctggtgggcaaggaggcccccgccctggtggtcctggccctgctggtgctgccacggctccagcaccaaatgctcctcgcccataggtttagactatcgactgcatgaagtccggcctgttggtagccatgaatgtcttaattcagtatcagtgagtcgtcagtcaggagggtgtggagttgctatattagtagaacttttatctgaagtcagaatgttggctaagagaatatcttctcgtttgaacaattgtgctcagctataatctcacttgaacgtcagtgtcttctatgatattggtactccctttcaatttcaaaaaaaaccgtattaaaaaaaaacttatttaagttaaaaaaaaannnnnnnnnnnnnnnnnn

SEQ ID NO: 14409 - DNA, 370 bp, Setaria italica
  Peptide Sequence Number=SeqID_80383
ttgtgataatactccaattcagttcaattaaatgttcaaatagtagcaattaggcttgtttggaaggtaagaattttcctagaattttggagaaatgaaaagatcgaacttttataaaaatccatgtgtaaactgtaaatggttttggttcacatgtccaattaacagttgattactctatgatacgtagatacctcactacgttccacatggctaacactaaatatccaaacttcatagatggcagagctccatgtatgccccttaccggagatggacgccgtctgcgacgcgtacttgggtttcgttccgggttcggttatttgtttctttttcccgttttaacctttttaccttttttagtttttta

SEQ ID NO: 14410 - DNA, 395 bp, Setaria italica
  Peptide Sequence Number=SeqID_80384
cccagctgcgccggagcaagcctcgacctcaactacccgtccttcatggtgatcctcaacaggaccaactcggccacccggacgttcaagagggtgctgaccaacgtcgcggcatcaccggcgaagtacagcgtgtcgatgactgcgccggcggggatgaaggtgacggtgtcgccgacggcgctgtccttcggtggcaaaggcagcaagcagacgttcacggtcacggtgcaggtcagccaggtgaaaaggagctcagatgagtacaactacattgggaactacgggttcttgagctggaatgaagttggaggcaagcatgttgtcaggagccctatagtctcagcatttgcccagtgaggaagacataacaggagcaaaaataaaattatggc

SEQ ID NO: 14411 - DNA, 1661 bp, Setaria italica
  Peptide Sequence Number=SeqID_80385
ctgcccggcccggtccgtcatgggcaagagtaagaggaacaaggaggccgaggtggtggtggtggtggtggtgatgaccagcttgaaggcggtagcgatgccgatagcgtggcatcgatgtcgactgcgctgtctgaccttcaggtcgctcaggccaccgagcatgtcagctcgcaggaattcgttcttgacaagtacatcgatgacctctacgagaagaggggatccaccagagagaaagcactgggcgctcttgttgatgcttttgaaagttttatgcttcttggtttagtggaaaacaaatatgtcacactattgagccagttcaccaattcaattaaaaagggatctgcaaaggaggtgtgtcttgcttgtcgtgccattggcttactggcaattacactaggtgctggaagtagttcgcacgaaataatggatgagtcacatccgcagcttttgagaatcctacaaacttggcccgatgcaccaaagatgatctctgcacttgattgcctagctgttgtaacatttgtcagtgcaaatgatcttgctgaaacccagctatctttgaaagccatctgggatgtgatccatccaaaatcaggatcaaaggttggcattgtcagaaaaccaaaccctcctttattagcagctgctgtatctgcatgggcatttcttttaacaactgttggttcatctaggagaaattctgattcttggaaagagccaattacatttctctctagtcttctagaagcagaggatcgtgctgtgcggattgctgctggtgaagcattagctctgtgttttgagctaaagctgcttgatgtttcctctagtgaagaagctgatgttgacagtgacaccagagagaccagtggttctaagaaccaacttttcttgaatatgcaagcattgaaggccaaaatatctggtctagtctgtaatctctctatggaggctgggggcagaggtgctgacaagaaaaatcttaatgatcagagagacttgttccaacgaatctcagattttattaagagtggtgagtgccctgaagaatcacttaggatttcaggcaagaatggcattttaagagttacatcatggcgtgaatcaatacagttgaactatttgaggcggtttcttggacgaggattcctgaagcatgcacaggacaatgatttgctgcatgatatctttgatatcaaaattgatcaggttaaaaatatgtcaaccaccaaaaagaaaatctttagatctgaagaagagaaaggaagagctctaaagttgaataaagaacgtcgtcttgcccaggagaggaagcaaaacatcttgaacgagcaatacggatagaaccttcctgctgcctggagttttgtatagtcgaactatttaccagattgttgagtgttgtgtatatgccggtactgatgcattgagtgagtgtattgcccggtattgataggcattacaatacgatttcatactgagaaacacttgtatagcgtcatgtttgaaatggtttgcccaaaacagtcagtatagaaaggatcgtgtgccctgtaaaatacttcccttgcacgtggaaaggaggttgttcagtttcaagtcagaatcacaattctacaattcagctcggttcaaggttgatcgtgtagtgt

SEQ ID NO: 14412 - DNA, 239 bp, Setaria italica
  Peptide Sequence Number=SeqID_80386
cacttcggacctgcgccgcttcttgggaggctttcctggctgctgctccaccgccgcccctttctagcctactgctccaccgccggtgatgctgcgttgttgctgcagctcgcgcctgccgacctgagccgttgctgctgctcgccgaatccaagaggagccacggggcgatgtggtcgtggccgagatcccggagctgaggccggcggagcaggagcaaatggaagagaccaatatgg

SEQ ID NO: 14413 - DNA, 478 bp, Setaria italica
  Peptide Sequence Number=SeqID_80387
tcgccaccaagaacgccgccgcgcccggggaagccgccgccgacgaggcagccgtaccaccgccggcctctcagtctcagccagcgacgccgtcgagcggtgttgaggaggagcgccagctgttcgacctgccggacctgctcctggacatccgggacgggttcgggtgcttcccgccgatgtgggcaccgctccccgacgtggaggaggtcaatgcggagctgcgcctcgaggagccgctgctttgggagtagcagtcagagatgcttgcattgcaaggactaaacaatcgtagtactagcttatctcctcctcctcctcctgctcttttcctcttttttttttagattactcggcaaaagcagctactttttcttcttcttttttgttggttaataagtataaacatatataaatgagagacataagccatgtacttataagagtaagtacctactagtatcagttaattttcact

SEQ ID NO: 14414 - DNA, 300 bp, Setaria italica
  Peptide Sequence Number=SeqID_80388
gaggagtctgatgatcgactgcaacaagaacatccatctaggacctcgctcgtgctcactgcttgacctgccgccaatccctccggttgcctccacggatttggcagttgaattgtggaaacaatgagccatgtatctcgtatatgcttcaccgtgctgtagctatagcaaacatgccatccatgctgtcttgaagacagtcagtgctcaacccgaacaacaggatcaacatgactagttctgtgttggatgatgcagttcatagctaacaaaaaaaagttccttggtctggatcatgga

SEQ ID NO: 14415 - DNA, 378 bp, Setaria italica
  Peptide Sequence Number=SeqID_80389
aataagccatcagttcctccgagaaaaccgataagcttgctgtttgggttgtgagcctttatagcatcatagaggccccatataacattgtggcctcctggcgattgcctcccactgaagacaatgccaaccctgacgacaggatgctctgtcatgattgtagcatcctgcacattggccgtctttccgaggaagtgcgccagtggctggccatacgtgtgagggaaggcctggctgatgacgtgtgcaccggcaacatcggccgcaatcgctgcatcaccgtactccaccctgaccgtggtaccctgaattccgtccggtgcagagtacagacatgcaagaaagccatcagcccatcagttcggtgcgtcagtcaag

SEQ ID NO: 14416 - DNA, 2039 bp, Setaria italica
  Peptide Sequence Number=SeqID_80390
aattagttagtaatttagtaaagtaagtactaactaacttacctaaacgtacctaactaattagtaagtaacgtcttttcagctcaagtgttaattgagatgagtcaacatatatcgcaaaaacatgttatgcaattttatccttatcacttataatagtgtaaccagttgtattacgcacaaattattcctgttctgactcatctcaattaacacttgagctgaaaaacacccaaaaacagagctgatattgagcaggggatctaacaagatggtggtttcagataaacagatgatacagtcagaatcaaaatatgtctgagactgagaacacgagagcctatgattcagacgatagactttggcatggcgttcagatggttgcctggctactgaaaggtggggtagacattatggtaagcatctccgtcacagaagccatggcgcttaccgctgctttaaggacatcctgtgaacacccgggcttcacaatgcttttcaccttctccaagtactcctgcagttgtttgattcttcccatgtagtctcgatcttcaacacatagtgaaataggctttgtctcagcacctggtccttcaaactgaagtggcccagggtttcggtagatgtcttccatcaagaaactggaagaattttgtcgcaacaactcgtatgcttttcctttcaagtcgacactggccatgtggacagcaggcttgccaatttgactggcagtaggaccacgagaccaccgttttacagtcatcatagacgtaataggagcagcaccacatttccacttgttcactggactctttagatttgtcacagtggccatgtagccattcaaaccagctgctaggatgtgatagcacacatgcccaagaacataagcataatcacagtcgaatttggaaggcagggcaccccttgcttggtagccaaaaaagtggcatattgcattgaacttctttcctttgtaagtgccttccttaaggcgtttgttcatttcattctcaactaattgtgctagaagcttctcagtctcaatctgagaaagttgagcagattcatcagattcaggatggagaagaagctgctttctaataaatggaggcaaaaattcaaagagtgcagatgcccaaggtgaaagatgggaagagatgttctcaacggaaacacctttattatgtagcccatgaatttcctgaagcaaagcataaagctcaggaatagtctcaacaagaccctcaggaatcagtacaaccccatgatatttgtctttttcagcccttgcctgcacagcgtcacatatctgctttgtaatatcaaaaatggtaagttttgacagagaaacctcctctcctaggataaccatattcggatgtgattgaagagcacactccaacgccacatgagacgctttctgtcccatgaaccgaataaaatagtaatacttttcagcagaaagagcatcagtgcaaacattgcttatgagctgcgagttcaccttgcatatggtatcaaaaccaactgttgtctctacaaactggtttttgaggtctccgttcaaggttacaggaacaccaacaacctttgttggacatttcaactcagcaaatgtctcagcaagctgagcagcatccgtattagacgtgacacctccaattataacaagggaatccaacttcaatgcttggcaaatagccagtgttgcctctacttgctcagttgttctgatctgatcccttgtccgaccaagcatgtcataaccaccttgatttttataagatgcaagagcttcatcactgatatccatagttttctgtgcaaataagccatcagttcctccgagaaaaccgataagcttgctgtttgggttgtgagcctttatagcatcatagaggccccatataacattgtggcctcctggcgattgcctcccactgaagacaatgccaaccctgcatcccacacacacattccaatccatagaaggaaaaatattacaggatcacacaccatgaatttctacaatg

SEQ ID NO: 14417 - DNA, 616 bp, Setaria italica
  Peptide Sequence Number=SeqID_80391
tttgtggccgtgggaacacacgaacagctcaattaccgggagctgcagcttgcagggaatcggaggccaaggatccagtgaacctagactgatttgcgttggaattttcggggattagcaaacatttcggatttgattcttttccaattactgttgttgtttggattgactattgacaatctatactaaatatacagacgattctaatttgattttgcgttgttgctgaaatgctggtgcttatacttgcttggcctggagatgtgcgctcctatgttatcgagctggctcacgagccaaacgagccagctcgagctggtcaacgagccgagctgagcctgaccgccagctcgttatcttaatgaaccagctcgagctgagctgagccgagccgagccgagctggctcgatatccaaccctatctgtaaatataaccaattgttccacagcgcggttgtatattgagctggtaatgcagctcattgatgtagctgtgctatagtttctgaagctacatgctattgatacttcattcttctgttgcttgtcaatccagcccccctgttgttcgcttttctgttttcaaactatcatgtagaagttgatgtggtgatt

SEQ ID NO: 14418 - DNA, 426 bp, Setaria italica
  Peptide Sequence Number=SeqID_80392
aaaagtaaacctgtttgatgtgatcgtttgactatgcaaaatgttgtatatgtaggtcaagagtgaactgccatctacttacaaggcctactgtcggcagcaattccggtggtccagtggtggtgcaaacttattccgtaagatggcaaaggatgttttggttgccaaggtaagcttatgtcctcccatgctaacagattatgtctagaaaaaaaagaatctaaaaatcaaccccatttgttttaccactaggatgtatcactcctcaagaagacctatatgctctatagcttcttcttggtgcggagagttatagcgccaaccgctgcctgtattctctacaatatcatactccccatttcagtcacaatcccggagctgtacttaccagtctggggtatcgcctatattcccacggtgcttacc

SEQ ID NO: 14419 - DNA, 1550 bp, Setaria italica
  Peptide Sequence Number=SeqID_80393
ccatcgggtggcggcccgagtggaggttcaagtgggagcccctcgacggcgacgacgagaaggggagcgcccactaccccttggtgctggtccagatacccatgtacaatgagctggaggtgtacaggctgtcaatagcggccgcatgtgagctgcagtggccgaaggacaggataatagtccaagtgctggatgattccaccgatccgttcatcaagaatttggtggagcttgaatgtgaaaactgggccaacaaaggtgtcaacattaactataccacaagaaccagccgcaaggggttcaaagcaggagctctgaagaaaggaatggaatgtgactatgcaaggcaaagcgaatacatagccatatttgatgctgatttccaacctgaaccggactttctgctccgaactgtcccattccttgtgaacaatccggaagttgcccttgttcaagctcggtggtccttcgaattttgcagtgaatgacaccacaagcctgttgacaagggtacagaagatgtttttcgattaccacttcaaagttgaacaagaagcaggatcagcaacctttgccttcttcagtttcaatggaactgctggagtgtggcgtacagtagccataaaagaagcaggaggttggaaggatcgcactacagttgaggacatggacttggcagttcgagcaaccctaaagggttggaaattcgtatatgttggggaagtcagagtcaagagtgaactgccatctacttacaaggcctactgtcggcagcaattccggtggtccagtggtggtgcaaacttattccgtaagatggcaaaggatgttttggttgccaaggatgtatcactcctcaagaagacctatatgctctatagcttcttcttggtgcggagagttatagcgccaaccgctgcctgtattctctacaatatcatactccccatttcagtcacaatcccggagctgtacttaccagtctggggtatcgcctatattcccacggtgcttaccatagtcacagccataagacatccaaaaaatctacacataatgccattttggattttgtttgagagtgtgatgacagtgcgtcgcatgagagctgcactgacaggactgctggaattagaaggatttaaccagtgggttgtgaccaagaaggtggggaatgatctagcggacagtgaagttcccttgcttcagaaaacccggaaaaggttaagggacagagttaatttccaagagattggattttcggtgtttgtcttcctatgtgcatcatacaacctcgcgttccatgggacaacaagctactacatatatctatatctccagggattagcatttttattgctagggttcaacttcacaggaacttgttcttgctgacaagtgacaatggcaagattgtatgaatcgctgctttacaatcattttcttggtataagtccaccaggttacatttcagatgatttagatcttagatgcacagaaaggtgttgttatcccgtgtgctcacaacggttttcaccagtgataatttt

SEQ ID NO: 14420 - DNA, 730 bp, Setaria italica
  Peptide Sequence Number=SeqID_80394
agtacggaacgaccgggggggaccggggaaccccgacggggagcagatcaggaaggcaaagctgatgagcctcggcaggggcaatcccggtgccgccggtgatcagggcggaggaggcaccgcggagtcgctctcacggcaataccaggaatacaacttccttgattacaatgagaaagttattgatggattctatgacatatgtggactctctgcggagtcttctaagcagaaaaagattccatcgctttctgagcttcagatgagcattggggatcttggatttgaagtgatagtgattgaccataagtttgataatgcgttaagggagatgaaggatgtagcacagtgctgcatggaccgtgatgatattccagtatcagtgcggcgaatagctgaagttgttgcagaacatatgggtggtcctgtgatagatgcaaatgaaatgtttactaggtggttgggcaaaagcattgagcagaggacatcacatcagacaagtctgctgccaattggccgcattgagataggtttatcccgtcatcgtgccctgcttttcaagatccttgctgatagtgttggtattccatgcaagctggttaaagggagtcattacactggtgttgaagatgacgcttttagcatcataaagatggataatgatagggaatatttggttgatgttatggctgcacctggcactcttattccagtcagatgtctttaattc

SEQ ID NO: 14421 - DNA, 246 bp, Setaria italica
  Peptide Sequence Number=SeqID_80395
ggcgtgtcaaacaaaacaccaagtggccgtgccttacgtgacagagcagcgatgacaacaacacaccacctgcaacctgcccgcctagcaacactagctacgacctagccttttctgattgtggtgcacgcactactcgaccctgcgatgcaaaagaggatggagctacaagggattggtgtgtgtggaagccatccatccggagcaggaggaagaagaagacgaggaggaacccagccatcgcca

SEQ ID NO: 14422 - DNA, 909 bp, Setaria italica
  Peptide Sequence Number=SeqID_80396
catatcttctattcgagatggtagatgtttcaagatggaaaacataagctttgtgacaccagtgtctgaaggtagccacaagagctataagaatttgttgccaccgctttatgaagggacagtggaatgccaggcacaaggcagtgatgttgttgggttggatgcaagggttgaaggttctgtttgtgagccctctggacttgaaaatgacacacaactttatgaagtagagctgactgttcgtggaaactatgagggccatggtttaccccttgctttcctcgcaagtaaatcaactggtaaacatgtaaagggctaccctatcactgtggaggttatggaggatggttcttctgcagcatgtattgcagcccagcaattagcagccttgtctgcctactcaagagtggaaactaattagcatggctagcaagatctttgcatgcatcacgatcaaatcctgggagcaaacagaaagcctgtagttgcaagaacctcccttctgccatgctcatccccaggggtgtcagctgatgctggtagcgcagcggagtaccatgtgagaccgatgaccatgtgagtaccatgaccattttcgctggttactgtggctcgcctttgtccctgtcactggcggcgagttctaccagtctctgcaacggctgcacttctctgtacttgtattcactcctgctcagttgagaggaaaagttgggactattgatgattggagggacatggaatagcggcgtggcagcgtacagttcaagtggcaagtctcagctgttttgatcttggaaaactatggcatgtgcggtagtcgtatctgttgatctccaccaaacttgagatgaattaatagactatccatatacagtacttagttatttatatagtattatgtctacg

SEQ ID NO: 14423 - DNA, 380 bp, Setaria italica
  Peptide Sequence Number=SeqID_80397
atgtcctcaagtttgagatgggcactcctaccaccaagacgttcctgaggatgttcatcagatctgcccaagaagacagcaagaataatcctagcctctcgttggagttcctggggagctaccttgctgagctgagcttgttggactatggcttgcttcgcttcttgccatcacttgttgcggcctcggtggtgtttgttgcaaggctgacccttgatccacacacccatccctggagcaagaagatgcaagcactgacaggctacaatccatctgagttgaaggactgtgttactgccatacatgagctgcagctcaaccggaaatgttcatctatgatggcgatccgggacaaatacaagcaacacaggttcaagggt

SEQ ID NO: 14424 - DNA, 356 bp, Setaria italica
  misc_feature (111)..(111): n is a, c, g, or t
  Peptide Sequence Number=SeqID_80398
aaccccccatcacactcacagtacttcctccttaatgtagctgtaggtaaaggatgaagcatgtgttcatttgtgaatatcattaggtctaatggttaaagataaggaganagtttctttcaagtctattccaagtgcaaacaagcaaggaaacaagtagtacccttctttgaggcgcattatccgatcgtcgcttgaaaggttcctttccctcagccatctcaaaaattctggggacatatccttgttgtcaggattgatgtcaataataacagattcatcgacataaggggtcacacgtgcaccatatcctgttttcaccaatgctcttaagccctagtatttgtaaaattctt

SEQ ID NO: 14425 - DNA, 357 bp, Setaria italica
  Peptide Sequence Number=SeqID_80399
tttaccatgatgcatgcaagtacatgcaacgaggcggaacagcccctttattcattcagcccgaccacaatccatatctttctactgtcacttctcagaatcaactaaaaggtactgtgattgtacagaatcattctcaatgggatccagacatgcctgcggttccccttctctctccttgcctctctctccctcgcaaaacctggcgccgctaacatgtttgacagctccaacgccagattttgcgagggagagagaggcaaggagagagaagggaaccgcaggcatgtctggatcccattgagaatgattctgtacaatcacagttaccttttagttgattctgagaagtgacag

SEQ ID NO: 14426 - DNA, 327 bp, Setaria italica
  Peptide Sequence Number=SeqID_80400
tctccaccagccatggagcttagtggtggttggcaagaagaattggagcatgtgcgcgccgccgatgggcatggcggcgcgcacatgctccagtactgatgacgatgatgcctctccaccagccatggagcttagtggtggttggcaagaagaattggctgcacgcacctgcccacatgatctcatctatctacctggctgcaacaagaacacagatttactaacacagcagcagctgatagagcctatgtaattctcgaagcagccaggtagatagatgagatcatgttgcttcgagatttactaacacagcagcagctgatagag

SEQ ID NO: 14427 - DNA, 594 bp, Setaria italica
  Peptide Sequence Number=SeqID_80401
cctgctcacacaaccactgcttctttagtcgttctcgttctgcttgttcctctgcctccctctctctgaaggatcattctgtcaggcagaaaacttgtctcgacggttggatcctttccaagtttgatagggccatttttcttttgagtttcttgattctcaaaatcatcttcatcacttccgttctcaatgtcgtcatagaaagataggcgtggatcgcccttcactctcctctttttccttttctgcatttgcaattcttcttcttcttgttgcaacttctgaagtttctctttctcttcctcctcgatcttggtccgaatgttaaccctcttctcgacatactgctcccttgtgacgagaccaactgtttccttcttaaatgcagtctcaagaatctcggaggtgctggagcatgtgcgcgccgccgatgggcatggcggcggcggggtagggcagctgccacggccggagcaggcggggtcgtcgggccggcatctcctcctggatgtccatggcgacgccgctgaactcctcgacgacgcggagcacctcgttgacggagcgcagccggtcgccgagctcggcggcgcg

SEQ ID NO: 14428 - DNA, 1010 bp, Setaria italica
  Peptide Sequence Number=SeqID_80402
cgagcctgcctacgccgtgtcccgtctccggagaaaatctaccacaccacactccccctgctcaagccatggcgacccgggcctggatctcgctgctgctcgcgctcgccgtcgcgctgtccgcgccggctgcggcgagggcggaggaggccgccgcggagggggaggccgtgctcaccctcgacgtcgactccttcgacgaggccgtcgccaagcaccccttcatggtcatcgagttctacgccccgtggtgtggacactgcaaggcactcgcgtccagagtatgagagggccgcacaggcgcttagcaagcacgacccacctattgttctcgctaaggttgatgccaacgaggacaagaacaggccgcttgctaccaagtacgagatccaagggttcccgaccctcaagatcttcaggaaccagggcaagaacattcaggagtacaagggacctagggaggctgagggcattgttgagtacctgaagaagcaggttggccctgcttccaaggagatcaagtcaccggaagatgcagcatcccttattgatgacaagaagatctacattgttggtgtcttcacagaattcagtggcactgagttcacaaacttcatggaggtatgggtggttgtcggggttcttgtcaaagtaacaacccgggggtgctgctagcatcaataaacttctccagagcagcgacatcaaaatccttgctgtcaacaacaagctcatcaaacggcttcaacagcctaaccaaaggcctctcaaccgcagcatcaccacgtgggagatggttggcaatgcagggtgtgaccgaagtacgtagtcagccctcagcttctcagcaacctccatgaagtttgtgaactcagtgccactgaattctgtgaagacaccaacaatgtagatcttcttgtcatcaataagggatgctgcatcttccggtgacttgatctccttggaagcagggccaacctgcttccaaggagatcaagtcaccggaagat

SEQ ID NO: 14429 - DNA, 483 bp, Setaria italica
  Peptide Sequence Number=SeqID_80403
cctgccgtacgggcacatcttgtgggccaagaaatatgctggcctctcgtcggcgtaagggatgaagtggttcctctgacgttattaacacgacgtgatgtggttgctacatgtcagtgatcattcatcactgacatagcgtcaggggtccatcgtcgcagcgtaaggggggcggcataatgcatgtctatgtaatgtatcagtcgtcgttcatcggctaataccaccttgcatgttctctactctagctacatctccacagtgcctagctgctagtagtgcagcgtcgttgtaaacttaggcactgtttgtttggactttcaagtagctttccaccctaagaagccgaaagctcaaacaaatggtcagtttctgggctgagctttccgaaagccaaaagcccagaagctgcgaaatgtgagttttctgcagcttttctatgtcaaggtcgcgaaaattaccctcctaaccaaaaaaaaaaaa

SEQ ID NO: 14430 - DNA, 1384 bp, Setaria italica
  Peptide Sequence Number=SeqID_80404
gctaaaaaatgcaaaatttggcattcactaaaatgttacaacatagagtagaatcgaacattgaaaatattaggtgacaacagtcgatcaaaagatgtaaaatagcacaatgacacaattacagctttagcagtatatgctcgcaaacaacactaataaccttcctattccactcatgtcacatcacttcattctcatgtcgtgttctttccaggcatcccaagtacaaataacttagctgtctgtgatattgttacactctaatccccatggattgtgtagcgctcccactttttagttgggtcatagatctcccatcttgaggcagggaatatatgcttgtttttctcgtaccaatgcctctctacaactttgcccgcgtgagactcatccttttcttttgttgcatcagcaatggttcgaacatcctcatgaacatcgaaatggaaaagcggtccactcttccccctcgctttgttgatgatcaattcatagaaactgtgttgatgagggataataagatcttccttcacataaagtaggttctctactgacgttgtccgtacttcacggaactcaggggcaagctgctgttgaactgcccttaggaattctccaatagtgtcacctttacggacctggataactctcctgtgtccagtcccatcccagtaactgtaagtaattgagagaggttcatttttgatcaattcctgctcacacaaccactgcttctttagtcgttctcgttctgcttgttcctctgcctccctctctctgtcaggcagaaaacttgtctcgacggttggatcctttccaagtttgatagggccatttttcttttgagtttcttgattctcaaaatcatcttcatcacttccgttctcaatgtcgtcatagaaagataggcgtggatcgcccttcactctcctctttttccttttctgcatttgcaattcttcttcttcttgttgcaacttctgaagtttctctttctcttcctcctcgatcttggtccgaatgttaaccctcttctcgacatactgctcccttgtgacgagaccaactgtttccttcttaaatgcagtctcaagaatctcggaggtgctggagccgaactggaggaggccgggctgcccgtcagcggacttgttcttgagctcctcgatcttgcgtcgctccgcctcgcgctgcttctccagccgccggatcttcaccgcgtcctgcgccgtccccacgtacccatcaccgaaccccgacatcttcctcacctcccgtgagggagccttacgcccttcgaccttctcctcctaggtcagcgtagagtcgcggcacgcggccggacggagggcggcggaggcggccgccggggcggtgagagcgg

SEQ ID NO: 14431 - DNA, 1449 bp, Setaria italica
  Peptide Sequence Number=SeqID_80405
aagttatagaacaagtaataaattcaaaagtgtgctaggaatcatacacaaagatcatatgaacccaattctagactttaagcagctgcatctccatggtagtaattctaacctattctatgttacagaagaacttagagctacaataagacaaaaaaaaaaacataaaacacattaagaaaaactatacaaccaaatctcggcttaaccaaccaccctcaacctgccataatcacacccaacatttgcacatttatctcaattctagcagcccacaaaataaatccaaagtccaaatatttcacaagcattttttttctttggcgatgattctccaagcttccatctcgctaaactggtatgacatcaatatttgacgtatcttcacatcttagaactagcccgtcgatgttcgttgggaggacgcacttggcccactggcagccagtcgagatgggctccgatggagcaactatcatcaacacattgtcatttctttgcacaacccccatcacactcacagtacttccttccttaatgtagccttctttgaggcgcattatccgatcgtcgcttgaaaggttcctttccctcagccatctcaaaaattctggggacatatccttgttgtcaggattgatgtcaataataacagattcatcgacataaggggtcacacgtgcaccatatcctgttttcaccaatgctctaagcccagattgaaaatctgaaatgtagaaatcgaccgcatgtcgctccattgagcgtaaaccccaggtaaaacggcgatgctcagtgttggcagctttggaatcccaacccctgtactcatacaagctagtagaagtgtacacacatcttgggaccctttggaatgaggactcgagggggaaatttccacaagtaacgacccctgtaacctttacatactgtccatctttggcagttctgagatcagcatcaggatagcgattaacaaacccaatagcacctctccttccccagcaagcattccagattaacagtgcagcaacaaaaccaaatatcaccacaacaactattagcaaaatcgcattgtgaacagcacccagaatgaagccaccagctatgaaacccatcacgaagagcagaatcacagcccaaagtattggctttggaaagcttccctgaatagtgtaaccatcttcagtgttgaggttagtaacagccaatactttgggctgtgattctgctcttcgtgatgggtttcatagctggtggcttcattctgggtgctgttcacaatgcgattttgctaatagttgttgtggtgatatttggttttgttgctgcactgttaatctggaatgcttgctggggaaggagaggtgctattgggtttgttaatcgctatcctgatgctgatctcagaactgccaaagatggacagtatgtaaaggttacaggggt

SEQ ID NO: 14432 - DNA, 1555 bp, Setaria italica
  Peptide Sequence Number=SeqID_80406
taggtaccgacaacaaggcgctttagcaagcacgacccaacctaattagttactcgctaaggttgatgccaacgaggacaagaacaggccgcttgctaccaagtacgagatccaagggttcccgaccctcaagatcttcaggaaccagggcaagaacattcaggagtacaagggacctagggaggctgagggcattgttgagtacctgaagaagcaggttggccctgcttccaaggagatcaagtcaccggaagatgcagcatcccttattgatgacaagaagatctacattgttggtgtcttcacagaattcagtggcactgagttcacaaacttcatggaggttgctgagaagctgagggctgactacgacttcggtcacaccctgcatgccaaccatctcccacgtggtgatgctgcggttgagaggcctttggttaggctgttgaagccgtttgatgagcttgttgttgacagcaaggattttgatgtcgctgctctggagaagtttattgatgctagcagccaccccccgggttgttacttttgacaagaaccccgacaaccacccatacctcttgaagttcttccaaagctcagccaccaaggctatgctatttttgaacttctccactggaccttttgactccttcaagaatgtttattctgctgccgcagaggagttcaaggacaaggaaatcaagttcctcattggtgatattgacgcttcccagggtgccttccagtactttggtctgaaagcggagcaggcaccccttatctcatccaggatagtgaatccaagaagttcttgaaggataacattgaggctgaccagattgtctcatggttgaaggagtactttgatggcaaattgtcaccgttcaagaagtctgagcctattcctgaggtcaacaacgagcctgttaaggtggttgtggctgacagcatccacgatgtggtcttcaagtctgggaaaatgttcttattgaattctatgccccgtggtgtggacactgcaagaagctggcacctattttggaggaggctgccaccacacttcagagtgatgaagaagttgtgattgctaagatggatgcaaccgagaacgacgtgcccagcgagtttgaggtccagggctacccgaccatgtacttcgtgacccccagcgggaaggtcacctcctacgacgccggcaggacggctgatgagatcgtcgacttcatcaagaagaacaaggagacatctggcaccggccaggcaacgacgactgagaaggcggcggacccagccaccaccgcagagtccgtgaaggacgagctgtaaaaccctatgcctctggacgcttgtggctgtgagcatgggagagggggagaggggaaaaacctggcgccggctaacatgtttgacagctccaacgccagattttgcgagggagagagaggcaaggagagagaaggggaaccgcaggcatgtctggatcccattgagaatgattctgtacaatcacagtaccttttagttgattctgagaagtgacagtagaaagatatgg

SEQ ID NO: 14433 - DNA, 789 bp, Setaria italica
  Peptide Sequence Number=SeqID_80407
cggcccggacgtacaaggtggagatggagggcgccggtggtgacaaggtcaccttgttctccgtctgccacaccgacacgtcggagtgggacaaggaccacgtcgccttcaggttcctcggcaccaagcccggcggcccgccggtgtgccacgtcctgccgtacgggcacatcttgtgggccaagaaatatgctggcctctcgtcggcgtaagggatgaagtggttcctctgacgttattaacgttatcgcacgacgtgatgtggttgctaataacacacgtcagtgatcattcatcactgacatagcgtcaggggtccatcgtcgcagcgtaagggggcggcataatgcatgtctacgtaatgtatcatcgtcgttcatcggctcatgccggccaccttgcatgttctctactctagctacatctccacagtgcctagctgctagtagcagtgcagcgtcgtctgtaataaaggtgtagctagagtagagaacatgcaaggtggccgggccgatgagccgatgaacgacgatgatacattacgtagacatgcattatgcgcccccttaccgctgcgacgatggacccctgacgctatgtcagtgatgaatgatcactgacgtgtgttattagcaaccacatcacgtcgtgcgataacgttaataacgtcagaggaaccacttcatcccttacgccgacgagaggccagcattatttcgtggcccacaagatgtgcccgtacggcaggacgtggcacaccggcgggccgccgggcttggtgccgaggaa

SEQ ID NO: 14434 - DNA, 1086 bp, Setaria italica
  Peptide Sequence Number=SeqID_80408
caccagaaggagtacccgtacaccgtgtacatgtgccacagcaccggcccggcccgggcgtacaaggtggagatggagggcgccggtggtgacaaggtcaccttgttctccgtctgccacaccgacacgtcggagtgggacaaggatcacgtcgccttcaggttcctcggcaccaagccccggcggcccgccggtgtgccacgtcctgccgtacgggcacatcttgtgggccacgaaatatgctggcctctcgtcggcgtaagggatgaagtggttcctctgacgttattaacgttatcgcacgacgtgatgtggttgctaataacacacgtcagtgatcattcatcactgacatagcgtcaggggtccatcgtcgcagcgtaagggggcggcataatgcatgtctacgtaatgtatcatcgtcgttcatcggctcatgcccggccaccttgcatgttctctactctagctacatctccacagtgcctagctgctagtagcagtgcagcgtcgtctgtaataaaggtgtaaacttaattacagacgacgctgcactgctactagcagctaggcactgtggagatgtagctagagtagagaacatgcaaggtggccggcatgagccgatgaacgacgatgatacattacgtagacatgcattatgcgcccccttacgctgcgacgatggacccctgacgctatgtcagtgatgaatgatcactgacatgtgttattagcaaccacatcacgtcgtgcgataacgttaataacgtcagaggaaccacttcatcccttacgccgacgagaggccagcatatttcttggcccacaagatgtgcccgtacggcaggacgtggcacaccggtgggccgccgggcttggtgccgaggaacctgaaggcgacgtgatccttgtcccactccgacgtgtcggtgtggcagacggagaacaaggtgaccttgtcaccaccggcgccctccatctccaccatgtacgctcgggccgggccggtgctgtggcacatgtacacggtgtacgggtactccttctggtggcaccccacgaagctggagccccggacggggc

SEQ ID NO: 14435 - DNA, 1892 bp, Setaria italica
  Peptide Sequence Number=SeqID_80409
ttcccgttctccggagaaaatctaccacaccacactccccctgctcaagccatggcgacccgggcctggatctcgctgctgctcgcgctcgccgtcgcgctgtccgcgccggctgcggcgagggcggaggaggccgccgcggagggggaggccgtgctcaccctcgacgtcgactccttcgacgaggccgtcgccaagcaccccttcatggtcatcgagttctacgccccgtggtgtggacactgcaaggcactcgctccagagtatgagagggccgcacaggcgcttagcaagcacgacccacctattgttctcgctaaggttgatgccaacgaggacaagaacaggccgcttgctaccaagtacgagatccaagggttcccgaccctcaagatcttcaggaaccagggcaagaacattcaggagtacaagggacctagggaggctgagggcattgttgagtacctgaagaagcaggttggccctgcttccaaggagatcaagtcaccggaagatgcagcatcccttattgatgacaagaagatctacattgttggtgtcttcacagaattcagtggcactgagttcacaaacttcatggaggttgctgagaagctgagggctgactacgacttcggtcacaccctgcatgccaaccatctcccacgtggtgatgctgcggttgagaggcctttggttaggctgttgaagccgtttgatgagcttgttgttgacagcaaggattttgatgtcgctgctctggagaagtttattgatgctagcagcaccccccgggttgttacttttgacaagaaccccgacaaccacccatacctcttgaagttcttccaaagctcagccaccaaggctatgctatttttgaacttctccactggaccttttgactccttcaagaatgtttattctgctgccgcagaggagttcaaggacaaggaaatcaagttcctcattggtgatattgacgccttcccagggtgccttccagtactttggtctgaaagcggagcaggcaccccttatcctcatccaggatagtgaatccaagaagttcttgaaggataacattgaggctgaccagattgtctcatggttgaaggagtactttgatggcaaattgtcaccgttcaagaagtctgagcctattcctgaggtcaacaacgagcctgttaaggtggttgtggctgacagcatccacgatgtggtcttcaagtctgggaaaaatgttcttattgaattctatgccccgtggtgtggacactgcaagaagctggcacctattttggaggaggctgccaccacacttcagagtgatgaagaagttgtgattgctaagatggatgcaaccgagaacgacgtgcccagcgagtttgaggtccagggctacccgaccatgtacttcgtgacccccagcgggaaggtcacctcctacgacgccggcaggacggctgatgagatcgtcgacttcatcaagaagaacaaggagacatctggcaccggccaggcaacgacgactgagaaggcggcggacccagccaccaccgcagagtccgtgaaggacgagctgtaaaaccctatgcctctggacgcttgtggctgtgagcatgggagaggggagagggaaaacctggcgccgctaacatgtttgacagctccaacgccagattttgcgagtgagagagaggcaaggagagagaaggggaaccgcaggcatgtctggatcccattgagaatgattctgtacaatcacagtaccttttagttgattctgagaagtgacagtagaaagatatggattgtggtcgggctgaatgaataaaggggctgttccgcctcgttgcatgtacttgcatgcatcataggtaaaaaaaaaa

SEQ ID NO: 14436 - DNA, 1168 bp, Setaria italica
  Peptide Sequence Number=SeqID_80410
ggatttttgatgtcgctgctctggagaagttttattgatgctagcagcacccccggttgttacttttgacaagaaccccgacaaccacccatacctcttgaagttcttccaaagctcagccaccaaggctatgctatttttgaacttctccactggaccttttgactccttcaagaatgtttattctgctgccgcagaggagttcaaggacaaggaaatcaagttcctcattggtgatattgacgcttcccagggtgccttccagtactttggtctgaaagcggagcaggcaccccttatcctcatccaggatagtgaatccaagaagttcttggaaggataacattgaggctgaccagattgtctcatggttgaaggagtactttgatggcaaattgtcaccgttcaagaagtctgagcctattcctgaggtcaacaacgagcctgttaaggtggttgtggctgacagcatccacgatgtggtcttcaagtctgggaaaaatgttcttattgaattctatgccccgtggtgtggacactgcaagaagctggcacctattttggaggaggctgccaccacacttcagagtgatgaagaagttgtgattgctaagatggatgcaaccgagaacgacgtgcccagcgagtttgaggtccagggctacccgaccatgtacttcgtgacccccacgcgggaaggtcacctcctacgacgccggcaggacggctgatgagatcgtcgacttcatcaagaagaacaaggagacatctggcaccggccaggcaacgacgactgagaaggcggcggacccagccaccaccgcagagtccgtgaaggacgagctgtaaaaccctatgcctctggacgcttgtggctgtgagcatgggagaggggagagggaaaacctggcgccgctaacatgtttgacagctccaacgccagattttgcgagggagagagaggcaaggagagagaaggggaaccgcaggcatgtctggatcccattgagaatgattctgtacaatcacagtaccttttagttgattctgagaagtgacagtagaaagatatggattgtggtcgggctgaatgaataaaggggctgttccgcctcgttgcatgtacttgcatgcatcaataaaggtaaaaaaaaaaaaaaaaaaaaac

SEQ ID NO: 14437 - DNA, 205 bp, Setaria italica
  Peptide Sequence Number=SeqID_80411
gcctgtagaaaacaaagaaggcccccaaggtggagcttggaactggaacaactgatgccaacatggatgagtggctggaggtatgttcttgctgataaaacttccttttggaaatgagacccatgtgtccatgtcaaggactaacgggcattccctttaaccttgcagggcacttccttcgcacagagaagcaaatccaagaaga

SEQ ID NO: 14438 - DNA, 1169 bp, Setaria italica
  Peptide Sequence Number=SeqID_80412
tattcgcgcagagagagcccgcacgcaaacacagagcccctccgatccgagatctgggccggccagccatggcgattagggtttggctccccgccctcctcctcgccttcctcctcgccgcctcccccttcacccaagttgctagagctcagtcggaggaagatgctgctacagctgaggttgttgaaggggctgatttaggaattgtgggtgatgatactcaggtttccagtgatgaacctttgagtcctgctcctggtgtggagacagtatgtgtattccccaaaaatgctggcaaaattgtaccagcgggtgaagaaactgaattactggttggcctgcaaaacgagggcgaatcagctttgaatgttgttgctgttcattcaactctccatcttccttatgatcataagatgtatggccagaaccttactgttcagaatttcttcaatgcatcagttcctgtttctgtgcaagcaaccttcccctatacatttgttgtgagcaagttcttgcagcctggagcctatgatctagttggttacatcgtgtatgagattgatcagcacccttaccagaatgtattctacaatggcacaatcgaggtcgttgaggctggaggcttactcagtgttgagtctgttttccttatcacccttggaatcgcacttcttggtctcttcggattgtgggcatatggccaggttcagcagctctcaaagaaaacaaagaaggcccccaaggtggagcttggaactggaacaactgatgccaacatggatgagtggctggagggcacttccttcgcacagagaagcaaatccaagaagaagcagacctgagtgaggctcactagtttaatcatttgaggatctagaatgaggaaattgagggtagcccttcacaatcacaagtgacttttgcagatgatagatgagaacagaggttgaaaactgtagtttcgtggtctgcacatctttgttaacaccattttcggccttgtgtactttacatggaacctttcttcaaacaaaattttgttaaaaaaaggtatatgctatcgctgctgggattcctgatcttatttgaactaggggctgccaaattaacatttatatgtcattcgcgccctagaattttctgagccatgatagacaatttgcggattc

SEQ ID NO: 14439 - DNA, 711 bp, Setaria italica
  misc_feature (606)..(711): n is a, c, g, or t
  Peptide Sequence Number=SeqID_80413
gcaagcttgcacgtctagtgaagagatggtgccattagtgttgctaacttgggtgaccggactcaaacatggggtgatggccatcctgagaaccggacagctggcagtatcagtggcgctggtgattgtttaactaatgacagaaatgcgcctcagaaaagaaggaaccctggaagtggaacagcagctttagatggtgcagccgtggggagcaggaatggtggcgatggagcgagcggagccgcatctgaggagcgacgttcggttcgaccaagattgatactaagcatcgactcggaatctgatgattaggtatacattttgtgttggctggagagacgacgttgggttttaatttgagtggattggatggctggttggagagacatcggagtagatatctgcattaggttttcttgtttttgctggccaccatcaactgatcattaggttctctttggagatgatgaaattccatctcggttaggttaggttagatcgtacagcagtatgtaaaatgcagcttacaagattagtgttgaatggatggtgagacacagagctggatatggaaagggtgtctcaggttgaaattagaactttttnnnnnnnnnnnnnnnnnnnnnnnnnnnnnnnnnnnnnnnnnnnnnnnnnnnnnnnnnnnnnnnnnnnnnnnnnnnnnnnnnnnnnnnnnnnnnnnnnnnnnnnnnn

SEQ ID NO: 14440 - DNA, 613 bp, Setaria italica
  Peptide Sequence Number=SeqID_80414
gcctgtcaggagacttgctaaggagcagcggggggatggcgccggtgaggcggttgcggctgaggttgatgccggagaggtttgggatggcggcgagcgaggtcgggatggtgccggtgagcgagttgaaggagaggtcgaggaaggtgagcttggtgagcgcgccgaggaaggacggcacgggcccggagacggcggtccaggagatggtgaggaaggagaggttggagagcttggcgatggccggcgggatgggaccggatatgcccgggaggtggtgccacgtgaggctctggaggtggacgaggccggcgacggcgtcggggatggtgcccgtgaggtttgcgtcctggaacacggagaggccgacgacgcggccggtggagtcgtcgcagtcgacgtcgtaccagtcgcagcagggcgtgccgggcgtccaggacgcgaagtggtaggggttgccgagcgccgccttgatggccagcagcgccgccttgtcgccggagtggcagcggctggaagcggcggcggcgggtgaagcggcgacgaggaggacaaggaaggcgcccatccgcgtcgctgtcgtcgtcctcatcgtgtgggctgctgcacgtgc

SEQ ID NO: 14441 - DNA, 421 bp, Setaria italica
  Peptide Sequence Number=SeqID_80415
cacgaaataatcacagaagtcatcccaggagtcatggatcttgacaacaacatatcttagtcgtagtgattaaggtagcatattgatgatcgaggaaaggatgaaaatgtatatttgaatggttgggttatgtcaatactcagcgctaccaagtttggcactttgcaattcatatattatcatataaacagttgatagcttacatacaatgaaaggatacggccaataatccaatcctgcacgcttcaattttgtgtcatctacgttaaaacctaatggctggaggggggaaaaaatcaaactatgatttcagagagcacaacactccagatgaatgacaatacaaaggcaacaaagatgacaaatcattaatgctgtccacctcttcgcttaagaacacaacaaagaaaacagcacataa

SEQ ID NO: 14442 - DNA, 719 bp, Setaria italica
  Peptide Sequence Number=SeqID_80416
cccccatcttatcatactctaataaccttctgactgcaggtttataaaactagcaccattctttcatggaaccggcaagccccgtacacatttttgaatgagcatgtgaagggcacctcgacaaagaatcggtttggaattgaatttgcaacagaatcccgtgtggtcctccagctcaatcatatgctcatgcgtcacagcgaaaagcaacaagttcaatagtctttccaccatatgcgtgttccatcaaattgttcttagacgaagttttcatgcataaatatcctctgctgggaatagtccctgtgcttcctccgggagctcaggctgatactggagctgttcgtagttcagctgtctggcggcttcatacagggcgatcccaacgctgacagagagattcaggcaccggacataggtttccaccatgggaatccggatggttccaccgcctaggccttctctactgcaatcctcaagggcttgttgaggtaatcctttggtttcagaaccaaagactagccagtcccctggcttgtatgagaaatctgaatgaatgcttgttcctcttttcgtaaatgccaacagccttttttctccttcctgcttcacgaaataatcacagaagtcatcccaggagtcatggatcttgacaacaacatatggccaataatccaatcctgcacgcttcaattttgtgtcatctaacgttaaaacct

SEQ ID NO: 14443 - DNA, 269 bp, Setaria italica
  Peptide Sequence Number=SeqID_80417
aaaggccagcaacatttaatggacactaggcaaaatctatccttttcttccaagacattttcaagaatcattatttccttctattcctactggttacaacttacattttcctctttttcttgctaattttacacctcatcacgattggacaagaaccactctcgtggtagcaccaacaatgatcacaacaacatcagcagtaggcatcacacaatcaggcaaaaatatttacgccatgtacaggaagaatcgtcatcggctcatcgcct

SEQ ID NO: 14444 - DNA, 522 bp, Setaria italica
  Peptide Sequence Number=SeqID_80418
agtcattccagaggagctgagcgacatgttcatctccataccagaggaaaaatttcgcatggatatttcatctactgaattaaggaaaagccaaggtctctgatgttttagacatggtcatattccagattcaagttgactctccacagtacacaaacatttaaggctcagttgaagctacttcttgcttttctggttcaaacacctttgtacaaattacaataggaccattttcgctggaagcaatcaaatgatagctcattccccttttgagggaatcattgatgtatcttcagggagtatatcttatataggttttgacttgacagggcctcttggtattttgttgagcaaattggaatcaatcctcttatagaacctcttgatgtcttcactacctcttgcagctagatggtccacctctgtctcatatctttggtacaatgctggcaaagtgtgagcacaacaaaaatcctgtggaagtaagttgttcagacttgttaaatgtattatagcaattgg

SEQ ID NO: 14445 - DNA, 451 bp, Setaria italica
  Peptide Sequence Number=SeqID_80419
tggaggagattacaatagaatgctggagatacttctcaaatgtaaaagcacaggaagtgggagagagatcatctgaaacaccatacactactggttgggttttgaaggcccttgaggatttagtcattccagaggagctgagcgacatgttcatctccataccagaggaaaaatttcgcatggatatttcatctactgaattaaggaaaagccaaggtctctgatgttttagacatggtcatattccagattcaagttgactctccacagtacacaaacatttaaggtacatttgaatgctgacagtctgaattctccaggctcagttgaagctacttcttgcttttctggttcaaaaaacaaacctttaagtaacaaaattaacaataggaccattttcgctggaagcaatcaaatgatagctcattccctttcgagggaatcattgatg

SEQ ID NO: 14446 - DNA, 233 bp, Setaria italica
  Peptide Sequence Number=SeqID_80420
agcactcaagctttctgggccaggtctgcaagttatgggtgttggatttacagggtcacttgcaagctcacgtccaaaacatggtgaccacaggtatgccttgcaactagcccacttcaccaagttagagcagtggtcgtgctagaatcttggcttagcatgtgaattgtgatacgatacgaccataggagcctgagcacaccaaattctccactttcgaggaaaaaagaggg

SEQ ID NO: 14447 - DNA, 889 bp, Setaria italica
  Peptide Sequence Number=SeqID_80421
gttttattcttaaaagaaagagtaaattgcttgatatttttaattggatccacttgttgtagcatgtatgatgatgggcttccattctttgagatatcagcaatcaatgccgataaacctccactatctattccagaaattaagaggcgtgttgagcaatttagaaaagcagggaagaatgtgataatatctaaccaaccatacttctataagaaagcggagcttttcccaggaagtgcttttataattggtgcagacactgcagctaggcttgttaatcccaagtattatggaggagattacaatagaatgctggagatacttctcaaatgtaaaaagcacaggtaccacttttcttgttggtggtcgaatgattgaaggagttttcaaggcccttgaggatttagtcattccagaggagctgagcgacatgttcatctccataccagaggaaaaatttcgcatggatatttcatctactgaattaaggaaaagccaaggtctctgatgttttagacatggtcatattccagattcaagttgactctccacagtacacaaacatttaagggcctcttggtattttgttgagcaaattggaatcaatcctcttatagaacctcttgatgtcttcactacctcttgcagctagatggtccacctctgtctcatatctttggtacaatgctggcaaagtgtgagcacacaaaaatcctgtggaagtaagttgttcagacttgttaaatgtattatagcaattggtttgtatgatctttgtgtgttcatcttgttaaaaattaccgcagtactcaccgagatatagtagacttgtgaagctgtaagaacttccaatctcagacaatattagcagtgaaaagatcaccttaat

SEQ ID NO: 14448 - DNA, 1160 bp, Setaria italica
  Peptide Sequence Number=SeqID_80422
catccccagcttggtgaaatttgcactattactagagaatattgaagcaggctaaagagatgtggatgcctcgtcttctgagggttttttttttctgccattgatactagtatgtagttgcaagtttcttgacctccacaaagagttaactgacctcagtgctttccattagctgtgaatgtcctgactcctgaggaaagaacttttgagtttggtcatattgcaaagaaccgaaggaggttaacgttagggcccagagtaatgattacatgctggggcccaagcgatccaaaacagaagatgggttggtgacataaaaggtgcgcttacagttgatgttttgtttgaatatcttcacatttgggatatggtggatagccttgttctacaacaggaggtgccagatcagtacaaatggaaattgacacatacctgctcttatagcagtaagttggcctatgcagccttctttgtaggcaccatcaagtttggcccgtggagaagaatttggaaaagctgggctcccccgcgttgcaagttcttcatctgactggtgtttcttaaccgggtttggacggctgatcggttggcgaaaaggggacttccccatccggagtcctgtcccttctgtgatcaagctgaggagacaatacatcatttgttggttggctgcgtcttcactcaccaagtttgggccctgattttccagcagttaggcttgttgaatttgacaccagacccagacccatcagtgagtcacttcccaagctggtggagaagagcaatttcttctgttcctaaggaagtgcgaaagggtttcaattccttgattatcctgatagcttgggaagtttggaaacaccgtaatgattgtgtgtttgacaattcgagaccaaacattcgcttatgctaaggttgtcagttctgtgagcacggagggtggcctctggtgcatggcgggagcctccaagctccaggaactcatgtccaggttgtccaggtcgctgcctcttggagcttaagctctgaaggctgctggtcgtctgttttgctattccgtggtgcgaccgtgagttttggttttctgtaagtgtgtgggtgtgtttatgtgtgtttgtggggtttgcctggtactcgggttgggtctttctagacttgtg

SEQ ID NO: 14449 - DNA, 1057 bp, Setaria italica
  Peptide Sequence Number=SeqID_80423
ttttgtcttgctgagtccatattggatgctcttttttcatgtgctgtacttatacaaacccatggtgtcagagttgaaagagaaaacaccactcaattcttattaatgatctgctttgttgagattacaacattatagttcatttcatattgattgtgaagtcttgaaaatatgcttgtatccatgcattgataggtacatttgaatgttgacagtctgaattctccaggctcagttgaagctacttcttgcttttctggttcacgcacctttgtacaaattacaataggaccattttcgctggaagcaatcaaatgataggtcattccctttcgagggaattattgatgtatcttcagggagtatatcttatataggttttgacttgacagggcctcttggtattttgttgagcaaattggaatcaatcctcttatagaacctcttgatgtcttcactacctcttgcagctagatggtccacctctgtctcatatctttggtacaatgctggcaaagtgtgagcacacaaaaatccgagatatagtagacttgtgaagctgtaagaacttccaatctcagacaatattagcagtgaaaagatcaccaagaggaatttcttcagatcctttccacatgcaatgtcataaagagcagcagcagtgtatgccagtttgtaatggatggtctgtgctatatgtcggaaggcatgctcagagacgatgacttctgggattcttggagggggtatgttcaagagcggcgcggcattcgaccaaatgaagaccacgagcatggccaagatggcaatctgggaaaggagcgggattacgttgtattcaaccacttctaacaggtaccagatcaacgtggccccgaggagcacacctgcagataagttcctgtccttccacagcagaatgtccgccacttttcctccgccaagaagcctatgaatcgacttgtgcctatggaacggaccacccactcgttcattgtcgtgatcgttaggaaaatgaggatgcatggctctaagagttttgacgattaatctcgtc

SEQ ID NO: 14450 - DNA, 1567 bp, Setaria italica
  Peptide Sequence Number=SeqID_80424
gtcccgtagcagctcgccccaagccaactgcgtccaccgggatcgcgatggagagctgggtccgcgcggtggtggaggccatctactcctctcgctcccaggcggtcatctacctcgccggcggcgcatctcaggcgctcggctggctcctgtccgtgcccggcgcgtcgggcaccgtcctcgaggtcgtcgtgccctactccagggcctccatggcgcagctccttggcaagatgcccttgcaattcaccagcaagcaggctgcagaggacatggcactggccgcgtacaaccgagcactcaagctttctgggccaggtctgcaagttatgggtgttggatttacagggtcacttgcaagctcacgtccaaaacatggtgaccacaggttttatgtgtcaacgtggactcacaattgcctcaggacatcacatgttaccttgtcaaagggtttacggagcagagaggaagaagacgaggtttcaagctgttttttgcttaaggcaatagcagatacctgcagagtatctgcaactattcagtcaggcattcaagaacctgaacttccagaagaaagcacggaacaatttgatgaagatcaagagctccaacaagtcattgatgggcaagtttgcatgaaagtctatcattttgccgctccagtggaaacgaacttcaataggaaagtaattctacctggttcattcaaccccttgcatgatggccaccttaagctgttggaagttgcatcaagcatgtatgatgatgggcttccattctttgagatatcagcaatcaatgccgataaacctccactatctattccagaaattaagaggcgtgttgagcaatttagaaaagcagggaagaatgtgataatatctaaccaaccatacttctataagaaagcggagcttttcccaggaagtgcttttataattggtgcagacactgcagctaggcttgttaatcccaagtattatggaggagattacaatagaatgctggagatacttctcaaatgtaaaagcacaggtaccacttttcttgttggtggtcgaatgattgaaggagttttcaaggcccttgaggatttagtcattccagaggagctgagcgacatgttcatctccataccagaggaaaaatttcgcatggatatttcatctactgaattaaggaaaagccaaggtctctgatgttttagacatggtcatattccagattcaagttgactctccacagtacacaaacatttaaggaaggttgtcagttctgtgagcacggagggtggcctctggtgcatggcgggggcctccaagctccaggaactcatgtccaggttgtccaggtcgctgcctcttggagcttaagctctgaagggctgctggttgtctgttttgctattccgtggtgcgaccgtgagttttggttttctgtaagtgtgtgggtgtgtttatgtgtgtttgtggggtttgcctggtactcgggttgggtctttctagacttgtgtacttttatttctaccttaatgaaatgacgcgcagttctcctgcgttggtttcta

SEQ ID NO: 14451 - DNA, 418 bp, Setaria italica
  Peptide Sequence Number=SeqID_80425
gagaggaggctgttccgggcacggtactggatcagccgcttcgattgcctcttcgacaatagccactgggcgagggatcagcaagttctaaggaaaaggaagaccgagctgggtggcacatgctcagtggctagcttgatcctcttcaccggattgttaactgtgcttctgtatcaagctatcaaaagacgcagcattgagatgcatcgagtcaagccagccaacgctccagacctgctgtctttcgtgaacgatcttgagttccacatcaccaccatctctggcatgtcctgcgctcaagcagttgcaccttcgacgttcgcaatgggacaccgggttacatggatttcaggttggtgtccctgccaacgatgttcacctacagctgtgcaaacacgagccagggccatccattacg

SEQ ID NO: 14452 - DNA, 247 bp, Setaria italica
  Peptide Sequence Number=SeqID_80426
gaaggttcatgccattaaggtgcacagcgagcggctcgcaattgcttacgggttcattgttgttgaagctggcagcccaatccgtattgtcaagaaccttagtgtgtgtggtgattgtcacgagttcagcaagatggtgacaaaggtttttagcagggaaattattgtgagggatggtagtaggtttcatcatatgaaagatgggaagtgttcttgccatgattattggtgattaatcattcaatta

SEQ ID NO: 14453 - DNA, 421 bp, Setaria italica
  Peptide Sequence Number=SeqID_80427
atcttgaagcggtacctcggccggcgcgggatcacctggcttggccccatcccgaactgcccggggccctgcatgagcggcgggccgtcgtcgtagacgtggccgaggagacggccgcaggcgtcgcagctgatgcgggtgcgcttccgctggatgccccagtagttgcgggtctcgaagaaggggcggatccggtcctcgggcgcgaaccggaggcgcgactcgtccacccacgagaaggacagcgtgcccttgttcccggcctcgaagaagacgcccgccgggtacaggtgcgccgccgacaggttcaggtccgcgccgcacgccgcgcaccggtacgagccggaggcgggcgccgacgccatcgggaccgccgcgtgggagatcgctggacggagagtttgctcgcctcgactcggct

SEQ ID NO: 14454 - DNA, 465 bp, Setaria italica
  misc_feature (1)..(32): n is a, c, g, or t
  Peptide Sequence Number=SeqID_80428
nnnnnnnnnnnnnnnnnnnnnnnnnnnnnnnnctttccaaatgtcaaattttattgcaaccaaccaatgaacaaggtgaaaaaactgcacgacaccatttacatacacacaagactaatttacagaaatcacagcgcaacacgatacgcgaccagaccaacccaaaatcaggggcgcatcacggcaggtttcactttccatacgcggcggcaggcggcggactgggcgcggcgacggccttgatcttgaagcggtacctcggccggcgcgggatcacctggcttggccccatcccgaactgcccggggccctgcatgagcggcgggccgtcgtcgtagacgtggccgaggagacggccgcaggcgtcgcagctgattgcgggttgtcgtcttccgtcttggtattgttcccttagtttagttttgtttcgggttttcttttcgtttaagtttaagggttcgttta

SEQ ID NO: 14455 - DNA, 249 bp, Setaria italica
  misc_feature (9)..(9): n is a, c, g, or t
  Peptide Sequence Number=SeqID_80429
cgagctccnccttaggcacgttcagcaggaagcggctgcggaggcgattcagctcggattggcctggattgatctgagcgaatcccagaagaagttgcgagatgggattaggggttaggggaactacctgcagagatcgtcgagaagctcttgtggcggcagctgccccgcgacgacgaccggttcagtcccccgccgcccgccatcgccatccaccggccaccgcgccctctcagcaccttgctctcc

SEQ ID NO: 14456 - DNA, 656 bp, Setaria italica
  misc_feature (616)..(616): n is a, c, g, or t
  Peptide Sequence Number=SeqID_80430
ggcccaccacgtcgaaatcaaacttggctcgaacgatctctccaaggtccaggtcagctgtgaggagggcctcgccttcatagttgggacctgccaacactgttccagatggtgaaatgatgacactccctccacaacaaacaacagattccggggatggctcttcctctaggctaccaaatgtatactcgggagggggaggatagtcctttctgcgggtgaacggcactgctgacagcacgaagcatcccccttcaagggcaatatgtgtcacagaagacctagaccaaacttagttaaccctggacaaagaacaaggtaagacacaacacaatgtataagcaacagatttacgctttggaaaagcaggagatttaggagcaaaataaaacaagcacattgttgattttcttctaatgccccataacagcatctgccccaaaaataaaggagacaaaatgtggatcagaagatactgacgtcaaaaatggtgcaaccatgtacagcttcattccattcactccacgagataccgcatcatcactagctggcaagagatcgtcaattctgtgccatgagatttcactgatttccttctttgtttgaggtgcaaacncagtatctctcttaacaccagttatgatatagagccgaac

SEQ ID NO: 14457 - DNA, 347 bp, Setaria italica
  Peptide Sequence Number=SeqID_80431
tttcaaagaaattaacaaagaacgtactagaacaagaaacggcacgcgataaatatataccacaggcaagacgtcccaaacatttgttgcactgaaagattacaggtaccaccagaaaaggaaaaaaaaagacagaaatggagacatcatgtccttgtggagttaacactgaccacagcctatatacatcaaggatgcaagtgcacgggttgatgctttgtcaggctcctaggtgcgtaggaaggaagcttccatggactgcaggatgcctgcggtgtcaaacctgaagtttctgaagcttctaccgggtcggttgtcaacattgcttgcgcgttctagtattcctt

SEQ ID NO: 14458 - DNA, 379 bp, Setaria italica
  Peptide Sequence Number=SeqID_80432
cccgagtatacatttggtagcctagaggaagaggatagtcctttcagcagtgccgttcacccgcagaaaggactatcctcccctcccgagtatacatttggtagcctagaggaagaggatagtcctttctgcgggtgaacggcactgctgacagcacgaagcatcccccttcaagggcaatatgtgtcacagaagcctgccaacttgttacgcaatcaacagtgggagcacaatatatctgaacacctgtaaacataggactcggtatgaaagattaactcaagtgcatctgtgcatgtggtgcatttcagcagttacaccttatggttccaaattatgttcctgcactttgtttcaggaataactagttatttactta

SEQ ID NO: 14459 - DNA, 1612 bp, Setaria italica
  Peptide Sequence Number=SeqID_80433
cacgaagcgacagcgccagaaaatagacatgacttttaagccagagcttaggataagatccaccgtcctgaacataacagttaaagaccaggcttaaaagggataaccaaaccgtaacctaagaaacaataaacaagtttaattattcgcaaacgtacaacagaaagcccacaattattgtgatgcaatggccacttgcaatttgttgtattaggcgattaaagatgtgtggtcattaggtcttcgaaacgtcatccctctttccagcaaaagtcttctctgcgtcggaagcgaaggagacagcagattttggatcggtattcaccaccaaactcagcacctctggtcgcgagtagtggcccaccacgtcgaaatcaaacttggctcgaacgatctctccaaggtccaggtcagctgtgaggagggcctcgccttcatagttgggacctgccaacactgttccagatggtgaaatgatgacactccctccacaacaaacaacagattccggggatggctcttcctctaggctaccaaatgtatactcgggagggggaggatagtcctttctgcgggtgaacggcactgctgacagcacgaagcatcccccttcaagggcaatatgtgtcacagaagcctgccaacttgttacgcaatcaacagtgggagcacaatatatctgaacacctttagcatacatggcggtcctgagaagtggcattctgttttcccagcaaatgagggcaccgatttttccaagaggagtatcatagacaggtattgtagatccatctccaaacccccaaaatactcgttccagtgcggtaggcatgagcttacggtgcttccctaggtattttcccaggggatcaaaggtgagcactgtattgtaaagtgtatatcctgacctttcaaccacccctatcaccaaaaaaaccttatattttccagctaatgcagctaagcgggatacttcggggccaggcacatctatggctgatgcatgatacttccgaaagtcttcctttcccttggcagtgcgattgccaacaacgagtccaaaggtagccccatgaggatagccaccaatgaagacttctggaaataaaaccaactgtgaaccatatccagctgcctccgccatcaatttttctgctttatcgagagtggcaggggtgtcgtagaacacggacgccgcttgcacgacggtgacccgaacggtgccggcgtcctgatcggtgccggcgttcatctccacctccgcgataacggactcaccgcccgagctcgctggagccagggccgccatcgtctcagagtactgagcgatcgggcgggtcgggccggggcccgggggcgggctacttgtcgtgcttcttgcggaggtagtcgcggacgaactggtcgcgagcgagcgtgcgcgcgcgctggggttcgatgttgacgtaggagaggtggatgccgtaggcgaggaggcccgcgccgagggcgaagagggaggccgtggagaggagctgccggggagtggacggggagccttaccctaggtaattttacccaagggggaatacaaaaggtagaagacaactagtaattagtaaaagtagtaata

SEQ ID NO: 14460 - DNA, 279 bp, Setaria italica
  Peptide Sequence Number=SeqID_80434
ccaccaaataactgggcctgaaacaggaaacttgagccgcacgatctgatcccttggtgcaaaagtatccattaccactgtggatgtcaagatcacaagctaccactcctatcgtagaaaataccgctcaagtcactcccactattcatccaacagtagcaagcacgaacaaaaccaaacctttatgaagcatgcaatgcacaaaatccataacaaataatgagtccagctttgccagatacgaaggtgccgagagcagcacctccttcccccatagaa

SEQ ID NO: 14461 - DNA, 678 bp, Setaria italica
  Peptide Sequence Number=SeqID_80435
aaaagttcatattatccaaagaaacttgggcaccagatgtggatcttcggtcagttgccaatatgactgaaggatattcagggagtgacttgaagaatctctgaataactgcagcgcatggccctattcgtgaaatttttgagaaggaaaagaaggagaagagtttggcgatagctgaaggtaagcctgagcctccgttgtatggaggagaggacgttcccccacttggaatggttcacttgaaatttgcgcttgaccaggtgggtgctagcttgtcgcctgattcagtaaccatgaaccagatcgtgcagtggaacaacgagtttggagatgggggatcgagaaagaaggaaacactgacctacataatatagtggaacatagagaaacaacagcaagtgtacagttgctatatttcccaaactgggaatgtatgtcctcacaagtcgccatgctcggatcagtcggggtttttctctgctaaaaattccagcagcagctgcctctgacgctcccctgtaattagcttgattgcctctgaagtactcttatctgagagtcatgattgatatgatgctgttacaacagagatcagtactcattgtactatacttcccttttccttccttttacaccctttttactggtattctgtgaattggctatagttccttgtta

SEQ ID NO: 14462 - DNA, 1550 bp, Setaria italica
  Peptide Sequence Number=SeqID_80436
gaaacccttaaagctcaagccaatactagcaatattcgtaagtttctaatcagcagagaaattgaatgcaatgatcttgaggaattatgcatcaatgaccaattactgactactgaaaatgtggataagattgtcggatatgcaattagccatcaccttcaacaaattaaaccccaaaagggtggcaaaatggtacttccaattgaaagcctcaagcatggatttagtgttgtacagagcacgcacagaggaaataagagctcaaaacatacactaaaggatgtggacacagagaatgtgtttgaggaaatcgttctttcagatgtaatatcatctaatggcactggagtaagctttgaggacattggagccctggacagcgtgaaagagacactgaaggaattggtgatgctccctctacaaagacctgaattgttcactgaagggcagctaagaaagcctgtgaagggaatactgctctttggacctcctggaacaggtaaaacaatgcttgcaaaagcggtagctactgaggcaggtgcaaactttatcaacgtgtcagtatcaagcattatgtcaaagtggcttggagaagcagagaaatatgtgaaggccattttctctttggctagtaaaatatctcctgcagtaatatttgttgatgaggttgacagtttgctagcaaagagagaaagtgcagtcgagcacgaagcaatgcgcaagatgaaaaatgaatttatggtaaattgggatggtttgcgtactaaagagcaagaacgtgtaatcgctcttggagctacaaataggccatatgatcttgatgatgctgttatccgaaggtttccttgcagattaatggtgagccttcctgaggcatcaaacagagagaagattttgagagtaatactatcgaaggaaattttggcaccagatgtggacctcaaattagttgccaatatggctgatggatattcagggagtgacttgaagaatctttgtattactgcggctttttgccctgttcgtgaaatcatggagaaggaaaaaaaggagaagagtttggcgattgctgaaggtaggccagccattgtatggaagcaaggacattcgcccaattaaaatggatgacttcaaatttgcgcttggccaggtgtgtgttagcttttcaactgcttcaagaaccatgtagttgaacaatgaatggatcctacaaaaacaacagcatctgtacagttgctatactacaccatgggcatgttctcgcaagtcagtgtgccccaatcagttacagtttaggagtttttcctctgctccaacattcaggagcaactgcctcagacgctcccttagctagattgtctactaaagaatgattgtgatgatttgacatgacactcccctgttcattgccctttaccctattcctttcttttttgttctcctgctaattgtacaaattggtaaaggccttgtggatgtaaagaaccgattcgattgattgttgcacatatacagattggctcttccgtttactattccctaaaaaaaaa

SEQ ID NO: 14463 - DNA, 278 bp, Setaria italica
  Peptide Sequence Number=SeqID_80437
taaagtaaagtaaaccttgcaagagaacctcctgtcgaagcgccatgagctccgccgcactgctcttcctctgcctcgccgtggtgctagtcgcggcggcgaccgttcacgacgagcactcgcagtgcctcgacaacccgccggacctgtcgttgcgcggcgttgaagctggcaaggttgtagacgaccttccaggggggttcagggcctatgtcaccggcccctccatgtccatacgtgccatcgtcctcgcctcggatgtctacgggttcgaggca

SEQ ID NO: 14464 - DNA, 303 bp, Setaria italica
  Peptide Sequence Number=SeqID_80438
ccatgataactggtattgcgcccgttgcgttaacagcacaaagtcaggaggcgaaggagttatagttatgcagattggagcttacttattagtctgtatgtatgatggttctcttgcttcagcttcacaagcaatggtggctgctgatcagtttgcaatgcagtttaaccggagaactcactaatttcctcttagtatagtttgatgagtgatgttggcctgcgatttggtattattatggatcatagtgctaaaatgcattaaatgaccttatgcaattcctaatgttaccatttccttggg

SEQ ID NO: 14465 - DNA, 686 bp, Setaria italica
  Peptide Sequence Number=SeqID_80439
tgccaatttgccaacactgatgataaccactcctgcttaagctgtggcactacaagagagggctttccctccaaggtgactagtaagctcataaaaatgccgatgaaaatgggagagaaaatgaactgatcaagtaaaaggcgagcaatggcacctgatgctccgctgattagtcactaatttactcaaataaaggtaccagacatgtaaagttggccccacgagggcaagtcccaaaaatgtgaatacaaatgttctccttaaatcaagtgctggaactcgatcaattacaagctggcagatgaggtccccggccagtgttaggacagcagaagtgaccgccttagttgcaatcgggttcttatcgagagacatcaagtaccatgccaagaagaaccgccaatcctttacgccagtagcgcttcctccagcggtgcctgcagccggagcggaattgctgcagcaggaggcggcgttgagctgctggaggcgcccggccttgcgcgggtaggtggcggctggggcggagagggtggccggtcggggaggaggaagagcgaggcggcgggattggagatgaggtgatgtgggcctcgccgggacgggccggggcgcgaggaggagcgcaagggcggacgccacagccatggcaggatggcactgcagcggcaatggaggatggatcc

SEQ ID NO: 14466 - DNA, 323 bp, Setaria italica
  Peptide Sequence Number=SeqID_80440
gccccaaaccccttcgccatcgaggactacctcgtctccacctgcggcctcacccgagagcaggccctcaagtcgtcgaagtggatctcccacctcaagcacccctccaaccccgacgcggtcctcgccttcctctcggacctcggcctctcccgcgccgaggtcgccaccgtcgtcgccaaggaccccagagtcctctgcgccgacgtggggagaaccctcgccccccgcgtcgccgaactcgccgacctcgggctgtcgcgtcccgacatcgcgcgcctcttcattcttggccaaaaccacttccgccacagctcgctccg

SEQ ID NO: 14467 - DNA, 2254 bp, Setaria italica
  misc_feature (2239)..(2254): n is a, c, g, or t
  Peptide Sequence Number=SeqID_80441
gaagagcagcaccagctcggaggagacggcccccgctgcgaagaaggcgaagaaggagaagacgaagaaaaatgtcgaggcctcaccttcggcctcggaggacgacggcgagatcacggccagcagcgacgaggaccccgcggacccgaacgcgctcaccaacttccggatatcggagccgctgaggcagaggctcaagtccaaggggatcaaggcgctgttccccatccaggccactaccttcgacctcgtcctcgacggcagcgacttggtcggccgcgcgcgcactggccagggcaaaactttggcttttgtactgcccatactggagtcgttggttaatgggacacacaaggcatcccggaaaactgactatggcaggcttccaactgttttggttctgctaccaaccagagagctggccaatcaggtgcatgcggactttgagttttatggttccacatatgggctttctgcgtgttgtgtgtatgggggttctccttatcgtcctcaagaaatggcattgagaaagggggtggacattgttgttgggactcctggtcgtgtcaaggatttcgttgtaaaaggaactctaaatttgaagtctttgaaattccgtgtccttgatgaagctgatgagatgcttaatatgggcttcgttgatgacgtagagctcattcttggcaaggttgaagatgttactagagtacaaacactactgttcagtgctactctgcctgattgggttaataagctctccatgaggttcctgaaaggtgacaggaagacagttgatcttgtcggcaatgagaaactgaaggctagtgcatctgtcaagcatcttgctcttccttgcaacaaggcagcaagggcacaagttattccggacattatccgatgctatagccatggaggccgaaccattatcttcaccgagacgaaggactctgcatcagagctttctggtttgatccctggatcccgtgccttgcatggagatgttgtgcaagctcagcgtgaagttatccttgctggattccggggtgggaaattccaagttttggttgctacaaatgtggcagctcgtggtctggacattaatgatgtgcaacttatcattcagtgtgaacctccacgtgatgttgaagcttacatacaccggtcagggcggacagggagagcaggtaacactggtgttgctgtcatgctctatgagcccagatacaagcacagtgtgagcaggttagaaagggagtcaggggttaagtttgaacatatctctgcgccacagcctactgatgtggcacaatcagctggcaccgaagctgcagatgctatttcgagtgtgtcggacagtgttatccctgtcttccggcagcaagcagagcaactgttaagctcttctagtctgtctgcagctgacttactagccaaagcactggcaaaggcagttggatacactgacataaagaaaagatcattgctctcttctatggaggattacactacattacatcttcaaactggcaggcctatgtggtcaccggggtttgcttttactatattgaaaaggtttatgccagaagagaagcttgcagatgtaaagggtgccaccctaacagttgatggaacaggggttgtatttgatgttcctgcagcagacgttgaagactacattcaagctgcggagagtgctgcccaggtgacaattgatgaagttaagcagctgccacccttgcaagagagagagcagtcaagaggcaactctggcggtggaagatttggccgtggtggaggtggcagcaggttcggtggtggaggcggcagcaggttcggtggtggaggcggcagaggtggaggtggcagcaggtttggtggcaggggaggcggtgggaataggtttaacaggaggaattaggtctgttgcagggttgatgaacatttgaaagcaatatgtcatttttgacgtagaattgaggtgaagaggggaggggatagtcacagttttggctgcgagtgtatcggcttttatttatttgttagtgtttgtcaccaagattatgatgatcaattttgccatcgcaagcgtacaattttgatcttgtaccccataaagatatcaactgttatgatttgtgtaaagatatatgtattggttttgccatttttgaagatatcaactgttatgatttgtgtaaagatatatgtattggttttgccatttttatctcaaaaatgnnnnnnnnnnnnnnnn

SEQ ID NO: 14468 - DNA, 621 bp, Setaria italica
  Peptide Sequence Number=SeqID_80442
tgtctagtccgtcctaggccgccataaccgtcttcctcgccgcccccccctgcacttaccccgcgatgtctcccgcgctcgccgccgccgcggagcccatggccgtcgacgattccgcctccaagaaggccaagcggaagcagctcaaggccgccgccgccgcggcggaggctgaggcggcggaggccgcttcggcgaagaagaaggagaagaaggagaagaagcggaaggcgaaggagccgtccccgccggccccgtcctcggacgaggaagagaagagcagcaccagctcggaggagacggcccccgctgcgaagaaggcgaagaaggagaagacgaagaaaaatgtcgaggcctcaccttcggcctcggaggacgacggcgagatcacggccagcagcgacgaggaccccgcggacccgaacgcgctcaccaacttccggatatcggagccgctgaggcagaggctcaagtccaaggggatcaaggcgctgttccccatccaggccactaccttcgacctcgtcctcgacggcagcgacttggtcggccgcgcgcgcactggccagcatctgttgaattgctagaccgtgctgtgcttgtacacttgataacaatgac

SEQ ID NO: 14469 - DNA, 760 bp, Setaria italica
  Peptide Sequence Number=SeqID_80443
gttccgtacatttgcatcagttgtattcaccaataatcttcacaggagcactttccacccttaaacttatgcaaacaatttgaatccttgatcagtatttgccgcttgtatttttctgaaacaagtttggcaaaggtgtggcaatggcgacacatccttacattttttattatccgtatggttctgaaaggaggggaatttgaaattgcaaatgcaattgctagcttctcacaatgtattgcagataattcttcctcctcttcttcaacatctggaatcccgttgctgatattcagctttgagattccaatctgaatcataatcaacttcagttcggctactgtacgctctaacacaaaattatcaccagttgagaacaaatagaccttgttcttaatttcaacagaacagctatcaacctcttccaactctcttcctttgttggataacatcgtctgtggcaaatcaacaaactttccagctaggtcctgcagattataaaccagcctttgaattctagggtcgctggactcaattgacaacagctctcttgcagccaggtttgccagccttacatttccatgaactgttgcagcagtaagcaatgcctcccagattgctaaattgggtatgagtggcatctcatcaataagctcatatgcttcttctaatctccctaagcggccaagaagatcaaccatagctacataatgatctaaatctggagtaatgttgtaatcgtgagtcatgttgtaaatat

SEQ ID NO: 14470 - DNA, 645 bp, Setaria italica
  Peptide Sequence Number=SeqID_80444
agaagtgcacggcagtcagaaattgctaccagccatgtgtttatacttcagtatttccagcagtatcattgtaacagaagctcatcaatatgcacattaattagcataagatgaagaggaacggaacgaagaattaagcaatctgatcaagagatcaggatgcgcgtcccaaatccaaggacgggcatgaacgatcgaccagagaattaatcaggcgtcctgggcgtagaagtcgatgatctccttgaggtcgagctggagtatctgcgagacggagcggccgtcgcatgcgagccagaggatgtgctcgaagaggatggcgtcgacatcgacgaagatggccccgcccctgcgctcctccttccgcgccaccgtctccaggagcacccggaacgggtaggagtcgagcacgagctggtcgacggagaacgcccgccgctccttcccgaccacgaccgtcaccgccgccggcgacgggcccgcggccgcctcgtcgtcgagggggcggtagccgatgcggggcggcgacgccgacggccaccgcaggaagacgcagcagccggccatggcagtggctgattcttggtggattctgctctgctcctcgggatggtggcagcagctgaatcttcttcagccttcatt

SEQ ID NO: 14471 - DNA, 417 bp, Setaria italica
  Peptide Sequence Number=SeqID_80445
aggtgacgcccacggactcgctgccgagcttgagccccaggccccagccggcgacgccaaggatatagccggagcactggcaggcgatgtggaggtagaaccacgccgggtccgcggactcgaaaacgcgcaggtaccgggcgatgatggcgcccgtggggatcaggatgccccaggccaccgcgttcaggattccgtggatctgcagcacgtttcagtcaaggttagaagttgctgggcgccaaaatcgtctgtgttacgtcaggaagcaggaaatttgtcatcacgcatcaacttttgaagtggctagcaggttcgttcaactactactccccagaaagacgtgccgttgcttctgggaattggattctgacccccatccttttgatttctagtctagcatgaatggatgataag

SEQ ID NO: 14472 - DNA, 325 bp, Setaria italica
  Peptide Sequence Number=SeqID_80446
ttaaaaaaattatacaaaatatcgtcttgctgttatctgtttcgttggataattagtcaaggtaaccggaggggaagaaccggagaagagaaatggaggaggagcttacatttttgcggcggagcctggagttggacgccccggtgctggagcctgagaggaagtccagcctggtggcgctcgccaagttcgccggcgccgtcgggtgcggcgctatttgcccgccgctgagcgacccggcctgccacaccgtgttctgctgggtggcgttcccgggcagcgcgatggtggcgaagatggtgtacgcgccgccggagtactcgac

SEQ ID NO: 14473 - DNA, 1531 bp, Setaria italica
  Peptide Sequence Number=SeqID_80447
ttttttagtttttttttgttactagtcgattaaaccatacactatgcatataaataaaattaatcatacatcaataatgagaagaagaaaaaaaagtgtgtacaaataattccgtcatagaaccctaattaaaacagaagagaaaggagctactctgcagaaccaggaacaagaaaggtacaaacagtatctctaaaggcacaacatcgatatcacatcactcgctcgcagcaaaactaagcccacacgcgcatcgtggcaaccgtgcgcggccgtggattctcatcacgcgccctgttgccagccggcgttgccgttggtcgccttgttggcgtcgcgcttgcgcttccggatggcgatgggccaggtgatggcctcgaggcagagcgcgatgccgccgagcgtggcgaggacggcgatgtaggcggtcttgtagccgctggcgggcttgaggatgtcgagccccttgaagatgttgatggcgccgaggatgatgacggagtagccgacggagtggtggtagatgttccagtagagcctgtacttgttcttcttgtcgggcctcagcagcagcgcgaacacctgcagggtggccaggctgaagatggcgatgccgatgttgcggtgggggtggtaggtgacgcccacggactcgctgccgagcttgagccccaggccccagccggcgacgccaaggatatagccggagcactggcaggcgatgtggaggtagaaccacgccgggtccgcggactcgaaaacgcgcaggtaccgggcgatgatggcgcccgtggggatcaggatgccccaggccaccgcgttcaggattccgtggatatttttgcggcggagcctggagttggacgccccggtgctggagcctgagaggaagtccagcctggtggcgctcgccaagttcgccggcgccgtcgggtgcggcgctatttgcccgccgctgagcgacccggcctgccacaccgtgttctgctgggtggcgttcccgggcagcgcgatggtggcgaagatggtgtacgcgccgccggagtactcgacggtgggcgcgacgggcacgttgaacttgagggtcgcgggctgcaggctgggcgacgtggagtcgaggttggtcatgaggacggaaggggagccgctgctctgcgtcgcgacgaagacgctgctgccgaccatgccgcggctgttggggttgatgccccagccgacccagccgtcggcgcccgactgcgcccggaacgcgatgtcggcggtgccgttctccgggtggtacgtccagtgcaggctggcgccgagcgtcggcatgctgttgcaccgcccgaaggtccggccgttgctgaacctcgcggataggcagtcctgcgccgtcgcggcggacgccaggaggagcatggcggcgccgacaaggagccacgccgtgtggcctggccgcgccatggctactggtacccggagcacctggcttgagctgtcgttgatgattcgagaggtgccgatgcaacgggaggtgaaggcttgaagc

SEQ ID NO: 14474 - DNA, 217 bp, Setaria italica
  misc_feature (214)..(214): n is a, c, g, or t
  Peptide Sequence Number=SeqID_80448
gggggagggcaagtgaggtcaccgcgcgcggcagccatccatcatggtctgcgcggcgaccattcaacagcgagaccacaccgctcaaaaacggcgaaggatcgcggcgcctttcggctccccggatggcgagcagccgagagcgacaaggcttgccgcgtcccagccgtgagccgcgcgcgcgcgcggatgcatgatcacgctatgacgcggngtg

SEQ ID NO: 14475 - DNA, 513 bp, Setaria italica
  Peptide Sequence Number=SeqID_80449
ccgactcccgcgacgccgacctcgtcttcgtccccttcttcgcctccctcagctacaaccgccactccaggcccgtgccgccggagaaggtggccagggacaaggcactgcaggagaagctcgtcaggtacctcagtgcgcggccggagtggaagaggtacggtggcgccgaccacgtcatcgtcgcgcaccaccccaacagcttgctgcatgcccgggggccgctatcgccggcggtctttgtgctgtcagacttcgggaggtaccaccccagggtggccagcttggagaaggatgtcattgcgccatacaagcacatggccaagacgttcgtcaatgactcggctgggtttgataaccggccgacattgttgtacttccgaggagccatttacaggaaggagggagggagcattcgacaggagctatattacatgctcaaagacgaaaagaattgtttatttttcctttggaagtgtccagctaggtacttattgggttaccttaagttta

SEQ ID NO: 14476 - DNA, 385 bp, Setaria italica
  Peptide Sequence Number=SeqID_80450
ttcgttacgtttgtttactattggagttgaggcatggcgtggcgtcgctttgctaaaaaaatgtgagagtaggggatgggaagagagaggaacaatgcagacggactgaccaggttgacgctgtcgcgcgcggcgagggcgaggatgtcggcgcaggagacggtggccgggcacgcggcctcgacctgcgtcttgatgtcgtcgatgaggtcgaagccgaaggtggagccgccggcgttggcgccggcgcccttctcgccgggtgtcgtgggggtgtcatccagcagcagcgaggcgtcgcagccgttgacgaagcagtcgtggaagaagaggcggaggatggcggcgccgctgcgcgagttgtccatgacggcctgcgacatga

SEQ ID NO: 14477 - DNA, 1032 bp, Setaria italica
  Peptide Sequence Number=SeqID_80451
agtcataatagttgcacctctgcacaactctgcaataatttgcgattaaaaatcttctgcttctacatcagcaactgaattaaagcctgacagagcatattcaggtcaggcaagatataataacaccaaatatcattttcattttgaatgaacacaccaaataccagtttggacagtatacagatcttacatgtgtgttgatctactttgcaatccaatgccattgattatgtacatggaattgtgaaacttgaagaatcagcatgacctatcacctatgtacaacacatgactaccagcaaataaacaaaaggctcattctcagcaccacagttgcttcataatctgccatggtgtttgcagggctaaatagaacgcagacttctgcttgtgcttcctgttctttccatgtttgagagtaaatcgtagaagttgatacagaatatgtgctgatcacatatcgcatcattctcttgtatgtgatcctatgaggagagactcaagattcttcaccgatcgactaacttcttcaagcttgtggagcaatatactgtcaggaattttgcccttaggatcgaggaaagcacggattgaggaagctttgacctttgcactaggagagtgtaatccactagttggtggaacataggaagggccttccccagagtacaatctagttctccaactttggacttcttgtgttctcctggaagcttctctgataataacctttctcagaagatctggatcatggacaccatgaaattgcagttcatcaacgggagcaggtttcccatgggctatgctttctattctaaacgtgtataagctataagcagattgtagacagccttgctcaactacaatatcaacgatcaaatggagaggcactttaatctctttcttgactatccccatgaacggcaagtaggaaggtctagtcgccttgtacactatgttgttttccgtgacatagagttggcgggacatgatgtccctcttgagcacgtatctcttgtacggcaggtagag

SEQ ID NO: 14478 - DNA, 347 bp, Setaria italica
  Peptide Sequence Number=SeqID_80452
ccaggggtgcactttttgccacatctatcggaaagtaccaaataaaatcgattaaggtcctaacaaagctggaaaagctctaggaacactaatacagctttttcttcaatgagatatctcacagtgcttggatactcagaattcttacgtcttacggtagttaatccaatggcaaaccctatgttcaacaataaaatgaagacaattagtgctccaatagagatccaatagaaaatgctggagaagtctagccctcggtccattagaatgctccttccaagtgtaacacctgataccataatctctgagacacgcaacaggggaaaggcaaggcacacagggggata

SEQ ID NO: 14479 - DNA, 1839 bp, Setaria italica
  misc_feature (10)..(10): n is a, c, g, or t
  Peptide Sequence Number=SeqID_80453
tcacttgatnttgggaggtcagtgatacaatcatcattccaaggtagacaaagtacagcaatgtgcagaacattgtatagaagaaccacaaaagcttggtggctgtccatgcatagccgatcattggatatgctataaacaagaatagtactacctgtattgccacatatggtatctccatggccagctgtgcaaaggagtaggcccaaggcgagtacattcctgcaaacctttctctgtacatgactgagcgttcaacggagacaaagggcatgactgattggcagtttttgacgccagtgtacaaagtggtgcaatacatggaccccaatatggtgaacaatcctttccggtcgtttatgtgagctatgttgccttgctgccagtacagagcaccaaagagaaggctgcaaagagctacagttacaattcgcaccaagttgtaggatggggacctccagtgtgacaaacattgtttccagaggcaggctttgaactgctcccagaatttctgcgggaaccgcattaggaaatggagatcacttgtttttggtgatggtatgctcagctgtttgacaattgcatcattgtccttgtataatgacgattccctgtatatttgagcgaagttgactcctaggtatgtctccatggattgtgatgtaacttctaacatccatgtagatgggttatagtcatccttgatcatgggtactccaggaatagcctggaaatactggatgaccttgcatgagttatgtccaagtggcccagcataaattaactttccacctcttttcattagcatcaattgatcaaatgcctcaaatatttcaatacttggttggtgaaccgtgcatgcaacagttcgtcctgtatctgcaacattcttcactgcacgcatgactatagcagcagctctcgcatccaatcctgatgttggttcatccaggaaaatgatactagggttggagacaagctcgactgcaattgtgagccgtttgcgttgctcagtagatagtccatttgctccagggagtccaaccaaactgtctcgaacttcatccagttctatcgtttcaagaacttccttaacaaagtcatatcttatctctgggtcaatttctgttggcaaacgcaaccaagctgaatacacaacagactcccatactgtgatctggggagaatgcacatcagtttgctcacaatagcctgatatcctagcaaaggtctcctgcactttaggatagccacctattctaatgtcgccttcaataactcctcctgttttcctgccagctagaacatcgagtaaggttgtcttgcctgctccagtgactcccatgagcactgagagaacccctggttgaaaggctccagtgatgttgtggagcaactgtagtttactatctgaaaatcccttctccctcatggccataggggtatcgacgtagtaattgacatcttgaaatgttatcccgagaggtttgaaaggtatgaccttcccaataaaattaggtgtatccagagcagcttttggtaactttgggcttttgttcactatgtcttcaaaattagctcgctcttttccttgtagtatagtaagcttatcacgagacacaagagcttgagatgtccgtcttacggtagttaatccaatggcaaaccctatgttcaacaataaaatgaagacaattagtgctccaatagagatccaatagaaaatgctggagaagtctagccctcggtccattagaatgctccttccaagtgtaacacctgataccataatctttccatcgtggtgttaaaaactcatttccagttaaacttatctca

SEQ ID NO: 14480 - DNA, 1080 bp, Setaria italica
  Peptide Sequence Number=SeqID_80454
atcctcctttctttggtggccatcctccatcgtcctcccctccctcgtcggccggtgggcgcagagcggagatcgatccggaccttgagttggctccctcttctgctgggtaccatgaagaggttggtgtcgaccgccctcgtcgcgagggggcttgtcagatcgtgccgcgcgccaacgacagcggctgtgtcacgaccagctttccagcagtttatgaactactcatcaggacatggtggtgatgatcctaatgcaaccggggattcaactgcaacacaaatagctgctgatcgtgatacacatcaagatttcaaaccaatgagcaaaagttcggacacatctttgcatgacattgttgctcaggatatcagggagaacccagttttgatctacatgaagggtttccctgagtctccaatgtgtggcttcagcgcactggcagtcaaggtcttccagcaatatgatgtccctatctgtggtagagatattctgggagatctcaggctcaaagaggctgtcaaagcccacactaactggcctacatttccacaaatattcatcaaaggagagtttgttgggggatctgacatcattttaagcatgcaccagaagggggagctaaaggatctgcttggtgatatcacacaaagatatggacaaaagccggatgctaacgagccataaaggaatccacggtgcatactttttcactgtgcaagctactttgtgacaatattattctcagacaatcattaggtgaccttgcatgcggttatgtgcggcaccggatatggatgtggtgccaggttgtttaatctggcattctggatgagacaaaaccatgatcggagtgtaccgagttctttgtcagaatgaataagtgccactacgcaattgcagttctttggtgcatttgtatatggagctttagttcataggttgcgctgcattcccatattttgtaattcaactgaacctgcaatgacagatatggctgtaaaatgcttatgcgaaacatgttctgaattctaccaccgtgatcacataaacaagttgtgagcttgatgattacttaaa

SEQ ID NO: 14481 - DNA, 256 bp, Setaria italica
  Peptide Sequence Number=SeqID_80455
ggataccaaccaggcgcgtcgcctccattccacacagcggtggtattgggggttcatccgaatcaatcctgactacccgactctgatgcttgtcaagattgtacctcttgtgccgctgaatcgcatcctccaatcgggccctgaatcgtgcggtctcgcaggcgacccaccggctccggctcaggtcctcccggagcctggcgaccctgctgcggaggttcttccgggcggcggccgagtggagcccgtgggtgag

SEQ ID NO: 14482 - DNA, 1618 bp, Setaria italica
  Peptide Sequence Number=SeqID_80456
ccaccaaccaaaaaccaacctagaagctaactaccaaaaccgccaccaaaccgacctgagccagaatccccaaatccaccggaacgaccaaaaccagatccaccaccacttgagcgaccaaaccctgagtcaccgtatccaccgcttgagcgaccaaacccagagtcaccaaaacctcctccgccacctgaacggccaaatcctgagccaccgaatccaccgtctgagcggccaaatcctgaatctccgaatccaccaccaccacctcctgatcggccaaatccaccacccctgcctgatgagttgccaaaaccaccaccacgtccaccggagcccccgtgagcgcccaaagtttgatccaccataccctccaccaccaccaccaccgaaggaatcgaagtcaccaccaagcaagacagatccctcgacatttacctttggaagctctttgaacttggatccaatatcacgttcaatggactggacgtccctattttgtcgatagttgtacatcgcaattgcagtacccttctttccagcacggccagttcggccagatctgtggacgaatatctcagacgagtttggcagttcaaaatgtatcaccagatcaacatttggtatatccaatccacgggcagcaacatcagtggcaatcaaaatattaaaccgtccatcacgaaatcctgccagtgttctctctctttgggcttgtgagatatccccatgaagagcttcacactggaaacttcgactcatgctgcatgacaatctatcagcgtccctttttgtttgcgtgaacacaatgcactttccacctttagcgtgctccttaataagttctccaaggacagcaggtttttcgcggttctccgtagcgatagaaaacagactaattccttcagccagcttttgatcatcctcaccaactaggtcaactgtaacaggattgttgaggtacttttgtgtgagcttccgtatccaggttggcattgttgcagagaacatcaatgtttgacgctgctgaggcacttgctgcaaaattgtctcaacatcttgatcaaaacccaccgacaacatctggtctgcttcatcaagaacaacgaaccgaatctctgccaaactcagagagcctctttttagcagatcaatcactcgtccaggtgtcccaatgaccacatcaacaccataaccaagcttccttatttgctggctaattggagttcctccataaacacatagtgtttccaagggggaagactcaatgaactccctctcaacctgttttgcaagttctcttgttggtgccaaaacaatagccaagggaaactttccaggcttgtacttgtcattgtggcggataatagcatccatgatggggattccaaacgccaaagttttacctgtcccagttttggcacgaccaaccatgtcctttccttgcattgctggctcaagaacagctctctggatggggaagagcttggtgatgcccttgctagcgagcctatcgacgatcttggacgagatccccagcttggcaatctccagcccctcctccgccgcggctccaccgcccgccctcttctcctcctcgtagaacgaccccttcctccga

SEQ ID NO: 14483 - DNA, 846 bp, Setaria italica
  Peptide Sequence Number=SeqID_80457
tttttttaggggtaagaatggtagatatacgatacgattatagagaacgtcattcaggtcagaatggcctacaaggtcgcaccaaaatcatcatacagtacagtgccactaccaaaaacgatataagaaaatcatccgcagagaaccctctgcatattttacaggtatgatctattgctagagcttgaaggatcaaaaggcaaaggaaaaacagaacagtaatgaaaaatagcactcgtgattatttcctgctgcattctgatcaatccctctccagacaaaaggataagcgagtgttttccacggcagtgactccagccttgtcaccaacagagcctcagagggatcaaacaacgggtcaagaatggcctatctctattatgaccctcaaatgtccatactaatcatcaggataaccatattaagggtagatgctattacttttgcccaagtccatcttcagactaagacgagttgccaaatcaacccgacttcctgtcaccaaagccaccaccaaaaccacctgagctactaccaaaaccgccaccaaaccgacctgagccagaatccccaaatccaccggaacgaccaaaaccagatccaccaccacttgagcgaccaaaccctgagtcaccgtatccaccgcttgagcgaccaaacccagagtcaccaaaacctcctccgccacctgaacggccaaatcctgagccaccgaatccaccgtctgagcggccaaatcctgaatctccgaatccaccaccaccacctcctgatccggagttatttcctttaccttttacctttttactttttttgttttttttagtttttttttcgtttttttta

SEQ ID NO: 14484 - DNA, 329 bp, Setaria italica
  Peptide Sequence Number=SeqID_80458
caaaaaagggaatccaaatcacttaggactgagcattttgatgcctagactacaacttcagctacttttcacggtacactgggaggaagcatttggatgtgtggctagtatcatttagtatctacttcgtcttcgtcatcattcagatgctccttgaggctctgaatctggggttggccattaacattctcccagattgaatcagtgcttggtaactcgtagccttctggtctcagcgacagtgcaaactctggtagatcaggaatcgattgaagtgcgctgttcttgtcttgctcgaacagatgcccgtacacttggaacttcttgta

SEQ ID NO: 14485 - DNA, 302 bp, Setaria italica
  Peptide Sequence Number=SeqID_80459
agaagccttctcttcgctcgctctccgcccgccgcgccatgagcgccgccgcgtgcctcttcgccgccgccgtatccctaaccctcccctccacctccgcccccgccttcgcaggcgcatcgggccgacgcagccgatggatccctgccgctctccgctcctccccaactcgccgccgtgggccggtccgggcactcgacgagcggctgctcgaggccgctgcggctccggctgcgaaggacaccgaaggggaggaggcaggtgttgacgtgggagatgggttcggggacgcggagggtgat

SEQ ID NO: 14486 - DNA, 1310 bp, Setaria italica
  Peptide Sequence Number=SeqID_80460
tagtccagaagaggtgggggtcgatctcacaaccctacttatacactgtgctcaggccgcagctattgatgatcaccgaaacgcaaatgagttgttaaaacagattaggaagcattcttctgctactggagatgctggccagagattggcacactacttcgctaatggtctcgaggctcgcctagctggcactggtagcagcatctaccgttcacttacttcaaagagaacttctactggtgaaatgctgagagcattcggtttatatgttaaggcatgctcatttaggttaatatcgcactacgttgcaaatacgaccatcttgaatgcttctaagagtgaagcaaggttgcacattattgactatggggtacagtatggttttcagtggccagtcctcatgcagcgtctctcaaagagatgtggtgggcccccaagccttcggatcactggtatcgattttcccctaccaggattccgccctgcagagcgtatagaggcgacagggcgacggttacatgagtatgcccgtatgttcaacattcccttcgaatatcaagctattgcttccaagtgggataccatccaagttgaagatctcaagataaaaagcgatgagtatcttgtcgtcaactgcctttaccgaatgaggaacatgatggacgagacagtaacagatgacagccccagaacaagggttttgaacacaatcagaaagttgaatccccatttgttcgttcatgggattgtcaatggtacttacaatgcacccttcttcgtgacacggttcaaggaggctatgtttttttccctttcaatcttcgatatgcttgaagcaaatgcctcacggatggatgaacataggctgctgatagaaagtgaattctttggacgggaagctcttaatgtgattgcctgtgagggcacagagaggattgaaaggccagagacctacaaacagtggcagatgaggaacctcagggcaggttttaggcagctacgcctgaacgaagagataatgaagagagcaagatacaaggtgagcaagagctaccacagggatttccttgttgacgaagataacaagtggatgctacaaggttggaagggccgtatcatatttgctctttcagcatggactagctagacctgtaaatattagtgggctcagctgacattttctatgaatttattattttttttcgccatttcattttgttgtatgatgtttatgtccatgaattctggccgttctcctgaagccaaaattttgaaattttaattgcctgcaataaaagatgcttgttggt

SEQ ID NO: 14487 - DNA, 240 bp, Setaria italica
  Peptide Sequence Number=SeqID_80461
cggcctggattggtttcttcattgttgtggtaagaggcacctggtttattcttgctgaagctggtggtacatgtgattctgtgaatagcaggcctctcttctgtctcagcttttgcttctaagcaatggccaatgtaagcaagcacttgcaaccttcaagcgcagcaggaaatgacaggaagtaccagggcacattggttgcttctccagcaaaagccatttcacccaagcgtgtgaatc

SEQ ID NO: 14488 - DNA, 1339 bp, Setaria italica
  Peptide Sequence Number=SeqID_80462
cctggtttattcttgctgaagctggtggtacatgtgattctgtgaatagcaggcctctcttctgtctcagcttttgcttctaagcaatggccaatgtaagggcaccttgctttggaaactcttcttactgcctcaagcacttgcaaccttcaagcgcagcaggaaatgacaggaagtaccagggcacattggttgcttctccagcaaaagccatttcacccaagcgtgtgaatcgcatcgtgccatctaggcagctgatattgggtgcggattcactaggtcatgcggcatcatttctgcttaaggttgttgttcttgaggcagtaagaagagtttccaaagcaaggtgccctttcatatggaattctgtccaagcattgcaaattcttgtgtaccctccatttagctggattcaacggtgggcaccactcagatttattgtgcaaggaatacagaaactatccacgccactgttgtttctgtcagtcacaacaacattaagtgagcggtcttctaagcgtgatgatgaaccggacagcaatacagaacattctgagacaccgtctgaagcaaatgaatcggcatcaacttccagcacaagggatgttgctgatggcacaaaggaaatcgtgcaagagaattggcttgtgttacttttcagagaacttgagaagcagggcatcactttgcccgagaggttcacagaagatgagttgcgcagattttatgtcgcagcaaatggtgacttttcaagtttactctcttcggttaagaagacaattcgttggagggagacttttcacatacttacattgcaagaacttgataggtggtctcacttagtcttttggcatggatttgacacaatgcttcggccttgtttagtaattcgtcttggacttgcatgtgctagtataccaccgcgtgatagacctcgtttcgggcaagcagtaggtaattcctcaacctgttttatctgtacatttatttctgtatattcttaataatcatcatttttctatttgataattttattatgacttcaaagtttagagctgggtagtcaaactcacatgtagtatgggcaatgtatctttctgccagcaagatatcttctactggtgaaagtcttttgctcagtttgacattgtggtgcttttcaaaggcatatccttctctttgtaaactgggtgctagctattctgagagaaaacgtgtgatctttgatgtgctttttctttggctttcataccattgaagagggtagtataacttgttttcaccttttccttcctctgattggcttgcaagaaaagtggctactttctcactgatgtct

SEQ ID NO: 14489 - DNA, 679 bp, Setaria italica
  Peptide Sequence Number=SeqID_80463
tacgaagagaggaggtaggaagagtacaaaaattcaacagctaatgtagttcggctccgcaattgcaattgagaatggaagggtaaaagatgcacatatcatccatttcccaggtgcaacaagccgtactctgtgcatttcaacaatgtcaacattctcccccaatgctacatttatcctcccatggaagtcatgttcaggatcctctgctttggaaaatccataaacgtggatcattggcatgacacaatgcagttctgattgaccactccgcaagatccctctgaacacatctggggaaaaaaaaattcggagatatctttatgtatgtgaagtttttcaaaatcaattcaacatggaaacatattaaagttgttaatgttctttaaaaacaaatattgactcgccatcttttgatttcaaatcaaataaattttgtgggattggtctgcaatgaactggatagggacaatctcatatgataattgcatgggatgctctactgcttcaagatatatttacctgtctccagaatccggagaacttgtggaaatgttgaggtcctatataagtccaaacaaaatataattcgatacaatctgatgattctcagactagaataaggcaatgagaacacaaagcaaggaaggaggtttcattcatatgttcggtctactgc

SEQ ID NO: 14490 - DNA, 913 bp, Setaria italica
  misc_feature (1)..(43): n is a, c, g, or t
  Peptide Sequence Number=SeqID_80464
nnnnnnnnnnnnnnnnnnnnnnnnnnnnnnnnnnnnnnnnnnnttttaaattcacaattcaatcagaagcgctttctctttcatgcaagtctttccgaatctaggacaccatctaaataatctgctttgaagaatttgcggacatactacgagagaggaggtaggaagagtacaaaaattcaacagctaatgtagttcggctccgcaattgcaattgagaatggaagggtaaaagatgcacatatcatccatttcccaggtgcaacaagccgtactctgtgcatttcaacaatgtcaacattctcccccaatgctacatttatcctcccatggaagtcatgttcaggatcctctgctttggaaaatccataaacgtggatcattggcatgacacaatgcagttctgattgaccactccgcaagatccctctgaacacatctaaaaattctgcggcgtcattgggcaaattcattactatttgggtgactggatgcacatgctggcttgaatatattgcactgataaaccttctagcatccatgttaaaaacctctattttcctttcgagtttgttaagaaccatgtttctcttgaagtattccactgcagtaggatttatgtcatttgcatagacatatttgaccttttttgcagctgaaattgctaggggaccaaccccagagaacatatcacctgcagcaggttgagataaccaacaattggtttagttacgacttaagaattaagataagggtgtgggtaatgtacacacttccaagtccacgcccaaataaatttcaaaacaaacagcagattaaatttaaatgttttagttattcgggtctgactctgatccttaatttggtgtgacacatgcatttaacatcccagggcctagaattccacggcatt

SEQ ID NO: 14491 - DNA, 780 bp, Setaria italica
  Peptide Sequence Number=SeqID_80465
cattcatatgttcggtctactgcactttcttaaattaaacagttgcattaatagaggtttcattcagtagaaacgagaaaaaaatcagttacaagtactattttccaattagccaaactcaaaagaggaatttggaaatacccacctaaaattctgcggcgtcattgggcaaattcattactatttgggtgactggatgcacatgctggcttgaatatattgcactgataaaccttctagcatccatgttaaaaacctctattttcctttcgagtttgttaagaaccatgtttctcttgaagtattccactgcagtaggatttatgtcatttgcatagacatatttgaccttttttgcagctgaaattgctaggggaccaaccccagagaacatatcacaaacaatatcagagtttctaaagatgtcattgacgagcctctgcctctcggtggctaatctagaattccaatagactgtaccaagatcaacttgaaaacggaggccgctctcaatgaccatcgtacgaagggaatcattaccggctaagacttcaagttgcatagttctatagtcattttgaatagcatctatcttattgacaacagtttggattttggcttgtttttatccagaaccacctgagcgataagtttcttgtaaggcagatgctcatcacgcaagttcaagtgtgcaatatgccctactgtttcaaaacctgtaggaattattacaccttcagggagtaattcctctaaaacctcattcattggccaataatt

SEQ ID NO: 14492 - DNA, 646 bp, Setaria italica
  Peptide Sequence Number=SeqID_80466
aagaggcacaaatgtcaggatgagcatgtccctagtgatgttgagagaatactccttgaacacaggcgcagaactgctcggcgcagtgaaattgtcgaggagcacaatgtcttgcgtcgacaccttgaagttcgccgtggtaagatcatacttctggtatttgaaggggaacaagtgaagccggacaaaatgccggccgcggctcttgagcttgaaggcgtaggacgatggctcgttgaatattctggcactctgatacagcatagcactgtcgaaacccgagaccaaattcggcgaggtggttgctgcggtgctttgggaggatgtcaatatggccggcccggagttgtctgcctggaagaccctctggtcgacgtttgcatcgatcgtggaaccacagttgatgaggtagttgtctgcaggggtgaaatcggcgctgcaggtgccgagaacccagatggctgcagtgaaggctaggaccagtttgaggttgacagtcctgctatccatgacgagttctggtgcagatggaggctagaaggatggaagggtcatgaatcgcagagaggtgtataaaggctggaactggaagtgctatatgagataggtgcaaggactgaagagagcaggaatgcttaatttcttt

SEQ ID NO: 14493 - DNA, 311 bp, Setaria italica
  Peptide Sequence Number=SeqID_80467
tggatgccaccagcgttgaaggagtagtaaaatttggtgttggacccagactccttggatggaacagcgaagcgcgccaagtatgatgcgaatgtcacctcgccaccatgcccctgtggttcaatctcatggttcccctctatcaccatcagtggaattttcgacgtaatgggctccatgaatcttccccatccgtcccatcttggctggtaggactcccgaatcggggcattgggaaaggagcaggagaagcagggcaccccttgccgccggtggagaggtactggttggcgtaggtcatgtccccgaca

SEQ ID NO: 14494 - DNA, 324 bp, Setaria italica
  Peptide Sequence Number=SeqID_80468
tttttttttttttttatttcaatttcccaagcgattaaatagtttttttttattacacagtccatgggcaccaacttgaagaaagaacactagcaacagactgtaaactaaattgcattattgcacatgcgactgtttcagtcttctgcattgccaccatgataatgccattttcttgcactatgacatcctattgtcatctctctcgttcgaccacactactctatatacttcatttgtactgttggggaactgccaggaaaggcttgaaggtcagtatgagccccatgacctctgtcaaatttagtagcagaaacatcatat

SEQ ID NO: 14495 - DNA, 311 bp, Setaria italica
  Peptide Sequence Number=SeqID_80469
gtggtggcggtcgaagaccgggtacgccgggaggatgcggccgtgcgcgaagatgtagtcggccggcgcgaggtcctcggcgccgccgccggtcccgcgcgccacgagcggcggcgcgaaggcgaactcgaaccccgcgtcgtcgtcgtcgtcgtattcgctgccggcgtctgagaaggcgcgctcatccgtgcccgggcggtgtgcgtcggcatcggcgccgtcgccgggcagcgcgttgccgaagctgaggacggagtcgaggcgcgggggaggcgccgccgccgcggccatcgcggacatcagaggcg

SEQ ID NO: 14496 - DNA, 449 bp, Setaria italica
  Peptide Sequence Number=SeqID_80470
gttttgtttatccaatttgtctttcttgtctttaaaatacatatacaaccaagtttggcacttcgacagagtatggtgtacttgaattctgtccaatgatatgtctaaatatgtaaaaaaagaaacttctaaattcaaaatcatctggtaccttactgtttatgttaattggtctcaagcttgattttgcattcaggtagtttggcttagggttttcagggctaggctgattattatagttgtctatttcatttttttaaaagaaaaccctggcttatcctatgtactcactatgtcacttgcttcctttgtagactataaaatatttttagattatttgataactgctttgctcaaaacattttcattttgtttgttctggaaaatcaggaagtcaaacctgtttccagtatttcttccccaaatcatagtcattcacctgaatgtaa

SEQ ID NO: 14497 - DNA, 3236 bp, Setaria italica
  Peptide Sequence Number=SeqID_80471
aaaagaaaagcccgggctcggctttggattcttgcgggggcgaccggttttctgctctcgaggctcctcgccgccgaagtcgcggcctttcttccaatccaccggggtggcgccgccgccaatctgtgttgatatctgaaccctgcttttgggcattttagtggtggcgaaggatccaatagaattccagttgctgctttgaatggtctggtggttgggagatggatcgcaggagttggctatggaagcgcaagtcctcagataagagccctggggagagcgatagctctggttctgtgtcgtcacattctgagccttacttcgatgatcaggaagtcaaacctgtttccagtatttcttccccaaatcatagtcattcacctgaagtttcttcaaggatgatgaccgatgatgagactcaagaagctggaacaacaaaatcattgaatgagaagctattgttggcaactatcttaaatgattcttctccacagcatggccagtcaccacagccagaggtgtgccagtcaccacagccagaggtatccccagttgtccaggattctgtaaagagtttgaatgagaaattgtccccaaaggtcagggatgatgatgtccaggattctgtaaagagtttgaatgaaaaagtgtccgcaaaggtcagggatgatgatatcccggattctgtaaagagtttgaatgagaaactgtctgctgctcttctgactatcaatgctaaagaggacttggtaaagcagcacacaagagttgcagaagaggctgttgcaggttgggaacaagctgaagctgaagttgcttccctgaagcaactacttgaaactgcatctcagaagaatacctccctggaggatcaggtcagccacctagatgatgcccttaaagaatgtgtaaggcagcttcgccaggcacgagaagaacaagacaagaaaatacgtgattcagttgccaagaagtcaaaagaattggagtcagagaagtctgagctccagaaccatattgccgaactgagtaagcagctggaagccaccaaagtagaagctactgccatgcaggttcagcgcgatctgcaggaaaagcttcagatagtggagaaagaaaacaaagacctcaaggttgagctcctcacactgtccaaggacctgaagatacttgcacgggaaagagacctgagcaaccaggcagcagagacagcaagcaaacttcacctggaaagtgtgaaaaagattacaagagttgaggcagaatgccttaagttgcgtcatctaacacggcgaacatccttggccaatgattcaaggcctatagccaacagtgcttgcatggaatctcagactgacagtcaatctgacagtggggagcgcatgctagttgttgacgatgaaatgaaaaattccgattcgtgggcatcagctctgatagctgaacttgatcaattcaagaatggcaactctggcgcaagaaatcttgtgaacaatcctgctgagattgacctgatggatgatttcctcgagatggaaaagctggctgcattacctgaatcagaccgtgtaagctctagcttcggagctgaaactgattctgaccaaggtgtgactacagataagtcatcaaaagtcgaaactgagtcattgatgcgtcaggtggcagatttgcatggaaaggttgacaagattgaagttgagaaaagggaccttgaaatggcccttgcagatgccaaagatcagcttggcacatcatgtgaagctctaatggtggccaacaacaagttggtcgagttgcagatgcagttggacttggcaaacgagtccaaacatgctgctttaggacaagctgaacgactgaatggtgagaggaaagatttggcattgcaattggagtctaagtctgcacaagttgaggagcttcagctgatggtggcgtcactggaagaaaaggtagacaggaaggagttggaattgcagttagagttgatttctgcggaggctgcagatcttcgcaagacagtgacttccttggaagagcagattgatgcggagagaattctttcgatgcagcacaaagcaaatgcagacatggcagaggcctctaaagaatcattggaggcacagctgcggtctgcaaacacagaaattgggaaactgaatgggatcatgcaaactttggagagtgaggtgcagaaagagaaggcgtctcgtgaagaacttttggaacagatagagaccatgaagattgaatcaaacagatcacttgcttcagcgtctaccaaagagtcattagaggcgcaattgcaggtagtgaactcagaagttgcaaaactgcacgggacagtgaatgcgctggagtgtgatgcagcaaaagagaaggcatattcctcagacctccagatgcaactagaggcagtggaaggcatcaggaaggtgttggagtctgaacttgagtcttcacaccaggagaccatgaagctccgggagaaggtttcgttgttggaagtaaggcttaaggaccagacctcgttgcttgtagaatttactgctaaatcagaggacgcagtgtcccggagaaaggcaatggagggtcaacttgaagcagcaaatctggaagtcacaaaactgagaaacaggatcagcctgctacaagggaaggttgagcaggagaagcttctgtcagaagagtacgaagcaaaatgccgcaagctggaggctcagctgtccagggacagccgagaggtgaagctttggcgtctctctaactcaaacggcgacctgaaggtcaagcaggagaaagagctaagcggtgctgctgggaagcttgcggagtgccagaagaccattgctaaccttggtcgccagctgaaatcactaactgacatcgatggtgttgtgacggatcatgaagatctggaacccaaggacacacaccttgacttcagagatggcgacgatggcctgctttctgcagacatggctgacggtctgcacgaactgggtcttcctaagagaaatgggagctgcttctcaccgattcggccgaatccatcctcatcccccaccttcgggatcgccggtgtctcagggaatctgacgtctcttagtagctacctgagcaaaacaaaaacgtaagcaaccatcaggttctgtaaatgtacaccagatctaccattaagtaacaactgacgtcatccgtgaaccgtcaaataattatgcacaatcctctca

SEQ ID NO: 14498 - DNA, 422 bp, Setaria italica
  Peptide Sequence Number=SeqID_80472
ttaaaaaatggtcaaaagcaaagtaaatattgatacagatgggggcagatgctgatactagaactggaagttactgaatgctactaatccccgagatatatcagccacctcttattaaaccagaagcaatgaatcaattagtcctccaaaaccgcattcagagggaagctgccctttcaccgtcagttgagatgaaacgcccttgttgatatgtcgttgccaatgctgctcccgccatggtggttcccgccacccttgtgcctgctgccaccaccaccaccagctccagcgccaaagccaccgcctttgcccgcgcttgctccgtgcccacctccagtgccgccgcccatacctccgccaacacctgctccgcctcgtgcaccgtagacagcaccggcgcctgccccgtgcccgcctcctgc

SEQ ID NO: 14499 - DNA, 543 bp, Setaria italica
  Peptide Sequence Number=SeqID_80473
cttgagtgcactcagcattcacatcacatctccaaatttgaaaactaaaatagcaagatctctgtttaacatcactataatctgtgtacagcacatcataccaatcaacctgaacaagattgtacagattttcttgatcttcctccacaaatgtctggcggacattagaaggatcttttcgtgaagatctttttttacgagatgttgctccaagaaaccctcctgatacaaatccaaatttggtggccccaccagtttacatcttcagcttgggatacagcatctgggcagatgataggatcaggttcatccaagcatgtagattcaactttctgatccacttggcaattatcttcatttttgcgtacaagggaagttaatgtgcttaacttctgcaagttggggtgtgcgtcgtctgtgtgcaacaacatcaacgctgctctgggaaatgaagaggcgaacgatgccgttgagagttgcgaccaagcctgctctagcttctgcagcgtgcatgttggcagcgccaccgtggttgctttaagc

SEQ ID NO: 14500 - DNA, 1580 bp, Setaria italica
  Peptide Sequence Number=SeqID_80474
ttttttttttttttaattgcaacgtgcttttttttttgtcaagcaaagaagtagcatacatagcacaatcacgtccggtttatatttccgcggtttgtagactaaggcccagcaagaacagctagagatacatcgaatgtactgcaaacatatagattagcagctctgcacctaacaaaattttgcaaaattcaacctccgcatctgcaaagggtttgattccttatctatactacagagctcaatgtgtcctacttctgatacaaatctcaagcaacaacaaatatgagcaccggacacctcaaccctgcactgctctgccccaagactccgtatctgcttcactttcaagacacaagatgtactttcttgccgtccacgttgaatttcctgctcccctgaagcttcttcttcagaaacaacatagcttcacgtctacaagagaagctggagaatacagcatttgaacgttcttcgacagctaccttaagatccttcaatttcatcgactgagatggggcctcacgaagtattcttttgcaaagtttcttgaccttggttttggatttaatgtccgcgtgcaatactttatctgtattcttctctgtgtcaatcaattcaacagtagtggcaggttgttcctcattgtcatcttcttcaatttctgaatattcatcggattgggctgaactatcttcatcactatcaccaaatgaagttttatttcccttccaacgatggccagcaattttcattggcaggcccttgatgccaagaccctgcttgcctgaagtagctttatcctgaacaaggttgtacagattttcttgatcttcctccgcaaatgtctggcggacattagaaggatcttttcgtgaagattttcttttacgagatgttgctccaagaaaccctcctgacacaaatccaaatttgtggccccaccagtttacatcttcagcttgggatacagcatctgggcagatgataggatcaggttcatccaagcatgtagattcaactttctgatccacttggcaattatcttcatttttgcgtacaagtatgccttgaagatctattgctgaataagaactcacacttttccccctctctcttttcttgtatcttccttgaggtcgagtaactttagtaacttcatcatttgctggtttgtctttcttgggtgtgctgtcaggcgaatcacttacagctgcagtttcttcttgaataggattagctgattgcactttcagtttcttcagtatgttgtcaaattgggtggtatcatatacccatttgtcacgaggattatctacaccaacacctagagtatcctgcttgtttttcaccctaacatgaccctttatgccctgtttgtctttgccaaggccttcaccttcttcccatcccatttgtttcatgaggcggaaggcggcggactgccgcgcgatccctacgtagcatgtggacgcctccggtgcagccatggcgcctgcgctgcgtggggtcgtcgcggcgttcgccgccgccgggatggtgccgcgctctcctgggttgccggagggggggcggagagg

SEQ ID NO: 14501 - DNA, 1232 bp, Setaria italica
  Peptide Sequence Number=SeqID_80475
tcgtcgcgctcggggagctgaccttcaactccaagcccatcatcaccaacctcaccatcatcgccggcgagaacctccaggccgccaagcccattgccgccctcatctgcgccaacatcctcgaggttccaagtgaacagaagctaccatctctatatctacttgacagtattgtcaagaatattggaaaaagattatgttaaaacatttctcttcaagactaccagaggtgttctgcaaggcgtataaacaagttgatccttctatacatcatagcatgaggcaccttttcggaacatggaaaggagtgtttcctcctcatccgctccaaatgattgagaaagaccttggttttcagtcatctgccaatggatcctcaagtgccacaccatcgaggcctgaatctcaatccccacggccatccaatagcatacatgtaaatccaaaatatttggaagcacgacagcagctcaatcaaccaactaaggggatactgggaagtggtgctaagacagctgtaattgctgatgcaggcaatgatattgagagggctaacaggctaggtactgatagaagtgcagggcgacgattagatgctcctaatgctaggcctaacatacagcgcactcagagggacccttttagcaatcctgttaatgaaaaacaggcaggtagagatgtcaggggtcttggattctccaacatttcacaacaagctgttgtgggaactggtcaagttcgctcaaaatccaaaggtcaagatggaatcggggggccgtattatgccactggtgttggctcttctgaagaacaatttgaccggcgcagcaacttttatgcaagcaaggatgttcggccatcaggacctgtacgtttggatagtgcacttcttccaactccttccattgatcctgatagaattggtaggccttcatcaaacaaaagctggaagcactccgaggaagaagagtatgtgtgggatgatgtacattctcaagcagcagattatggtagtaacagcactgtaagaaaaggagaatggatggtcgatgatggcaatgctaagtttgcaagcctccaaagggctaaatgggcagagggaggagctgttgaacatctagacccaagatttggacttgcaacaggtcaagatagaagacttgcggcatacatggatcatgaagagtacattcatggtaagcatgaggtgggaccaagaattgatcgggaaa

SEQ ID NO: 14502 - DNA, 1576 bp, Setaria italica
  Peptide Sequence Number=SeqID_80476
taggtaagtaaattaggaaattaagttacgaatttagtcgaatagaataggttagatgctaagtttgcaagcctccaaagggctaaatgggcagagggaggagctgttgaacatctagacccaagatttggacttgcaacaggtcaagatagaagacttgcggcatacatggatcatgaagagtacattcatggtaagcatgaggtgggaccaagaattgatcgggaaattaggcctgatggacaacagttgccggcacctcgaagttcctctctctgggcatcccaggaaaacacacacccagacattgggctggatcctaggatatcaaggttttccaatcagccaggagagaggtctactatttatactggtaccatgtcagcaagtatcacttcgtctgtacctgttgggttatcaggaccttacgctggaagatcaagcctagatagtgcaaacagtgtaccaataagatcaactgagacttttgggcagcaaaagcacagatattggtcatcttctcctccaccagctcactcaccttcatctactgcaccctttgtacgtcagagttctccaaatcctgctgagcctgatttttatccttccagatcattttctcaattgggccaaaatcctcaagaagaatatagcctaagagcggcagcacttgctaaagattctcattttatgtctcacaatgctggacttcctcagggacaacctagtctactagcaacccagcagggacaaaagtacgctaccttgcagccaaagtcacatatcaagccaactgatcaagtgcaggcaagcttttcacgtgaaaattctccatcgttgtcgagaccttccatccagcttggagaagtctctttacccagtgatcccacccctataacctcagatctgacaagtgctagtaatttgttggctggtctcataaagagtgggttcaaaccaaataaccccagcgatcttgcaagtttgagggcacaacctcttgttccaagtgggccacttccacgtactctgccatctcctccagtggcatcttcatcactgcaaaatgcagctggcgaaaataccactttgcaaacacaggcaccaaacactgctcgtccacctttgccaccgggcctgccaccacctccaacacagagtgcggggatagctgcaccgctctcaagccttctcagttccctggttgcaaaggggttgatctcttcgccagccactgattcatctgctgctggcccttcacagccaaataaagcatcaagcgcaaacgctacagatgttgcagcttcagctatgcctatgccagctcagaagccttcagttggtaaggagacatctaattctgattcatcagccccaacaaacactttgttacccaaagttatcaaaatcaagacaggtgaccttattggcctggagttcaagcaagagatacttcgtgagtgccatgaacatgtgattagcagcctgtttggtgaccaaaactatcagtgtaaaacctgtggtgaaaggttcagtcttgaagaggaattgaggtcgcacgcgccatgtcctgtgt

SEQ ID NO: 14503 - DNA, 256 bp, Setaria italica
  Peptide Sequence Number=SeqID_80477
ttttttttttttttttttcaaataaaaccccaggaaaaacaaagatttgagcgagtggataaaattattacaacacaaatacatatgatgtataactaaatacacaacgttgggcttttctactgtgcacactacacttggtacaacaccaccatctatatcatctctaagcacccctcttctctcccaaatcaataacccaccatctccccccacagaaacccccaaatttgatgcacaagcatccatctcaagc

SEQ ID NO: 14504 - DNA, 658 bp, Setaria italica
  Peptide Sequence Number=SeqID_80478
ccttggtcacagggagtaaggcagcagcgtgaagataagaaacatctgttagtgctgcaggcagaggatttgaagcaacatcagctgcaaaagttctcctgtgaacttctctcaaggcatgtacagagagttgccacaaaagctcaacaaatctcggcccgcagcaagtcgcaagcgacgagaccctggaattgctccgcggtaacgccccctgctgctccagttcgctaatgatcccttgcacgatcttcctgaactccctggactgagcggagtcgaagattggccataccttgtcgaagtccttggcggattgcgcggggcctcgtagcgatgagagaaggaagtagaggagctgctcgccgaggcgcgggttggagtggcggaagaggccgacgcgggcggcgggggaggagggggagccgaggacggcgggatcgagaccgaggaggaggcagttggtgtacatggcgctctccagctccgcctcgcgctccttctcccgatccgttgccatggccgccgcgaccgcgcctgctctcaaggtggggtttgggggcgcgggtgggtggagctgctaggtttagcaggcggaggaggagggcgccattggagacggagccgtgagatctcgcggaggtgggcgagggagacaaaa

SEQ ID NO: 14505 - DNA, 2221 bp, Setaria italica
  Peptide Sequence Number=SeqID_80479
gagagatttgagcaagtggataaatgtattacaacacaaatacagatgctgtatatataactaactaaatacacaaggtaccagtaccacaccaacatctatatcatctctaagcacccctcttctctcccaaatcaataacccaccatctccccccaccagaaacccccaaattttgatgcacaagcatccatctcaagctggtcacaactggcaagcagcttgaccatcaacacattcaccgcaaatatgctgtcaataagacgaacataagccacacgaaccccgggctgcggtcaggcgctgaaagcttcaggtgatggtcaaaatattacatagtgtacaagtgaagcctaatgttgttccattaatgctgcatcagtctctgacagtggtgcaagcaggtcctcatcagcatcatggaacaacgaagattccatcaacagtggaggggagaaaacttgatcaagagcatcatcagtgataaatgactgacgcgccagaccactaaccgggtcaagaaaattcatggcactgatgggatcatgtccattcagttcacttaacagaacaggacttgtgtttattggactgtctgcattgtagtaaaggtcacccatgctctttgggaacttcatctgaggcgacgacaaacctaatctttgttttcgtcgatttatcgctgcatccatctcccttgcagcacctgttgacagcggaatgaagaagtgctctgaaccatcgtcactatttttatcttgcggcctctctgtattcctcgatggctttgacagagcagcttcacgaacagaccgtctaatgtcattagcaaaatagccatcattttcatgaactgaaccattcatttgatctttagttgaggggatagtgagcgttttctcttctgatatgacctcctggctaggttggcgtgttaatgcattccgtttttgcgtctgcgttccttttccagaagaacttggagtcaggctaaataatggaggtagctttagagcaggactgcccccaggcttgtccaggtatgtagaggagagcttagaagtcatctctgaaacttcactgctgctttcttctgatcttccaagccctgcgttttgtacagacagcggtagtctggaattcaattgatcgattgggttgctaacacagttcacttcttctgagagttcttcaattgactgctgcattgctggaatagcttccttcagttgattaattagaccctgtatactgactaaatgctggcgatgttcggctaacgttgcagttaacgagtcagcatgagtactggtctctccgtcggatgcactcctcagtaattctggcccctctccgtcatttgctttggccaaatgaagagactgtttatgaatgcgctgtaaagcatgagtccaacggcggagaatttcagctacatctacattttgttgagcacgtccgttcctatcatctggccttgaaagggcttcttcctttccttggaatagcggagaaatcttctcttgcttgtccaaaatcggagaagtttcaccagctcgagctgataataactcggaatgtggaacacttgaactcatatccatggccgctagtaactgagatccagatatccggtatctgtgctcccgatgtgctataagatcttcaattggtccggaagctaaaacctcatgttggcctttgcgagccaatatagattcccaaagacgagttgccttagaaaccaaatgagaattctgcccagacgagcttgaaagccgttcatcccacaattcaccttcaagttttgctttgtttctcatgtcttgtagtttctctaactcttgctgcaaataagcctcttcggcacatagacttcggaactcagctgtcatttcatgggccaaatttgaccatgtcgtttgcctctggacagctatgtttgcatttttcagaaacttacgcctctccagagctatccttgccttggtcacagggagtaaggcagcagcgtgaagataagaaacatctgttagtgctgcaggcagaggatttgaagcaacatcagctgcaaaagttctcctgtgaacttctctcaaggcatgtacagagagttgccacaaaagctcaacaaatctcggcccgcagcaagtcgcaagcgacgagaccctggaattgctccatcttcctgaactccctggactgagcggagtcgaagatt

SEQ ID NO: 14506 - DNA, 412 bp, Setaria italica
  Peptide Sequence Number=SeqID_80480
cgcttcgcgacggcgcgcagtgggtgtccgtgccctccgaccgcgacgccttcttcgtcaacgtcggcgactccctgcaggtgcgcgcgcgcttttgacacgtgacacccaaattttcgtgtgaccctcccgatttttcgcactcgctttctacagtagtccggctccagcaggctagattctgccgtgatgtggatactattaaaatttagtgcctgcttttgtgaacaagtcaaactgagacggccacgcacggaatgccggtgctgaccaacgggaggttcaagagcgtgaagcaccgggtggtgaccaacagcctcaagtctagggtttccttcatctacttcggcgggccgccgctggcgcagcggatcgagccgctgccggagctgctgggggaggcgagggagag

SEQ ID NO: 14507 - DNA, 463 bp, Setaria italica
  Peptide Sequence Number=SeqID_80481
gacgcgctgagcgcgatggtgacggagcaggggagcgaccaggtgttccgcgtgaaccactacccgccctgccccgcgctccagggcctgggctgcagcgccacgggtttcggtgagcacaccgacccgcagctcgtctccgtgctccgctccaacggcacgtccggcctccagatcgcgcttcgcgacggcgcgcagtgggtgtccgtgccctccgaccgcgacgccttcttcgtcaacgtcggcgactccctgcaggtgctgaccaacgggaggttcaagagcgtgaagcaccgggtggtgaccaacagcctcaagtctagggtttccttcatctacttcggcgggccgccgctggcgcagcggatcgagccgctgccggagctgctgggggagggcgaggagagcctgtacaaggagttcacgtggggcgagtacaagaaggccgcgtacaagacgaggc

SEQ ID NO: 14508 - DNA, 790 bp, Setaria italica
  misc_feature (486)..(486): n is a, c, g, or t
  Peptide Sequence Number=SeqID_80482
ggcagccggttccggaccacgaagctcgacgcagccctgacgctgttcctgaactccatggtgcggcgggtgccctcgacgacgaggttggtcatgttgccgatgaggtaggcggtgaggccgaggttgaagagcatgtagaagatgttgaagaccatctcgagggtgttctcggcgtggaggtcgccgtagccgacggtggtcatggtggtgatggaccagtagatggaggagatgtagcggatccggaggctggcctggcggaagttggggatcgccgcgccgatccaggtccttgtcacggtgagggtaccggtcggcgatcaggtagtagacgcagccggcgcagtgcaccaggaacagggtcaccgcaacgaggcgcgcgcagcggatccagaagtagctgaagcggatgtccttctcgagcctagtgaagaactgcttcaccttgcggagacgccagaggcggaggatgccgagaaggcngtaggcggcgccctccctgacctcgccggtgacgaggtaggcaaggccctggaacgggatcgtcgacgccacgtccatgatgaagaacgtcgacaggtacctgaaggttatcttcttcctgtcgcggacgaggagctgcgtcctggggtcgatgtaggcgacgaagaaggtgagcacgatgtcgacggcgaagaagaggtcgacgacgatgtccgccacctccaggccgcccttgggggacgcgttccattgtaacgtcctaccttcgtaacgggttactaccctacgtccgtagttacgtcct

SEQ ID NO: 14509 - DNA, 1706 bp, Setaria italica
  Peptide Sequence Number=SeqID_80483
tcataccatccccaccagtctcagacaccctgccccgccggtgcacggccagggaggtcgccgcgcggcagcatccccggtgacacctgacgcgccaccgcaccaccgctctggctgttggcatcccaccccgctgacccgcaccgcctccaccttccacgcccgggggcggcggacctcccacccgccccgaacgccgagcacctgtccgtttttcttttatctcccacgcctttcccctcgattcctttccccaccgccccgcgcagtcgccagtcgcccaccccgttccacacttccattcccaaccccactaggccgccgctccctcccaaggacgtgcgcggcggagccgaaacgacccagctacgtatctagtggtgttgcttccaccaaggtgctgaaatgtcctttctattcaaatccagcaatggtggtacaactgagaaaggcttatccctagaagaacagcaagaaaaagtaaatgaactacgcaaggagcttggtgaatcctcgtcagcagccattcaagatttcctttcggatgcctcgttatcaagatttcttcgagcaaggaactggaatgtgcagaaagctagtaagatgatgaaagcagctgtgaagtggcggcttgcgttcaagccggaaaacattttctgggaagatattgcacaggaagcagagactggaaagatatatagagcagactacaaggacaagcatgggagaactgttcttgtattgaggcctggcttagagaacactacctcagcaacagggcagatcaaatatctagtttactctctggagaaagctattatgaacctgacagaagatcaagagaagatggtgtggttgacagatttccagtgctggacattgggaagcacaccactgaaggtgacccgtgagactgtcaatgtcttgcaagaatgttatcctgagaggttgggactagcaatcctttacaatcctcctaggatatttgaatcattctggaagatagtgaagccattcctggaccacgagacccggaagaaggtgaagtttgtgtactccaacgacacggagagccagaagataatggcagaggtctttgacattgaggagctcgactcagcattcgggggaaagaacccagctacatttgagtacaacagctatgcagagcgaatgcaggaggacgacaagaagatgggatctttgcacagctcaaccgatagcttgcttgaatcagcagggaaggatactcatggcgcggcctcggacgcctcgagtgaggcctccttctacagtggaaccgactctccgaaacatgaagatggtgaacacggcgccccaactcgacatacaattatctaactggagcgattgtcaggaccgatggctgcgccagtttacaagctggttagatcacgctgtcgggtctaggaggaatgtatatttgctgcccatgatattatagagaatatggaaagagagtctggaccatcaatggcgatgcactgcatgaatatcccaataagatggactcctttgaaccatgtgctcggttactcgtggcaggagccacatatgtgttgcactagccgttcctcgatttttctgaatgttgccaaagaacgtgtcgtgtatcgacttaataacaattataaaaggtctagcagctagccaaccaccgcaatttgtctcgaatacgagacagg

SEQ ID NO: 14510 - DNA, 301 bp, Setaria italica
  Peptide Sequence Number=SeqID_80484
tttaactttcttctgcctagaggtccactcagatggagactgctgaagtagagaattatttttgtagatttcatttggtgggagacgtgggggcagccttggtggttttctccaaagtgtgcgaatattgggagctctcttgacattgttattatgcatctctttgccatgtaggtcaccagatacaaaaccctctgggcttttgtgcagaaataagtataataagccagaaaccatcaacaggctcaagaatttaccaacagtgaactttccacaacggtacttgctgctgttagtagcc

SEQ ID NO: 14511 - DNA, 279 bp, Setaria italica
  misc_feature (241)..(279): n is a, c, g, or t
  Peptide Sequence Number=SeqID_80485
tctgctgtgcatctgccttcctatttgatcaagaatgcagacaagttcaaattcttacttcctggtggatgcttgagatcaaagtagatcagagattagctttgttagtcaacagtatttcttttagctgcaatactgttgttcatgctgaaacacatgtttatgtttgaaaagaaatagtattactctagatagggtgctaggagctattttggtgtgtatttggaagcacgggaatttnnnnnnnnnnnnnnnnnnnnnnnnnnnnnnnnnnnnnnn

SEQ ID NO: 14512 - DNA, 1613 bp, Setaria italica
  Peptide Sequence Number=SeqID_80486
acggaagggaggggagggaggagcacgcgacagaaataggcgggcggctgcagagagattggcggaggagccgaggagggaaggttacatgagacaaggccggaggcggaggaggcgaggagcggaggaggggttaaatgagccagcgagacgggaggcggaggagcgggcggtgtagaggaagcggcaggtcgtccacggatgggagctttccgtcttggtcttggtcttctcctttcgcctcttcgtcttcttccctgagattacattcagcttcggacatctgccacatcccccagcaagatagtgtttttggagcactctcctatgcttccaagagtttcactcatttctttctctgtcatagacgcaagaccacctcatggccagagacttgccccatccgtctgtaactagacgaaaagttttgcctttcaagtttctgataccgtttgttctggttctttctgtgtctgttattgctgtcacccagtatttccaaagtatctcctaccttctgcggccactgtgggacacaccacctacaccattcacccgcatcccacactattatgcccccaatatctccatgccccagctgtgccagctccatggctggggcatcctcccctcccctcgtcgtgtgtttgatgccgttctgttcagtaatgaacttgatattctggaaatccgttaccgtgagctccttccatatgttgattaggtttgtcatccttgagtccaatgccaccttcaccggtatccccaagtcactctccttttatgaaaacctgaatcgttttgcatttgctggatcaaagcttgtctatgacatgctttctgttggagaactggatactggtcatcgtgagcagcccttccatgttgaggcctaccaccgtcgttcgcttaataatctgatacgaagatcaggtattgctgcgggtgatgtcctgatcatggctgatgctgatgagatccctagccctgagactgtgcagttgctcaagtggtgtgatggaataccaccagtcatgcaccttgagatgaagaactatatgtactcctttgaatttcctgtggacgacaacagctggagagcatcagcacatgtgttcactgagcgcacattatatcgtcactcccgtcagagcaacctaattctagctgatgcgggctggcactgcagcttctgcttcagggacatcaaggagtttgttttcaagatgaaggcatacagtcacgcagaccgagtgaaacagaaaagcttcctaaatccagacagaatccagaagatcatatgcaatggggaggacctgtttgacatgctacctgaagagtacacattcagggacctcttcaaaaagatggggccaataccgaagtcagcatctgctgtgcatctgccttcctatttgatcaagaatgcagacaagttcaaattcttacttcctggtgatgcttgagatcaaagtgatcagagattagctttgttagtcaacagtatttcttttagctgcaatactgttgttcatgctgaaacacatgtttattgttttgtaaaaagtaaaaattaagttaatttaacttacttaagtaattaagggttagta

SEQ ID NO: 14513 - DNA, 497 bp, Setaria italica
  Peptide Sequence Number=SeqID_80487
taattacgttacgtaattaagggttcgcaaaaaggtttgcacaattcagaagcacttacattgtctatccatacgcttctgagctgcatcagtttcttcagctgctcagccaagtctttgctcacttgcactgtctctagagtctgcagttcttccaggttcgacagccctttaggtgattcgactccgataaaatatctcgtggtagtttctctatttgggtttgcttgatgtccagagtgtggagattgaagagcttctcaatggactctgggagtgacttgacattggtgcgccttaacccaatgtaccgcagattaaagagattccctataaaggtggacccacacgttcgccgattgtcattatgtaggtggaaagttaatacttcacttaaggttaaatttccacgtcttagaagccttgtggctcatggaatgatttcatccacccctgatttgttatcctcaattttgtctgaatcaaagaacttgact

SEQ ID NO: 14514 - DNA, 486 bp, Setaria italica
  Peptide Sequence Number=SeqID_80488
atgggtgtttcaatgtacaataaaaaatcaaaaggaggaattcatggcttattggaataaaaagggataaagtgcccaacaaatacagttctgagcagacgtcatacaagcataacaatggagaatctaccatctagtagtcctagatacgaatctctggaacatgctgcatcttctggtgcatcccactggtttgccacagagttttaaactcatcgtgcaggtacagcagccaaagcctcttcagagaaagaagcaactcgatgccttgaggaaccttatccagctgtgctagggacacaatgtaaagaccttcaatacgtggaagagcaccatctccgatttccatctgcttgacatccggcattcgcttcaagacgagcgtcttcaggtgaggaaagcacccagcagaaagaaccaaagtgcttgcacttaattacatgcctaggcttaaataggtgagatttgccacgtgtggagcgagca

SEQ ID NO: 14515 - DNA, 794 bp, Setaria italica
  Peptide Sequence Number=SeqID_80489
ccccggccaaaaggaggatggagcccaccaggcatggtaggagtggtcccgccattcatggctgatggggaggacatggttcgagctaggatatagggtggatgggtgcaatgggggccaagcccggcacccggagtccctcgtgagcaagacaggttgctcatgcataaatgaggcatgatggtgatggcgcttgatgcagcctgtcagccaaaaggtgcctcaacttcttaaccttaacaatacctcgtggtagcttctctatttgggtttgcttgatgtccagagtgtggagattcaagagattctcaatggactctgggagtgacttgacatcggtgcgccttaacccaatgtaccgcagattaaagagattccctatagatgtgggcacctcggtgatattagaatcttgcagctctagaacagtcaagtgctttgattcagacaaaattgagggtaacaaatcatgggtggacgaaatcattccatgagacgtggaaatttaaccttaagtgaagtattaactttccacctacataatgacaatcggcgaacatgtgggtccacctgtattattgcttcataatcatttgcagaaccaaacttttcttctttggcaatggagagtgccagatcccgcataatattatgcatcttgcgagctcatcacagtccacaacttcaagcatattgcggtgaatcagttccatgagatttacctcagccacctcctctggtgtattcttttctctgctcagaacaaagccttctgcaccacagccgcacgaggc

SEQ ID NO: 14516 - DNA, 713 bp, Setaria italica
  Peptide Sequence Number=SeqID_80490
gacatggggtagtcttcagggaacaagctacaatacaaaagcaatttctgaggtcttcagatagatcatgatagcttaggtttaatattgctcggacatgatcatttgttgacaactcactccttagctgattatatgtttgattccaaataatgtattccaaataagacaacaagctgcctatagtaacaattgccagcggcaggccatgacacctatccactatagatgtagcaatttcctcaaactccttggggcatttgtggtccttgttgttgtgaaaagcccttctgcagaaaaggtcaaatgcatcagggccatccaatggttctagctcaaggtgctggtccaacgaagcatcatgtattttggaaagcatcatgtattttgaagtataatacgacttgcttggtgattctggaaagcatcatgtattttgaagtatacctcttgctcccagacgtcatctaatacaatcaaacattttctattttggagttttttctttatttctgccttcaagtcgtgtacatccattttgtcaattcaagtcgtgtactgccctcttgttcccaatcttccagagtagctttctcaacagagcgtctgccgggcagatctgtgacacaacaatccaagcatgcacagggaagttgaccttttcacgttcataaagatttgttaccagggtagattttcccaacccacccata

SEQ ID NO: 14517 - DNA, 570 bp, Setaria italica
  Peptide Sequence Number=SeqID_80491
ctttcaatctcagcaagttgttgattgttagagacaagctgtgtttggtgtaaccacttatccttcatatgaataacttggttaatctcctcttcaatatgagctatctcatctgtaattgcgctgaaaacaatgtcattatgggttcccttgatgaagaacttcaggaacccttcttgcgtcagttgaaaaacatggtatgagtatttgtctactacatcttcaacacggtaagccaccttccggacctccccgatccaattattggcaagctcatctgtgaggtagactgttccaatctgctgtataatttggctcatgaatgtcagattcatccttatttgatcgactttccatggcagttccttcagagaatgaactttccaagacagcttatttataacagccttggaggtttcatctcctaaaatggaacctatcttcgtgacagcaaggagtaccgctccagccgattgtaattgacatggcctgcccaggatgccactagataagaatctggattcttcaaagttaaccctttttaattgacaactgcgtgtactaaatttt

SEQ ID NO: 14518 - DNA, 2887 bp, Setaria italica
  Peptide Sequence Number=SeqID_80492
tagtctttaacgtctttaaatttatttttgttagtatttgttttcccctattgtatttgtcgtaaattattcggtattaccttctagttgttccctagaagttccacttggcccctttacaatttaaccttgttggagcttttgttggaaattcggattcaagggcagttgtcctagatacgaatctctggaacgtgctgcatcttctggtgcatcccactggtttgccacagagttttaaactcatcgtgcaggtacagcagccaaagcctcttcagagaaagaagcaactcgatgccttgaggaaccttatccagctgtgctagggacacaatgtaaagaccttcaatacgtggaagagcaccatctccgatttccatctgcttgacatccggcattcgcttcaagacgagcgtcttcaggtgaggaaagcacccagcagaaagaaccaaagtgcttgcactattcaccctgttaagacttaaataggtgagatttggcacgtgtggagcgagcacacccagtggatcttctccaagctgacaccagcttaacgctaaatatttgagatgttccccatgattgcgaaatatcggatacctcagtgtcccagaagtccactggccccttacaattaacctgtggagctttgtggaaatcggatcaagggcttggaggcagagtgtctcgttcagatctcttgcagagataagcaggctggaaagaagtggcatcgtcgatagggtcgcaaaaaggtttgcacaatcagaagcacttacattgtctatccatatgcttctgagctgcatcagtttcttcagctgctcagccaagtctttgctcacttgcactgtctctagagtctgcagttcttccaggttcgacagccctttaggtgattcgactccgataaaatatctgaaatctgactgcttttcgtcaactaacctgtcagccaaaaggtgcctcaacttcttaacattaacaatacctcgtggtagcttctctatttgggtttgcttgatgtccagagtgtggagattgaagagcttctcaatggactctgggagtgacttgacattggtgcgccttaacccaatgtaccgcagattaaagagattccctataaatgtgggcacctcggtgatattagaatcttgcagctctagaacagtcaagtgctttgattcagacaaaattgaggataacaaatcaggggtggacgaaatcattccatgagccacaaggcttctaagacgtggaaatttaaccttaagtgaagtattaactttccacctacataatgacaatcggcgaacatgtgggtccacctgtattattgcttcataatcatttgcagaaccaaacttttcttctttggcaacggagagtgccagatcccgcataagaccatgcatcttgcaagtgctaacccttccgagctcatcatagtccacaacttcaagcatattgcggtgaatcagttccatgagatttccctcagccacctcctctggtgtattcttttctttgctcagaacaaagccttctgcaacccacagtcgcacaaggctttctcgtgacatggggtagtcttcagggaacaagctacaatacaaaaagcaatttctgaggcctccagatagatcatgatagcttaggtttaatattgctcggacatgatcatttgctgacaactcactccttagctgattatatgtttgattccaaatgtttattcgtggtcttgatgacaacaagctgcctattgtaacaattgccagcggcaggccatgacacctatccactatagatttagcaatttcctcaaactccttggggcatctgtggtccttcttgttgtgaaaagcccttctgcagaaaaggtcaaatgcatcagggccatccaatggttctagctcaaggtgctggtccaacgaagcgatggctccaacatgatcctttcgtgtagtaatgataatacgacttgcttggtgattctggaaagcatcatgtattttgaagtatacctcttgctcccagacatcatctaatacaatcaaacatttttattttggagtttttctttatttctgccttcaagtcgtgtacatccattttgtcaatttctgatggtactggtggtaccatgttcccaatcttccagagtagctttctcaacagagcgtctgccgggcagatctgtgacacaacaatccaagcatgcacagggaagttgaccttttcacgttcataaacatttgtaaccagggtagattttcccaacccacccataccagaaactgttatcacggtgctatccagctcatccgagtacagccatccagacagcaattttctatttttttcaattcctactagatcttcatctttgacaaaatctgggaaaccatcttgggaccgctgcctttcaatcatggcaagtttgtcaggaacaagctgggaatgctgcaaccactgatccttcatcagaataacttgttgaatgtcctgttctaccagagctacttcatcagcaatgtcactgaaaactttgacataatgggtacccttgatgaagtacttcatcaggaacccttcttcctctatctcaagaacatgatatgagtatttgtctactacatcttcaacatggtaagccaccttccggacctccccaatccaactcttgacaggcttatctatgaggtagactgtgccgatctcttgtatagtatcactcattaatgtcaatttcatccttatttgatccattttccgtggcagttccttcagagcttgaactttttcagacagcttatttataatgaccgtagcactttcattcgctaaagcagagccaatcttcgtgacagcaaggagaact

SEQ ID NO: 14519 - DNA, 377 bp, Setaria italica
  Peptide Sequence Number=SeqID_80493
gaaaccctcgcctccggcgcacgccatggtggagactcgccggagctccgccgccgcggccgccgggaagcgcccgtccccgtcgccgtcctcctcgtccttgcctcccccgaagaggcccaaggcggaggccccggcgtcgccgacggcgtctgcgcccgggagggccgaggaggattctgcggctgcggccccggcgaggagcgccggttcggcggaggacgcgatggcggaagcagagcagaaagatcaaggagcggataagccagctgctgcggcggccgagagttcgaagaggagaaaggagccggagcaacagcagcctgcgttaatgtattgtgtgcttgtagccacatgggcttagttgatagaggttg

SEQ ID NO: 14520 - DNA, 793 bp, Setaria italica
  Peptide Sequence Number=SeqID_80494
aggggacagtaaggtagacggagagcggccagaagcccagcgcgccgatgaggcccagcacggcgttgaagaagggcagcagcatcgccaccagcgtggtgaacatgatgaggatggtgcggagcacgagcttgagcggcgccaccgccacggtggccggcggcgaggaagacgaccggaggcaggggacgcgcacgtagtaggtggcgttgatgaatttggcgtccggccaccggcacgccacgcagctttccagccgcgcgaagatgggctgcgcgaacacctggtatgcgccgatgaggtggacgatgacgcagatgttggcgatgtcgacgagccagaagggctcgtagaaggcgtatccggtgaggatgttgccgggggcgtcgttgccgaaggcggcgtagccggtgcatccgagcaggaggtagaagacggtggtcatgccgaggccgtagaaggacgcgcgcttcatggtcttgttctcggcgggcggcgcgcgcagcgtgtcctggatctcgatgagcacgtcggcgaaggtgtaggagaaggccatgttgccgagggcgaggaggacgttgaaggccttctcgcggggcgcgtcgacggcggcgccggcgagggtgccccggacgtctccgtgggaggcccacttggcggcgcagaggccgaggctgatgaaggagtagccgaaggaggtggcgacggcgacgacggagagccaggcgatgttgtggaggctggggagctgcgagagaaggagctggaagaggccgaacaccaccatgtaggt

SEQ ID NO: 14521 - DNA, 443 bp, Setaria italica
  Peptide Sequence Number=SeqID_80495
cattggtgaagaaaaggaccaatgtgctgctacttggtgatcacattggagacttggggatgtctgatggtttaaactatgaaaacagaatcgctgttggattcctgaatgccaacattgagaaatccctgaaggattactccaaggcatttgacattgtgtacctggtgagaggcacattgcaattgcgtttatttcctcaaagttattgtggctttgcaccttattcaatgtttgtttttcacatggtccgcttctgacaaatcaattcaatgaagaacgatgctccaatgaggggagttgttgagcttgtgtctgaattatgcccttgatccaattatcttctgctgcgcccatagaaaaggatttcgcccctggaattagcagccctgcaatccgatcacccaaaaatctggagttccactccctcgctaaccatccat

SEQ ID NO: 14522 - DNA, 1330 bp, Setaria italica
  misc_feature (1327)..(1330): n is a, c, g, or t
  Peptide Sequence Number=SeqID_80496
agttggaaatgcggcccatgatgagcccgcccctgctgtcgccgtccccctgctcccttctccgcttcctccgcctctgccacgcccctcgccgccggaaccctaccgccgcgccgcccactccttatactttccgccgccgcccgctgctcctcctccccgtcgccatgtcctcctccgcctccatcactgcccccaactccgtcgtcgcggaccccagcgcgcttgcccggaaggtcgccgccatccgcgccgccggaccctccaagctccaggtcatcgccgacttcgacggtacgctcacgcggtactggtacgacggcgcccgcgggcagagtagccatgggctgctgaggcaagggaacgaggagtacgacgcgaagagggaggcgctgtacgagcactaccaccccatcgagatctgccccgacatcccactcccggagaaggccaagctcatggaggaatggtgggagaagactcatggtctccttattgaaggtggtcttacgtatgaagctatcaaaaaatctgtgtctgatgctgcaattgctttccgagatggtgtggtggagctctttgagtacttggaggagagagatattccagtgctggtattttctgctggacttgcagacattattgaagaggtcttccggcagaagctacacagatcattcaagaatatcaaggttgtctccaacagaatggtgtttaatgaagaaggtcgtcttgtagcatttaaaggtaaaacaattcacgtcctgaacaaaaatgaacatgccttggacatggcagctccagtgcatgacagtctgggggatccaaatggatctattgatgactattcattggtgaagaaaaggaccaatgtgctgctacttggtgatcacattggagacttggggatgtctgatggtttaaactatgaaaacagaatcgctgttggattcctgaatgccaacattgagaaatccctgaaggattactccaaggcatttgacattgtgtacctgaacgatgctccaatgaggggagttgttgagcttgtgtctgaattatgcccttgatccaattatcttctgctgcgcccatagaaaaggatttcgccccctgaatttagcagcccctgcaatccgatcacccaaaaatctgggagttccactccctcgctaaccatccatgcctgcttcataagcagctgttgtacaggctcatcgcagggccaaagagcccttggaacaatgatcagtcttcacttgtaagctaatcccaattcgtgttatatccagatcatgtgaacaatgctgaaattccatagtgcacnnnn

SEQ ID NO: 14523 - DNA, 462 bp, Setaria italica
  Peptide Sequence Number=SeqID_80497
tctgatctgtgctcactcgtgtggttctgggctgggttgtcccgatctcgtggtaatcagtagaaggccctcgatttgtttattattattatgaattgcttgcctgatctgcgcttgctgttgggatgggttggtctcttgctattctgtatttagtaatcattgttccatgttgatttccatatcggataatttgattagctgctgcctgctagtccagtagtatttgtagatctatatgtgcctgcttggttatccttggctaaacctttcagctgtgtttatttgatctttagctatgcgttgtgtagttgtctatatttatgctccttatttattaccttaggttattttcatatgtacgacggttcttttgcatacatattgaaatttttgctgaatagtagcccttagtgtgttttatggtttaagtatgagatctctgttcatcattgtggcttt

SEQ ID NO: 14524 - DNA, 476 bp, Setaria italica
  Peptide Sequence Number=SeqID_80498
ggaaaaataatgtgagaagcaaggaattccatatgaatatggaaaaggtcgcttgcaagagcgttcttcactcatcctggatatccaaactattaaaccaacacatgtcttcaatgctgctggtgttactggcagacccaatgttgattggtgtgaatcacacaagccggacaccattcgtaccaatgtcgtgggcaccctgactctagctgatgtgtgtagggagcatggcttattgatgataaattatgccactgggtgcatatttgaatatgatgcatgtcatccagaagggtcaggtatcggcttcaaagaggaggatacaccaaattttactggttcgttctactcgaagactaaggcaatggttgaggagttattgaaggagtatgagaacgtctgcaaccctaacgaagtaccggaatagaccaaataatacttactagaacctactaagtactaaaacccttaactaa

SEQ ID NO: 14525 - DNA, 627 bp, Setaria italica
  Peptide Sequence Number=SeqID_80499
catgtttgtcgagaacagacctttcaacgatcagaggtatttcttggatgatgagaagctcaagagccttggatgggctgagcgcaccccatgggaggaaggcttgaagaagacaatggaatggtatgtagcaaattccgattactggggagatgtttctggtgcattgctgcctcatccgaggacgctaatgatgcctgggtatgagggctctgaggagattaaaggaatactcagtcagttcaataacattcagacaaaggtggcttcaacatcagatagtgctccggaaacgcatgccttcaagttcttgatatatggtaggacaggatggatcggtggacttcttggaaaaatatgtgagaagcaaggaattccatatgaatatggaaaaggtcgcttgcaagagcgttcttcactcatcctggatatccaaactattaaaccaacacatgtcttcaatgctgctggtgttactggcagacccaatgttgattggtgtgaatcacacaagccggactccattcgtaccaatgtcgtgggtagactagactaggtagttaactaggacaagaacccaaatagttagaattaggtagtagaaatacaacaacaaagaccggaaca

SEQ ID NO: 14526 - DNA, 1061 bp, Setaria italica
  Peptide Sequence Number=SeqID_80500
atttatccagacttcgcgaattcaggaatacatatctcactacatgatcgtgaagccagcatacagaattacatggggatataacatgtgatagctcaaggtctaattattcgccagtttctgggatggatggccgagcaacatgacgccgtaacccatctcaacccgctggcatagcaaagaattggttgtacacacagcttcaggagcactgggcatgccacactagctacaccgccttgatcggcgtcctggggctcgaagggatgccgccaaacctatccgccaggatcttgaaacacgggaccgagacggtgtacaacacgcccagtacaaatggcgcggcaatcagccaacctagcatcgcatggactatgctcagcagcacatcctttgaggcatggccggtgaggacgttcttcaatgcgtcggccgtcaaggggaagtgcccgctgcccgtgactgcttctcccaaacgcaggaaagggatgatcaaacttagctcaataggagtggcggccaaatttagaaccataagagtaacagcattgcaacggcttcccaacattgctacagcaacgccaccaagaataacagtggtcccacatattggaaagattccaatggtgactccaagggcagcagagaaggccagttgcttgggttccgctccccttctgatgacctgcagcacgggatcaacaatcttgctctggagccatggcaggacgccggtcctagtgagaagagaccccattcgattcaggggtacccttgattaagctgggagcatcccctattcccctggcccctgccctgttcacgttcagctgaggggtgggagcagccccagagatggttcgaatcgaaagcactccaccacgcaggaatcggcggaggacgcctccggcgatgggcggacggcgggggagatggaaggaagagaggaggaggagggaggatcggaacggaggaggagggcgtccggaatggatctggtcgtggcaaccaagagttgcggggaaaggcacctcgggtggagttgtaaagtaattacctta

SEQ ID NO: 14527 - DNA, 303 bp, Setaria italica
  Peptide Sequence Number=SeqID_80501
gcttcaggaaatgcagacgtcaacggtgacggccggaggctgatccggagcgcgcgtcacgctcacgccttgcaggttgcatcgaggcatcgagcgatccttcgcctgcctcgcatatggttgccatagcggcggcacggcaatgcgagattatatattgcgaggctgcgagccaggaagcccccgtcagtgcggcgagcggtgtggccgtgtgggggactattgccatccttgccgttagcaagcagagtgacgatttgttagtgaggcgcaagcacgaggtcaaccactagtgtaagctca

SEQ ID NO: 14528 - DNA, 239 bp, Setaria italica
  Peptide Sequence Number=SeqID_80502
aacacggggtgccgcgtctcccggaacttggtccgccccgccggccgcttcggcggcgacgtccacacagtctggtggtgctccgacgaggtcgaggtcgaggccgatgcccagctgcacggcgaggttgactcggcgctcatctccttcttgatcggacacatcttcttcttatcagctctcggttgcttagcttgaagatctttggtcgttctgactgagttgggtctcgagtgggt

SEQ ID NO: 14529 - DNA, 236 bp, Setaria italica
  Peptide Sequence Number=SeqID_80503
aacacggggtgccgcgtctcccggaacttggtccgcccggcgggccgcttcggcggcgacgtccacaccgtctggtggtgctccgacgatgtcgaggccgaggctgagctgcacggggagcacgactcggcgatcatctccttcttgatttggcacatcttgttctgatcacttcaagttcaagttcttttgagcgcaggatgttgtggttgcctttggtgctgcttgaattgtgt

SEQ ID NO: 14530 - DNA, 302 bp, Setaria italica
  Peptide Sequence Number=SeqID_80504
cccaatttgctctgtctgattaccggtagtagtagtaaactagcaacctttacgataccataaataggcatcggacgcaaagagagaaaaggcaaaacattgaagtagagtgcagtagtcctagtagctccagagtggcacttcggcaacggcgtcgtcgcagaacgcggtgactgtggacggtggctccatgagcatcgcctgcgccaagctcgcgtagtacaagtcccaactcatgtcaccgaacacgtccagttcgaacggcgagtcctcggtggccgaggaggcttcctcggcgtcgt

SEQ ID NO: 14531 - DNA, 562 bp, Setaria italica
  Peptide Sequence Number=SeqID_80505
gcctactccctgttgcgtgtctctttagtttttttttttttttttttttttttttatttttttttttttcctattcccaactcgctctgtttcattgccacaagtagtaaccactaaccactatcattacggtcccaaaagttgggatcggtagccaagagaaagaaagaaaatgcaaaattcgaactacaaactaacaacggcttcagttctagtagctccacagtgccacatcgccggcgttggcgtagccgtcgtcgccgaacgccgggaccgcggacggcggctccatgagcatcgcctgcgccatgctcgcgtagtacaagtcccagctcatgtcatcgaacacgtcgagctcgaacggcgaggactcctccccgtcggtggagacctcgtccttgacgctggcggcgggggaggaaggcgccgacgacgcggccgaccgcgcgtcctcctcctcctccgggagcgcctcgcggcgcaggaagtcctccacggcctcggcgaccgcgtggcggacctcggcgaggctggcgtacgaggccgggaccgcgagcagcca

SEQ ID NO: 14532 - DNA, 1039 bp, Setaria italica
  Peptide Sequence Number=SeqID_80506
ggggaactaattagaccaataccttagaccgttaagacaaagacagaagtgacgatttgttagtgaggcgcaagcacgaggtcaaccttagttgtaagctcaattttccatttcttgctacttttagcaaatctgttttcccaagttgctctgcctcacttccaaatgtagtaaaccgtcacagtaccaaaatttggcttcggaccttcggagtccaaggaaaagaaaaaggcgaaaactgaactacagcgacctcggctctatgctctaatagctccagagcggcacatcggccacggcctcgtcgcagaacgccgcgactgtgcacggtggttccatgagcatcgcctgcgccaagctcgcgtagtacaagtctgagctcatgtcaccgaacgcgtccagctcgaacggcgagtcgtcggtggccggcgaggtctcctcgctgtcggtgcagctgcattcgtcattcgcgacggaggacggcgtcgacgacgtggccgagcgcgcgtcctcctcctcagggagcaccttgcggcgctggaagtcctccacggcctcggcgacagcgtggcggatctcggcgaggctggcgtacgaggccgggaccgcgagcagccacgccgagtccgcgaagttgaggcaggcgcccgcgccggcgatggcgagcatggcggcatcgtgcgcgcgcgccgcggcctcggcggtgtcgaatgtgccgagccagagcctgcagccgcggcgaccgggcacgcgcacctcgcacacccaccgcccggcgttgcctcggcgccggacgccgcggaacacggggtgccgcgtctcccggaacttggtccgccccgccggccgcttcggcggcgacgtccacaccgtctggtggtgctccgaggaggtcgaggccgaagcccagctgcacgcggagcctgacgactcggcgctcatctccttcttgatctgacacatcttgttctgaatcggctgccgaacgattgcttagctctggagtagtgagtggagtgccttcgctgctgcttgaatt

SEQ ID NO: 14533 - DNA, 479 bp, Setaria italica
  Peptide Sequence Number=SeqID_80507
ctagagagaaatgtcttgattttagccaatatatactcccaatgaaatttttggagaggctgctggttaaggtgaaaggctggcccgaatatccatgcttattgaatcacaaacagtttttttaggaaaaaaaacaaaagttgaaccagaaacagtttgtttttggacgcgggccccatcacaagtgaccccactggcagggttggttagcagcggggatcagggtgacgaggactgcacgtgacccaatcgcacagcccgagtgattcgagaaggaaaatgagcaacgggaaagctgttccgcagcggaatgatgataaaaattacaggatcacgtgaagccacaaccaaagaaatgcaaaaagggcaagaaaaaaagaaaaaggattacgctgaaggaataaggaatcagcgaaccactaggaactagccatgccgcagctgctgaacgctatcgtgtgtcagcgcttacctaacac

SEQ ID NO: 14534 - DNA, 372 bp, Setaria italica
  Peptide Sequence Number=SeqID_80508
ttttttgtccaaagcagcagatcaatcttccaatcttacatcgtagagcaaacaaattatggatgtacactgtacaaatgattcacctataatgaccggccaactctgcaatacgcgctcgtgtttcttcagttctttgcaattaattacagtaccaaaacttcgttggacactgtagtttctctgtagcaagggtagtaaagatgaattgaagaaaaacaaaaagaatagcagcagcgtatgcaatcaaacacttgcatgccgaagttaccgatttgcccgaggaaatgaacaaggtctgtgtgataaaatggacaaacaagaagtttccgatccacatcagaacaatagactctccaggttcatccatcg

SEQ ID NO: 14535 - DNA, 741 bp, Setaria italica
  Peptide Sequence Number=SeqID_80509
aggtaaacttacggacaatgcaagtgtttgattgcatacgctgctgctattctttttgtagtttctctgtagcaagggtagtaaagatgaattgaagaaaaacaaaagaatagcagcagcgtatgcaatcaaacacttgcatgccgaagttaccgatttgcccgaggaaatgaacaaggtctgtgtgataaaatggacaaacaagaagtttccgatccacatcagaacaatagactctccaggttcatccatcgaccagtaaccacaatgctgacctgacttctgtgaacatcgcatggtgtgaccatgtctgagcataacattcacaaatcgctttgatttacgagaacattctgctccgaaaggcactgttgaaaacgtgctaagcgtgcctgcaaattcataagaccagctgctttcttggatatgataaagctcattcttgttatgtactcatctaactgattgcctggctggtctgcttcctctaacagcttcatctcctctctaaggatggtaatactctcctgcacttgtttgcggtgagcaattaccagatcttcttcctcctgaattgagtaaaacaaagtatagagtatttaaaaaacgattaatctgagtcaagacctgatggtttcatagggacaaagaacaccaaactaggatctaatctgagcaaagcattgtgtacaaaaggaattatatggatgcatgagatttattactacataatccaaattt

SEQ ID NO: 14536 - DNA, 1655 bp, Setaria italica
  Peptide Sequence Number=SeqID_80510
ttaggttcttactttgttttgttaaaacgttctgctccgaaaggcactgttgaaaacgtgctaagcgtgcctgcaaattcataagaccagctgctttcttggatatgataaagctcattcttgttatgtactcatctaactgattgcctggctggtctgcttcctctaacagcttcatctcctctctaaggatggtaatactctcctgcacttgtttgcggtgagcaattaccagatcttcttcctccttcaagagggcatctagcacatcatctgcatccagaccattagcatgtacttcaggtgtacttttccactgcatttgagttgcagtctttctggttccatctatggatgaagttgagtttgttggagctctactgcttttctgtaagggtatatctggctcagacccctcttctgataactcatagccattaccttttgcggaactccttgagggctcattaacgtgatttaagtatggtaatggtccttgtgtaacaaacctcccactaggaacacggcttatgttagaaagtaaagaatcatcttgtgcagttttctttagtccatatcttttgagctcgtcagaagcatcgcagtaatcaaggttcgataaaggaggcccaggacttgattctctcatatttgaggctggtggaagtggatcatccttcttggtgcctactttagaaaggcttttgactctgtcagcatatctcagtgtatttagtgtgtgttcgcatgatccagaatttggagaaatgcaggagatcatcacagtccgtgagtttccaataaatgaatctcgcaaaacttctgttagtttgcttcctctgaaaggaatatgaacttgatcgttgtcaagagctctgatacattcctttagagcaagcaaacttttgttgatttcagcaccttcaattctcgtttgcttgtcattatcagtcgtatctgcaccacgctcgctgccagcaagatcaatgaaggacaacttcccaacaactcgagaagactccttaccctcaaccacctttttaatagcaagctgaagtattgcatgagatctggaggactcctcatttgcaccagtagttcccgtgcttctgcaagcatttcctctctcaatgagctcctttatcatttcaacgtctgaaactctatactcttgtaatcccacaatgcacacttgttgtttaccatcctccctcatgcagagtttccttttcttattaagaagatcgaaaagctttccaccataaatctcaaagaagctgacaaacaattgaaagccttggcttctgtatgtataatgtattagtctcaaaatatcctgggatgctttaaggggtagtggctgcatggtatacgttttcccactacctgtctgaccgtaggcaaaacatgtagcctttgttcgctggaaaatggcaggaataatgggttccaccgtttcattgtaaaccttatcatttgatacatcatcatccaaaacagcatcaaacacaaactcatgcctctccatgtattctgttaagtcaaccttgagttttgtctcatgcacagtgagagagttggcatatgcatctactgtgatgatatcttcttcctttcgagttgttgggaagttgtccttcattgatcttgctggc

SEQ ID NO: 14537 - DNA, 302 bp, Setaria italica
  Peptide Sequence Number=SeqID_80511
cagaggagaagaagaagatgggaggtgagccgggcgatgttgcagcagcagggaggaaagagaggaagaagagggatcatcagaaggctccccccatcgtgatgcatcacttccccttccactcacgccccggcttgctctgaattcgttggttattcattcattttaaggagaactagcagtggtccagttgtactcctgattatagtctcctcatgccttcggtcgaagtctaattcttttgttcttgctcattctgtcacccggggtgacatatttaaaaataaaaattaattccggat

SEQ ID NO: 14538 - DNA, 493 bp, Setaria italica
  Peptide Sequence Number=SeqID_80512
actagatgccaagcaacaactggtgtgagtagtttccgcataaaatctctgctcttaaatctctaaataaattactcctaactgccaatgatatagatgatgagaacatcagctgggaaggtctatcatgccttcaaaaattattaaacttgtctttaagccagaaccggctggttagcttgccatcgactttgggctcactgacttctctgcatgaacttcgtattgcaaacaacaggcttgataacttacctattgaaataggatcactgaagcatctccaaattctgatagcaaataataataggttatcctagaactcaccacttgttggcttgcagcaccttactaagctcttccacattttgacatgtttatttcatacttttgttattctatctactgctaaacaaatgctttcggtcgagaagagatacaagattgccgagatgcgtgatcatcggagactggcattgcttgtcagttatgttag

SEQ ID NO: 14539 - DNA, 600 bp, Setaria italica
  Peptide Sequence Number=SeqID_80513
gtttttagcacatgtcttagctaatgtacacatactggtaggttgtgactggttctaaaatagaaaaaagttggtacagggagaagagaacatcttttgtccccaatttttttctgtagcttcttatggggaactacattagtaatactttgtgaaggaaaacttatgctttatggtgaatgcgatatttgactcgttttcacttgttggcaggataacttcattgccttcatctataggagattgtgaatctctcaccgaggtatgttctttctatcatatattacctgtttctgcttcatatgtttttcagaaaactattttgaacacataactattttgagtttgcattggcagtatatatcacccaaatcttgaattcaggttgacttgtcatcaaatctcttaactgaactgccagaagcctttgggaagcttggtaatctcaaggttttgcatctaaggaacaatggtcttacatccctgccttcgaccctattcaaaaagtgtgtgcagcttattacacttgatctccacggcacagaaataacgaatgatattcttcggcaggtggaggggtgggaggagttcgacgaacgg

SEQ ID NO: 14540 - DNA, 1163 bp, Setaria italica
  Peptide Sequence Number=SeqID_80514
cgtttagaattgaattcctttgagtagggtgcagtgattaaacatgtgcgaaggttcgatttggtgctgtgctcaggactgctagatgggaatgggagcagatctgaagtttagttgttaaacctgtagagtgtgtcacccatcgcctgtagagtgtgtcacccatcatgaggtaactgcctttatttcaccatttggatgtcttttctgtgaatgtttgggggtagtgtagtcacatattctaccatggaagtatcgcaatgctgataatgtttgaagggaggaaatggaagcagggtacacatgtcattcttatgtatttgatacaacctacttctctgtgcctactctcaaataggatggccccatcacaaagaatagcagcagttcggcaacaagtgtaacaagaaccttgaatgttaaggaacatcagacacaaaaaccagaggcagttgttggcaaaagccgagctgagcggtggaaattaacaggcgttgttgcgctgcatgattgcgacttgaaggcagtgccagaggaagtctggggttgtggcccctcagtacgaatactagatgccagcaacaactgtatcaaggaaattccgcataaaatctctgctcttaaatctctaaataaattactcctaactgccaatgatatagatgatgagaacatcagctgggaaggtctatcatgccttcaaaaattattaaacttgtctttaagccagaaccggctggttagcttgccatcgactttgggctcactgacttctctgcatgaacttcgtattgcaaacaacaggcttgataacttacctattgaaataggatcactgaagcatctccaaattctgatagcaaataataataggataacttcattgccttcatctataggagattgtgaatctctcaccgaggttgacttgtcatcaaatctcttaactgaactgccagaagcctttgggaagcttggtaatctcaaggttttgcatctaaggaacaatggtcttacatccctgccttcgaccctattcaaaaagtgtgtgcagcttattacacttgatctccacggcacagaaataacgaatgatattatttctttcggtctaggttggttatttgtctaaactaactaggtctttgtattaactttacctt

SEQ ID NO: 14541 - DNA, 2233 bp, Setaria italica
  misc_feature (2207)..(2233): n is a, c, g, or t
  Peptide Sequence Number=SeqID_80515
gcactgcggcagttgccaattcaatctaccgaaacagagttgtggaaggacagaccgacagaggccatggagagctcgccgcccaccatcaccatccaggtcaaattcgcgggccggaccatccccgtggaggttccggccgccgcgaccaccgcggagctgaagcgcctccttcaaccgctcacgaacgtccttccccgcggccagaggcttgtctgcaaaggaaaagtgcttcaggacgccgcgagtctgagctccatgcaggtggtgggcggatccaaggtcatgctcatcgcatcgcagggtctccatcagggtggatcacaaagaatagcaggcagtgccagaggaagtctggggttgtggcccctcagtacgaatactagatgccagcaacaactgtatcaaggaaattccgcataaaatctctgctcttaaatctctaattgatataattatatattactcctaactgccaatgatatagatgatgagaacatcagctgggaaggtctatcatgccttacaaaaattacttaaaacttgacgtttgtaatataatcccggaggtgttaaatatatctcagttgttaatctggtgctgcttgacttcatgaattttgaggttaatgggatgatgtcagcttaaaggctacattttaaatttgaattgtctattgaactgctaaatctcatgacctcacatttgttttcacctatctatttgccaacatcatttatacaaattttttagttaactctctgccaccaagatgcatgtaaatgaccacctacatacaaaaaggggatattccatggttttcgttaagaatgcaatatctcttatcttctcaatgttatctaacatgatctccaacatgcatatttttggtgcacatggtaacaagataagtgattattcactttttttgttaatcttgcaggctggttagcttgccatcgactttgggctcactgacttctctgcatgaacttcgtattgcaaacaacaggcttgataacttacctattgaaataggatcactgaagcatctccaaattctgatagcaaataataataggttatcctagaactcaccacttgttggcttgcagcaccttactaagctcttccacattttgacatgtttatttcatacttttgttattctatctactgctaaacaaatgctttcggtcgagaagagatacaagattgccgagatgcgtgatcatcggagactggcattgcttgtcagttatgtttaggattgaaataaccacgtctggatagagtgatagatcggtgccctgactttgacactagtctgatgacagctgtttttgctagtgcccattctatttttagtacaattttggttgtatttatgtaacccaagaatgcattttttacacataaaaaagggaataaaacatggtaggtttgtttttagcacatgtcttagctaatgtacacatactggtaggttgtgactggttctaaatagaaaaaagttggtacagggagaagagaacatcttttgtccccaatttttttctgtagcttcttatggggaactacattagtaatactttgtgaaggaaaacttatgctttatggtgaatgcgatatttgactcgttttcacttgttggcaggataacttcattgccttcatctataggagattgtgaatctctcaccgaggttgacttgtcatcaaatctcttaactgaactgccagaagcctttgggaagcttggtaatctcaaggttttgcatctaaggaacaatggtcttacatccctgccttcgaccctattcaaaaagtgtgtgcagcttattacacttgatctccacggcacagaaataacgaatgatattcttcggcaggtggaggggtgggaggagttcgacgaacgtcggcggcagaaacatcagaagcagctagacttccgtgtaggctcatctggtgtgttcgatgaaggcgctgatgatgataacatgcgtagataatttcctgactgttgtgagcaagatcgtctgctctgcatctggactgggttccagataaaccgtacaattcagaactgggtttcagagcttgagatgaaaaactttgttactcagagtcacagacaggacatatgttcttaagaaatgcatggcactgctgaatatttttgtagcactcagcctagaaaccnnnnnnnnnnnnnnnnnnnnnnnnnnn

SEQ ID NO: 14542 - DNA, 582 bp, Setaria italica
  Peptide Sequence Number=SeqID_80516
acccccgcagctccactcaaagcttgagctttcttttttcttgttttgttttattttcttggtaggagtaacaatagttcctggccttcctcatcctctctctatatcctaggagagagaaatccagaggcaaaagcttcaggatttgtgtaaattctagatccactaaccagaaaaccaaaagaaaaaaaaggaagagaagatgagtcacttcgccgccatgaagagcccccttcccgtcgccgcgtccgccgccgccggcgacgccaagagcccgctcttctgccccaagccgcggcgccccgtggcgcccctgcggtgccaccagagcggcggctactcggacgccggcgtggatctgctcgacctcctcctctcaaagggcgaggagagcggcctcatggcggcgtccccgcagccgccgctgttctgcggctcgccgccgcggcgagcttcgaacccggtggtccacgacagccggttcggcatggactacccgcccatgccggtgcccctgccggggctgccggcggtggtggccgccccggtggcggtggcccggcccaacccgcgcccgtcggt

SEQ ID NO: 14543 - DNA, 515 bp, Setaria italica
  Peptide Sequence Number=SeqID_80517
tgaaggatatatctgacattgttttgaaggcagtgagagctgctgagtctgaggccagatctgcaaatgcacctgatgaagctgtgaaagcagcagctgatgctgctgctgagcttgtgaagtccgctgctttggaggtttggaaaagtgaaaaaaatggtgatgcggttgtattagctgcggagaaagctgcatccgctattgtagaggctgctgtctcaacaagtgtctcacgaagctcaaatcaagtcggtgtaaagcatgcggtggaagaagctgtgccctagagcaaagaccaggatttagaaaattttgttatcagtgaccaagggcagctcttgcaacttagagaaaaatatagcatccagtgtctacagattttgggagagtacgttgaagctttgggtcccgttctccatgaaaaaggtgttgatgtttgcctcgcattattgcaaaggagcatgaaagaccaggagggtcatgaccactttgctctacttcctgatgttcttaaa

SEQ ID NO: 14544 - DNA, 380 bp, Setaria italica
  Peptide Sequence Number=SeqID_80518
cttccctcccttgtcacttctccgacgacgctccctctctctgcacgtccgccgaagctagcagcagcttctcaaagcctgctctgttctgctctgctcactgccgctgcgtcgatcgagctctcgttctcgtagagacacgtaccagccgctccatggatctgctgaacccggagcagatctcggagttccgcgaggcgttcgcgttcttcgacaaggacggcgacggctgcatcacggtggaggagctggcgacggtgatggggtcgctgcaggggacgcggcctagcgcggaggagctccgcgagatgatccgcgacgccgacgccgacggcaacggcaccatcgacttcgccgagttccttggcctcatggcgcgc

SEQ ID NO: 14545 - DNA, 1334 bp, Setaria italica
  Peptide Sequence Number=SeqID_80519
ccgcgccgccgttgccgctcctccgcgttcgcggcggctgccggctccggcctctgtcgctgctgcccgatagcggcaggaatggggaggtcgccaaggcggcggccgcggcggcggcatcggtgccggaggacgacgcgagcgctgcggcgaggggagagggcgccggcggcattgcggccacggcgcagctgggcgccatgatcgtcgcgtggtacctgctcaacatctacttcaacatctacaacaagcaggttctcggcgcgctgccgttgccgctgccatacaccatcaccgccttccagctcgccttcggctccctgctcatcttcctcatgtgggcgaccaggctccacccggcgcccaggctctccgctgcgcagttgggcaagatcgcaccgctggccttggggcacatgctgggcacggtgttcaccaacatgagcctgggcaaggtcgccgtctccttcacccacacaatcaaggcctccgagcccttcttcaccgtcgtcctctccgccctcttcctcggcgaggttccttccctgccggtgctgggctcgctcgtgccgatcgttggcggcgtcgccttggcatcgttcaccgaagtttctttcaactggactgggttttggagcgccatggcgtccaatctgaccaaccaatcaaggaatgtcctcagcaagaaactccttgccggtgacaaggatgctatggatgacataaacctcttctcggtaatcactgtgctgtcgtttctgctatcgtgtcctctgatgctgttcgcagaaggcgtcaagttcaccccagggtacctccagagctctggcctgaacctccaagaactctgcatcagggcagcactcgcaggtttttgcttccatggctatcagaagctctcgtacctgatcttgtcgagggtgtcaccggtgacccactccgtcgccaactgtgtcaagcgcgtggttgtcatcgtctcttcagttatcttcttcagcacacccatttcgcctgtcaacgcactaggaactggtgctgcattaggaggcgttttcctgtactcgaagctgacgagaacgaagaaaccgaagaatgcatgagggatgaaatagaaaagggtacattagttcgtgaaaaattcttgttgtatacacaattttgaggtatacagattagatcgagatgtattgatgaggagatggaacaagcggagttcccaccccagttgtacacttgtaccacatggcacaggcagctcatttgcagagctgcaacattcgtgactgaatatattctcgagacacggtgttctggaccaaaaaaaaaaaaaaaaa

SEQ ID NO: 14546 - DNA, 779 bp, Setaria italica
  Peptide Sequence Number=SeqID_80520
tcacttcaactcttgagaatagaagctgggttgtagacatcatcctaaaaatgaatgatctattatcaggggggaaatatcttgaaccaaagattggggaactcagcttagaaaaaggaaagcttatgcttgtagcttactaaattgccatgccgtgcaattatactgatacagagtacagaatatgctcccacaacaaaatttgtatcaaggatatgtaccagagagaaactatatgattcaggagctgaccatccagaggttctgatattgaggtcctagtcttggtctttcacgatgtacagaacaaaggcccagactatgcgaccatataatatgcaattggccaaaactgaaagttgtgccccgtcaatatttttagcaggagttttctaatgagctccagccaagagacttgttgtgccaaacctgctccaagggaatggctaaatatactgaagtgcactgtgcgtcattgggcttgcccatcgctaaatgcctttgaattttcagagccataaccttgcattggttgcacatagaaaaaggcttgaaaatgatcatgtgccctggtgtaaatactgcaggccatgctgtagctgaacccagttcctgaagagaggcctcatgactgcagctgaatggcagtaatcagtcgaccactgctttcggaccatgacttcagtataactgataatgaacagttcatccgctccaagacagcaattgtaaggatacttgcactaccggcaaactctacctatttgtctactttaaaa

SEQ ID NO: 14547 - DNA, 1459 bp, Setaria italica
  Peptide Sequence Number=SeqID_80521
gcggatgcgcgcgccggcatggtggtgtcgcgcgcgcgggtgcaggacccgggcacgggcgcgcaccgggaggtgatgtacaagggcatggcgtcggagctgttcgtgccgtacatggacccctccgaggcgtggtacttcaagacgtacatggacgccggcgagtacggcttcgggctgcaggccatgccgctggtgccgctcaacgactgcccgcgccacgcgcagtacgtcgacggcgtcttcgtggccgccgacggccggccctacgtgcgcgggaacatgatctgcgtcttcgagcggtacgccggcgacgtcgcgtggcgacactcagagagccccatcaccggcatggacataagggagtcgcggccgaaggtgacgctggtggcgcggatggtagcgtccgtcgccaactacgactacatcatggactgggagttccagatggacggcctcgtccgcatcaaggttgggctcagcggcatcctcatggtgaagggcacggcctactcgcacctaagcgaggccagcgagaacgaggacatgcacggcacgctcctctccgagaacgtcatcggcgtcatccacgatcactacgtcaccttccgcctcgacatggacgtcgacggcaccgacaactccttcgtgcgcgtcgagatggcgcgccaggagaccggccccggcgagtccccccggaggagctacctcaaggccacccgccacgtcgcgcagaccgagaaggatgcccaggtgcgcctcaagctctaccagccggaggagttccacgtcatcaacccgaccaagaagacgcgcgtcggcaaccccgtcggttacaaggtcgtccccgccggcaccgccgccagcttgctcgaccccgaggatccgccgcagaagagaggcgccttcacaaacaatcagatatgggtgacaccctacaacaagagcgaggaatgggcaggtggtctgttcgtgtaccagagcaaaggggaggacacgctggccacttggtccgagagggaccgtccgatcgagaacagggatctggtgctgtggtacactctgggattccaccacatcccctgccaggaggacttccccatcatgcccaccgtgtcctccagcttcgacctcaagcccgtcaacttcttcgagagcaaccccatcctcaagcagcggccgaccgaggacgacgacctgccggtctgtgccgccgccgctagatgagtgcgcgctgtcgcgacaccgtccatcagcggccgtggacgcgtgttcccctgtgcctgttatgtaccgttgggcatgtagccatgtccctgtgctcgtgctagtagctatagtatgtgatgcagctgcgtcatctcctctgccatgtatgaccaaactaaatgaggactttgagtcaatgcattgcatatcagttgcgacgacgtatatctccaggagccctgcagattta

SEQ ID NO: 14548 - DNA, 1337 bp, Setaria italica
  Peptide Sequence Number=SeqID_80522
accaacaccacaccaaagccaagaaccaactcatcggaagcagagaccacagcgaaaaggcgaggagggggaggggaaatcatggagccgatttgctgtggagattcgggcgcgtgatccggtcggatcttgctttcctgaggggcgatggtggtggtgctgcctctgcctctgcctctgccgctgccgtgatgtggcgtgccatggtggtcgcctcctatgtcctatatcctcctccgcctgctccccgctgctgccctcccccgagatgctgcattagccaccgttaagcaacgcctgcagcaagcaaggaagagaggcttccctgagcgactcaaggaggagagcaaaagggaggccggctgtgctggttgattgattcgttcggtttctagtactggctctcgtcgttccgcggccatgacggtggtcgacgccgagtcgcgcttccacgttctcgcggtggacgacagcctcatcgacaggaagctcatcgagatgctgcttaggaactcgtcctaccaagtgaccactgtcgattccgggagcaaggccttggagctgctgggattgagggatgaggcggacgacccatcatcgccttcttcctcctcccctgaccaacaggagatcgatgtgaatctgatcatcactgactactgcatgccgggcatgacagggtatgatctgctgaagcgggtgaaggggtcctcctcattgaaggacattcctgtggtgatcatgtcgtctgagaatgtgcctgcccggatcaacaggtgcttggaagatggcgcagaggagttcttcctgaagcccgtcaagctcgccgacatgaagaagctcaagtctcatctcctgaaaaggaaggagcccaagatgtgccagccgcagatacagcctgagcccgagcagaagctggagccaccgccacagccggcgcacaagccggaggaggccgtggcagaagcgaccgctgacggaacagcagccatcagcgactgcaacggcagcaacaagaggaaggcggcggccatggagcagcagcaggaggggctcacgtcgccggagagcaccaagccaaggctgtccaatagcagcctggcagtggagacctgaaaaggcaaccgaattgatcaaccaaccaaccagaaccacctccctactaagaatttaattttccttctttcttctgctgttcttttggaggggctaatcattcatgggatggatggatggatggatcattagctccttgggaggaaggggtgggggtttagctcgaagtgaaaaacaatttacggcatacttatatagtagctgcttcggcctgcaaaaaa

SEQ ID NO: 14549 - DNA, 526 bp, Setaria italica
  Peptide Sequence Number=SeqID_80523
gcagccgtcgctgtctccggcggcagcggcggtgacgacgacgagttcgtctactccggcttcgctgctggcggctccaacctgacccacctgacccttgatggcacggccaaggtcacgccgaccggcctgctcgagctgaccaacggcacggcgcatagcaaaggccacgcgttccacccgacgccgctgcgcctccgcgagccggacgacggtggcagtgataagaagaagaaggcagcggcggcgatccggtccttctcggccaccttcgtcttcggcatcgtgccgccggcagccccgggcgtgggcgccggccacggcctcgcgctcgtggtctctccgaccaaggacctctcctccgggatggccacctcgtacctgggcttcctcaacggcaccaaattcttcgccgtggagctcgacaccgtcatgagcactgagttccacgacaaggacaacaaccacgtcggcgtcgacgtcgacactctcgtgtccgctgccgccgccagcgccggctactacg

SEQ ID NO: 14550 - DNA, 631 bp, Setaria italica
  Peptide Sequence Number=SeqID_80524
cgcacacggcctgtaagtgatggagagctacatctatacatcggtgatcactgagcagagtatgcataccaacattagcgatgtgattcactgcacatcgatcgtggtcatctgcagaggtgatcgatggtgagcaacgcttagccgtatcctagcatcttgggcgcaagggtgagcaacggttgcagcgtgctgggcgcaaacttcctcgcgaacaagaagcatacgtccgccggctggccgttgtaggtacacgtcccctgatccttcccaggtgtcgttaacctcttcaggaacgcctccttgacgtcggcttccccgaacgtggccgggtgcgcgccgccgcgagaccagtccacccaagtcacgctgcggttggcgatccgccccggcgcctccacggagagcaccgtcggcaggtagtgctcgtccatgtagcacggcgggcggcagtgcttccggaacttggggtagtaccgctcgtcggcgaccacgtccacggcgagggcgcggtccagctcgaaccactgcgcgcccttgcgccactgctcccggcgcacctccggggcgaggccggcgcggtaccggccgcggccgtgcgggccgggtctcgaaggcgccgacgaagctc

SEQ ID NO: 14551 - DNA, 204 bp, Setaria italica
  Peptide Sequence Number=SeqID_80525
gtgttgtgatgacattttccttggttcgcagaatatgaattcagaaaccagtgtaatgtgcagtaaacaacaacaacaaaaaaaatacttgagaactctcacatcatcacctgactacaattccacaaatcgagttcttagcagtatcttgatcaacagcacccaacaaagtctacaacagcatcatgacaacccgggtcaaac

SEQ ID NO: 14552 - DNA, 1171 bp, Setaria italica
  Peptide Sequence Number=SeqID_80526
gcctgtaccaatattagattcatcactttgttgcatggtttgggtggtcgttttggcgctctgcagggtttcggttggggctgaagatttgcaccaggagcaacaaagatactctcgtcctttgtcaagtttcaccaaaacattattaggagctaaaaatctatgagagtcatataatgccactacaacatggcaaacttcataatcaatgggtcaaaaatctccatacgctatgggaaatttcccaaataattttaagagctgaagtcagtaacggaaaggagctgacagagtgaggttggcatcagatatcctgccacatgtgaataactaatccaaacgtcagcacaaatccatgtgcaagagaacaggtagctcatgccctggctctacatttctttacattgcaattttgggtgggggttgttcctgtccgttctggttcgaggtggtatatagcagtggctgggatgaggtgggcagaagactgcaaattgtcactgcctatgcgaccatcaatcagcacccaaaattcatagcaaggaaatgctggaacagcagatcagagatttgacagttcccaaatccccattgcaaatggcttcataatctttcatgcccaatttcacctcaaacagtcaaaagtgattgatagcagatattgaacagcaatgggtattgggtagtgatatggtagccttccagaggcaccactactatcaaaaagattcttccaataatgtggttataaaattcattaatcaaccagcatccaaaattttgatcatgttggtgccagcaggatcagaacctttatctgtaggcacatgcctagcctttgagaatctgctgttgtgcatagtctcatatgtcatgaacattaagaactcgagaaacaggcacctatctatgtcctcgttgttagcctggggatcattctccatttccctttgtgcccaatcaattatatttctagtagcatcattagtctattctattctaaaactaaaagaatcttctctgagcttctcagcccacataagggctctcttcccaaacccttgcttgcagaaatgagaaaggaaaacattaagtgtgatagtgtttggttgaaaagccatcttaatcagcctgccagtcagtatcatagctcgatcaagaacatcacttg

SEQ ID NO: 14553 - DNA, 1337 bp, Setaria italica
  Peptide Sequence Number=SeqID_80527
caatatgttgcattcaaggttaaaaccacttccccaaaaagatattgtgtccgaccaaatgtaggagttattcttccactggaatcacgtgattttacagttactatgcaagcgccaaagaatgcttcaccagatccgcaaataaaagacaagtttcttgtgcagaccacagttgttccgtttggcacagctgatgaagacaatgttcctgcttttttctccaaagaaactgaccgatatattgaggagaagaagttgaaagttgtccttgtcagcatgactcaggatcaagtagagcaacccatcaatggagttctgcatgccaaggaaccagttggggttactgtggcagaggaaatactgaataatgtgaatgaagcacctaatgtggtgaatgaagttcgtcatcccctgaaaccaagttttccccctttaagaggaacccctgctactttcagtgaaatttcctcctctgtaaaacaaggtcctactgttctgcaagattttctagtcccaccaaatcaaacttcacttactttgtcggaatctgctcccagtctgcaagaaacctcttctatctctgtagaatctcaattttcgtcaacagaaacaagtgcatacttgaaatctccaccattggaatatactcctactccaagtgaagttccaccgttaagtgatatagaatctaccaataccgatgaccttcatatatctcatgtaactgaagatgttcacactttacagatgaaacttaacaatcttgaagtaaaacttgaagaggctgaaactttgattgtaaaactgagggaagagaccaaaattaccctccaggagcgggataagttacggaaagaagtggtattcttgaaaaaggcgggcgctgcacaggttcactccagcactggttttcccctgctttttgtcgtctacatggcagttgttggcatgtcgctcggttaccttctgcacctatgagaatggggtatcggagatgaagctcctgggccgggcgtttgctgatcttccctggagcggccgagtttcagaggatactaaggtagttaatcagagagaaactactgtcgcgtcatgatggtcacattagtccgtggacttccatagttccatacatttcagggtgacaaatactggagcgtatagaaatagaacagcgtagttttaattgtatagaactctaaaaggtttgcctgaagactaaccaggagatcatatcctccatgttctcctttcttggcttcttgccaaagttcggcaagaaactatcacaagtttatggaactagtcaaataaggcatttacgatttggtgataat

SEQ ID NO: 14554 - DNA, 286 bp, Setaria italica
  Peptide Sequence Number=SeqID_80528
tcaccattaagcatatgccattgtacttcttgtaatcgtccctctcgacaaggcggtagcgctgcgtcacgagggcctcccggtggcctccctccctcttgtactccaagaaatttgtcttcttgagtagcttctgctcgtggaacttgagcttcctcatcttttaattgaatccaggtgtgacctgccgacctgccggctcgtcgcccgcgagcagcccgacgaagaaggaagaactagccaagggcggcggcgccgctcgacctatcgtcggccgagaggagag

SEQ ID NO: 14555 - DNA, 592 bp, Setaria italica
  Peptide Sequence Number=SeqID_80529
acaggctcttttaggttggtggtccgcccatgtcttacagcttatcgagcagcatgtctgtcatttcgattctgaaaggatctcttgggtccatctgctttatgatgttaacgagcttttgcaccattaagcatatgccattgtacttcttgtaatcgtccctctcgacgaggcggtagtgctgcgtcacgagggcctcccggtggcctccctccctcttgtactccaagaaattggtcttcttgaggagcttctgctcgtggaacttgagcttcctcatctttcaattgaagcggcagtaagggagctcccgccgcccagcgaaaaatttcttcggaacgaaaggatttgcttgaagaaaaacaagaacaagcaaggctacttgcagatggaagaaggaaccgatagaagcctatacggatctccgccgcaggcaagtgtaggcagtaccagcagaggggagccggcgaagagaggaggagcgcgacacctctcgacgcgagaatagctgggtgggagaaaccctagctgtgtcctttcgccgccggcaagttcgtcgacgaggaggcgcaacaaatgtggcggcggtaga

SEQ ID NO: 14556 - DNA, 674 bp, Setaria italica
  Peptide Sequence Number=SeqID_80530
tagaataaaactcggcctttaaaaaacaattgcacagtgcatcaaacaaaatgtgtcagcaaccaactacaaaattgcgctgtctgcaatgcaaatgcaagtaccctacaacaaagtgaacaaacaggcaattgtcacagatttttgttctgaaaatcacatatgtgagtagctaagattacattgatgggcagcgcagaatttcctgctgaatggttttctcaaaacatggcatcataatcgtccaaggcatcgttgtactccatgaccttcctcttgatctttgaggaatccacccaggtgatgaagtcctccatgtttctggtcacaagaaaggctggatcggtaactgtctctggacctacacgcacatgcccctgctcgatgtatgttaccgcctctttaaggtgctctgcaaacttgagcttcaccataactgttgccagtctccgcctgcagaaggcgctagccgaaagattctcgcatttcaacaggctcttttttgttggaattacacccatgttatatctgaaatttaagaaactccatcagactacacacatgaggatggataaaagtgcaacagacaaaatctgaaaatcgcaaatactaaattggataagacattacatgatttggtcaaaatgaaataggttgagatatcacaaacaaac

SEQ ID NO: 14557 - DNA, 997 bp, Setaria italica
  Peptide Sequence Number=SeqID_80531
ttgcctgtttgttcactttgttgtagggtacttgcattaggtacgtaagtggcgaagtttttgtttaagtttcatctgcaattggcatccaattcgtgcctcaacgacatccacatggactttagagcactccgacttccaactgaaattgtgctgaatggggggggtataacaacgcagtcaaccacaaatgcactgcagaatgaacatcgtgaaggcacaacgtagcagtagcacaaaactctccctttaataaaaaaaagacaatcgcacgctacatcatcagacataatgcgtcagcaaccagctacaagactgtatcacgtctgcaatgcaaatgcaagcagcctgcaacagacaatatccggatttttgttctggaaatgccacatgtgcgtagccaagattacaatgatggacaagaaatttccgtggaatgattctctcaaaacatggcatcataatcatccaatgcgtcattgtactccatgaccttcctcttgatctttgaggaatccacccaggtgatgaagtcctccatgtttctggtcacaaggaaggctggatcggtaactgtctctggacctacacgcacatgcccctgctcgatgtatgttaccgcctctttaaggtgctctgcaaacttgagcttcaccataactgttgccagtctccgcctgcagaaggcgctagccgaaagattctcgcatttcaacaggctcttttttgttggaattacacccatgttatatagtttatcgagcagcatgtctgtcatttcgattctgaaagggtctcttgggtccatctgctttatgatattaacgagcttttgcaccattaagcatatgccattgtagaaactccatcagactacacacatgaggatggataaaagtgcaacagacaaaatctgaaaatcgcaaatactaaattggataagacattacatgatttggtcaaaatgaaataggttgagatatcacaaacaaacatt

SEQ ID NO: 14558 - DNA, 456 bp, Setaria italica
  Peptide Sequence Number=SeqID_80532
ttaccattaggactttgctgcatacatgtctgatagcattagcacttacaacaagagaagtgaaggatgttaggatgccgattaccagaaatccatttactgcaccgatcagttgctggcttccaaagtaacaaattcccccgaaagccagtgaaaacagggtagcactctcccatccaatgagtttgttatgatatctgaagagcgtgccacgtatgcgacaagaagtgcataatgtataaataaataggataagctttcgtggatctctgactgcatgtcacctttaacaagcgggtttgataatttacccagtcaatgacattcaattaccatgtataaccagcagaaaatgcatgtaactgccgaggccaagaacccagcttcttgtgtgactgcagggattgcgaggatacctgccccaacctatttgcagagaaagaagagtaagtgaag

SEQ ID NO: 14559 - DNA, 658 bp, Setaria italica
  Peptide Sequence Number=SeqID_80533
ctctgttgttgcaaggctgacagtattggtaacacctttaactggcacaaataacaagttaacaacttctgtactaaattaagtattatcatttatgtacaaaattatcctcagaagacttaccgtacttttgacaggtttccctccaaatttgtacagagaacaggaactacattctggtatacaaatgaaagggcaattattggtatactttgtggagcagcagcaaaatttgcttcaagaagagaactccactgtagatttccacttgccacaacaacaagagaagtgaaggatgttaggatgccgattaccagaaatccatttactgcaccgatcagttgctggcttccaaagtaacaaattcccccgaaagccagtgaaaacagggtagcactctcccataatggaatacccaatgagtttgttatgatatctgaagagcgtgccacgtatgcgacaagaagtgcataatgtataaataaataggataagctgcaggcacaaggaaagcaaagttagaaaattttcacaggagatatgaaatgttaattgagtcgaaaaaagaatttctgactctaaatggtgagctaaatttatgtgaggatctgaagttccttcttcttttacaattgtcaatttatcatatttcaggcct

SEQ ID NO: 14560 - DNA, 1663 bp, Setaria italica
  misc_feature (1)..(59): n is a, c, g, or t
  Peptide Sequence Number=SeqID_80534
nnnnnnnnnnnnnnnnnnnnnnnnnnnnnnnnnnnnnnnnnnnnnnnnnnnnnnnnnnngtcaaaactgcactcgattgcttttttactatacttatgctacctgttggcagtactacacaaagatctgaaggggtgttgtatttggtactgttacatgatgtacattcacttgcaccaattgtcagtgttgtccttgtaattgcattatatccttgactatctctgaaacaataacaagcaatgcacctcccataacaactcctagagtaaatttccctcctgggactatagggggtactggagcttccaactcatctgaatatctctctgaccaagacatagctgctggaaaaactccaaagagtactagaactccataagttcctgcaaagtccaatgctttgaaaaatatctccggatcaagcagggacagaacaagtggagggagcagagttaataagaatggcagcggtttgttctggccacttggcagtttaagcaagtccgctaggaagtctgagagtcctagaataaatccaatgtatgatgtgcctatagcgagaaatgagaatgcctcaacaataggccccactgtcccattacttgacctcagtagttctaatggatcagaaacattgctattccctgcaatgcctggaagtgtccccaggattacaccatcccatactaggaacagagccaggggtatggcagtacccgctacgatagctgttcgtacttttgacaggtttccctccaaatttgtacagagaacaggaactacattctggtatacaaatgaaagggcaattattggtatactttgtggagcagcagcaaaatttgcttcaagaagagaactccactgtagatttccacttgccacaaccagaaatccatttactgcaccgatcagttgctggcttccaaagtaacaaattcccccgaaagccagtgaaaacagggtagcactctcccataatggaatacccaatgagtttgttatgatatctgaagagcgtgccacgtatgcgacaagaagtgcataatgtataaataaataggataagcaggctgttattactccggatgtccctagagtgcgcattgccattgagaccagggaaacacctccagatcctatctcacacatggtattgacgtttacttcagcaactaacagccctgtcacaaccatgtataaccagcagaaaatgcatgtaactgccgaggccaagaacccagcttcttgtgtgactgcagggattgcgaggatacctgccccaaccgttgtgccggccacaaggaagatggcactggtgacgctcccaggctcgtgcttcatggtcgcctggttgaggttggagaagaggcgctccagctgctgcggcgattccggcggctgccgttcgtcagcgtactgggaacagaggcatcgctgcagcggcctccttgttcctcttcttactactcgcctgagcaccggtgtccttgcggagaccgaagaaggcgtggtgagtaacgacggtttcagtagagggtagcagtgagcagagatcaacgccattgttgagcaaggttgttccttctccgcggccggcgttctaccagcagaagctgtttggcctcgtgttgcgtgttatcctctagcttgttgttgc

SEQ ID NO: 14561 - DNA, 460 bp, Setaria italica
  Peptide Sequence Number=SeqID_80535
gtaaaaaattaaaataaactaaccgtaataaggaagaagaaccgtgaagcttgccgtgctttgttgtctgatggtagctttgtggaagttttcttgaacatgtccttggaattgtgtgaagcaagggattcaaagggtctttattaagcttgctcgtgcaggaaaaataaagggtgtctatatgtccatttgtaagtttaggaggagttctctagttgagaaatggaaaaaaaggaaaatgagttttactggaatcgatgacccctacgaagctcccctgaattgcgagattgagatcaaggaagtggacggtgtatgccccccactttgtgacatggcggggcaggtggttacttaccttgaggagaaaggcttcctgcacgagtagctgaatccgtgaagcaatctttggggaagatttacataagacataactatgggaacaccactgccagcgcct

SEQ ID NO: 14562 - DNA, 602 bp, Setaria italica
  Peptide Sequence Number=SeqID_80536
tgactgaaccaaaatcagttgagctgttttattttgggagtggattctagtccctgacctggaccgtggagttataggtcaaccgtcagggcatgctagggccccagcctctaaaggttttcttttcaggtgtctatatgtccatttgtacagcattttaggaggagttctctagttgagaaatggaaaaaaaggaaaatgagtaagccttgtcttctgtaagcttaagaatctatgttttcactgcaactttgtttatgtgcagacttatctttattttgctggttctagttcaccatttattatgtcaactgtcttcatgacattctatttaacctgttttgttaactcgtatagagtttgttattgcttaatcatggtttactgcaggttttactggaatcgatgacccctacgaagctcccctgaattgcgagattgagatcaaggaagtggacggtgtatgccccccactttgtgacatggcggggcaggtggttacttaccttgaggagaaaggcttcctgcacgagtagctgaatccgtgaagcaatctttggggaagatttatataaggctagcacagaataagtcaaaggcgc

SEQ ID NO: 14563 - DNA, 944 bp, Setaria italica
  Peptide Sequence Number=SeqID_80537
actttctagccttgtgtaattgacagtttcaactattttggacaggtgaagtggcaaagttatttgcagatgcgggccttgtatgtattgcaagtttgatatctccgtataggagagaccgtgaagcttgccgtgctttgttgtctgatggtagctttgtggaagtaagggatccattttatttgttttgtctttagtgaacttagctatcccatgagttttaccaccaaacacctgtgaacttttgcaggttttcttgaacatgtccttggaattgtgtgaagcaagggattcaaagggtctttataagcttgctcgtgcaggaaaaataaagggtgaggttcatataatgcttggtgtccagaatggaaataatttggagagtttaatgcttcaatttagcatgtcctgctgagcaaaatttgatcatacttaatgctttacattataaatcacatttctggcttgtttgtaaggttagaagcacagcctgatttgaagaattaaaaatactactcgagtcaaattatgcttgttttgagaaagcagcaccttaataacaatatgatttcacaacaaagcacaaatttagatgttgcatatactgcgaggatggatattttattttaccatctacagtgtttagattcttccatttgattccttggtcacactgtgtagcgatggtacacctagcatgtgtttaagcattctttttaggttatattctaccactatgctgttatttcacatttggctgcacatgggtcatgttgcgtatttctaaatgctgaaccaaaatcagttgagctgttttattttgggagtggattctagtccctgacctggaccgtggagttataggtcaaccgtcagggcatgctagggccccagcctctaaagcaccaacaacttagtaagttacggtgttagtacttacgtta

SEQ ID NO: 14564 - DNA, 1244 bp, Setaria italica
  Peptide Sequence Number=SeqID_80538
ctcgccgcaccgcggcgcgcggggtggtggtggtgccctcgcgatccgcgtgccaattccagcggtggtggcctggtgggtgtacctttccctcccctggccgctgctcgcgcctcgcggccgcgcaccggaaccagagccccgtcgcgaatctagggttgcctccgccccgcccccgccttccgaggtcccaagccgccgggactgggacgagggtaacaggcgacggaggcttcgacagacgccccctcgtcgaatgcaccggcgaccgatcgattcaggagcacgcaggagttgaggagaaagcttcaaaaatgtcatccactgtgccaaagtcatcaaatatcttctggcatgattgcgcagttggcaaggctgatcgtcagaagctactcaagcagaaaggttgtgttgtctggattacaggccttagtggttcaggtaaaagtaccttggcatgtacattaggccgagagctccatacaagagggaagcttgcatacgttcttgatggtgataacttaagacatggactaaacaaggatcttggctttaaagctgaagatcgtgctgaaaatataaggagagttggtgaagtggcaaagttatttgcagatgcgggccttgtatgtattgcaagtttgatatctccgtataggagagaccgtgaagcttgccgtgctttgttgtctgatggtagctttgtggaagttttcttgaacatgtccttggaattgtgtgaagcaagggattcaaagggtctttataagcttgctcgtgcaggaaaaataaagggttttactggaatcgatgacccctacgaagctcccctgaattgcgagattgagatcaaggaagtggacggtgtatgccccccactttgtgacatggcggggcaggtggttacttaccttgaggagaaaggcttcctgcacgagtagctgaatccgtgaagcaatctttggggaagatttatataaggctagcacagaataagtcaaaggcgctggcagtggtgttcccatagttatgtcttatgtagattgattccaatgccatcttattttctttcgttacttccctctggcacaagttctgtcattctgtgcaatggcattcagatgagcctagattgttcctaatctcttttgattacttcctctggcactagttctgtgcaatggcattcagatagaagcctattaaatgttccttaagtttaaccttaaaaaaaaaaaaaaaaa

SEQ ID NO: 14565 - DNA, 650 bp, Setaria italica
  Peptide Sequence Number=SeqID_80539
aagaatttttttcataataaacttttggctctcggaacgaacgatggctggagggtcgtcacgtggagcagggagctccacaactcggaccattggatcaaggactgcgacgcctgcgccgacgacatcatgatcgacaacccggggcatctcgacctgctgccacctgagctgaggacctataatggcggcggttctggatcagaagcggtgacgacactgaccaagaaccacgtcgcaggcgccccagccttgagcatccatgacggggacgttgtctacctcacgggcaagctgaagcaaacgaaccgagccggatggctgccggcaatcaacacgaggaagaagaggctggacgaagtggccccggcttccaccggaggagccgcctccccctgctccccgaggtacatcatccattcatcccctgcgcgatctccaaacacatgagcatggtgacacacgattgcaagggatctggttgcaaagatctcaaagaaggaagagatgatgctagcgtaagcgtcgtgcaggaaagcacgcccaggaaaggaattcggctctactaggcacgcccaaatttttctactctcatttctttcctcatgctccttcctaattagcaagcatggagcaggtaggaaagaaaa

SEQ ID NO: 14566 - DNA, 836 bp, Setaria italica
  Peptide Sequence Number=SeqID_80540
agaaaaggggaaaactacaatgggtagtgattagtaatcccccatatataccaactgatgatctacctcgactgcaacctgaggttggttggcatgaaccaaagttggcgcttgacggaggcaaggacggccttgagcatctgctccatctttgtgaagggttatcttcagttctgaagcctggaggtttcttgtttttgagactaatggcaataagcagtctgagttccttgttgatttgataagcacaaagtggagttcttcttttcataatgtggaggcagtattagacttcgcagaaatcaagcgttttgtaacaggatatcgcagatgaacaccaaagcatggatgttgatgtagttcttgggggcgaattttccccgcttagactttggaccttgccatgtaaataatgggatcagtctgggctagcttcagcagaaagcaaacagctcgtaccattgcccctcttcggagcttatcacttgaagtttaagcctggtggtgacaatgatatagcgcaaagtcaatcatcaaatataattctttaggcatgcgagctaatatttcgccaaagccaagctgcggaccgatccatggtccatctgcccaaggaagctgtacaatagacaagactcttgtggcagtttgcattcagaagcatgtatttggccacttgttttgcagcgtgttgggtgatgattgtgatttaaagcggagacttttgtggcgtccaaaattattccgccgcccacacggcactttgtgtgtttcattattgattgatgccgtgggccaggcgattatttttgtaatttgtttcttttttgttccct

SEQ ID NO: 14567 - DNA, 273 bp, Setaria italica
  Peptide Sequence Number=SeqID_80541
gtggaggtggaggcggctccgacgtggtggacgggctcaagtcgtttagcatgagcgacctccgcgcggcgaccaagaacttcgggtcgagctcgtaccttggcgagggcgggttcgggtgcgtgtacaaggggtggatggacgaggcgacgcttgctccgaccaagcccggcgttggccggatggtggccatcaagaagctcaagaaggagagcttccagggccacagggagtggctggccgaggtcacctacctgggcgagctccaccacg

SEQ ID NO: 14568 - DNA, 1504 bp, Setaria italica
  Peptide Sequence Number=SeqID_80542
agaaattaacttactagacaagtcttgtagacatcatcagtactaatagcaatctgtgcataggcatttcccttgtcatattccttgaccccatagttgtatgtcaactccaatacagcatttttatcttctggaccatatcccatcattgcaattgtatactaaagaaaggaacagcagttatttttacagtatcataaattacatgaacagataggtaacatatattgcataaacagtgatggtctcatacagatgccatagcaaatgatcaaatcgatgatagaaaaaaactgatttcaaagtattatgaaacagagatggaagctacttggcataaccattgtgacacatctcatgatgactggaaatgcatgggaattgtcacttcaaaccagtagatagcatcataaatccttcattgcattcaggctgaattcatacgaggacagaacacagctgggtttacaaagacacgcctggtttttctgtcaaagctgcaagtggaacagaatgggtggattgggctagttttcaacaagttgaggaggagaggaatcagcacgcaggttattatgtttgagttgttttacaggtttggatggtttctagtaaaaggcccatgaacaactttggaagcctagcagtgacttccggtgtacaaacaaagagtgggtagaagcctcaacaaatcaggcatcagttacatccagccccaagtttccagactacaaatcccatccaaggcattatgtttcttgagtcccatctccaagggaaacgaaattgaaaacagcagaatgagtaatggtagaaccacagaagcgcgaccaaggagttgagaacaacactgctgctgccagaagaacattaaccacagccaaagaaagaagtggaaactgcactgccacaactacttattgttggatagacattgtaaatcactgatggtcaatctaacctaaaataagaaggaaacctaaaaccttctcctcaaatgactagttacacttgaatggcaagcatgttactgctggacaagtaaataagtatgtgaacttgaaccgtgttcatctaaagggaaaactcaaaggtacaaaaacaagcttttcctccgatccaagctagacttcttattacaagtcagacatcaaatgtgccaaggatgtatatagtgaatacaaaaactgaggcaaaaacagtgtaagcaaccttggcagtggctactgtttaaagcttgagatagaccagcatatggacaagcaccgtaaagtgcgccacgtctttgaaagtagggaatgtttaaactattaaagaactgcttatacaagaaatacgtaacccccccccccccaaaaaaaaaaaatagtaccaagcatacagctagcacttagcatcacataaagatttgtagtaatctaatttcatcacaaacatgctttagaacacaaacctaaacatggtgcataaaagaaacggacaaggtacaacaacctaacaaatg

SEQ ID NO: 14569 - DNA, 446 bp, Setaria italica
  Peptide Sequence Number=SeqID_80543
ataatttgatgttcaactccaatccagcattttttatcttctggaccatatcccatcattgcaattgtatacttgtactcaggattatctcgcttgcgaagaagttccatgccaaatgccttctcatagaaatttatagcacgatcaagatctcccactcgaagcattacctggcacaaaggctcgggagtaggacctctttctataagctcaaatttgtaaccatcaggatcctcaataaaggcaattactgatttcccacctttgacaggacctggctcccttgttactgttcctccttttgctttaataaggtccactgtttttgcaacatcctcaacagcaatcccgaaatggccgaaaccagtcccaatgtcatagctctccacaccataattgtaagtgagctccacaacaaaatgcgagtcctcaggcccgtaccccag

SEQ ID NO: 14570 - DNA, 1064 bp, Setaria italica
  Peptide Sequence Number=SeqID_80544
gtcggccactagtcacaacctgctcgtgctcagcaacccaaccaacaaaccatggcttctcccaagctcctgctcctgctcgccacctccctcctgggctgcggcctcctggccgccgccgactacgccccgatgaccctgaccgtggtgaacaactgccccttcccggtgtggccgggcatccaggccaactccggccacgacgtgctggagggcggcggcttcttcctcccagcgctctcccacaagtcgttcccggcgccgtcccacccctggtcgggccgcatctgggctcgcacggggtgcactggcgccggcgcgcagctccactgcgccacgggcgactgcggcggtcggctccagtgcgccgggctcggcggcgcggctcccacgacccttgcgcaggtgaacctccaccacggcggcgacgaccaggcctcgtacggggtgagcgtggtggacggcttcaacgtgggcctgtccgtgaccccgcacgagggccgcggcaactgccccgtcctcgcctgccgcacggacctcacccagacctgccccggcgagctccagctgcggtcgccggcgggggccgtgctcgcgtgcaagagcgggtgcgaggccttccgcaccgacgagctgtgctgccgcaacatgtacaacagcccgcgcacctgccgcgcctccaagtactcggagttcttcaagcgcgagtgcccgcaggccttcacctacgcgcacgacagcccgtcgctcacccaccaatgcgccgcgccgcgcgagctcaaggtcattttctgccactagatgaccagagctccggagcaccggagctctgaggggtgggcgcgcgcgcgcgcgccgtcgcaagtgtcgctagtaggatttgcggtgtgcgtggtggtctagtgcgtgcttctgtgcctggttagcagtggtttcactggtttggtcgtgctctgtaggtaccgtgcccgttggatgtgtgtgcgttctggccctgagactgatgtaatgacattactgctcagtttgcagtctgaaataaacttggtttagatcacaaacaa

SEQ ID NO: 14571 - DNA, 299 bp, Setaria italica
  Peptide Sequence Number=SeqID_80545
tcagtgcatcagcaggtaccccttttaactcaaggggaggggccggagaccacatacaagaaggaacattattaagtgcggcagttcgtcttgcctccacaaattcctgcaggaaggaagttgctaaaacaatatcaatggaatcctgaaatctcattgggtacacaatagtaactttatctgcctggggagcgaggaaaaaggattcattaggacggtgaacaagagcaacaagcttgtcaacattaggagctactgtcttcgaggctaaatgtttcagcagaaccttcagtggtgca

SEQ ID NO: 14572 - DNA, 730 bp, Setaria italica
  Peptide Sequence Number=SeqID_80546
aggatagctatgccagggctttcggcaggatagtcagcgccactgaaagcaagtttatttgagcttgaaaaactcaataactgaagggttgctgtatatatacagtgcagcatgaattgtagcagtactgaaaaggttaatgttaatctttagtgtcaaatgtggctgatatgatacagataaaatgcataaatcatgaataggtcacgaagctgatgaaagagacagaaggaagcataaaaaatacctgcaggaaggaagttgctaaaacaatatcaatggaatcctgaaatctcattgggtacacaatagtaactttatctgcctgaaaagccaacagttaattccatttggtgcaaataataaaatcaatgcagcactgaacagattgaccgtaaaatcaaatacataagtaatacattcatgtacatagaataatcagggctaatataactaatataacacctaggtactagttgcatgatatgcacatttatatgatatggctgtccctaaagtcatacctgggagcgaggaaaaaggattcattaggacggtgaacaagagcaacaagcttgtcaacattaggagctactgtcttcgaggctaaatgtttcagcagaaccttcagtggtgcacccagcacaacctctctaacagatgcaatttagtgtcaagatagcatttctttgttcttcatctggcggaagctttgtcaagtttatcttca

SEQ ID NO: 14573 - DNA, 339 bp, Setaria italica
  Peptide Sequence Number=SeqID_80547
catggacatcgactgccacacggtggagttcgacgatgtgcggtatcatatccagttttctatgaggaatccaaaggtaatggtgctatcggttgctttgccgctcccacctcctgaagcgattctgtatgatgggcttccacttggtgccattgaggctataaaggctgcttatgggccggttgtgcaaattcttgatcctccaaaggatggatttgatcttacgatgaagataaacttgacaatgtttcagcagaaccttcagtggtgcacccagcacaacctctctaacagatgcaatttgtgtcaagatagcatttctttgttcttcatctggcg

SEQ ID NO: 14574 - DNA, 875 bp, Setaria italica
  Peptide Sequence Number=SeqID_80548
cattaaaaacaatctgctcaatgatttacagaggcatgcacttgaacctagaatttatcatcaatgttctgttgtgagcaccgaatacaaatattcatcacccaattataacagaagaacagtatacgatgccggttttgttccaccccttctatcttttgctccacagaattgaacgggcgtcaccaaccaagtagtacagccggcatcaaggaaactccaacctcatttgtcaaagatttccgagtgcagacttcaattcccttcattcttcaggctcagtctattgaaagatgcgccatgcaccaacttcttcagcttctctgcatcagacttcgctcggtccaaagcctggatcagcgactcaaccctgcgcctcatcctagtatgcatgaatccttcagaacactttacatgatagcttacataagcatgaaatgttaacaaattccaaactgttctgtctagctttttaccctcaacatgccgagggtatacaacaaaagtaacaaagccagcattcgcattcagtgcatcagcaggtaccccttttaactcaaggggaggtgccggagaccacatacaagaaggaacattattaagtgcggcagttcgtcttgcctccacaaattcctgcaggaaggaagttgctaaaacaatatcaatggaatcctgaaatctcattgggtacacaatagtaactttatctgcctgaaaagccaacagttaattccatttggtgcaaataataaaatcaatgcagcactgaacagattgaccgtaaaatcaaatacataagtaatacattcatgtacatagaataatcagggctaatataactaatataacacctaggtactagttgcatgatatgc

SEQ ID NO: 14575 - DNA, 642 bp, Setaria italica
  Peptide Sequence Number=SeqID_80549
accaaggcgattgtacttcttgttgtgactatgcagataacctccagtatcaacatgcctaagccttattttttgatcccttttccataccttttccgcttccttctatttctagcctccagtagtcaccagtgtctgatagttcatccccaccataacagctaacctcaaggttaccagataacggtgaagcgtgcaagtgactatgcagccacctccgtgtcctcatgtgttgcaactttacaatgctaccagtctcgatggcatcaccttgcttagacgatgaatctggagtaggccttatgatccagtagctattggagtcgtctccttcggggaatcctgtgacggactgctggccgctgcccgagccgtagggcacgtcgtgcgagtgcagccggtgcttcgtcttctcgtgcatcagcttgatcacgctcccgtacgtcacctcgccgccctctgactccacgggggccgctgtgcccctgtccacgccgctgaatccggcgctgaccaggagagccacggcgagcgcgagcagggacgcggccatcgcgacggcgagcgcgcggcgggacctcggtggagacgaggaggaggaggcgtcggccttgcctttgcacatatccaattattgttacg

SEQ ID NO: 14576 - DNA, 251 bp, Setaria italica
  Peptide Sequence Number=SeqID_80550
ctcaggaactgcagttagagagagcactccaccatagggacggttcacagttctgcggttcctatggtggagtgctctcaggaactgcagttagagaaaggatcatccgtgctttcctggttgaagagcagaagattgtgaagaaggtgttgaaaatacagaagaccaaagacaagactgccacaaagtaactctgaaaatggaagtgagctcctggttctgtaaacttaggaagtactttttgtcaaagt

SEQ ID NO: 14577 - DNA, 477 bp, Setaria italica
  Peptide Sequence Number=SeqID_80551
tgccgctcgtagtgttttctgcacctcgcgacggcgaaacgatggtggtgaattcctgcgccaaattggcaagccctcgctttggcgggcagacacaggcacaatccaaacatgccctaagttcatggatcacaagtttttgttgcattttctttgtatgaagcggcatttcaagcctacagtatgaacgtgtcctcatattgcacatgctttaaattgcagattccacacctcagacctgctgagtacaagaggtccaggttgtcaaggaaccggaggactgtgaaccgtccgtatggtggtgttctgtctggtactgcagttagggagaggtgtattcttccttggatcttctgggaggtcaccgggaagaagatccaaggaattccacacctcagacctgctgagtacaagaggtccaggttgtcaaggaaccggaggactgtgaaccgtccgaatgatcctctccctaactgc

SEQ ID NO: 14578 - DNA, 597 bp, Setaria italica
  Peptide Sequence Number=SeqID_80552
gcagggcgcgggcggtggggtggccaccggtgcgcgcgtaccggcgcaacgcgctgcgcgacgaggccaagctcgtcaaggtggccgtcgacggcgcgccgtacctgcgcaaggtggacctggcggcgcacgacgggtacgcgggcctgctccgcgcgctgcacggcatgttcgcctcatgcctcggcgccaatggggccgggaggctcgtggacgccgctaccggtgccgagtacgtgcccacctacgaggacaaggacggcgactggatgctcgtcggagacgtccccttcaagatgttcgtggactcgtgcaagcggatccgtctcatgaagagctccgaggctgtcaacctatctccaaggacatcatcccaatgattgttgtcgtcgacgcatatgcgctacgctgcggcggttaatttgtctgaatttgttcacaacaacgcgcgcaatggaagaggcttggctgctcaggtcctccatgcgccttatacaccgtaggatcagagttcagtctgttgctgtgttctgtacaggccacacaccacccatgggaacttctctcagttccaagtgccccttctctcggccggac

SEQ ID NO: 14579 - DNA, 958 bp, Setaria italica
  Peptide Sequence Number=SeqID_80553
ttccttatgatttgggaggtgttgctgtttactggcatgtcattgccattgcttacaaatggtgtgcttgctgacccagggacacattattgatttgtcaatatctcttttctgctccatgctgcagattcatcattttgtcttgcgtcatcttgtgtagatatttttatattgtgaggtacatactattgaatgcattgttcatcctgtggatacctagactttgactataggtggctgagtacccttaattgataaattaggagaatctgtgttatttttaagccttgctgagttttgaggaacaggttatgttatctacccaaattagctgaccttagtctaatcttggagccatttctctcatcatgctgtgttatgtggtgtttgtttatttatatctgatcttgtatccaacagctaattggagttgtgtcaacattggttaagtaaacatttatgtttggatgctgctgccactgaagcaacattagctgagttggccttctgttggtgtttgatgttagaacttgcaattggttggtttgatcacttcacgtgtgcatggcctatatttggttgtttctgtcgcaatcgcaaaatattctccataacttattatttagttgacatcatctcctaattttcttatctgaacaggcccaaagcatatttcatctgctgttcagtgtgaattttctacataatatctagtgctatttttaccatttttacagattccccacttgaggcctgctgagtacaagaggtccaggttgtctaggaaccgcaggactgtgaaccgtccttatggtggagtgctctctggaactgctgttagggagaggatcatccgtgctttcttggttgaggagcagaagattgtcaagaaggtcctgaaaatacagaaaaccaaggacaaggcagcgctacgcttccattcaggagctctactttg

SEQ ID NO: 14580 - DNA, 724 bp, Setaria italica
  Peptide Sequence Number=SeqID_80554
agagaggtcgacgccatggtgcagcggctcacgtaccggaagcggcacagctacgccaccaagtccaaccagaccagggtcgtcaagaccccaggagggaggcttgtgtaccagtacaccaagaagcgggcgagcgggcccaagtgcccggtcaccggcaagaagatccaggggatacctcacctgaggcctgctgagtacaagagatccagattatccaggaacaggaggaccgtgaaccgtccttatggtggtgttctgtctggtcaggctgttagggaaaggatcatccgtgctttccttgttgaggagcaaaagatcgtgaagaaggttcttaagatccaaaagaccaaggagaagacgacttcaaaatgagacggcaaaatctttctatacccatgagaactttttggaggacggtggtgatcaatgcttagtcaaaaatccttatcggtatgctaggctggtggtttctgaatctagctagagattgtgatcaattttccatgttgtcgggatggaagtctagacatcttctcccatgttctgatccttgtggttggctactagttatatatcaacagattttcagtgctttctgagcattatttgtgcccctctgttcttagaaaagaatgttctacatatgttgaacgtcggttggtgtgcttttcgggttggtctattcgtgaatgcaccttgagcaacgtggtgtttggattcc

SEQ ID NO: 14581 - DNA, 1119 bp, Setaria italica
  Peptide Sequence Number=SeqID_80555
agtaggtagaagaaggaagaaaagcagaggaggatgaggcagcggcggcggccgacgttgtcgccgccgccgcgtcgccggcagcagccgccaccggcggtgcaaacatgaagaggtcgccgagccagagcagcgtggtcaccaccgacgcgcagccggacgccgacaagcctcgcgcgcccaaggcgcaggcggtgggctggccgcccgtccggtcgttccgcaagaacatcctctccgtccagtcgtgccagaaagggggcggcgacatggacgacggcaagtccggcgcggcggcgttcgtgaaggtgagcatggacggcgcgccgtacctgcgcaaggtggacctgaggatgtacgggagctaccaggagctgtccaaggcgctcgagaagatgttcagctccttcaccatcggcagctgcggcgggtctcaggggatgaagggcatgaacgagaccaagctggcagacctgctcagcggctccgagtacgtgcccacctacgaggacaaggacggcgactggatgctcgtcggcgacgtgccctgggagatgttcgtggagtcgtgcaagcgcctccggatcatgaaaggatccgaagccgtcggcctcgctcccagggcgatggagaagtgcaagaacagttgctgaggaaggcatcgcgagcgtccagtattaactgcaaggacggatacgcgtccgctcctctctgtatcataatgttgttgagttttactaccctgaaagcctgtgtcgtcgtctcggttaaggcgtgttgttcatgtactagtgtgttcttctcttcttctcttttaatttagggactccacgcatgtataattgtggttaagtttcatcttgttatatgaagtatatatatacacgtaacaagatggtgtgatcgatcaattatacatgcgtggagtccctaaattaaaagagaagaagagaagaacacactagtacatgaacaacacgccttaaccgaagccgtcggcctcgctcccagggcgatggagaagtgcaagaacagttgctgaggaaggcatcgcgagcgtccagtattaactgcaaggacggatacgcgtccgctcctctctgtatcataatgttgttg

SEQ ID NO: 14582 - DNA, 848 bp, Setaria italica
  misc_feature (807)..(848): n is a, c, g, or t
  Peptide Sequence Number=SeqID_80556
tcacactctcctccagcctccctccagggtttatccaccggcggcgcgcgcggcggcggcgagatggtgcagcgtctgacctaccggaagcggcacagctatgccaccaagtccaaccagacgcgggtcgtcaagaccccaggtggcaagctcgtgtaccagtacaccaagaagagagccagcgggcccaagtgccccgtgactgggaagaagatccaggggattccccacctcaggcctgctgagtacaagaggtccaggttgtccaggaaccgcagaactgtgaaccgtccctatggtggagtgctctcaggaactgcagttagagaaaggatcatccgtgctttcctggttgaagagcagaagattgtgaagaaggtgttgaaaatacagaagaccaaagacaagactgccacaaagtaactctgaaatggaagtgagctcctgttctgtaaacaagggaaggtatttttgtcaatggtgatgatcgatggcttagtctcatctagctaaatgttctagtatttcgtggtgacaactgtttgtaggattctcgaaatcctatctaccattgtgatgtcaaaggttatgagacaacaatgatccctctgttgcttttgttcactttgccaaaccgcgatcgaattcacatgagtaatgagttggtttgagttagtgtttgattttctgacagttgcttggtgatgcagccttcgatctcttcttttctgactgatagtttgtgtcagtgaatgagtttgtggccctcgttgctcattcgtgcttaagtaaatttgcgggaaactnnnnnnnnnnnnnnnnnnnnnnnnnnnnnnnnnnnnnnnnnn

SEQ ID NO: 14583 - DNA, 706 bp, Setaria italica
  misc_feature (659)..(659): n is a, c, g, or t
  Peptide Sequence Number=SeqID_80557
ccacgcttgagagaggaagagcgcgcgcggagagcggaagcccgggagaaggcggcggccggcggcaagatggtgcagcggctcacgtaccggaagcggcacagctacgccaccaagtccaaccagacccgcgtcgtcaagacccctggtgggaggcttgtgtaccagtacaccaagaagcgcgcgagtgggccgaagtgcccggtcaccgggaagaagatccaaggaattccacacctcagacctgctgagtacaagaggtccaggttgtcaaggaaccggaggactgtgaaccgtccgtatggtggtgttctgtctggtactgcagttagggagaggatcattcgggcatttttggttgaggagcagaagatcgtgaagaaggtgttgaaaatccaaaagaccaaggacaaggcctccaagagctagtcacaattgcaataggcatttgccaccatgtttaattctcttcgaatttgtttcagtatgaaattttctcgtggtttctggaaatcctggttctagtgctagtatcagatcgatgtgagtgattgaattttgagcgaatccttttaacttttggaacttaagatcggtggaatgtttttcgcttggctatgaggatgtcatatattttgcccttgttcaaaaaaaccaanaaaaaaaaaactaaaaaaaaagaagaactagaccaaaggacaacaac

SEQ ID NO: 14584 - DNA, 1367 bp, Setaria italica
  Peptide Sequence Number=SeqID_80558
cagcctcctaccaccctctcaaagcaaccaacaagcaagaagccagccagccagccacagccagcaagcaagaagccgggagctagccgaggaagaaactagcaagcaagcaaggtggctacggcaacaatggcggcggacctggggttcgaggagacggagctccggctaggcctgcccggcggcggcggaggcggcggagggggagacggcgaggggacaaggagcgcctccggcaagaggggcttcgccgagaccatcgacctcaagctgaagctggagccggcggccgcggccgtcgtggcggaggacgaggaggtcgatgcggcggcggaggagtcctcgcctgccgggaagatgaagaggtccccaagccagagcagcgtcgtcaccgccgccgcccagcccgaccccgccgagaagccgcgcgcccccaaggctcaggtggttggatggccgccggtgcgctcgttccggaagaacatcatgtccgtgcagtccgagaagggcgccggcagcaaggacgccaccgacggcgacaagtcctcgccggcagccagcggcggcgccgcgttcgtgaaggtgagcttggacggcgcgccgtacctgcgcaaggttgacctcaagatgtacaagagctaccaggagctgtccaaggcgctcgagaagatgttcagctccttcaccattggaagctgtgggtctcaagggatgaacggcatgaacgagagcaagctggtggatctgctcaacggctccgagtacgtgccaacctacgaggacaaggacggcgactggatgctcgtcggcgacgtcccatgggagatgttcgtcgaatcgtgcaagcgccttcggatcatgaagggatcagaagccattggcctcgcaccaagggccatggagaaatgcaagaacagaagctgaacacatgggtcaccagatgcaagaaccaaagtctctgtagctttgcagctctgctcgtctctgtatcatactcgtccctgttctccaagcctgtacctcctgatcagtgaagtcattttggtgtgtcaactgtgctatcagttccagtgagtcagtcagccagccagtcagtcagtcagtgttcaagtctcatcttgtcatatacaaaagagagaagccatgaacatgtacctgtcctataacaatgtctttttgctctacctgttccttttttttccttttgggcacaaaatgcaaaggcaccctgcttctaatgaatgggcccttttgcatcttgtccaccaaaagttgtttaattatattgccatggtgtgtcaatggaacaaataattgttgcaagctgttaaaaaatgtattgtatgagccctaattactaaaaaaaa

SEQ ID NO: 14585 - DNA, 958 bp, Setaria italica
  Peptide Sequence Number=SeqID_80559
tcttggtatttctagtaattgtaattgtacttgtcttttgtccctaattctttcggtttggctgaattcttcacgtatccatcttgcaccattttgtcaattaactttctgaccgtattctggctggcttccccatccagctttccttgaagtttggctattgtcacataatccataggaagtgcatgatataatgccttcatatatatcaaatcaccattgttctgtttggttccttcagtaggtgatacattttgcatgatgacctccttctttatatgtggtgttttgggatcaacagtctggttgacagtataaccatctttgcttgccctggatagtacaccatctttaagtagcctctccataatatcttcaaccagttccagggatatgtcagggaagttagaaaggacatctgaaacattaatggttccaatttctcttgagcatatccattctttacttgggctgttagctcttcctcatgagcagcatcttgagtgtcatcttctgaaatagtaccagtactctgacctttgcattttccatcattaggagctacaacataacgatctgcctcagatggacgaacctcagtgtcagaaaagtcatcatcttgatatgtcccattatccacactcatgccatcatctccactgttaatattgttgtcatcacatggatcaaggacactcttaaccttcaaagctaacacaaggtgcttgctattgacattccccacttccatcttcaaggggttcttattccatatattaatagcttcattgtcagcacaacccttgaagaaaggaggctcataatcctcaggtgtgacatcatcatagtacagcagcttcattagaatagttcgctcctctggcattgggtccaaggttctcataagtgaaaccagcgttctgatcatcttacaagcagagctcctcatctgatcagg

SEQ ID NO: 14586 - DNA, 357 bp, Setaria italica
  Peptide Sequence Number=SeqID_80560
ggggaacatggcgcgctcggggacggtgctccggaacatgatggtggtggggctgatgcactcccagtcggagctgtccccagcttccctgccgttgagcggcctgaggcgcacggacaccattatcctctcctccttggcctccgccgtcatctcctcgcccggcgcccccatggcggcagagccccctccccctgctgcgacgcgcggcgaaggcgcgcccgtggaatggaagctagtcgcgggaaatgcgggaggcgcgggagatagacgggggaagcaatgcgggcggccggctagtgagcggcgagatagccgtctcctcgtcggctcatctcctccctctcttctccttgc

SEQ ID NO: 14587 - DNA, 517 bp, Setaria italica
  Peptide Sequence Number=SeqID_80561
tatatctctatggccgaaaatttcaaaatgaactccctttcaggatgcttatcaatgtaatcatagatgtcaagcatgctatattcagtaattcccgtcattgtgtaagtctttccactgcttgtttgcccataggcaaatatgcttgagttaattccactgacaactgatagagcaacttcttttgctccttcctcatagacttgccgcgtagagcaactggggccaaacaccctatcgtaggtgtaggcggtggggaacatggcgcgctcggggacggtgctccggaacatgatggtggtggggctgatgcactcccagtcggagctgtccccagcttccctgccgttgagcggcctgaggcgcacggacaccattatcctctcctccttggcctccgccgtcatctcctcgcccggcgcccccatggcggcagagccccctccccctgcacacacaccctcgccggccaagagcattatcaataccaaagtcctcccccctccttcatgcctaa

SEQ ID NO: 14588 - DNA, 604 bp, Setaria italica
  Peptide Sequence Number=SeqID_80562
agcgagaatatgccgatatatctgatcattcctgtgaacaaacctgcggtgtcaaagaaaacagttttgatgacatcacagctggaaaggcaactgagattgtttcttcgttgggtatcatagatgaagtgagtaatcgtcagaaaacatctgagaatgtatctaattcagatgtggataaatcttctactgggaatggatctttggcttgttctttcagtcagtcttgccatgattgtatagataatgatgagtactggaatacaggagttgctcatgggaatgaacctgaaagtgtaaagattttggaagagttgtctcctattgatgagtctagcacggatatggtgtctctacctaagatggttgaatctgatttatgtggaagcacagaaatgaattgcacttcacttgaggaggttgtccagatgcagggtgagtgccaattggattcagtagtctgctgcggtgtaagaccaaagcatatgttactagatgcggaaattggacatacagtgggtgattatacattttcctttgacaagactcttgacttgactcagcctatcaattttgttagcacaagatggaaggcttgaaagta

SEQ ID NO: 14589 - DNA, 730 bp, Setaria italica
  Peptide Sequence Number=SeqID_80563
ggtgactcatgaaggatttctacctgtctgtctttcatttgcacccaacggtcagggcatatcgccagcacaatttgatgatgttttgtgagttgcttgtataatttgataatttcataatgcatacgaagtcgtggtgttagacgcaggacactgtgtgtgaagtgtgcggaaatattggttacaaacatcttctggtatgctgcagagactgcaagtgttctgctgtgcacctatactgtttggacaaagttatctttgatgcatcattagcagaatggtggtgtgatgaatgcctacagaggcgtggtgaagttccttgcaacagatctttagagagggtgtctagtcaaaggtcgccaaatcatgatcattttggttctacagtacagcagcaagttaccaagagagtgaagtcagcaaagaatgcagggccaaggagaaaaagtaaagaagatattccctctgcaaatattctttggactcggatgatcttcaggcatcctcaaaggctcattatgttttatcatatagaagttatctatctgaagcacaaaagcaaagggtaatggcatttatcaaggaaattcaacctaaaatcactgtttttgtagcagtcatgctaaagaggaatgttcaaccccgggccctttctggaattaggtgtacgatatgctgctgcacatcttccagctagtgggcaagctgtggcgctccagtgcatggggaa

SEQ ID NO: 14590 - DNA, 564 bp, Setaria italica
  misc_feature (63)..(63): n is a, c, g, or t
  Peptide Sequence Number=SeqID_80564
ggtgtcgagcaggctcttgaaaagtacaggatgaagaaggacattttcaatggtgttgctgcnggttttgctactggtgctgctatgggtttcagagttgggagctcccggacagctgtcttgtcagggtctgcgctcgctttgacttctgtactgctggatgtcactggaatgagaactactaatgaagagaaaaaaaggccaccactagccatcctgaatgggaagagcagcatctgtttcagagttcctttactgctacagacatgctagtagactagttttttggtcaataccgaagagttccgtttccatataagcacgcaatgttagtctgttcatattaaaggtagcagatagacttagcaatggtcctgatctaaaatgtttggaagtaattttcaccattactgctggttggtgctctgaagttcgaattgtaaatccaaggcactggtttgtctgtccaggtagcgtcggggttgccgatttcgaactctgcactgcgaattgccctatttcacaatttatgcaagtggtggatggtttctttaaaaaaaaaaa

SEQ ID NO: 14591 - DNA, 1980 bp, Setaria italica
  Peptide Sequence Number=SeqID_80565
ctgcgacctttttatcaacacgaaaaagcgggatatgatggactattacggaaaacatgttctggacaatttacaaccacctgttctctcatggataatgaagagaaaagggataagaataaagagaagaaaggaagaagaagaaaaggaaggatttgcattgctacgaaataatctaatttttatacctcgctatcagtacgctaattaccaggcggagtctagacagtaggttttgagaagggcaacacgacaggtgttacactacacttgattgcagcagcagctctcatctccagcagatctgcatcgtgccttttctttccggtataacttcttcagtaggtgctgttcagctgagctggagctgagaaaggagcgagggattttgcgggaagggtgacaccgccccctcggatagagaccgaggggcttttgctccagctagctttgctcatggcatttgagtcaaggaatatcacaacgacggttatatcgtcatggaaatgccgcctcaccccgcggtcgattttcttgaggtctgaatatctcatctccctcttcttggctgcttcttgcatcgcgactttcactagctttcgagcgattccattacggggactattctggacaaggtcaactgcttcctgattgctgagatgctcccatagcccatcagaagcaaatataacaaactgatcgttgggctgtattctgtgttcagtaatttgaggatcagagctaagaattggcttctggaaggtttctcgaagccgaaacttgctatgaagaggttctctgttaaactccggtctctttagatatacatctccgatagatcttgagatctggatgagacccttcacacgccaaacattgtgttttagaaccacaatttgtggatcatcaggatgtgctgactgcagctcttgtctaacttcctcgtagcacgcattgtgctccgacgacaactgcatggccagaacctccccagttgccttaacaagccttccaagaactgcacgtgagtcgccgaggttcgcgacatagagagtcccagaacaaattacacccactaggcaacaggagcctactgatgcaatctgaggcttcaaagcccattccctgctgactagagaaagaaagccctcctcagttgcttggaaagctttccggatcacatccactgagatgcacttgtgctcagttgcaaatttcatgagatggttgaagaggtggtcattgatgaatcgggacgtctccgggccgccatggccatcatagacgccgacgaaggtgccctgcgggccggggtcagccaaggagagcgatccggactccacctggctctggtcctcgagcagctggttggcctgcaccacggccatggagaactccccggtggcgagctggccggcgtccttgtaccagaggagaccttcctgccggccggccgcgtcggagcccttgccccggtgcccggcccgagatcgcgggccccagcaggagctgaagtagtccatcactgcggccagcatccctcatctcatcgccctcccctccacgcggtttcttgacggcatgctcaagggacccagcccgctcctaacttcaccgccctttcagcctcttcttcccctttttccctaagaactccctgtcgagttcgtgctcgattcctggaatccaccgagcaggtggctcggatctggagagcaatcaaagcccgggcacacgaacagcaaggattagttggactggcggctgctctccgggatcaaagagaatcaagcaggaagctggataaaaaattctccttatgccccccttgagctctctttttctctctctggcaggcagctctgcccaatctaatctatcctgcagactggatgaatcagctcagagctctctcctctctctgatgctgggaactagtacgcgcccacatgagcacaagcgcaaattccaaaggagtac

SEQ ID NO: 14592 - DNA, 332 bp, Setaria italica
  Peptide Sequence Number=SeqID_80566
cttgttaagcagacagtcatgacatcagtctatggtgttacatacattggtgctcgtcagcaaattacaaagagacttcaagagaaagggctgataacagatgacaaattgctgtacgatgtatcgtgctatgctactagggttactttggatgcactgggacaaatgttccaatctgctcgtggtataatggcctggttgggtgattgtgcaaagatgattgcttcaaaaaaccaaccagtcaagtggacaagtcctgttggtcttccagttgttcagccctacaagaaatataagaactatatgatacgaacttccttgcaatgtctggt

SEQ ID NO: 14593 - DNA, 611 bp, Setaria italica
  misc_feature (531)..(611): n is a, c, g, or t
  Peptide Sequence Number=SeqID_80567
ggagggtgaagtggtcgttgagaaggtcaaggaaagtgagtgggaagtgggctacaatgcaatgacggacaagtacgagaacctgatggagtccggtgtgatcgaccccgccaaggtgacaaggtgcgcgctccagaatgcggcctctgtggctggaatggttttaaccacacaggccattgttgttgagaagccgaagccgaagcctcgagtggctgagccggcggagggcgcccttagtgtgtaaattttaacgttcttgaggccgctatttagatggttcagatcagttaaaagggtagaactttggtttgaaattttggttcaggtccactgaaaggtgtagtgtaggtttgccattttgcggatgaagggagaagggtaattttactttgatctgaagtcatgcgaatcaaagaaatttgcatcatcatttttgaaataaattgatgtcgatgttcaattgtatgtggaatgagttatgcatacgggatcaaattttcaaaatgtccatgaacaaaaaaaaaaaannnnnnnnnnnnnnnnnnnnnnnnnnnnnnnnnnnnnnnnnnnnnnnnnnnnnnnnnnnnnnnnnnnnnnnnnnnnnnnnn

SEQ ID NO: 14594 - DNA, 1957 bp, Setaria italica
  Peptide Sequence Number=SeqID_80568
ctccagcgtataaaaactgcgctacctcatctctaaaccccgcctcgcctcgacactttgcttccaaatcctccgcctcgtcccctccaccttatcctctcggctcgctccctgatccttcttctccgtctcccgatggcctccgccaacgccatctccaccgcctccctcctccggcccctctctcagggcagggcgaggagggccaggaacggccggtcgcagcggttcgtggtgcgtgcggacgccaaggacatcgcgttcgaccagaaatccagggcggcgctccaggccggcgtcgagaagctcgccaacgccgtcggtgtcaccctcgggccccgagggaggaatgtagtgctggatgagtatggtgcgcccaaagttgtaaatgatggagttactattgcccgggctattgagctgtatgacccaatggaaaatgctggcgcagcactgatccgtgaggttgctagcaagaccaatgattcggctggtgatgggactacaactgcttctgtccttgctcgtgaaatcatcaagctaggccttctgagtgtcacgtctggtgcaaaccctgtgtcacttaagaagggaatagacaaaactgtgcagggtctaattcaggagcttgagaacaaggctagaccagtcaagggtggaggtgatatcaaagctgttgcgtctatctctgctggcaatgatgaatttatcggatccatgattgccgaagcaattgacaaagtgggccctgatggtgtcctttcaattgagtcttcatcatcttttgagactactgttgatgttgaagaaggaatggagattgaccgtggatatatttctccacaatttgtgaccaaccttgagaaatctatagtggagtttgagaatgctaaggttcttattactgatcaaaagatcacaagcataaaggaaattcttccaattttggagaagaccacacagctgagagccccgctgttcattatcgctgaggacattactggtgaagctttggcaactcttgttgttaacaagctccgaggaatccttaacgttgcagcaattaaggccccgagctttggtgagcggcggaaagctatccttcaggacattgccattgttacaggtgctgagttcctagcaaaagatcttggtttgttggttgaaaatgctacagaggaacaacttgggacagcaaggaaagtcactatacatcagaccacaactaccctgatagcagatgcagctagtaaagatgagatccaagcgagggttgcacagctaaagaaggagcttgctgaaactgattcagtttatgatactgagaaattggctgagagaattgcgaagcttgctggtggtgttgctgttatcaaggttggagccgcaaccgagactgaacttgaggaccgccagctacgaattgaggatgcaaagaatgccacttttgccgccattgaggagggcattgttcctggaggtggcacggcatatgtgcacctatccaccattgtcccttcaatcaaggaaacaattgaggaccctgatgagcgtcttggtgctgacattattcaaaaggcattggtagcacctgcttcactaatcgcacacaatgctggagtggagggtgaagtggtcgttgagaaggtcaaggaaagtgagtgggaagtgggctacaatgcaatgacggacaagtacgagaacctgatggagtccggtgtgatcgaccccgccaaggtgacaaggtgcgcgctccagaatgcggcctctgtggctggaatggttttaaccacacaggccattgttgttgagaagccgaagccgaagcctcgagtggctgagccggcggagggcgcccttagtgtgtaaattttaacgttcttgaggccgctatttagatggttcagatcagttaaaagggtacaactttcagtgaacctgaaccaaaatttcaaac

SEQ ID NO: 14595 - DNA, 1202 bp, Setaria italica
  Peptide Sequence Number=SeqID_80569
cacattagccgtatggatgacggtcctgtgacagcagcaactttctgagccttctgtgtttccgatttatacaagcctttgagctccttctttgcgatccgtgcttctctcttctcttctttcactgctgcctttcttgctttcttttcctccttcgtttccttctcggatccttttttaaatttatcagcaactgagacttctgcaggctttactttcttctccttttcgccgcctcttttcctttgtggtagatattctactggcagtttctctttcccatgaagcttgatgatatcatttgttgtagcagtttctccagggaaaactctagggagccgccttttagggattcctggagttttaatttttccaggatggttatcaaggttagagaatgtggaaacaatggtctcacagtcccaaagttcagattcatcactgctttctgaaacaagtacaacctcctcttcttctgcggtttcatttaaatacttttcagcatactcggcacatttttttatcacatgagcagattcatccacctcatctgctgtgctcgagtccagttttctacgaacgaaatctgctggtgttctgtattcttcatcaacacatacgttctggctgtggaacaatttgagttcatctataacctcacttggcagttcatactccccatctttaacatctttgtcatcatcatcactgtctccatattcttccaaagcaagcagatcaaattgttcatccagcaatcgtctcactcttggctttggatcatcctcttcaaaatcgaactcctcgtccacatcactgaacacaccattctcatattccacctcttcatcttcttcttcctcctccaactcctctccctcagcacggttagccacgatgacaaaatcctcctccagcccctcatcctccgacccagcatgcgacatatcgctctcatcaagcaacctcgcaacatcagggtcgacggccttctcgatccgcctcaccggcgccgtcttagctgccaccttgcacatcgtcctcccctcgtccaattcaccttcactgggaccaacccgtaccctgcttgcatcatacgccttgacatcgagcgggaggggctcggggcgggcggtggagctgggtacgaaggacgaagcggcggcggcggaggggcggagctcgcggaggtgggagaggta

SEQ ID NO: 14596 - DNA, 288 bp, Setaria italica
  misc_feature (265)..(288): n is a, c, g, or t
  Peptide Sequence Number=SeqID_80570
ccggagagggcgatcgtacagtcggtggacgtggtgaaggggccgtttgaccccaacaacatcgagtacctggagaagggggtggaatgggacgacttcaagagccgcctgcaatagaaagaatttttccttgcaaatgttgcatgctgctgtgtcagttaatcgagagaaaaaaacggtcaccgcctttctttttggaaacaacttctgttcaacgacttatcaagacgtgcttgtgcattggtcatcaaaaaaaaaaaaaaannnnnnnnnnnnnnnnnnnnnnnn

SEQ ID NO: 14597 - DNA, 193 bp, Setaria italica
  Peptide Sequence Number=SeqID_80571
gagccccatgagatgcgaaggatgggggacttcaggtagaacatgattgcacaatgaagagagaatggtcatgtaaaaggtacagtgggtatagataacggggaatcatttgctatgcgcatgcccatcatggaaatggccgtcacatgacggctgctgtaaaaaatgtttgttttcacacatttcaagaata

SEQ ID NO: 14598 - DNA, 436 bp, Setaria italica
  Peptide Sequence Number=SeqID_80572
cgcgccgggggtggctgctccgtgctctgagccacccgtcgccgctgtagcccgctgctgcggggagtgctcctctgttggctgccgctggtgtaggggtccagggttttgtcttcgccaggcggagggcgcatggggatggtgcccaacgggctcctgccgaatgcgtccaccggggtgacccggcggctcgaccccgagcgctgggcggtcgcggagggccgcactgctgagctgatcgcgcgcatccagcccaacgcacactccgagggtcggagactggccgtgtaccactacgtgcagcggctcataatgaactgcctctcgtgccaggtttttaccttcgggtcagtacctctcaagacttacttacctgatggtgacattgatgtcactgcttttagtaatagtgaagacttaaatgaaacttgggcaa

SEQ ID NO: 14599 - DNA, 425 bp, Setaria italica
  Peptide Sequence Number=SeqID_80573
aagcaaataattccccctacggataatgtttcttatactatcttatacacttggaaatgggtgtatcacttgacagtaaatgtgtataggcttgacaaattcaaaggaaacctctcatgaacagtcagtaatacgtgtaagatagttccagcactctattcatcaagtggagcaaaagaaatttccaaccaagactaaaatttaattgcaacaccagcacatggacaagattgatacatatttatagttgattccatcagtaaacgtgttatgcagtatccagtacctattgagaaattgtgttttcatgaacaagcacgagtataatgcaaccttctttttttttttaaaaaaaaaacgaaaaagaaaatacccccatctgtagaattaggatgtttagcagaaaatgccacatcatattgtac

SEQ ID NO: 14600 - DNA, 308 bp, Setaria italica
  misc_feature (284)..(284): n is a, c, g, or t
  misc_feature (301)..(301): n is a, c, g, or t
  Peptide Sequence Number=SeqID_80574
acgtggaaaacccactggtgattagttcatcggtcatgctcagtagatagatctcggcaagtgccttcatgttgtgcttcttattccttgacctctggtactcctcgtgactcggctggtgcacttcgacagtagtgccatcaactgctgggtgttcatcgtacttcttctggatctgatcactgtaccaagagctcaaagaagtagttagaacggcaatcgttcggttattctgagtctcagctgctgctcccttattctgagtttcagctgctgcctccctntgtcatggcgtatttcnggcagga

SEQ ID NO: 14601 - DNA, 571 bp, Setaria italica
  Peptide Sequence Number=SeqID_80575
gtatttctgtatttttttagggtcacacatggcacttgttttttcatgcatttttccatagtgtcagtgacatgcttatccattgcagctgcttcttctccaggtgtgagcaagggcaacagaagctatgttgatctttctgcccagctgatgtctcatgcagcaagtgtacagagaatgtcactgccatggagacaccaggtgcgcccttccatggatcactcactcctcacctctgttgcttctctttcctatttttcctcaatgtcaccaatgccaataatcatgggttcaatcctagatgaaagatgatgtgagaggatcgttcaatcttaactttttttaatctttgcaatgattggctgtctggtagcatgcctaccactgtaggaaactgcataagactttaagctcttctcctaaagtctaacaatgtatctggtccagtcccagaaaagctgcagaagcatgcctaccactgcaggaactacaccttatctggacagatccctgttaactgaagtttcagtcttcctggcctctaaattatctcaatcatagagagcagttt

SEQ ID NO: 14602 - DNA, 382 bp, Setaria italica
  misc_feature (56)..(56): n is a, c, g, or t
  misc_feature (378)..(378): n is a, c, g, or t
  Peptide Sequence Number=SeqID_80576
aggaggctggtggcggcggagacgttggtgttgagcacggccacggacgccgcgangttggcggctacggggcgccgccgttgaacccggccccagcccatccacagcagcccgccgccggcgatcatcagcaggatgttgttcggggagaagcgctcccggtcgctcttcagacgagggcccacccagtatgcggcggtgaagcctgcgacgccggaggagaggtggatgacgtatccgccggagtagtcgatgacgccccagtggtagaggaagccgccgccccagaggctgaaggcgccgacggtgtaggagaagaggagccagagcggggtgaaggccatccaggccttgatgttcatgcggcccagcacggancccg

SEQ ID NO: 14603 - DNA, 278 bp, Setaria italica
  Peptide Sequence Number=SeqID_80577
tcaaccaccaatccaccgtgagcaaatggagggacgcaacccaaagtcgaaccgcacatatagctagtcagatgagattgccgggaaccaagagccgagctaccttgccagagttgcggtcccagacgcgaacagatccgtcgacgctgccggaatagagtttgtcggaaccacgtggcacagagaacccgctgatagcctccgtgtgtccagcgagggcgcggaggaagacgaagccacccccgccgctggcgcggcgcttctcaagggttggtgtg

SEQ ID NO: 14604 - DNA, 1344 bp, Setaria italica
  Peptide Sequence Number=SeqID_80578
tttttttttgtttccacataattcatgtatatttgttacttaatggcgcatgattaaacgtaaccagatccatgctgaaaagctccggcacagacacaaaggtcagaagcagaaacaaggggagcgcagaggctataacaccgcagcaccaaatggtttggaaatccatagtctggagactcggaaaaacagagggggcatcaggctattcgactagcacggcagttagatgagcctacatgggggacaggggagggagcacttaaggcccgccgaggtgggcgccaagctcgccaaggtcgccgtcatcgtcctggaggccgatggcgtccagcttctgccgcaggaccgtgatcgcgttcatgatcagctcataggctgtgatggcaccagttgtttccacggtgaagatgaagctgtcctcctttgcgttgatctccactaagcctggctttcccatggcctccgccttcttgatcacctcgtcgtcgtaggtgtatgcctcggcgtcacacaccgtcacctttccattagcactaaggtcaaatacttttgtaggactgctttcgacccagcttcttttctcatcaaaagtcaatgtatccataagttcttcattgataagtatgtcaggctcatacatgaaagtcacggtagcagctggtgaccatttggcatggtccttgccaattcctttcctagcaatggcacgaagcctcaattcttggccccgacgcagctttacaataagtattcccctctcggcgttggggtcgtagtcgttgccgctgagcgccagctggtaggcgcgtgcctggtcgacggggcagaccttggggtcagcggacctcaggtcgttggaggtgacctcgagcgtctggtcggagtcggtggcgcgcgcggagaggttgaactcgacggagcagtactcgcaggagccgtcaccgtcgcaggcgtcgcagtccctggagaagcgcatttgcatggcggcggcggaggtgagggggatgagccccaggcggtgcgcgatgaactcgtcgttgaggacggaggagttgacctcgatctcgacgaggtcgatggcgacggtggggacctcagcgatcatgacgcggcggagggcgttggctatgctggcgtcggtgtcacggagctcgaacttggcgtagtcgtccttgagttcgcggatccggacgcgggggaagcgctggtacgacgagccggccgcaggacggtccatctcgctcgctccctcgggcgcgcgccgaactcccgctccgccgccggagaagagtgtctgcagttggttgctggtgggagcgcaacgccgcgagggttttgggg

SEQ ID NO: 14605 - DNA, 1076 bp, Setaria italica
  Peptide Sequence Number=SeqID_80579
acaagcaaccaatcaaatccaatttgtatgatagtttaatatacatgtcctttacagatctgcatccgcgattacaatttctcagctccatcaaatacaatttgcatgacatatacatacatgtcttataaattgtacatacagatcacattggcatccatcaagttattggcataaaatgactactgccctataatatacatcttttcagatctaaagagaatttaagatgacagattgcttaaaaatctatacacaactcattgtatacccgagtacatgactcccagctagttttgtgaacttgtagacagctcaatattaaacttttagtcaaactaaaggtcgttgaagttcaccttgaagttgaactgaagtattataaaagatggcagttcccgctaactctattccgttgtatttttgtaccagaccaagaacaaaattaacttgatgaaatggcaggcatgttcaagttgtcaaaactgaaaagaactagtaatgatggaactgtcaattcatccggctgcctatatctagttctgaactgaaaagagcattcaacttaactcaaatttcaactccatgattaccaaaatactcatgagtcttggtaatttaacagtggttggaacttgtaaagacagactcaagtaatttgtaactagctggtaaagttcttatatatatatacatgaactaacattgtgttttttaccttatcaatcgatgagatggtaaaccacacttgctgcaaggtggccatagctataaatttgctgcgctgaaattaaattgaattagatcagatatttgcatagccacttttagtacagctataaaaactaacttctatgtttcctgcagagccactatttcagagagttgcatactagaccatatagcagaagttcaatgtcttaccattggatctcaacaaaagaccatagtttatttcctttacagtatggttactaagcaattgcaccagtgctgcaattttaaattggctctgaataaaacaaaataaaaaggtcaaattttcctgttgaagaaaacaacaagtaaaaacaagg

SEQ ID NO: 14606 - DNA, 380 bp, Setaria italica
  Peptide Sequence Number=SeqID_80580
ttagagtcttagagaatgcaacatgcacatcctttgcagtgcagatctctataaaatagaagctggggcaagtagcggaagcagtaataatgtttcaaaaagaagaaaggttaggcaaggtttgcctgcagaattagaacttgaattggaatttgaagttgaatcttgatagaaggaaagtggtgggcaacggaccgaatttctcttactgctccaacaaaatagccacttggtagaaatgcggatatctagcagcagagtacatgcagtccattcaggcaccctaaggtattcagaaaatgaaaacttgtagatttcgtcattgctggtggtagtagctgatgagtctggaatggtgtcatgtagcaaaagggcagatt

SEQ ID NO: 14607 - DNA, 1115 bp, Setaria italica
  Peptide Sequence Number=SeqID_80581
tgttcctgccgcaccgggaacagctccaggcaggcttcagaatctgcaccaggctcacagtggcccatggacacgaagtcgaaggcctgagggggctcactcagatgcagccgttcagtgtcagggttcatttcagaagatacaactctagtgctgatgcctgtgatggagccagtagtcacaacctcttctggcactgggaacagcagcgcaccttcactaaccatctcctggatgagttgctgagatctcggtgttctggcagtgacaaatccaaacagctttcttgtcgatggttctgagcctgagtggggttgtccatgaccgtgctcaacaggtttgatcagcttggtactgactgcagcaggtccagagtcacttgattgttcagtaatacttgaggcattcgcgggcaaagaggtgaagtcttcttgctggtccaagtctccatgcgcgtccaatttactataatttcttggctccacacagcagtttgatccaacttttggagaattcatcttagcagaggaccaactgctgccaggtgaggtagtgccttcacttgtggcagcttttgcagcttccttttctgcctcgtggtcgcactccaccagcagctggttctcaatatgcacgacatgcttcacagcacaagtttcttggtctgatgactcatataatgcttcatcccgttggttcaaaagatcaggttcttgtagttgcccttgctctgcagcattgttcactgaaccatcttgctctttgcctagaacagtttcatcagccatatccttccttcgcctgaacactccccacaggtagtgattcccagtggtattgttccggcaataaagaagacgggaagattagtagctctgccataccaactgcaacttttaaggcaccatcacttttgataatgccattaactaatctgttggatacttcattttgcctcgaactatttgggaagaaaaacaacccaatgttgtcatcagtaggtccgaaagacttccaactctttggccaggcttgtgaccgagggagcttctttacttcaactactgattgtaacgatgctgacaattcccttctacttcttaacttaaactaaa

SEQ ID NO: 14608 - DNA, 286 bp, Setaria italica
  Peptide Sequence Number=SeqID_80582
gagacagcgttgaaggagcacgcatgcagatatttatccctacaattgatcaagtagggagaccaaacttgagatacccaggcacctacactttgttcagtttaggtccttgctttgcttcagtaattgttgaactggacatatgctgcaggttcttgatcaagtatgtgatttgattgtcgatgttttaagagaccaagttgtgctcagaatatttcaagcttgcatggaaggaatatcttgctaatgtcctgtttgtcattgcaattgttagatagactaaagt

SEQ ID NO: 14609 - DNA, 512 bp, Setaria italica
  Peptide Sequence Number=SeqID_80583
accaacttgatgctatagaagaaggcatcaaacgatcctggatctctgtcttgtcagctaccagattgttggactatttgtcttgcattgctagtggaagacctatttcagaaaactcatcatcctctgatgaatcgatcgatgagttgttcacaatttttgatgatgtgcgaatgactgctgtgaacataactgacacgatcttgaacttcattggaacaagggctgtattctatgatatgcgggactcgcttcttttctccttgtaccgagacagcgttgaaggagcacgcatgcagatatttatccctacaattgatcaagttcttgatcaagtatgtgatttgattgtcgatgttttaagagaccaagttgtgctcagaatatttcaagcttgcatggaaggactcatttgggtccttctggatggaggcccatcccgtgcatttttggagacagatgtggacttgatgcaacaagatcttgctatgctcaaggatctctttatttat

SEQ ID NO: 14610 - DNA, 1128 bp, Setaria italica
  Peptide Sequence Number=SeqID_80584
aagagatactggcagcatcgaataattttgagctctttatagctgagaagcttcgctcagtgtacggggaagcagggtcttcattctccaactatttaaagccctacatgataggttgcttatcatcacctcttattctccaatggctgcatgctcaacatgaaaatgtcttggagtggacaaaacgtactattgggatagaggactggacgcctttatcagttcatgagaaacaagcaacatcagtggtagaagtattccggattgtggaagagagtgttgatcagttctttaatacgagcctacctctcgatattgtccacttgcgaagtctacttatcggaatcactagcagtcttgaagtctatttgcttcacatggaaaatcaacaagtttctggatctaccctgcttcctagggctccagtcttgacacgttatgcagaatcaatgaatccatttgcaaaaagaaaacttattgaacctacagttcctgaagaaaaggtggctactaaattgaacaatttgacggtgcctaaattatgtgtgaagctcaacacccttcaattcatcagggaccaacttgatgctatagaagaaggcatcaaacgatcctggatctctgtcttgtcaggtaatcctccttgagtatattcctgattcctttttatgttgacgtagcttgttattcaacaatatattggttgactagctggaacaagttctcttgataccccttttgacgtttttgcgacttggtctacctgcttattgtcaagctggttcttatataacttttatcacactcaagattgttggactatttgtcttgcattgctagtggaagacctatttcagaaaactcatcatcctctgatgaatcgatcgatgagttgttcacaatttttgatgatgtgcgaatgactgctgtgaacataactgacacgatcttgaacttcattgggtaaagggctgtattctatgatatgcgggactcgcttcttttctccttgtaccgagacagcgttgaaggagcacgcatgcagatatttatccctacaattgatcaagtagggagaccaaacttgagatacccaggttcttgatcaagtatgtgatttgattgtcg

SEQ ID NO: 14611 - DNA, 236 bp, Setaria italica
  Peptide Sequence Number=SeqID_80585
aattcttgatgacattgacgatgactgttatgggtggattgtcatgtacttcagtcttcaggcattgattgaaccatatgtctggatgcgaggaaggcctctagcagatacctggaatgtttgtgtgtagattttgtgccaaattctcatctcagactgtaagctgtcacatgaacttgacaaccagcagtctagctcagagagcagtaaattgccaattataccatgtaacttcg

SEQ ID NO: 14612 - DNA, 488 bp, Setaria italica
  Peptide Sequence Number=SeqID_80586
ggcggcggcggcggattccctgattcggagtgttcttgcgtcgcggccgaggtgtccgggaatcgatctgaatcagcgccttatcagtgaggaaaagggaggagtgagttcttaagctctccatatttctgtttctcttgtgctcaggagtatgtccttgcggtacaaaaattaggtttaaatgttgctaagtggggaatgttttcattttttccctgaatgagaaatgcttacgagcttaatatgattagattagatgcctaaggttgcaaaggaggaaatttttggaccctgcgtttcagtaaaaatcattgtactagtttagagggaatcggcagctggtgtcaaccagtgtactgctattgatcttcaagtcttttgtgcttctacagtctcatttttttctggtagttactagtcactaattgcttctacgcaataggatctgttcacaaattttaattacagtgatagagttagctattttt

SEQ ID NO: 14613 - DNA, 1638 bp, Setaria italica
  misc_feature (1592)..(1638): n is a, c, g, or t
  Peptide Sequence Number=SeqID_80587
ctatctccagcggcggtggtggcctagtgtgagcccaggctccccagccgcgcacaactccggcggccgacggccagatattcgaggaacccgtcccgttccgttgcagatacccagattgcggcggtgagagacaaggtcttggcctttgccttctgttccggcggaatccgttcgggaccgcctcgctcggctgctcgcgacggcggcggcggcggattccctgattcggagtgttcttgcgtcgcggccgaggtgtccgggaatcgatctgaatcagcgccttatcagtgaggaaaagggaggagggagaatggctgatatccagctaggatgccacactataaggtcccatggtcccaaagtggcaagattacatatgtatgactggatcatacttctctgtcttgctgtcctggatggactgttaaacataattgagccttttcaccgctttgttggacgggatatgatgactgacttgcgctatcctctaaagggcaacacaattccattttgggctgttccacttattgcaatagtgctaccctgggttgtctttgctggaatttactttaaaaagaaaaaatgtctatgatttacaccatggcatactagggattttatattcagtgcttataactgctgtgattactgatgcaattaaggatggtgttggccgcccctcgcccagacttcttttggcgttgtttccctgacggcatacctaattatgataatgtcaccactgatgtcatttgtcatggagaaaagagtgtcatcaaagaaggtcacaagagcttcccaagtggacattcttcatggtcttttgctggtctaggttttcttgcgtggtacttggctggcaaacttaaagcttttgatcgcaaaggtcatattgcaaaactgtgcctagtatttctgcctctccttgttgcgtctcttgttgcagtttctcgggttgatgattactggcatcactggcaagatgtgtttgcaggaggcatcttaggtcttacagttgcttcattctgttacctgcagttcttcccgtatccctttgacaatgatgctatatggcctcatgcatacttccaacagctagctgaaacgcacagcaacggtaatgcgaactcattcgaagtaagacctgcggagcttgaagatgaagaaggtcatggcggcattgccttgagagacaccagccctatcttggagtcaatggagtctggcaggagaccgtgaagcattgcactgcaagcatctccaaggttctaatccttccgttctttatgagtttgaattctggaagcatggcgacttggcaagttgcatggttgtaaagagtgtgtggagttatgtctaccaccttccttgatcattgacttggctgtttcttgtgatagtgcacgggccttaataccatggcataatagctgttgcggttagatgtaaatgacagtgaatgtttatgttttcagtgacaatgtgaatagctggtgttggacgtttggtgtagtttgtagtcaacgtttccctttggttgtaaatgaaatcgatggatggcgtgcgaatggttgcaaagtgcttcnnnnnnnnnnnnnnnnnnnnnnnnnnnnnnnnnnnnnnnnnnnnnnn

SEQ ID NO: 14614 - DNA, 1059 bp, Setaria italica
  Peptide Sequence Number=SeqID_80588
ggaggacgaggaggagggggttagggttaacatcggcctcgacccgactctggatcgggaggaagaggaggacaagtatgacagagaggccttcggacgagaggatgctgcagaccgtgtgtacatgcatgatatcatggatgatggcataaacatgagcatcaacagtatagtccctgacctccttgatgattccattgaagaggtgtaccgttcctcgaaagatcctcgagcagacatcagggcagcatctgcaagactcagagaagacgatggttctgctaaagatggtgactctcactttgccgctcgagccaaggagctccctactgcaggaatgcagatgaagaaagctgtggaggatgtcaatgtaaaaccaatactgaagaggaaggaggagcaagccgatttaaaaccaaggaaacgtgtcaggttcgatgctagtgttaaggatccagagtcagatatgttagaacatgacgaagattctccaatggttcctcaatccatggatgtagtcacggaaaaggatagcacgcccactccatctgagtctcctggggtccctgactacgtaaggaacccttcaaagtacacacgttacactctggatataccagagtctaatgatgcctctaacaggagagctcttgcagacctgcatgatctgttatggaaatcagagcccaacaagatacattctgagacccctgttgagattcctagctcagtcacgttcattccccgcaagaagtcagtcgatgcgatggcagtggatgagggtcccagaactagtgattccaactcagctgtaattggtatggtggcaggagcctctgatgaaactgatcaatgcgagatggatgaagatgacagcagagcatcggcaacaccacagatgcctacaaactcaaagtcgagctcccgtcgttacaggtcaagtagaactgaagataatgatgagtgaaactgatgctagcagattccctaggctgatgtttgtttaagatttttcaagtttcaggatttccatatgtaaatcaggatatatgtgtctgt

SEQ ID NO: 14615 - DNA, 504 bp, Setaria italica
  Peptide Sequence Number=SeqID_80589
ccactcctgctggtccctctccccgagccgcgcgtgctcctgctcgatgcacctgccgctgctccccggcgccgacgaggccgccgaggcgccatgcgcctccgcgctgccgacgccgcccttggagccgtaaaaccggcacagccgccgggacgggccgtgcggccgcggcgccccgaccgcgctgaacctcctgacaaagcaacctccggtgacgccgctggcggagatgccgagggagctggaattgctccacagcggtgggtgcatgaggaggcagcgcagccgcatcgcgtggtacatctcgggggaccagaatgttgaggaatcggcggcctagatcgctagcttgagcatgtggagaggaactagaagaggagtggtggcatgggaggatcgaacgaaaaccggagcagggttgcgggtggcgcggcggagacggtggcgcacgactgcgggcgacggggaggagagaggcggagacgccacggcaccaccgctccg

SEQ ID NO: 14616 - DNA, 361 bp, Setaria italica
  Peptide Sequence Number=SeqID_80590
cattttctaacattcttgaagactatgtgttcttttagtactgattcatagcctcttaatgttgaatcgggtttattgtccgtgcacatagcatggtggcattttctttatcttgataaatcgtagcagtttgtagggacaatgagtccttaactggggtttattggtgatctattcgtttcttttctgctctgcacctccatcatgtaatcttactagattgtttttgttgggcaatggctatccttatgtgcagctcacagtggcatgtatcaagatgaacagacctgagcttgctgcgaaagcaatagaagtagctgagaggcgtattgctacggacaaatggcctgaatattatgac

SEQ ID NO: 14617 - DNA, 452 bp, Setaria italica
  Peptide Sequence Number=SeqID_80591
gagaacttatattttttttttcttcgaatatgcaggagagctgtgtatcattatattaaggtgaggggtttggaaacccaaacaccaccacacacacactacacttacatgcactacttgccttataaacactaaaaaacttgacctcgacccaaaccgagaaatttaattgactgaacatggctaatcttcattaacttaagcaaatacaagtcaagcctcaatagggttttgtatgcatgaacaagtttacaagggcagtaaccatgaaaatctcaattcaagctctgctgacaccttgattgaaaaaacaggacaaaatagcgcataccacttttttgtgtgataaacactagctcacacattgttttctgtgtaggcactcttctattcagctctcttgtgtgcacgtgagatgttgactccagaagatggatcggctgacttaatcc

SEQ ID NO: 14618 - DNA, 2357 bp, Setaria italica
  Peptide Sequence Number=SeqID_80592
ccctctccccgcccctttcctccttccaccctcctccgcgccgcggccttctccttcacgagaggccacgctccatccccgcccgctccgcctcccccgccgaccggcggcgagcgcggcccaacaatagcgtcgtggtcggccgacgcttcgcgggttggcggtacaaggcgccaatggggatcgcggaggcggctctccacaccatgccgggggcatttgcagcccactccccggcatccaatttgtccatcggggcagacgctaggaggaggaagaggaccaccaacttggtgcccaacgccagggcactgcaaggcctcctaaagattccgaggttgaggtccgttaggcggcagtgccagcggatagacgaccttgcaaaggtcacagaagggaacgggacttgggccacggatgctatgaataatgccagccaggttcttggcgatttgagcgcacgggatcaggctgtaggtggcaatggaggtttaaatgggaatgctgtcaagtctccacctaagatgtggaagacgtcatcagtcgaggatgaggcctgggaacttctgcaggagtcgatggtttactattgtggtagtcctgtcgggacgattgctgccaacgatccgaatgatagtgatccagtgaactatgatcaggtgtttattcgagacttcataccatcaggcattgcttttctattgaagggggaatacgaaattgtgcgcaatttcattctacacacccttcagcttcagagctgggagaagacaatggattgccacagtccaggtcaaggtttaatgcctgccagctttaaagtgcggacaattccacttgatggtgatgaggatgtgactgaggaggtcttggatcctgattttggggaggctgcaataggacgtgtggcacctgtggattcaggtctatggtggatcatattgcttagggcatatggaaaatgttcaggggatctgtcagtacaggagagaattgatgtccagactggaatgaaaatgattctgaagctttgtttggctgatggtttcgacatgttccctacgttactggtaactgatggttcatgcatgattgatcgtcgaatgggaattcatggacatccacttgaaattcaggcactcttctattcagctctcttgtgtgcacgtgagatgttgactccagaagatggatcggctgacttaatccgtgccctcaataacagacttattgcactgtcctttcatatcagggagtactattgggttgacatgcaaaaattgaatgagatatatcggtataaaacagaagaatattcttacgatgctgtcaacaagtttaacatatacccagatcagattcctccatggcttgttgaatggatacctcctaaagggggttacttcatcggaaacctccagccagctcatatggacttccggttcttttcactgggaaatttatggtcaatagttagcagcttggcaacgactcaacaatcccatgctattttagatcttattgaatctaagtggtctgatttagtggcagagatgccactaaagatatgttatccggctcttgagaaccaggaatggaaaatcatcactggcagtgaccctaaaaacacgccttggtcgtaccacaatggagggtcctggccaacattattgtggcagctcacagtggcatgtatcaagatgaacagacctgagcttgctgcgaaagcaatagaagtagctgagaggcgtattgctacggacaaatggcctgaatattatgacaccaagcgggcacgatttatcgggaaacagtcccggctgtaccaaacatggtctattgctgggttcctagtagcaaagctactaatcgagaagcctgatgctgctaggattctgtggaacgacgaggatgcagaaatactcaatgctttgagcacgaacagaaaacggggcaagaaagtgttgaagaaaacatacattgtctgaattctcaaagcaagttccatcaaatgacctaagttagcatagtaagttataggaagcggctttcctgtatataaacttaaacaaggttgtgtttttgatggaggagggtgcctgctgttggatgctgttattgtggatgcatctggctttgcaagaaagcacttgcttgagcattcctcaattgtatatcttccaacatttttggtatactaggcctgcgtcatgtagttactttactcttcgtttgaccagagttcaaaagtttgcatttacccagatagcaatagagctttggttgctcgaattactccattcttgtaattgtccggatatcactggcatatatgtaatgcatgaattgtcaccaaa

SEQ ID NO: 14619 - DNA, 403 bp, Setaria italica
  Peptide Sequence Number=SeqID_80593
gtttcatcccatttcccaattagcatagctactttttcccctgttctattatcttgcacaaatccatgcaccctgaaattcaacccagggaaacaaggtaagcaacagcaaattttttttcctcgaacgacgcaggagaactggtgtggattgcgatcaattattgactgttctttgaatttaagcttacaggagtactggccacttccattgatacgcattgtgccatagtgatcacaataaattttgccaattatgatattgtaaatggaagtagtcactttactccactgaaatgtttctccgtcatcaaattggagggtaagaacgcctatcggatcaagctgaatggaccgaccccagaacttccctttcagattggaatcaccccagaatctaccaa

SEQ ID NO: 14620 - DNA, 2108 bp, Setaria italica
  Peptide Sequence Number=SeqID_80594
tttttttttttttcttagagtgaacctaaacctacttgatccgcttttatgctactctaatttcatcatatgttcagcactacattttggttatctagaccaaggaaattcggaatattgacattctttcaccatgtatatgtagctcgcaaaatattctctgcatagaaccctgatgctactagtataacacaagccgggtaggggtagctacggcaaccctggggatacactgttctggccaaagatgtccgggatgccgtcccagttccccttctcccttgcttcccagtatccacccacatagcggtagctgtcatcctcgtccttcttaaaccaccttggtttccatcctttctcttgcagtcgccgggcctgccgttgcagttgttcaagcctaagtttctctgcatttgccatctcatattcaccgttttccagatgcctttgatcaggcctcaaacgagaatcagtaggaggcaacttcttcaataagtgaggtgtcaattcattcagagaaattgcaaaaggagaaaggttgtatcgtgtctgattaagagacttgtctctctcccataaaagaaccgcttctgacattgggtcataccccttgggttttgcacttggatccccgagcacataatacatagtttcatcccatttcccaattagcatagctactttttcccctgttctattatcttgcacaaatccatgcacctggtgtggattgcgatcaattattgactgttctttgaatttaagcttacaggagtactggccacttccattgatacgcattgtgccatagtgatcacaataaattttgccaattatgatattgtaaatggaagtagtcactttactccactgaaatgtttctccgtcatcaaattggagggtaagaacgcctatcggatcaagctgaatggaccgaccccagaacttccctttcagattggaatcaccccagaatctccaacctctaccttcacagtggcatgcaacaaccactgggtgatgactgaccttttcagagaaaaagcgaactcctttatccggatagtcagcttcatatgtttccccaagtagaggattgaagggtttgcattgccggccttcagttgaagcataacctgatactgcaaacgctgctacatgaagtatcctcatcaagctatcaccctgttttccccactgtagtgcatggtcaaccaagtaagagtactccaaatcttcaaaacatttttgcaaagaagagagaggctcattgaaataaacaggtagacaaacacctgagagatctttccctatgttttctttaattattgaccacaatcctataggcttctctttttcctttggctctggtagcttatctctgcgtagcacaaagggatatttagtagttttgacagtatttgtaacagaatctccaacatattctgatccattgcaaccatttgccacaagctccttccttcgacatgaagcacttcgtaaagattctgcagatagaaaatctcttgtatcgaagtatgttacttcatcttcctcagtttcaacttcggccacttgacttgcagtgtcagggtctgattcacttgaacttcctcctgataaaactgaatagaaatcactttgtctgccattggcataaccatgtgtttccctctccttagtctcatgcacaactgttctctctagctcaactttctctgtctccaattgccggaggcggtctatcaaaatagaatgctgctgctgctgagactttatctggttgtgcagttccagcagctcactcatcataatagcctcacactccttgaccactgcttcactcagaccctcctgcagcagccgaaccctcagcttctcggtggacaacataatgtccgccatgggaccaagatcattactagtcagcgaccgcgggaaacgatccttcgccgccagcaatgcatctatccaagagttcctgtcctcctcagtttcacacctcaagtgtaatgtcttcgtcccactgaatatatacagcctcttatcatcagacttgcttgcacgaattgatgaaaccttgagatgtatctcgccgaatggcttcc

SEQ ID NO: 14621 - DNA, 728 bp, Setaria italica
  Peptide Sequence Number=SeqID_80595
ttagaccagcagggatatcgatttcatcagatctccaaccacaatgaagtccccacgggtttgagtatacaaggccagtatgtgcccatggtgcccacactcagattgcagctcatgtgaaccatcctcacgaagcatccacttatataattgaatcttctggttgatagcagccaacaatttcccattgaatgcattcagcgaataaactgcacctttagtttctttctctacgattaattgcaaccttccatcttcaacagcaaatacaaggattcgcccctttgttggttcattttcctcgggtaaaacatatgcagttcccacacagtaataaacattattatcatccgcaaatgagcagctaatgattgagcagccacattcgtattgatctagaggatatgtagacaggaactcaaaagtctgatgatctaacagacgaatataatgagtctcactttcctccatactagtctggttgtacttgaaactgcaaaatgctagtgtccttgattgctcctggtggcaaatgcgacgtgcttgttcattaagggggattgtgcggatatgaagcttttggatatcatcaatcgttccaatggagagttcaccttctttagcaattgcaaggctgtctggaaaagcggctgtattgaaagggcacatatgattaacttctttcaaattgacattgctatagagaagcttcttattgctgctataga

SEQ ID NO: 14622 - DNA, 2078 bp, Setaria italica
  Peptide Sequence Number=SeqID_80596
ccaaaagcttcatatccgcacaatcccccttaatgaacaagcacgtcgcatttgccaccaggagcaatcaagggggattgtgcggatatgaagcttttggatatcatcaatcgttccaatggagagttcaccttctttagcaattgcaaggctgtctggaaaagcggctgtattgaaagggcacatatgattaacttctttcaaattgacattgctatagagaagcttcttattgctgctatagatgaccgttggcctatctgatgaagcaaacacgtgggtggtaccctttgatgagaatgtacgaaggctgattggttgggtcccgagggaaaccttctttctatcagtcagttcaccagtacttgcattcagcagaaaactgaacaggttaccatctccaagagcacaaagtaaatacgaaaccccctccaaggtgcacagcagaacagaccgaggaacaatttctccacccaaattctccttccttattaattcaagatctggaagtgaaaatattctaacacttatatctgtccacatcccaacggcagctagggaactatactgtggattctccccaattgggttcaaatcaagacaagaaatctcatgttctagctgtgcatgtttcacttcaacaagcttagaatccctaatttctaggtaaacaagatggccaccacctgttgccaacagaacctgactggcattagctgaggcaacattgactgaaaatcctgctggtgcattccattgatccactagctcctgagaggtacaactgactaaccgaacagaattagcagtaacctgtataagaagatcattgatcacattttgacaaaacagggtctgggtttgtgcatcaaacccctctatctcagtttcttctagttcatcttccatgttcatcgccaagaaccgtgtctcacttataaagctcacaactaggtacatgtcgtaaggatcattgaaagaagatttcaatgaccataatcccttgataccttggagctctactgaagcctgctcattaatccctataccattgcgaaccacacgaagggaaccatctttaaatgccccagaacaagtaaccacctgaccctgaccctgcctatcaaggtcaaccacgcagaagtccacaataggtccaagattcacataacgttccagaacttcaacaaatgaaccacttgcatcagcttggaggttcagctttaccagctgtgaatcgccaaatcgtgaaccaacataaacaacaccattatcaagatatgaaattgatgatgcaattgaagtctctcccaagtactctactttcaaaccagtaaccctttctcgttcatgggtaaggacaagtaaatgcagagttcctgtattatcgccgagcaaatatcgagaaccatctgggtcaacccgtccataagctcttatgatggattgttttattggtatagctttaaatgtagcattggcattgcagtaaactattgtctcctcgccaataattatgacgccaccaagtggagctggtacaggtattaacaaaccggcaccattgtctaagttattctgggaccaaggaccctcaacaaaatctttgtccttcagtgcaacttcatatgtcttcacatgcctcgcgtctttattatcctggtagaggacaacaatagtaggtttaacacaaccatgcagaaacttgatgtccagtacttgaagttcttcgagtctgatattgaaagcttccttcagctgtcctttgttgtcaaatggtataaccttaaataagccgtcatagaggtgaagaccaataagtctacagtcagggtcgataattccaatctgtccattgtcagtaggacggccaatgcgatcagaaacatcacccattgctctggtgaggagctctgatttttctgtgtcccattgcagaacacagaatttgtacctctccgtagcaatgaaaagaaaatcctgagtctcattatgaggccggaagagctcaattgttgcgatccttccgtatataggtacatcaagcataggctgaaggccctgaggagtaagcaaat

SEQ ID NO: 14623 - DNA, 503 bp, Setaria italica
  Peptide Sequence Number=SeqID_80597
cctacacacacacacacacacacacacacacacacacacacacacacacacacacacacacacatatatgaacaaggattaaacagttctgatttaaacggtctttatcttctgcagaaaagggaattcactcaattcgtcacgaaagcaaactctattttgtaacgagtttcgaaagcactctgatttaaggattttttttacgaagactcctatttggagattacgcctctagaaggcgcacgacataatatcccgtccagtagtcgtgcacagcaggagcccttagctactccagattccccaaaaaacagacaagggcagcggctccgcatctgaggagacccctgaaaattaccaagctctacgattcgcttcacatgacggggtgctcgcggacaaaagcatctcgcagaagttgatgtcctcaactgatccgctcgagaatcccacagcggagcaaaattcccagtaatcgtgcgcggaggcgcaggtcgcgcccg

SEQ ID NO: 14624 - DNA, 663 bp, Setaria italica
  Peptide Sequence Number=SeqID_80598
actgaaatagaaaccaggcaaaaactgtacggcactaacaagcatgctgagaagcctccaagaagcttctggatgtttgtctgggatgcattgcatgacttgacgctgattattctaatggtttgtgctgttgtttctctagtggttggccttgccaccgaggggtggccaatgggtatctatgatggccttggcataatactcagtattttgttggtggtactggttacagcatccagtgactacaagcagtcacggaagttcatggagctggaccgtgagaaacagaagatatatgcccgtgtcaccagagataggcaaaccaagaaggtattgattcatgatttggttgttggtgacatcttgcatctttcaataggtgatgttgttcctgcagatggcttgttcgtctctggatactgcttagtggtagatgaatctagcttgtcaggtgagagtgaaccagtccatgtttctgaagaaaagccgtttcttcatgctgggagtaaagtgcaagatggaacagccaagatgcttgttactgccgttggtatgcgtactgaatggggcaaaatcatggatactcttaatgacgatggggttgatgaaactcctttgcaagttaagcttaatggtgtggccacaataataggacagatcggg

SEQ ID NO: 14625 - DNA, 389 bp, Setaria italica
  Peptide Sequence Number=SeqID_80599
tggccgaacttcaaatggaaactacgataaacccgtacctgattctataaacagggcagctgaaatcgtacaagaaaacaaggcttgaatctgaaaccaatactacaatgcacccaaaacaagcaagctcagctagtgaaaaaaaattcaagaagcgcggcttcctttggaaccgctaaccctaccacgcaaggaactaaatcgaagcgaagctaaaccccaagattaccaacttggctccttccggccatccaatcgaaacctctcaacccgctgccccccaccgcccttcccctcccggagagcagaaatcaactgcagcagggaagaaagaaacgggaaacaaggggatgcccgaaccttgcctccgaaggaaatgcgctcgacgt

SEQ ID NO: 14626 - DNA, 433 bp, Setaria italica
  Peptide Sequence Number=SeqID_80600
atgaattgttcataaacttacctacctaagaaatacaaacaagaaataggaaaattacaaaataacaatatattttagaggaaattcaaacacatcagacagtgaaaacaaatatccttatgtaagaaccatggtagtgccattttataggaacactgcactaatccttcctcagttcaatgcactctctgtgtgtgccggagctgttgatgaccacaatttccaacttatctccagtgtatatgtctcgttctgtggctgatgcgaaaacatccttcaccagatcaaccgcatcggattcagacaatggtgtcactgcatcctgaatgataaacagcattgtgttaaaaattctgtttagtaagaatgatacaaaacatattggagagaaaacatccccataattggattaagcagttgaaattgaagagaa

SEQ ID NO: 14627 - DNA, 708 bp, Setaria italica
  misc_feature (701)..(701): n is a, c, g, or t
  Peptide Sequence Number=SeqID_80601
ttttttttgtacttgaaaagttgtcttctaagtatataatataaaatgatgaattgtcataacttcctcctagaatcaacagaatggaaattcaaatacatatatttttagaggaaattcaaacacatcagacagtgaaaacaaatatccttatgtaagaaccatggtagtgccattttataggaacactgcactaatccttcctcagttcaatgcactctctgtgtgtgccggagctgttgatgaccacaatttccaacttatctccagtgtatatgtctcgttctgtggctgatgcgaaaacatccttcaccagatcaaccgcatcggattcagacaatggtgtcactgcatcccgagctggcagtagcagaggactaggagatttcaactggttgtcaagaacaggcatcatcaacgctgcgcctgttccctgagcactatagcctgtcctttcgtaagacccaacagcatcgtatgtgaagacacatcctttaccttggctatccagtccacccaacacattgaacgcgtagtatgggaagaatctcttgtagtagagtgtgttcgacaacagctgcgccattgcagggcagctcatcttcttgttatgattgtgttcataaaccaattccttggcagccagattctttttggcaaagctttgatatcaccttggaacccagatgaggccaaaaacnccatttt

SEQ ID NO: 14628 - DNA, 280 bp, Setaria italica
  misc_feature (1)..(41): n is a, c, g, or t
  Peptide Sequence Number=SeqID_80602
nnnnnnnnnnnnnnnnnnnnnnnnnnnnnnnnnnnnnnnnntgaggaaagaggattgtgttttctgtatatattgatgtgaagaacccgtcagattcagttccataagtcacatcacatctgcataacacatagtattacacattttcatgtttgtttaatttgcacagctgcataaggctcacaacttatgcctttctccttgagatgaagggcaggtataaatataataattagcatcgagtttacataagagacatcgaacagccttagtaccatga

SEQ ID NO: 14629 - DNA, 599 bp, Setaria italica
  Peptide Sequence Number=SeqID_80603
ggccgaggccggagaagtggaacaccagggagtcgccgtagctgcacccctgcaccagccagtgcatcgccatccggatgttgtccttggtcggcagccggaacgggtccctctggtcatctgcgtgcaccgatcgtccatgagcaattcatggatcagctcagtcgttaattcatggatcaatcacttaccggtgagcatgatgacgcactcgctggggaagccgaaacgctggcagaggaggtgcctcatgcacttgacgtcgttgacggggccccgcagctcgccgcagccgcggcgcatgccggcgtacgtgatgccgatcaggacggcacgcttcttgccgcgggagcacgggaataagcccgccggcggtgccgcggaatggagccccggatgcgcgtcacgccgcaggaaggaccgccggaggcgcgtcacgccgcagcattgcgcgcactggatggcgctctctccgtggaccacggtgaggcacgcgctgcagtacttgcagcggatcgtcgccggggcccttccgccgaagttcatggcgaaccaagctggtaggagctagcttgcttaggctgcttgctacgtagacg

SEQ ID NO: 14630 - DNA, 1621 bp, Setaria italica
  Peptide Sequence Number=SeqID_80604
tttaaagttaactaaactaaacgtaaatttaactaagtaaggttaattagtaatttaaggaaagaacatagtattacacattttcatgtttgtttaatttgcacagctgcataaggctcacaacttatgcctttctccttgagatgaagggcaggtataaatataataataagcacttagtttacataagagacatcgaacagccttagtaccatgatgaggtgtatagaaggcagtggaggtacttcgaccaaccaaatcctccacgaccaatgatctagctaaacctgttctttcttggtatcatcgcaggtgacgcacgcggatagtcacacgattcagaggtatgattaggaagcatcatcagcgctaaacccgtcgattgattattccgttacgacgatatatatgaagaagtattctcgaagccacggccacctatgctaggtgcttaattacatgacgaagggcttgcggtggatgtcgaacatctccgaagacgacaggttcggctcctggacgccactgaagttggcgacctggtgctgctggtggatgggcgcgccgatgggcccctgcaggtcgccgaagcccccgccgccgccgttcttcatgatggtcctcatggagctgagcaggcggccgtaggtgaccccgcgcggctcgcactccaccgcccggatgaagctgtgcgtcatggcccccaccgatgcgtaggcgtccggcatcacggcgaagttgctcttgccgtcgctgtagccgctgaagagcacggcctggccgccgctggtgcccttccaggcgcccgacggggggcggtggtcctcccactgccagtagccgttcctggcgacgcggcagaggaaggggaggtcgaggacggtggcgctgtagcaggcgtcgacgacggcgtgaagcctggcgccgtgcacgagcgggcgcaccatgacctcgttgatctcgtcgtccaggatcgggcccttctggaacgcgtccatcgggcagagcgcctcgtcgtagccgtccacctcgtcgccgtcgtcgtcggccacctgcgcgccgaggccggagaagtggaacaccagggagtcgccgtagctgcacccctgcaccagccagtgcatcgccatccggatgttgtccttggtcggcagccggaacgggtccctctggtcatcggtgagcatgatgacgcactcgctggggaagccgaaacgctggcagaggaggttccgcatgcacttgacgtcgttgatggggcccctcagctcgccgcagccgcggcgcatgccggcgtaggtgatgccgaccaggacggcgcgcttcttgccgcgggcgcgctggaacggcgccgtcatgggccccatgacaggcagcgggatccggtcggcgcgccggatgcgcgtcacgcagttgcagtgcgcgcactggatggcgcgctcgccggggatcaccgtgagcgacgcccggcagtacttgcaccgcaccgtcgtcgtcgccgccccatggggcctcccgccgaagtgaccaccgaagtgactcatggttagtgagccgggagctggggccgggggcggggctagcttgggttgcctaggttgcttctttggctagcttgagc

SEQ ID NO: 14631 - DNA, 652 bp, Setaria italica
  Peptide Sequence Number=SeqID_80605
tcctccttgctcctcaatgctcgaaccgcacttggtgtcgctcgagttcgcattcacttggagaaagtcgtagaattcaaccgatttgttcgtgtcttcttcttcgttagtagttgaacaataatcctccttgttgctatcatggttaatggcaaagggtactgcaaattctcttcggtacttgtccagcagggaggccatgctgctcgaatcaggcctcgtcctcttggcgttcctagggttattttcatcttccgcagcaccagcggcggcagcactagggacaccaccggcaccacgcttgttagacatccgcatcctctccctgcaccgccgcgccatgatcacatgccagtgattcttgacggcgttgtcggtgcgccccgggaagagcctggcgatgacggcccaccgattgccatggacgcggtgggaggcaaggagcagctcctcctcttcctccgagaaggggctccggtttatcctcgggtccagctgattgaaccacctcagcctgcagcttttccctgatctcccttgaagcttctcggcgatggcgttccagttgtgcggcccgtatagcgcgacgagctccttcagcttctcgtcctccgatggtctccagtggccactaaccaaagtaaggaaccaa

SEQ ID NO: 14632 - DNA, 292 bp, Setaria italica
  Peptide Sequence Number=SeqID_80606
ccaaaaccaggtacgtagcggtgaaggcccccgtgtcgtctcctctgggcgactcgggcagcacccccgatgcccgccgccgccaccccctcccagccttctctccaccttgccaccgccggagcagggtgccttctaggaaggcggcggcgagggcttctctcgcctggccgggcacctcccgctcgggtcaagacaaggcggcaccagccatggaggccgcggcgacgaccccggcccggcggatccggtgtccaggggatcggatccggcgcccccggtggcagatctg

SEQ ID NO: 14633 - DNA, 277 bp, Setaria italica
  Peptide Sequence Number=SeqID_80607
gtaaattaaccaaagcctgagcccccaagcgaaaaggggaagaggaaaaaagggtttggtttttattagctgcacagaatggcagcagcagcagcgatccaaacccaatccccagcgccgcagcgcgtgggtaataatctcccagttcgagagcagtcgccccagcgcccgttgctgttcctggctcgcggcttccccaaatctcctccgccacatccctatcctcctccccctccgttcgtcgcctcacccacccatccatccgcgcccgcggcgg

SEQ ID NO: 14634 - DNA, 281 bp, Setaria italica
  Peptide Sequence Number=SeqID_80608
cgccatcgtcgagcatctcaagcggcgaggggtcggactcaaccaattcgtgtacaactgcctcctcggcgcggtcaagaactgcggcgacttcggtcggattgaagctgtccttgctgacatggaagcgcagggaatttccccaaacattgtgaccttcaacaccttgatgtccatctacgttcagcagggcaagactgacgatgtcttcagggtgtacgcccaaattgaggaccgtggacttgtgccgactgcagcgacctactcgacggtgatgtcgg

SEQ ID NO: 14635 - DNA, 606 bp, Setaria italica
  Peptide Sequence Number=SeqID_80609
tagtagcccatggggtcggtggcgggcatgccggcggcggggtgcgggatccccgcccccatgccggcagccgcggcggcctcggcgtccttggcctcgtccctcggcacgatgtcgacgaggaagtcgaagacctcggtgcgcgcgacggcggcggcgatgtcggacttctgcagcgtgcggcgcttgttctcctcggcgtgcgcccagccgcggtgggtgagctcgaggatgaacatctcgcaggcgcgggcgaagacgacgggcgcctcggcggcgatcatgcggacgtcctcgtcggccttcatgatcttcttgatgcgcgccagggggaggttgtggttcttgaagtcggtggtggcctcgatctcgcggtactgctcgttccagaagatctgcagctgctgctgcgcagcggccgcctgctgggcagcggctgcggcgggcggcgcgtagagctgcggagcgtaggcggcggctccggcggccgcggcgggagggtaagccgctggagggtaggcaacgggggcgcccatgactgggggaggcggaggggtgctggatttggtgggatccatggatttgggggcaagctagggttgtggc

SEQ ID NO: 14636 - DNA, 392 bp, Setaria italica
  Peptide Sequence Number=SeqID_80610
aaatccacaatgtgtcttctgatctcatccacttcccccacccacatctcagcggctctatgtgcagataaatcccagagattcgtgggtcgtatgctgccttcacaaaattctcacatatttgtggtagtgacagccctgacgagaagcgtgtcttcaactggtcagatatctcgccgcgaagcttcatgttgaggacgcttcccttgcggacgcgctgccacggcggcgccacgagcatgcggagcttaacggcgagctgcagtcccccacccgagctcctcgacatcgaacgccgacgccgcgggcgttggcggctcctgggcctcaccagcagcgggggacggctcctgctcctccttggtgggcccaggggaggactccacggcgcg

SEQ ID NO: 14637 - DNA, 885 bp, Setaria italica
  Peptide Sequence Number=SeqID_80611
ttgttgtcctttggtctagttctcagataagaaaagttgacgtttctttgattttttcttagtatatcaatcccgatatttctagtcattagtacaaaatatcaaaatagcatatataatgctaattaactgtacaaatcccaaactacctgtttctgtgtaaggtagatgtgtaatggcattatgaactttccctcatccctaaatacaaatatttgtaaaacagaaggtaccaaatgctagggtcaatcaaaatagtttacgatatcttttatgagcaagaataattgattttctcctgacatatctcctaaattttcaaacaagattccatccatcctagcttggactccacttagggaggacatgtcctggagcactcccttcattgccctgtcaactccaagcaatgaacccccaatgcctgataagatctccggtaatgttggtgagggctttgagacttcaactagctggatcttcttatgcttcggtatattagctttctgttttgcaatagcaagagcttgtgagagtccacctactgaatcaaccaaccctcttgaaaacgcatcttggccgctccagactcgaccttgagcaacagtctccatctgatcaacactcattgatcgtgacatggctgctttatcacgaaacaaagcgtaagcattttgcgctgacttttcgaaaagctctgcctcatccggccttaaaggtcgttgatcagcagcattaagctcagcatatcgacccttggatagaatttctttattaaagtcaatcctctcataaagcttttgaaggcagaacttccctgtaacaactccaatcgatcctgtaagagtaagtttctcagcaacaattactggtgcagccattgct

SEQ ID NO: 14638 - DNA, 1524 bp, Setaria italica
  Peptide Sequence Number=SeqID_80612
tcctctcataaagcttttgaaggcagaacttccctgtaattccaggtaagcagttttaaaccaggaataaatacaaaacaattgctcaattcgctacctaaattctgaatagactagagctaatccaattccaaagttgtgacgaactacaggtggacaaccttagaatttgacgtagatgacttatcactagcaaggcggataaccttagaacacaaaaataataagggtcacgacttttagcttttgaaggcagaacttccctgtaacaactccaatcgatcctgtaagagtaagtttctcagcaacaattactggtgcagccattgccatgtagtaccccccacttgcagcaacgtcagacatcgaagcaaccacaggcttggagttggccagaagtcgaatttccctccacatcaggtcagaagcaagagcatcaccaccagggctgtctatacggaggataacagctttgtacttttctgattctctaacagttcgtatcttctcaattagctgctcagcgataatgcctgaacttggagtactcaatgggctacgagtacgtgttatgcttccagaagctctgataatggcaatttgttctcctcctccttgtaatccaagggtccgtttactgacacgcgagtatttactgtagtcaaccatacgcagacttttcttgtctttctgccctactctctcctttagcattgacattacctcgtcgtcatacattaaatctgttatccaaccttcttccttgagtctggcaacctggtagactcctgaattaatgaattcctcaatttcttctcttttcttcccatgtgtagaagatatcgtgtccagccagtttccataaatattgtcaagcagtgttgccagcatctccctaacttcatttgacatgctcttgcgtgcaagctgatccccggcacttttatatttaccaattcgttgaatttctggttctattccaactttctcaagaacacctctgagaaatgtttgctgaacagttagaccaaacagagcaacataagcacttggcggtgcgtatagctcaccacacgcacaagctaggtagtactctttctccccacaaacaggcatgtaaccaacaacaaatttaccagacttcttgaaatccacaatgtgtcttctgatctcatccaccttcccccacccacatctcagcggctctatgtgcagataaatcccagagattcgtgggtcgtatgctgccttcacaaaattctcacatatttgtggtagtgacagccctgacgagaagcgtgtcttcaactggtcagatatctgcaaccattaccatcaacaacacaagtcacataatacactatcaaagttgacaaatactagggggaaaaggacaaagtccatattacagaatggcaactgatatttgccgaaagtggacctaataccatgagaaaatcctacgatcgcaaacctaaacaaccagcataaaaatactaagacacgcattaggataagaccttt

SEQ ID NO: 14639 - DNA, 354 bp, Setaria italica
  Peptide Sequence Number=SeqID_80613
atctcctgctgctaaaagctgccctccttaattctagaacaaaggaagattctccgggcttgtttgtttggtccttgattaacgaaaaattgtgaagtgaattcagtcaacttgcagtagttttgattacctgaaggtcaacggcaaagtttatgcagttagctattcatgatcatgcgtcaaagctcaaaaatggagtggagtttacaaagattaggatacttctgaattcggactacagagtcacgcctaacaaataaaagcctttaaaatcacaatattttatttggggtactagtttgtgcaatcgtagagctggtttcttggatgattctttgtaacctgcaaactttg

SEQ ID NO: 14640 - DNA, 706 bp, Setaria italica
  Peptide Sequence Number=SeqID_80614
gggtcaggttgtggtgttgggtttggatcaggctgcggttggggctttgggtcgggctgtggtgccgggtttggatcaggctgcggttgtggctttgggttgggttgtggtgttggtttgggatctggctttgggtctggttgtggtgttggtttgggatctggctttggatcaggttgtggttcgggctgtggtgttggtttgggccgtggctttgggtcgatcaccctgccacaggcaaggtcaggaacacttgcagcaagtgtgaggactagggccaagaggagagcggacctcatcgcgctagctgccactggaatcgtagctctctgtgtggttgcttgtttgacaagataaagtaccgtgcccatgatgtaaatactgctacacttccagaaaggatgtccccttgaccaccacatcgccttggggaaccaaaagtactcacttgtgtcacttcagaaaacaagtcgatgaaaatatggtggaagtaatgaaattatatctgtggctaacttttctagacttttagttaagcagctgtctatactctataatacctgttttaccatcactaatgacatctgcttttcctttccgcattatagtcacaccaccaattttttcggcaaagcagcgtcagttgctcagcagcagtttcctcatttacatcaaagttcagcacctttctgaaacaaagtaacta

SEQ ID NO: 14641 - DNA, 420 bp, Setaria italica
  Peptide Sequence Number=SeqID_80615
tgctatattaaacgttataatgtgttcaattaatgaagagagtagttgcaagttaattcaatgaacaacaattacataatatttccaaattttcaaggtaaaaccagtataaacaactgagctgataacagaccttccagaaaggatgtccccttgaccaccacatcgccttggggaaccaaaagtactcacttgtgtcacttcagaaaacaagtcgatgaaaatatggtggaagtaatgaaattatatctgtggctaacttttctagacttttagttaagcagctgtctatactctataatacctgttttaccatcactaatgacatctgcttttcctttccgcattatagtcacaccaccaatttttccgtcctaaggctagtcgttctagtttgtcttctagttttctttaagttta

SEQ ID NO: 14642 - DNA, 1116 bp, Setaria italica
  Peptide Sequence Number=SeqID_80616
gggatatatagggtggttgttgatagtatttcatcaacccctattggtttgagtattatcctacatttcacagccaaagttttctgcctgatatacattgtactttgtcaaacatcaacccagagcattattttctaacatatccctaccaagcgtgacctctacagaatcaccacagtatccaccacacgagttcagcactgtctttccccagtttcaatttttagaaaactagtctgtattccttgatttttactgcagtacttctcaacaacactgggaaagcagtggatccaagcattgaaacaccctattcctattggacaaaacatgtaccaaggaggtccagggaccaaatgcctgtataaacattattagagctgtgcgtgcatgacgataattaagtactaaccagaactagttctcagcagggcagatatcttccaagcttttgcccaagaactcgatgatgtctgtggtgacggttgatcgcttgtttttctcgaaagcaagtgacgcggctttcctgagcagtagagagccagctatgcaccccagggtcataggattgactctcttctctgtaggttgctcatttgacaagataaagtaccgtgcccatgatgtaaatactgctacacttccagaaaggatgtccccttgaccaccacatcgccttggggaaccaaaagtactcacttgtgtcactgttttaccatcactaatgacatctgcttttcctttccgcattatagtcacaccaccaatttttcggcaaagcagcgtcagttgctcagcagcagtttcctcatttacatcaaagttcagcaccttctgaacaagacgtttgtactcatatacatttggtgttaaaatggcaagagggttgccttcaacaagaccaaggttattggttataagaaaaaggccatccccatcaacaacagtaggaatattagcctgccttgcatgcttcataatattactcacacaatccagaagaaatgagtcccttccaaggccaggaccaacgacaatgcaatcaaagcgctccatccactttgcaacttcagtgagaattttagaagaaaccaatgctcgttcatcgtctctcac

SEQ ID NO: 14643 - DNA, 434 bp, Setaria italica
  Peptide Sequence Number=SeqID_80617
ggcgcagaggttgtggaggtggacggggcggtgggagtcgacgacgaaggcggtggcagcgtggggcaggatcccgcggaggtcgcggtgggcgccccagttgacgaggacgcagcagagcgggacggtggtggcggagaaggaggcgaggaggtccctggccctggcggcggaggcgacggggtagatggagaagcggatggagtcggcggagaggacgtgggcgagggccctgacggcgcagagggagtcggcgtcggcggcggaggggaggatcaggagcggggaggaggagcccgccgcggcggcggcggcgcggaggcgcgcgtagaaggagtcgacgcgcagctcgcgcaccatcgcggctgcatcaatcgggatcgaggcgtgtggaattggaagtggagctcggcgcggagggattgagaaatggg

SEQ ID NO: 14644 - DNA, 472 bp, Setaria italica
  Peptide Sequence Number=SeqID_80618
agagtttttaggaattattgggaaagggaaagataaagtgagactgttggagcactattttcttattaattctcccaatatgatagttggattggaatgctctaatacgattatgttacatgagaccgaacaaacaccgtcttatagtctactgtggcgtcccgcccctgggccgggcctgcttacacctgtcagctctctaggatatcaagaattccctcacagaccaacacaagtcttttctgcgcactttgtgctcacctgggaagaacttcccggtcggtcacccatcctgaaattgctccgggccaagcacgcttaaccctggagttctttgaggatgagctttcagaaaacaagttgcaacttgttggtacgagtattctatcaatcctattaagccttgggtcaggatatcacatactcacccccttagaagaccgacgccctcgttcggtctaacccctaacct

SEQ ID NO: 14645 - DNA, 1784 bp, Setaria italica
  misc_feature (1)..(55): n is a, c, g, or t
  Peptide Sequence Number=SeqID_80619
nnnnnnnnnnnnnnnnnnnnnnnnnnnnnnnnnnnnnnnnnnnnnnnnnnnnnnngattgaactcgtgatttcagttgtaataatattgagccagcagtaagacagcgtaggtaactcagtagtaagaggttacaacataatagtaacacaacttgatattttgagcataaaacacacaaccaaagaactttggcacgtgatgacgtgaagactgaaagagtgaggtcctgaaatgctgttcaagtataggtatctatattttcacagctggcttgctttttcagtggctccattccatcacagaacttattcgtgtagtctggcgaccagcagttgagttgataattcattttgagtctcatttcaggagatagttctcagccacctatatgtatcattggtctattcgctgtcttggcaatatcaaacatcccagcatgtttagctttcttccttttgaccgcagcaccaactatctcctttagtccagcgtcatctacaccagcacggatgggctctctcaaactcacctctgaggggccaaacaagcacaccttgaagtttccatcagccaatagccgtaatctattgcatccagcacaaaaatgctctgtcattgatgtaataaatgaaattgtcccaacatgtccatcaatcctgaaattctttgcagtgtctgtagggtgatcttgaagtctctccacacctttataactttgccgcactttgtccaacatctctgcataaggaactagtttcttcacattccaaacattaccatcgaatggcataaactcaataaatctcacattgatgggcttgtgtctcgtcagttcaacaaaattacagatctcatcatcattcatgccacgcatgataacacaattgaccttcacagggttatatccaagttctacagcagcatctattgattccatgacctttgagtgccctttacgccttgtcatgaactcaaactttgcaggtactagtgtatctaaacttatatttaaggcattgaggccacattctttcaatttggggagtttcttagaaaggacaattccatttgtggtcattgctagtgtttttagccccttcaaaccagagagatgtaagcaaatgtcttcgatatcttttcttatggtaggctctccaccagttaatcgaatcttatccacaccagaggtaacaaagaggtcagcaattcgaattatctcatcatgtgatagaagctccgactttggtgttagttcgactccttcagcaggcatacagtattggcacctcagattacagcgctcagtcaaggagatcctcaagtaattgtggaacctcccaaatgaatcaacaagcatttctgatgatgatgtttctcttgatagaatatctggatccgtagcacaggacgttgcatacgtaactgagcacctctgtctgtcaataactcttgttgaagaggaagcgtcggccagatattggagtcctaccttcatagtatcaaccacgcgatccgaccgccgccggccggccagctccgagaagcagcgccgcatcatctcctctcctcctcccaatccgaaccagcccaggaacggatagcccgagtaggaaggaagaagaaaagccgggcgctcctgcaatcgcaggagtcaaacgacagccagccggcctgagaatcaagaaaccgattaggccgccgtcacccgcccaatcagtagcacgagctcacaaagaatccagctttctggcggctggaggaagagaagttagagagagctgg

SEQ ID NO: 14646 - DNA, 766 bp, Setaria italica
  Peptide Sequence Number=SeqID_80620
cttcattggattcagaagacaggagattgatgaactctacacagcactcaacaagaagatcctgtcttctgaatccaatgaagtgtgcagccgagaagagaagtgtgagattgctcctgagcatgttctcaaggctctaagtgatcttggcttcagagagtacattgatgaggtttatgctgcatatgaacagcacaaacttgatactctggactctccaaaagctggcaagttcactgggatcgagatgacagaggaagaagctgttgctgagcaacaaaggatgtttgctgaggcccgagcaaggatgaataatggagcaccaaagccaaaggagccagaacaagaagcacagcagcaaccacatcctcaacttcagttgcatactccaccacagcaacccatgcagcctcaactgcagttgcattcgccaacacagcagtctgtccaacctcaactgcagctgcacccccaagtgcagccgcatcctcagcaatcccaagtgcagccgcatcctcagcaatcccaagtgcagccgcagcaggccccacaggtgcagctgcaccctcagccgcaacaggccccacaagtgcagctccacccacagccgcagcaatccccacaagtgccactccaatcacagccgcagcaaatcccacaagtgccgctgcatccatcaccagagcaaccctcgcaaccccaaccccaaccgcaggtgcatctgcaatcgcaggagcccccacaagtgcagctgagcttgcagctg

SEQ ID NO: 14647 - DNA, 623 bp, Setaria italica
  Peptide Sequence Number=SeqID_80621
ccccgtcctcgtccccgcctcgccgcgcgccctaaccctagctccctcgattccacgctgatcgagccgagctcgctcgcgcgggagccctggttgccctcgcgcccttctaatctcgcgcggattcggcgccgcgcctcgaaatggacccgatggacatcgttggcaagtccaaggaggacgtctccctccccaaatcaacaatgtttaagataattaaggagatgcttcctcctgatgttcgagtggctagagatgcacaggatcttcttgttgagtgctgtgtagagttcatcaatctcctgtcttctgaatccaatgaagtgtgcagccgagaagagaagaaaacgattgctcctgagcatgttctcaaggctctaagtgatcttggcttcagagagtacattgatgaggtttatgctgcatatgaacagcacaaacttgatactctggactctccaaaagctggcaagttcactgggatcgagatgacagaggaagaagctgttgctgagcaacaaaggatgtttgctgaggcccgagcaaggatgaataatggagcaccaacgccaagtcctaaaggtagtcctagtaacttaagttaagttcttacttagttctta

SEQ ID NO: 14648 - DNA, 440 bp, Setaria italica
  Peptide Sequence Number=SeqID_80622
ccatggatatctacctcttcatgaacagcaaagtcctcttcaagactgtgaggaagatgctcatctgcggaagttgaagccggtgattgtgcatttgaactaccatcctgacaagtcggatcgcatgaaagcagtgattgaattttatgttaatgggaaacaaaatgcccttgaacatttccctgatggttcagaatgatagacagcagcttttgtagaacagaaaatgacaaacttgtagtatctagtcgttttgaagctctgaatgaaagcacaggttgtctaatacacaatccattgtcattttaaatcctctgtgcttgaaatgtcaactttcactgagcacctaactcgtacagttctgtactctcaagtattgggaagctgccatcccatgctttacagatcatggcgtttctattactaagtctatttaccta

SEQ ID NO: 14649 - DNA, 1430 bp, Setaria italica
  misc_feature (4)..(4): n is a, c, g, or t
  Peptide Sequence Number=SeqID_80623
cttntaccccgacggcttcttctcccgcgcccctgactccgccatccattggcctcgccgggctgactcagttgcctgtgatacatctcgggaagttgccaacctgaagtcacagctgttatcattggaaaggaaaaatgctgagtttaggaagcagatcaatgaactatcaatgaagcttcagttggctggacaaggggaaaacgaggtcctgtataaggctggtccatttggtacagtgaaggctctgaggacaaatccaacagtttctcctgacttatccatcaatcccagattggcaaagatattggaacaggttgctgtgaagaaagaactcatagttgcattggcaaattctaatgtgaaagagatgctagagatgtggttcactaacatcaaacgagttgggatttcaaattatttagttgttgcattggatgacagcatagagaacttctgcaagtccaatgatgtcccagtctaccgtcgggatcctgatgatggcattgacaatattggaaagacaggtggaaaccatgctgtttctggactcaagttccgcatattgagggaatttttgcagctggggtacagtgttctcctctctgatattgatattattttcttccagaatccctttgatcatctctacagagattctgatgtagagtccatgagtgatggccacaacaatatgacggcttatggattcaatgatgtttttgatgagccttcaatgggttgggcaagatatgctcatacaatgcgtatatgggtttataattctggattcttttacattaggtcaacaattccttcaattgagcttctagatagagtagcttaccgcctttctcatgagaaagcatgggaccaagcagtcttcaatgaggagctgttcttcccatctcgtccaggttatgaaggtcttcatgcatccaagagaaccatggatatatatttcttcatgaacagcaaagttctcttcaaaactgtgaggaaagacgctcagctcaagaagttaaagccagtgattgtgcatttgaactatcatcctgacaagttagatcggatgaaagctgttgttgagttctatgtgaatggaaagcaagatgcgctgcaacgtttccctgatgggtcagaatgaggaaattgcagatttttctggtacagaaagaaatatatacctgctattatatccttgtggctgtgggattgttttggcattaggatgggtcgatgggatcctcttgcccgcgagaatgtttgatggtcgagtgccatatggatcctttgagcttgagctatttggacgtcgccttagtctctactaacctcaacagttctgtagcgaacatggagtagcttagatggctgatcacattttcgctacagatctgagctttcgacaccactatatgtctttaaaa

SEQ ID NO: 14650 - DNA, 460 bp, Setaria italica
  Peptide Sequence Number=SeqID_80624
agaaggggcgtgaggctatgtacaacagagagacagcagctgtctatatgctgccacggaggcaaatctgtaccacgtgtacagcgattaatgaggagagagacgcacgggctcgtgctcccaagccaaaccgccggccccatcgccgttgtatgccgtcgtcgtctcctcgtggatcggctgcggtgagccaaaaatcagctacgatggcaataaaatccattccccgcgcgccaaaatccgtggcaaaatcgatgctcctcccttcctagatgccggatgcagcagttgcgcaaggcttaccagatgcgacggcatccctggagcggacgggggcgcggcggcggcagcgggggagcggaaaggcgcgatgacgaccgagaagcggaaaggctcgacggcagcagctgcttccgtctccgttgctccgtccaccgaccggcgcagcgaaagggagagc

SEQ ID NO: 14651 - DNA, 422 bp, Setaria italica
  Peptide Sequence Number=SeqID_80625
aaggcttatgttgaagaggaatggacctacattacggagctttgtggcgttggcaagtatgccgctgatgcttacgcaatcttttgtgctggaagagcaacagaggtggttccagaagatcacaagttagttgattactggaagtatgtatgctttaagttaccaactcagatgtttgaaaatgtgtacatgttgcaggcatcgcagaacgtggaggaggctgcaggggtgactgggcaggggaacttagcccctacggtgcagcaaaccgctctgagctgttgaaacggaaagacggttgcatggtggaggaagcgcaaatgcttttgatgttttagtttgaagcataatgttatgtgatgctgtgtcatgtcatctagctcttagtatctaccaagttaaatctgcggctcaaccttact

SEQ ID NO: 14652 - DNA, 373 bp, Setaria italica
  Peptide Sequence Number=SeqID_80626
caaataattagctatgttcacagtcaactgcttgattcattgagaattgtttctgtaactgtcaaagagaaagagactaacttaggttgccatgccaaatgggtgatcttagtaatagtcgtctctgcctacttcctgattcaatatagaatgattatttgtgtgtttccagtgatttgcaaataggatcgacaaacaaacctgatcagtgaaacacatgctatagtttacatgtggcacaggtctgtttggtcttattttttacgggctcgacagcaccgcagactaggctagcttattaaatctgttatatgttttagtgtaacactggcttggttaggcgtttcacatttaattttcttttacccaagaa

SEQ ID NO: 14653 - DNA, 831 bp, Setaria italica
  Peptide Sequence Number=SeqID_80627
taaagtaaaaacctaaaacctaaatttaagtaactttaaagttagactagactagaagaagcggtcagacaagtaccgtcgcctgccattgaatcagctggtacccccgccgcgttccccttataatctcctgcaggagaggtacgcacatgacccctggaaggtcattataatatgcatgctcctcaacttatcaaaaggagatcaggtgagctgttcaattttttcctactttattctccatgaatgttacttaaccaaataattagctatgttcacagtcaactgcttgattcattgagaattgtttctgtaactgtcaaagagaaagaggctaacttgtgttgccatgccaaatgagtgatcttagtaatagtcgtctgtgcctacttcttgattcaatatagaataattgtttgtgtttccagtgatttgcaaataggatcgacaaacaaacttgatcagtgaaacacatgcttattaaatcaagcaccgcagagtaggctagcttattaaatctgttatatgtttttagtgtaacactggcttggttaggcgtttcacatttattttcttttaccaagactatttatcatcctgacaactgttgctagctcatcaaattacttatctagtttggttttattgttgtactaattcagtatttgcatttattattaccaatgttattcccctgtttgatgttgctttggtggcacattcaagcttaaacttcaagtattatgccctttgtttactgctgcaggtcaggaagaaattggagggcttctttgaacgctatcctgatgctcagactgcatgtacagctga

SEQ ID NO: 14654 - DNA, 1431 bp, Setaria italica
  Peptide Sequence Number=SeqID_80628
acggcggaaaggggcggcagcgaggaaggagcagagacggggtaagctggagcaggggcaatccggccagcagccatcacccgttgatgtccatccccatggaggggaagcagtagttgatggtggcgtcagcggtagtaagagagtcagaaggagcagcaacggcaagcctcgggtgctgactgatcaggaaatcctcaggatgaggatagcgtcgttgaaagaacagccagtgccccaaggcttcgtccccgccatggccaatcccaacttcattggtcaggatcccaaatattcctcgcctttggtgcattcttcgaccagttctgctacagacctgaacgccggcaaggtcgcaatgctccgtcacttccgaaaacccctgatcctccagccaggccgcctcctcgagatcacctgtcatttctgtcttctcagctcactgcaaatcaaaaggctgccaagacaacgaccttgaacacaaagcgaccaccctcagcctcaggttcgcaagtagcggtaaaggcaaaagaaaagaaaagacctgatgagaagatggacacgacgaagaagccaagaaagaaaccaccattgcttagtgctgctgagaagcggtcagacaagtaccgtcgcctgccgctgaatcagctggtacccccgccgcgttccccttataatctcctgcaggagaggtacgcacatgacccctggaaggtcattataatatgcatgctcctcaacttatcaaaaggagatcaggtcaggaagaaattggagggcttctttgaacgctatcctgatgctcagactgcatgtacagctgatcctgaaaagatggcagagtatctagcacctctggggttgcagcgtgtgaaagcaaacagaatccataaattgtctaaggcttatgttgaagaggaatggacctacattacggagctttgtggcgttggcaagtatgccgctgatgcttacgcaatcttttgtgctggaagagcaacagaggtggttccagaagatcacaagttagttgattactggaagtatgtatgctttaagttaccaactcaggcatcgcagaacgtggaggaggctgcaggggtgactgggcaggggaacttagcccctacggtgcagcaaaccgctctgagctgttgaaacggaaagacggttgcatggtggaggaagcgcaaatgcttttgatgttttagtttgaagcataatgttatgtgatgctgtgtcatgtcatctagctcttagtatctatctgatttttgctaggctgctgcctgcaagtaaggttgagccgcagatttaacttggtagagatggaaggcttgtggtaaccatggccaactttgttttaatttggtgggagtttctatgtgatgtgaatcgtgatgcatgtatatgcttccctggttccaaaaa

SEQ ID NO: 14655 - DNA, 343 bp, Setaria italica
  misc_feature (1)..(104): n is a, c, g, or t
  Peptide Sequence Number=SeqID_80629
nnnnnnnnnnnnnnnnnnnnnnnnnnnnnnnnnnnnnnnnnnnnnnnnnnnnnnnnnnnnnnnnnnnnnnnnnnnnnnnnnnnnnnnnnnnnnnnnnnnnnnnnctttttcaaaccagcaacacaggtaataacagattcatctatcttttgcccattacgaggaaaaagaccaattgtttcagacataatccatcaatcttccgacagtcttccaaaactcttctcagcacatcacgaaccagcaagcggatatagtaaccgactacgacacaggaagattgatggattatgtctgaaacaattggtctttttcctcgtaatgggcaaaaagatagatgaat

SEQ ID NO: 14656 - DNA, 417 bp, Setaria italica
  misc_feature (1)..(39): n is a, c, g, or t
  Peptide Sequence Number=SeqID_80630
nnnnnnnnnnnnnnnnnnnnnnnnnnnnnnnnnnnnnnnaactagattcatctatcttttgcccattacgaggaaaaagaccaattgtttcagacataatccatcaatcttccgacagtcttccaaaactcttctcagcacatcacgaaccagcaagcggatatagtaaccgactacgacacaggaagctaccgcagcggctacaaacaaaaaagaaaggacagtactacatagatgaataacactcccagatagtggggtcagggcacacccgcctagcacttaatctccttcagcccatgcgcgaagtagaggaaggtcgggtcagtggctccatccttgtagtaggcgaacaccaggcttccatcatcatgcatgctctcgccaacaaagaactggaggtccttgagctttcca

SEQ ID NO: 14657 - DNA, 325 bp, Setaria italica
  Peptide Sequence Number=SeqID_80631
tttttttttttttaattaacagattcatctatcttttgcccattacgaggaaaaagaccaattgtttcagacataatccatcaatcttccgacagtcttccaaaactcttctcagcacatcacgaaccagcaagcggatatagtaaccgactacgacacaggaagctaccgcagcggctacaacaaaaagaaaggacagtactacatagatgataacatcccagatatggggtcagggcacacccgcctagcacttaatctccttcagcccattgcgtcgtaagttagtaggtaaggttctcaagttaggactaccaatacctta

SEQ ID NO: 14658 - DNA, 566 bp, Setaria italica
  Peptide Sequence Number=SeqID_80632
ccaatgtcgacctcaacagctccttggacgacccacttcgccgtcgacctcccacgaggatgccgttctcgatctccctgtacgggaacgagtccgagaggagctcgtcgccggtgagcagatcctggtagaccaattgtttcagacataatccatcaatcttccgacagtcttccaaaactcttctcagcacatcacgaaccagcaagcggatatagtaaccgactacgacacaggaagctaccgcagcggctaacaacaaaaaaagaaaggacagtactacatagatgataacatcccagatatgggggtcagggcacacccgcctagcacttaatctccttcagcccatgcgcgaagtagaggaaggtcgggtcagtggctccatccttgtagtaggcgaacaccaggcttccatcatcatgcatgctctcgccaacaaagaactggaggtccttgagctttccaagaaggtacttggtggcaccctcaatgccctttctttgtaatttccgtctttgtcttgtcttccggtcttcctagtctttggtctagttaaggtttct

SEQ ID NO: 14659 - DNA, 425 bp, Setaria italica
  Peptide Sequence Number=SeqID_80633
ttttttttaattaactagtattcatttttctttttatttttttatattaaaacagattcatctatcttttgcccattacgaggaaaagaccaattgtttcagacataatccatcaatcttccgacagtcttccaaaactcttctcagcacatcacgaaccagcaagcggatatagtaaccgactacgacacaggaagctaccgcagcggctacaacaaaaaaagaaggacagtactacatagatgataacatcccagatatggggtcagggcacacccgcctagcacttaatctccttcagcccatgcgcgaagtagaggaaggtcgggtcagtggctccatccttgtagtaggcgaacaccaggcttccatcatcatgcatgctctcgccaacaaagaactggagtccttgagctttccaagaa

SEQ ID NO: 14660 - DNA, 490 bp, Setaria italica
  Peptide Sequence Number=SeqID_80634
ttttttttttttaaaccagcaacacaggtaataacaactagattcatctatcttttgcccattaagagaaaaagaccaattgtttcagacataatccatcaatcttccgacagtcttccaaaactcttctcagcacatcacgaaccagcaagcggatatagtaaccgactacgacacaggaagctaccgcagcggctacaacaaaaaaagaaaggacagtactacatagatgataacatcccagatatggggtcagggcacacccgcctagcacttaatctccttcagcccatgcgcgaagtagaggaaggtcgggtcagtggctccatccttgtagtaggcgaacaccaggcttccatcatcatgcatgctctcgccaacaaagaactggaggtccttggaagactttaccaaagaaagcttaggtaggaaaaccctacaaatagacccttacttagaaattaccgacttagactagactaccggacta

SEQ ID NO: 14661 - DNA, 792 bp, Setaria italica
  Peptide Sequence Number=SeqID_80635
tcatttacgaggaaaaagtccaatttgttttcagacataatccatcaatcttccgaaagtcttccaaaactcttctcagcacatcacgaaccagcaagcggatatagtaaccgactacgacacaggaagctaccgcagcggctacaacaaaaaaagaaaggacagtactacatagatgataacatcccagatatggggtcagggcacacccgccgtagcacttaatctccttcagcccatgcgcgaagtagaggaaggtcgggtcagtggctccatccttgtagtaggcgaacaccaggcttccatcatcatgcatgctctcgccaacaaagaactggaggtccttgagctttccaagaaggtacttggtggcaccctcaatgcccttcttgaattccgcttgctgctccggctccagcttggcagtaaggttcttgatgtagcgcttcatgaaggtcacaaactgcttcttgtcaaaggcaggttgctcctgaagacggaaggtgtcaacaatgtcaacaaccttcaccgcctgatcatcaacaccctcatcatcgccaccctcggcagacgggttggcaccaatgtcgacctcaacagctccttggacgacccacttgccgtcgacctcccagaggatgccgttctcgatctccctgtacgggaacgagtccgagaggagctcgtcgccggtgagcagatcctggtagaccaacatggcgccgcctctcgtggagagaaccctgcctgcgcgagcaaggagacgagagcggggagcggcgggcggagacg

SEQ ID NO: 14662 - DNA, 886 bp, Setaria italica
  misc_feature (1)..(4): n is a, c, g, or t
  Peptide Sequence Number=SeqID_80636
nnnntactcctgtgtcggcccccccgtgttccttttttttttttttttttttttttttttaaataacagattcatctatcttttgcccattacgaggaaaaagaccaattgtttcagacataatccatcaatcttccgacagtcttccaaaactcttctcagcacatcacgaaccagcaagcggatatagtaaccgactacgacacaggaagctaccgcagcggctacaacaaaaaaagaaaggacagtactacatagatgataacatcccagatatggggtcagggcacacccgcctagcacttaatctccttcagcccatgcgcgaagtagaggaaggtcgggtcagtggctccatccttgtagtaggcgaacaccaggcttccatcatcatgcatgctctcgccaacaaagaactggaggtccttgagctttccaagaaggtacttggtggcaccctcaatgcccttcttgaattccgcttgctgctccggctccagcttggcagtaaggttcttgatgtagcgcttcatgaaggtcacaaactgcttcttgtcaaaggcaggttgctcctgaagacggaaggtgtcaacaatgtcaacaaccttcaccgcctgatcatcaacaccctcatcatcgccaccctcggcagacgggttggcaccaatgtcgacctcaacagctccttggacgacccacttgccgtcgacctcccagaggatgccgttctcgatctccctgtacgggaacgagtccgagaggagctcgtcgccggtgagcagatcctggtagaccaacatggcgccgcctctcgtggagagaaccctagcctgcgcgagcaaggagacgagagcggggagcggcgggcggagacggttgttcgtta

SEQ ID NO: 14663 - DNA, 389 bp, Setaria italica
  Peptide Sequence Number=SeqID_80637
cccaagtgaatggatcgagcgttggaacgaacaacgtgaaaacggcacattccctggacccttgtaaattgtaatgctgctcagagagaaagccatgcttgttctggcaccctaccttcatcaatatataactgcaagtgactaccttttcttttgggagagttttggcagaataaaagttttggtttgctgtgtaaggaatcgcttctgaattccttcctgctgatggttcattggattgttcaaggattcacggtccttgcccaactttgatgtaccaccgagcacggttacggattatcttgttcacacgctggttgcagaggaacagggataatggatatggaataaatgtcatagagctagttcctgaacaaaaaaaaaaaaaa

SEQ ID NO: 14664 - DNA, 557 bp, Setaria italica
  misc_feature (20)..(20): n is a, c, g, or t
  Peptide Sequence Number=SeqID_80638
cttagttttttttttttttntttttttttttttttttttttaggttttggcaaaatcttttggtgtttaactactaattgattgattactcagtctggtggcaaaatagcctggtacaagattgatcatacaggctacagtctcaccagacctgaaaaatgatggtaatgaatcttcgattctaaaaaaaaagcagaacaatctccaatcctatcaaccaatcacctactgtatctctgaaccctagtatgtatgacccccttgctctgtttccccccttattacaaaagaaatgggaaagaattgccctctgttctccacccgacgaatttaccatgactgaaacagctaagatgaaccaaacaaaaaaagctgtgattgttgagccttgcggcgtcttcttcgctgatccggccgagaaatgaagctgcttgcatttcctcttcttcatttcaagaggaagccggggccggcgctgctgttgctgtggaggaggttgtgggcgatttggtcgcgcgcggtgacggcgggctgcgagcgcacggggttgtcggcga

SEQ ID NO: 14665 - DNA, 431 bp, Setaria italica
  Peptide Sequence Number=SeqID_80639
taagaatccaccacagaaccgtcctcataatcacagaagaacggcctcgggggcatttgaaggccatcgacgccagcttcaagcatctctatgacatcactcattgttggccgatcatgagacctcatctggatgcaccagagcccaacaatgcataacttcttctccaactcatgcatactaacaacatcggtgatttcgcccacttcatgttggctcagacggctatacacccatgatgggtagtatgcctgacttgacgttgctgcatgtgggttggtgttcctgtgccctccagccatctccaacagcagcatcccgaagctgtacacatccgacttgctggatatgatgccaaagctgcgggacaccatttctggagctatatatccgatcgttcccctcatagcgctcattggcacaaaactatt

SEQ ID NO: 14666 - DNA, 269 bp, Setaria italica
  Peptide Sequence Number=SeqID_80640
ccaccctcttcctttctttcctgccggcgacaactgggcgagcgccgacgactgggcgagcggcgccatcctccgccaggtcttcgtcgggccctgcgcgggtgatgagtattcatcagcaatgatgggaacagaaggcattgcagccacagtcattgaggaccctgaaccatcaattccacctggatttgggccttttgttgcctctgcatcgtgggcaacccaagacgatattaaacctgttgatgctcattctagtcctgttgtag

SEQ ID NO: 14667 - DNA, 295 bp, Setaria italica
  Peptide Sequence Number=SeqID_80641
tagttgagcaggggcgagttcctttaccatcagttcttgtggaggaaagagattggttagctgctcttgcagctgcccctccaccctgttcacaaagagaagcaggaattgccgcaaatgatctagtttcctcacctctagattctggtcttgtaccaagtcttcttaaaccattggtacacctgcttatttccctttatttggatgaacgtgtatggttacctttgtctcttcttaaggcatctggttctattaaggaagttgtgttctcatccatggaaaagaatagtgtacc

SEQ ID NO: 14668 - DNA, 445 bp, Setaria italica
  Peptide Sequence Number=SeqID_80642
ctctgttccgtttccttttgaaacaatcatatatattttccagtttctaacaatgtatttacatatcccatgcaagaaaaaagaaaacaatctcttatagctgatcttcagaagctagcaacagctacttgctggctaacacccatagattgcgccaagccatttccatagtggcaaggcctcgccatggagctcaggaacgccctcacgacctcttccgatgcgtctcttctgagcaaacacaacacgtactccatcacggcagcatcgcagggcagcgtgatcctgccatcatcgccggcgaacccgaactcctcctgccgacatgttcaggagctcgccgaagaccgccgtgccgaggtacgccagcggacctcgaacctccggccgtcggccgagtacacgacgcagcaacccttgccggccaccgacgtcgacgtgctgc

SEQ ID NO: 14669 - DNA, 240 bp, Setaria italica
  Peptide Sequence Number=SeqID_80643
agcagagaagctgcaacttgctctagaaggaaggcacggctgatgagcaacggccaaaagagaaagcgcgatttgatcgcttccgcctccgctacccgcgctgcccttatcggcgcctgcttgccgccgcgccgcgccccggctaccgcgagcttcgcctggagcagctagctcgtgtagggcggcggcactgcccggaggagggaggtgctgctgctccctctgccgcccgcgtggtgt

SEQ ID NO: 14670 - DNA, 285 bp, Setaria italica
  Peptide Sequence Number=SeqID_80644
ccctcacctccctcgccctctcccgcgtcgcctactcccctccaactcctccctctccgcctccttcgacgccgcgctactcgccgccaaccccaacgccaagctctccgtcacctacttctcgcccctcgcgtcagtctccttcgcgccctcctccccgatcgcggtcgcctcgctcgcgccattcagccaggggcccggcaacaccaccacgctcgccttccgcctcgtcgtcgacgacgcctacgtggggcccgacgacgcagcgccgctcaagagcggggg

SEQ ID NO: 14671 - DNA, 449 bp, Setaria italica
  Peptide Sequence Number=SeqID_80645
aaaaagaaaaactctgcgaaactttgaataagatatcacccaatgcccacaccaaagaaatatgtggccgtggattcttgtaaaactcaggaagaccatgcaatcgatatacttcatctaccataagtatctgcttacttagctctggcaaaccagttcttgtaacttctaatgaaagaaatgaccgcgtacaatcgtcattgacaaagtgctcccacttattgaactccatccagtactaagcagcaaagttcttaagagacgactgaccgttgttgcaactggaacttttggcgaagcattgcaacgaaggagtcaatttgatgcacctgaactgcaacaggtcttcctaagcttacatgaaactccctgctcaaaagcactttctcaagcttctgttcatccttgcacaattcagaaagtgcatagtctgcatcaacagcataaag

SEQ ID NO: 14672 - DNA, 1113 bp, Setaria italica
  misc_feature (1)..(43): n is a, c, g, or t
  Peptide Sequence Number=SeqID_80646
nnnnnnnnnnnnnnnnnnnnnnnnnnnnnnnnnnnnnnnnnnngtcttgaaacataaccttgtatttcactgttccaatcacaagaattgacccaaactaacagaggtcagtacctcagagctttataaattgtaattcatgtgtgtttcagtctgcaacattacagatatcgtacaccttcttacctactttacagactacacgactgaacttgcatcgaacattacacttttgcaatgagctcatactgctctgatatttttcaatgtcctttatcgcctgcttcagtttgctgctgatatcacccaatgcccacaccaaagaaatatgtggccgtggattcttgtaaaactcaggaagaccatgcaatcgatatacttcatctaccataagtatctgcttacttagctctggcaaaccagttcttgtaacttctaatgaaagaaatgaccgcgtacaatcgtcattgacaaagtgctcccacttattgaactccatccagtaccgttgttgcaactggaacttttggcgaagcattgcaacgaaggagtcaatttgatgcacctgaactgcaacaggtcttcctaagcttacatgaaactccctgctcaaaagcactttctcaagcttctgttcatccttgcacaattcagaaagtgcatagtctgcatcaacagcataaagatccggcacaagagatgcagctcttttcatagcaagggccagctgtttctttgcatctgaaggtatgacaacagggatatagacatgtacagcgtagttgccttccacatgtgggaagctccggacacgactcccctgcgccatcgccgagtaatctacgaagttggggggctggaggaggtcgaggggaggtggagggagcaaggccgaggcttctggaacctccggggccccggcgggggcggccgccggctcaccgccgtcagagtcggagtcggacgcgtagttcgccatgagcgcgtccatcggtgcctgggactggaacccacaccaacggcttcctggatcgggtcggggatcgcgttctcccgctggatgccggccgagtcggcggggtcggcggcgcgcacgggacggaacggtggtcg

SEQ ID NO: 14673 - DNA, 1101 bp, Setaria italica
  Peptide Sequence Number=SeqID_80647
tccaggtaactgtaaccgaccagtatgaagccacagtctgccacaaggtcgagcgggatccttcgctcttcaccacctctcagctcacctagcctcaccattcccccatgctcccctatcctcagctgggtgtcacctatcacaccgccaagcaaccgcgctaggagttcctcaaactcatgcatgataaagccactctgcaccccaaaaccgtgcccaacatgaaactggtgaactgggatgttggaatggttcatgtccaccccaacacagctgcggactggatggtcagataagtgaaggatgcagttgcttggattctgatgtgccctgtcctccaatatcttcaggcctttatgtatagcacctacaggatcagttccgccaacacaacagaggtgttcaatgacctgcaatgctattctttttccatgcgatgtcatccgacgcaaggggaaggcacgggttgcggtggtagcatttgtgacaatggctaaccggtcgattgccctcatggagaagacaacaagtgccattgcctgcttcaagagccttagatgtggtccattaggactggcaaccaggaccaagtccatggctggctgcggagcaagactgacagagaggtaagcacgcctttgcccgcttggtgaagctatctgtggtggtgaaagcatggaggagctgctgtattggcagtgctgtcgtagtggcaacatacgtccgcagggataatgccctaggacatgatgatgagctgccactggagctgggataagggcaaagcgaagacatgggtccacatgctcagtcgaagtgtaaggctcaaccgggtcatcatcattgtagcgggcagcacgaatggaggaccttctgttaacacgggatgatgcgatgttgtcatcaaggatgcgaaggattggatccgactggttgtgcagcaatggtggaatcttcaggtcacgtggcagctcagaccattgtgcacggcagatagggcaggtgatattgccatgccggatgttggaggcgatgcataggaagtggaaagagtgggagcattgagctgtgaagattgctggcctctcaacattgtcaaca

SEQ ID NO: 14674 - DNA, 251 bp, Setaria italica
  Peptide Sequence Number=SeqID_80648
ggaggacgtgcacgagctccggcggcgccgcctcctgcacggcgccctgagcaacaagaaggcgctgggcttcttcaagggcctcggccagaacctgcgcttcgtcggccgctactttgccgccctggaggagatcgactcgtacaagcgccacaggtcgctgaggatcacggtgtactggttcgtttacaacaactacaggttcatcgccgccttcctgtaacaaaaaaaaaaaaaaaaaaaaaaaaaaa

SEQ ID NO: 14675 - DNA, 636 bp, Setaria italica
  Peptide Sequence Number=SeqID_80649
tggtcctagttttgtaagtctagttgtacttcccctttcctaattattatttattcgtaaaagtctattgtctatttttaattttagtctattgtattaattctttgtatttattttattgtattgtattggttgtctattcttggtcttgtatttttaggtaagtcgtcagtcttgaaatgctgggatttccatgtattcatcatgaagtcttgccaaaatcgggtacttcaacatatcaatttggaaaacgatttatgccggcatggatctgtggtgctagaaacacatcacccaattggacatcatctccagtagcatatttactctcgcatccatccaaaagcttttcaatggctctgaatcccttgtcaatataatgctgaactattgaagcccgtgatcaaagctcatgctgccctcatgcaaaccaataacagcatagccttgaagaggttgaatgcttgaacaaactatgttagctatctgcaacaagagacagacttgttgaaaaggagatgcagtaagtaggtgctaaatgacaataatgtttgacctctttaaatgatatcaccaatttgtagcaagaatatctgaagattaagagctttcctcttaagatctttaggcaggagc

SEQ ID NO: 14676 - DNA, 1004 bp, Setaria italica
  Peptide Sequence Number=SeqID_80650
catttgctggagtctccaatgaactgtacacattattaggaaacaacaagtttctcaaactgtttaggaaacggcccagttttgaagcagtgactccccttccaatatattatcgaaaagcatgcattttaatttagcatgataatcttgattatttatgatgatggtgcatctggctgatttttaggaagcgcagcttgaaatgctgggatttccatgtattcatcatgaagtcttgccaaaatcgggtacttcaactgcaagaaagcaagcgtgtattgaaaccactttctgaataagcagcaggacaacactaaagcatttaacgtgttgggaatagcagatgaatgtcgggtaccatatcaatttggaaacgatttatgccggcatggatctgtggtgctagaaacacatcaccctgttgatagatgaaaaatatgtaccagaagattagttcaaatcacattgcaaaggcagaaaaaataaaaaatgtttcactgcacattaatcttatctagatgcaagtaagatgacaggttcacaaaagttgggtgaaggagtaagtcaatcaagaagttttaaatgtagtttggacaaaatttctatgtatgatcgaggtggggattcagctttgaggatcgtttcaaagtgattggtcaagggaaagtaacatgcataatatataaatttaggtcagccaaacaaaccaattggacatcatctccagtagcatatttactctcgcatccatccaaaagcttttcaatggctgacacagagagttgaatcaagatagtaccacggtaagtaatattaagagagaaaaaaaggcaggtgacatgaatcacgcttttgtatattttattattgaaggcggatgtatgtagtgatcttaagaactttcatcccaattacataatggctaatataattacattgctacatttgaaaacttcaatcgtgtgactgaaaacaaggatggttttactttacaataaaaaggt

SEQ ID NO: 14677 - DNA, 592 bp, Setaria italica
  Peptide Sequence Number=SeqID_80651
gccgctgccaagctttataactggattgacaatgacagcaacggctgacccaggtaactggggcgctgtcctcatcaacaaccatctgtatgatgattgatgatgtcttgtccaacctttccttttgccaagcttagcggatgcagaagctcaaaagtccaatagaagttgcggcaatacacgctctagatgggtgggttcgataacagtagcatcctccgcttcagcaataaaagcagaacgttgaatagcctctgcaagagaaatttcagagttaaaactacagaaatggaattgctgctgtacttgctagcgagaggttatgcagcgtttttcagaggtgcaaacctgcaacaaatatgcgcagaagctcgcagctaactttaagcgcacttgcattggctgacaggtgaacacatcatgtcagcatatcatgaacaatacacaataaggtcgcaacaaaattagtttcgactgtatagtgtccagctgaaccataagggcgaaaaaaacccagtcaaatacagctttcgctctatccagtgccaatgcttgatcccttaacaaaaacagaaatccagtcctactctta

SEQ ID NO: 14678 - DNA, 695 bp, Setaria italica
  Peptide Sequence Number=SeqID_80652
ttaagtaaatttaacttaaatgagctgattctatttcataaagatacaccaccagagtaccgttccaagtttcctgaatctacacagctttaaaagaaattccctcaagctacaaaacagcccgctgccaagctttataactggattgacaatgacagcaacggctgacccaggtaactggggcgctgtcctcatcaaccaaccatctgtatgatgattgatgatgtcttgtccaaccttttcctttgccaagcttagcggatgcagaagctcaaaagtccaatagaagttgcggcaatacacgctctagatgggtgggttcgataacagtagcatcctccgcttcagcaataaaagcagaacgttgaatagcctctgcaacaaatatgcgcagaagctcgcagctaactttaagcgcacttgcattggcagttgtactccggtttctcctcgaggtctccagagcaggctcgacgtcgatgtcctcgttgccaccgccgcccttcaccagcacctcgagtcccagcaaagatgcaagccgccatggatgaagatgcgactacgggcaactcgcgtgctgcagagacattcgatccggacctgattcacaccagcttgaagatggcgtggagacggcgggcagagaagggcagcggtggcaacgaggacatcgacgtcgagcctgctctggacga

SEQ ID NO: 14679 - DNA, 365 bp, Setaria italica
  Peptide Sequence Number=SeqID_80653
agacaaagtagtaggtagttacctagactaaagcttatgtgtcctaacttaggggatccacctaagtttactccattctttcgatgctccctaaagactcatgatgggtggccgttgtgtgatttcaatgagtatatatacggcccaatggtaatgtggccaacagaggaggaagtgcgggagtttgaaagtgaaaatgcaccgtggccatgtgtgtcctctcctagtgatagatgcaagtgtggtatattggcaacagaaggtgtggtgccttctgaacttggatatggttcgttctatggaaatgcacatggcgattactgggagggaaggacatgtgattgggaagatttttgtggtcgata

SEQ ID NO: 14680 - DNA, 630 bp, Setaria italica
  Peptide Sequence Number=SeqID_80654
gagctgctcaaagcacggaagaaatcgacaagtgcggactcatcaagagggtcaggatctcagacaagagattatgcagcgcccatctgtggagcaatggcagataatgggtcctgcaaagtggtcccaaatgctggcagacaaatatgcgagaaagaccgtggaatagaggtcgctggtgcttcgttttccagaagctcaggatggccgtgtatatgtggtgcttgtacagcagacggttcaccttgtatgaataagcctgtcgaagggaggaagagatgtgcattgcacaaaggtcaaagagggtcatgcacccctacaccatcagtttaatacaggtacggttttcttttttttttttttttcattcagctgctgttttcgtgctgcagttagaaaattgaaacatagaaaaccagcgctttttggggtggggtttatattaagctgcttcaccccaggatgattcaccattcatatttcttttctttaaagttcatcattcacatttcttgtgcctccaagacgctacatattttttgtgattgtattttgatgtatttgcagagagctgaagaatgaatatcttataccgatgttctgaacattagaaacaaaaaaaaaaaaaaa

SEQ ID NO: 14681 - DNA, 959 bp, Setaria italica
  Peptide Sequence Number=SeqID_80655
tagaactggcaaggacttccttcagcatccagatgatgcccaatctttttctgttcttggcattccatgccatgatttatgccgtctcatgcacttcggtccaccttctgttaaacttattgcttcacaatgcctgttggagttgctcacgagaatttcagatcaaagaacatgtactcaggctgaattaagatgctctgtgaagtatttgaagtccattattgcagtgactgagggtttggtgttcagtgaagactgtaaagttgctggaaattgcggtgcctgtctctctgtgattttaggttgggagaaatttggaagccaagagaaggtggcaactagagaatccaaatggtttcggttaataatggaggaatttgctgttgccttgacagctcctggtttgacatccaaatctttcaccaatcagcagaagtttgcagcaaatctagctgtttcattgctcaggctgagccaagtaccagattggttaacatcgctgtttgatagccatcttatatctggcattgtgactaatctttctgctaggaatgttaccgcagaaattgtcaatctcttcactgagctcatggctaggaaatatctgagtcaagagcacattgttgcactgcataacttgttccagatgtgcagaagtcatgtctatgagggaagctccaaggcgcaaatgttggagcagaatgttaaaaaggtcgcgagaagcaccgatgacgtgcttgccttgctctttggcttgatgctgaaccagtgcacggagtctggcgtggttcaaccggagcagcagagactcctccgtgcgattgatctgtttgtccaggagtcgagcgggagagaacaacgttaaggccaaccagcttgtgtacatgttgttcagtgaatctgatacttcttgctctacgttttttaaacctaagttgatattccaaacggggaaaaat

SEQ ID NO: 14682 - DNA, 680 bp, Setaria italica
  Peptide Sequence Number=SeqID_80656
ttttttttttttttccgtaaaagatgaatcgctattgaattgaatgttaagcagcagctggttgaagcaacaaaagaatacagttagccatagtgtagcagctaagcttgtttacaagaaattacaaaaggaaaaggccgtaggtacaatgagacagacagatatacagctacagctagctaaatgctctaaacacttgcagagaagagaaatcaaagtagcgaggttctcttaaatttctggcaccgacaggcaggcatcaaagagccagcggcagtgaccgagaacctccagcaacaagaatattatcacgtgtgtgtcttctaagcgtgctcccagaggcctcaaattggaggccctgctgcacaaaagaatcgattagccagccacttcctttgctgccaaattctaaagtcagtctgcacctgtgctaatcaaatcagcctcgccaccatccaccacctgatccatccagtcctctcttctgtcacctcgtgtgtagttaaaatgcacctaaacaaagaattcgtctgcttagtagaggttagcacctgcaattgccctagaatgtccatggacaaccaagcgacaacttgtcatcccttgcaaatctctgcccggaactgcgctgctgctcaagctgtctactggcactagaaggtagccggattttcactcgt

SEQ ID NO: 14683 - DNA, 1069 bp, Setaria italica
  Peptide Sequence Number=SeqID_80657
cccgaagcatggcccgaccgctaaccgcgtcgttacgcccctagcctcgtcgagctcccgccgcggcctccgcgtctccgccgcgtccgtggcggcggcggcggcggcactgagccgcgtggacgtgctctcggaggcgctcccgttcatccagcggttcaagggcaagacggtggtggtcaagtacggcggcgcggcgatgaagtcgccggagctccaggcgtcagtgatccgcgacctggtcctcctgtcctgcgtcggcctccgtcccgtgctcgtccacggcgggggccccgagatcaactcctggctgctccgcgtcggcgtcgagccgcagttccgcgacgggctccgcgtcacggacgcggtcaccatggaggtcgtggagatggtgctggtcggcaaggtcaacaagcagctcgtctccctcatcagcctcgcgggggccaccgccgtcggcctctgtggcaaggacgcgcgcctcatcaccgcgcggccctcccgcgacgccgcggccctcggcttcgtcggcgaggtgacgcgcgtcgacccctccgtgctccacccaatcatcgcggcgggccacatcccggtcatcgctaccgtggccgcggacgagaccgggcaggcttacaacatcaacgcggacacggcggccggggagatcgcggcggcgatcggcgccgagaagctgctgctgctcaccgacgtgtcaggcgtacttgcggaccgtgacgaccccgggagcctggtcagggaggtggacgtcgcctgggtgcggcagatggtggccgacgggaaggtagcaggtgggatgatacccaaggtggagtgctgtgtgcgcgccctcgcacaaggtgtgcacaccgcgagtatcattgatgggcgtgttccacactcgttgctgcttgagattctcacagatgagggtacgggcaccatgatcactggctgaggtggtcatgacttatggtattttcttgaacctctcttctcatggtcgtgtattttatgggaatgtagacttgactcaagattgcaatgagaatgtcgttctcacatttgtggg

SEQ ID NO: 14684 - DNA, 789 bp, Setaria italica
  Peptide Sequence Number=SeqID_80658
agatatcatccgtcatttgttctggcctgatagcagatatctctttgccatacagattgccattttgctcaaaagggtaggagggatgtcactttttggtgttctgcaatggtccaacaccaaaaagtgacatccctcctacccttttgagcaaaatgaagcaggaatttgagtactggtatccctttgatatccgggtttctggtaaggatcttatccagaaccacctgacgttctgcatttacaaccatacagcaattctaccagaacaccattggccccgtggcttccgttgcaatgggcatcttatgctcaattctgagaagatgtccaagtcgacagggaatttccgtactcttaaggaggccattcaagaattctcatctgatgccactaggtttgcacttgctgatgctggtgatggtatggatgatgcaaactttgtctttgaaactgcaaatgctgctatcttgaggcttacaaggaaattgcatggatggaagaggtggtagctgctgaatcttctctgcgagctggccctccatctagttatgctgaccatgtttttgccaatgagataaacattgctgtcaaggaaactgagaagagctacaatgccttcatgttcagagatgcactgaagtctgggttctatgacctgcagctggctagagatgaatacagactctcttgcggagcggcaggcatgaaccgtgatttactgtggcaaatttaataggaacgtaccaagaacgaaggacttaatacaacccctaatactagtaccaa

SEQ ID NO: 14685 - DNA, 402 bp, Setaria italica
  Peptide Sequence Number=SeqID_80659
cgagcacccaccaggaaaatgtcgtctaatcctgatggaggcaagagctatgctcgcagagatctcttgatcgcaattcaatcagaggctcaaaagctgtgggatgagaaacgggtttttgaggctgaaccaggcaatggtcgtcccgggcctggcgaaaaattctttggcaactttccgtatccttacatgaacggattgttgcatttgggccatgccttctcgttgtccaagcttgagttcggtgctgcgtaccacagactgcggggctccaatgtccttttgccgtttggtttccattgtactggaatgcctatcaaggcctcagcagataagcttgcaagggaaattcagcaatatggtaatcctccagtgtttcctgcagtagaggatgaagtcagc

SEQ ID NO: 14686 - DNA, 3551 bp, Setaria italica
  Peptide Sequence Number=SeqID_80660
tgtaagaacaaaaaatagtaaagaccaaggtaaattttaaaagaaaagtaaaactaaaggtaaaactgcaaagaactggtcagccaaagatcatgaggggttttggcctgtcagatgaagaaattgctaaattccaggatccatatcactggttgacatactccctccattggcgaaggaggaccttaaggcttttggtctaggatgtgattggagacggtcattcataacgaccgacatgaacccgttctatgatgcttttgtccggtggcagatgagaaagctgaagaaaatgggcaaggttgttaaagatatgaggtatacaatctagttaccacttaatggccaaccttgtgctgatcatgatcgagcatcaggtgaaggtgtgcagccacaggaatatgtgttgattaaaatggaggtgatcccacctttcccacctcagttgaaggcattggaggggaagaaagtttacttggctgcagctacactgagacctgagacgatgtatgggcagacaaattgttgggtactgcctgatggaaagtatggggcctttgagatcaatgatactgatgtcttcattctgactgcaaggtctgctcttaatcttgcatatcaaaatctatcaagggtcccacagaagccaacatgcttggctgagatatctggaaatgatctgattggtttgccgttgaagtctcctcttgcctttaatgaaatcatatatgcgcttcctatgatgaccatcctaacagataaagggactggcattgtgactagtgttccaagtgattctccagatgatttcatggcgctgcaagatttagtcacaaaaccagctctgagggcgaagtttgctgtcaaagatgagtgggttcttccattcaaggttgttccaataatcaatatccctgaatttggagacaagtcagctgagaaggtgtgcttagatctaaagattaagagccagaatgacaaggagaagcttgctgaagcaaagcggatgacatatttgaaaggattcactgatggaactatgattgtaggagagttcaagggcagaaaagttcaagatgcgaagccattgataaagaacaagcttctggaagaaggtgctgcagtgttgtacagtgagcctgagaagaaggtaatgtcgagatctggtgacgagtgtgtagttgctctcacggaccagtggtatataacatatggtgaggctgaatggaagcagatggcagagaaatgtttggaaaatatgaataccttctcagctgagacccgcaatggctttgagcacactttgggctggctgaaccagtgggcctgctcacgctcgtttggtctagggactcgcatcccatgggacgagcagttccttgtggaatctctttcagattcgaccctatatatggcttattacaccgtcgcgcatcttttgcaaaatggcaatctgtatggcaaagagatatctgctatcaggccagaacaaatgacggatgatatctgggagtatgtgttctgcaatggtccaacaccaaaaagtgacatccctcctacccttttgagcaaaatgaagcaggaatttgagtactggtatccctttgatatccgggtttctggtaaggatcttatccagaaccacctgacgttctgcatttacaaccatacagcaattctaccagaacaccattggccccgtggcttccgttgcaatgggcatcttatgctcaattctgagaagatgtccaagtcgacagggaatttccgtactcttaaggaggccattcaagaattctcatctgatgccactaggtttgcacttgctgatgctggtgatggtatggatgatgcaaactttgtctttgaaactgcaaatgctgctatcttgaggcttacaaaggaaattgcatggatggaagaggtggtagctgctgaatcttctctgcgagctggccctccatctagttatgctgaccatgtttttgccaatgagataaacattgctgtcaaggaaactgagaagagctacaatgccttcatgttcagagatgcactgaagtctgggttctatgacctgcagctggctagagatgaatacagactctcttgcggagcggcaggcatgaaccgtgatttactgtggcaatttatggacgtccagacgaggcttatcacccctatctgtccacattacgcagagcatgtgtggcaaaagatcctgaagaaagaaggctttgcgattaaagctgggtggccagtggcagacaccccgaaccccactctaagaatcgcaaacaagtacctgcaagattctatagttttaatgaggaagctgcttcagaagcaagaatctggttcgaagaaacccaagaagggagctgcatctgctcctcctccgtcagagaacaagatgagcattggtcttatatatgtgaacgaacactactacggctggaaagagcaatgcttgaaggtgctccagtctaaattcgacagccaagcacgttccttttcaccagaccaggagatcatagaagctttgaagaactgttccatcggacaggaagcaaacttcaaacaagttcagaagctgtgcatgcccttcatcaggttcaagaaagacgaggcgagggaggttggccctcaggctttggagttgaagcttccttttggtgaaatggacgtgctgcaggagaacctggagctgatcagaaggcagttgggcctcgagcatgtagaggtgttgtcggcatctgatgaagctgcccgtgctaaagctggcaagtatgcgtctctactgaaccagaacccgccgtctcctggcgagccagttgcaatcttcatgagcaagcaggaattcgaagcccaaaactgaggtcgcgcttggcttttgagttgtcgtcgttgataacaggagtgttactgtttctctcttttttgtctgcccccggacatgttacagtttgattagcttggagcttttgcggcgcaaacaattttctcttctctgtaaggccagttcatcgtaaacatagacaatgccaaactgatgctacctatcgtgtgtcctaaaattctctggctccattccgtagctccttacatgaacggattgttgcatttgggccatgccttctcgttgtccaagcttgagttcggtgctgcgtaccacagactgcggggctccaatgtccttttgccgtttggtttccattgtactggaatgcctatcaaggcctcagcagataagcttgcaagggaaattcagcaatatggtaatcctccagtgtttcctgcagtagaggatgaagtcagctcagaagtagcagatagccaggctgaccaggctgttgctgttgccccagataaatttaagagcaagaaagctaaggctgctgcaaagactggtgtgcagaagttccaatgggagatcatgaggggttttggcctgtcagatgaagaaattgctaaattccaggatccatatcactggttgacatacttccctccattggcgaaggaggaccttaaggcttttggtctaggat

SEQ ID NO: 14687 - DNA, 385 bp, Setaria italica
  Peptide Sequence Number=SeqID_80661
gtcgtattcgatccgtcggcgcgcggcgacgagcagcatcatgcagtggaaggtgagcgcggcgacggcgaggagaagcagcgtccccgccgcccagcccgtgcgggagaaggtgtaggggaggcccagcacgcccgagccgaccaccgcgatgaagacgttggcgaacgtcttgggctgcgacgacagcttcccgcccgcgccgccgccgtgcagcccgccgtgctgcgggagcagcggcgccgccgcgtcgagccgcgaggacgaggagctcgcctccttgtcgaaccccatggccagccgctggagcaggcggatcgagcggcaacaatcggccggagcggttggagcgtggtggcgtggcctgctggcgtccggggggtgg

SEQ ID NO: 14688 - DNA, 905 bp, Setaria italica
  Peptide Sequence Number=SeqID_80662
cgcctccacgccccactgcgccgcgcccttgacgccgacgggcaccccgacccgcagcacgtcgacgacgagcttctcgttcatgaactgctccgcgaagtgcggccacgtcgccatcggcagccccgctgcgacgcactccagcacggagttccacccacagtgcgtcacgaaggcgcccgtcgccgggtgcgacaggatcgccctctgcggcgcccagcccgtgaccacgagccccctctccgcgacgcgggactcgaagccgtcgtcagagagccaccgctcgaagtcggcgaggttgctgggcttgaccgcccagatgaacggacggtcgctcgcctccagcccttgcgcgatctcggcgagctgcggcagcgacgaacgcaccaggctgccgaagctgacgaacaccacggaccggggcttcttggactcgagccagctcgcgcaccggacggcgtccgcgtcctcgtcggacgccgtcgacggcacggtgctcaagcaacagcggcccgacggtccatatcttcttgccgagggccgcctcataggcatcaacgaagaggggctcgagctccgcgaagctattcaccaacaagccgtcggctctcgcgttttctgccatgacctcgtcggcgaacaccttgccgaatccggagaagttccccggtgaccgcgccctcgacatctccatgtcgatggggaagccaggcacacgcacgggcagctcgtcgtcgtcgaccccctcgaagatcccgtgggtgctcatcaggcgcatgcagaacgaggagaaggcgcaggaggtctccagagcgagccgcggcacgccgagctcccgcgccacggcgccggtccacgggtggcaggtgtcggagacgacgcagctcgccgcggggcgtctgccg

SEQ ID NO: 14689 - DNA, 252 bp, Setaria italica
  Peptide Sequence Number=SeqID_80663
tttggcccaactcccacgccaccacccaccctagaagctgctgatgaaacttggatggaaaggcatgagaaggagccagtggctgaggtgaagccgcctgtggcaaaactagctgttagtgagccagctactgctgaggaaaggccaccacagatggctgcagagaaggagaaagcaattgaggagatggtggctaacctaccgccatcgaaacctattgttaggaagccacccaaggcacctggtcgaccg

SEQ ID NO: 14690 - DNA, 587 bp, Setaria italica
  Peptide Sequence Number=SeqID_80664
tagtttcatctcagctaacagttgcgcgtacactcgctgctggcgcatcatcatgtcctccatctgctgctgctgtggtggcggtggtcggggaaggacggcggccgaaccggtgggccggcggctaggttcggggacgcatcatcaccgtccgaccaagagagttgggaacggttgctgcggcccggtgcggcgggtatagcctcaacaccggcggcccctgcaccggcggctgcccgttgtgcgcgttcatcaaaggtggccgtcgctgcatcttcactggtccctgcatgctactgtagatcgccggcggccattgcatcagcggaggcagctgtgctggtaccctgcggtagtcgtagtaccccgcggctccgactccgaccggcggcgctcgcattgtgtgctgggaagcccgcttgttcggcgcgttggcttgctcgctcgtcggctgctccgccgcgggcctcttgcccgcgcacttgctcgacaacggcgtcagcgccgatgcctccccggagccctccggcgccggcccggactgcgacgaggttggcacctcttcatcgcacgcggaggcagagctc

SEQ ID NO: 14691 - DNA, 498 bp, Setaria italica
  Peptide Sequence Number=SeqID_80665
cgtcctttatacacacgaccaaagccaccttctcccaacaggcaatctttcctgaaattcttggtagcaatggccaactcacggaaagtgaaaatctgtgtggggccatgtgcagtgtttcctcctctgcgaacaggtacagaatcttccttcctagagcccgaagcacgtgattttgatcgaactggtgccgacttcgccgcaggccggggcgacggcgagagcgcgtccaagctcttggcctccttccccgacgaaccggagcacggcaagcagctcatctgcccgttcctgaccactatctcgcaaatgccagccgaacctccgagaaattcagctcaagacttgtcctcccctctcgcccgctgatcagccgggataaaagcagctgaatttgactagatttccggccgccggggatagggagggaggaagagagaggggaagggaagtcaaagactggagaggcgtataaacaaaagcgcaacttggggtggt

SEQ ID NO: 14692 - DNA, 539 bp, Setaria italica
  Peptide Sequence Number=SeqID_80666
acaagctggtctgtttcttggagcctgcagagaaatggtgcagcggtgaagggaggcacgaagggggagggttaggaggagaaagaggagaggagctgcagaagccgcagcccgctgcagacatggttggggcggccattggagtggtggtgctgttcttggctgcagcgccatttggggctaatgccaacaccgactcaaacgatgtaaacgccctcaatgtcttctacacaaccatgaattcgccaccccagctgacgaactgggtgtcccaaaatggggatccctgcggacagtcttggcttggggtcacctgctcgggttccagagtgacaacaataaagctacctggaatgcggcttaacgggaccttgggatacaacatgaatcaaatgactgcactaattcagcttgatatgagcaacaacaatcttggaggcagtgacatcccttacaatcttcctccaaatatggagatcttaaatcttgccagcaataacttcactgggactgtaccttactccatctctcagatggtt

SEQ ID NO: 14693 - DNA, 288 bp, Setaria italica
  Peptide Sequence Number=SeqID_80667
tgcgggtgtggctgggcaccttcgacaccgccgaggaggccgccaaggtgtacgactcggcggccatccagctgcgcgggcccgacgccaccaccaacttcgagcaggtcgacgaccccgtccccactgaggtcgccgagcgcctcccgcagccgccgccgccggcggcgtccaagaacgcgtcgtcctccgccacctcctacgactccggcgaggagtcccacgcggccgcggcgtccccgacctccgttctccgctcattcccgccgtccgcggtcgccgaggaca

SEQ ID NO: 14694 - DNA, 340 bp, Setaria italica
  Peptide Sequence Number=SeqID_80668
tttttaaaagttttctttaaagtttttaattatgagacaaaaatgtcagttcaatagtagagttaaacagatatattcatccttaaatcaataatacagatttagcaatcaaaataaaaactgaaaacaacctgtgctgcgttcaacaataattgatgaaacctgtatgaacagtgctgaaagaatgaacatatcaaatgatgctcagctttgctctactgtagcactgactatatacgcctatactgacagtgtgattcaacgttcctccagcaatatatgttgatttattagattatctaggtgtcctactttgaagcagctacctgcgacaactgac

SEQ ID NO: 14695 - DNA, 976 bp, Setaria italica
  misc_feature (937)..(937): n is a, c, g, or t
  Peptide Sequence Number=SeqID_80669
ttttttttttcttagataagcatcaccagaacaatagcctcttaacatcattcaagcccttataaaaaaacatcattacagaccaccttaacaggcatcttttcatcccaaaagccagcacgtccaataacttattattcatgttagcagttcacgagtctgtatctgaaaggcctatgtttacatctacagagcagcatcacaattactcaacgtagagaatgtgcccaatgcaaacatcctaaacacattaaactcgacaaacatgataatacccacttaagcgggaccttgtggcacttccttactagaggatacctcaggcacaggcacttcatcatcactggattcttctgatacagcagtttcctcaatgacagatccttccagctcatgtgcgtctgcagcaacagactttgactccacagcagtttctccagatgtaccttttgactgagtgtctctgctatccgagtccaacccaagttccttctcaagcttcttccacccagacatcgaattctctgggaacctcttcttcacctcggcaataatctccttggcctcagccaccctacctccctttgccaatccctcaaccaaccctttcattgtcttaaaatctggcaccttgtgcctcttcaagctttccttggcaatgcccaacccagcgtcaaagtcaccatgggcacacagcgctgccaacatgtgcttgtacgtagcagcattcgcggagcaccccttctcagctagtgaatggtacagaaccttggcatcctccaattttccactcctgcaatagctagtcataaggaaattgtaggtgatggtgtctggcttcactccatctgcctccatctccatcatcacctccagtacctcttccggcttcccattcagtccatagttcatggccttcacattgtaagctgccacntcgggcttgcatccactctcgaccatcctccttccacaa

SEQ ID NO: 14696 - DNA, 376 bp, Setaria italica
  Peptide Sequence Number=SeqID_80670
ttcagaagagatcatatcatagcttgaaagctaactgctgtcgtcaatgccatcatgacaagtatgggtactggagcacctattgtgaaggtgtatcatgagaaatctattatcttacctgatgtgtcaagagtgcttgcatgcctctatgagaaggatatcaagtttgagactcacaagacctcttacaggagcctacttagactgcaggcatcgtcacatgctccagttccattctatgatgggcctacatttctagaagaatccagaggaatctgccgctacatagcagaaaaatatgaacatcaaggagatgcattcctccttcggaaggatgccttggagagggcttcagttgagcaatggctccacaatg

SEQ ID NO: 14697 - DNA, 508 bp, Setaria italica
  misc_feature (24)..(24): n is a, c, g, or t
  Peptide Sequence Number=SeqID_80671
ctctcaatccccacccctctctcnccccccttcccttgagcgcgctcgcgagcctgcggccaccaccaccgccgccgtctccgcggcgcgcagatccgtccgactcgcgcggccccagccgagcgcacgtgtacggacgcgacgagaggcggccaccgcccacctcgccggggactcgctcccggatcgctcgcgccagcaggagcggtcgccttgcggtggcgggccgggccgattcgaccgaatccggtggaattctccgtgccgtggtgtgaaatagggtgagttccgtcggattccgtgtgggggaggcgggtttcggggggcaggcggccggaaatggcgccgggggtggttctagggtttggttttggtgttttggcctgaaggcatggcggatggcgtgcggatgaagggcgtggagggcgctggcgctggcgccggtgacgaggaggagaggaatgaggaggtgcgggaggagctggaactcgggctgtctctggggcgg

SEQ ID NO: 14698 - DNA, 716 bp, Setaria italica
  Peptide Sequence Number=SeqID_80672
tttttttaatgccataacgatgaaaatttgattgcccatcgaacaaggtttatatccacatcagtttcagtaccatctggaaatgacaaatgacaattgctacaaatcatccaagaaaataattgctagatcagttctgtggtttgctaaagtacagctctacaccgacaaagctgatgtacaggtcccactcaagatcatatcaattaccaatacaaaaattgagtacataatgagctcatggcatgtgcgatatcaggagaaatcccacgtctgctttcaatctttcgagagcagctctttctatgtccatcagaagatgtgaacaatgtcataagcaaatgaccaaaacagcacgaaggacataaggctgccaaaaactccttcaattaaaatcctgttccaactatcgaagtatgtctggactgaaaactttgacttagctaaaagcccaatagatgcaaccatcattatcagaaagtagaaaacaaatcccatcaggcctgtgaatccccatattccagcaacaaccccaccaatgatcgacaggaatgttcgactgtagtagatggacttgacgttgctcgtgaggttctccgcctggaggatcggaacatcgtcggaggagacgccgccggccgccgccatcgcggtgacaagtttttcgcgtgagattcggtggcggaggtaggagggggcagagatttcgatttggg

SEQ ID NO: 14699 - DNA, 412 bp, Setaria italica
  Peptide Sequence Number=SeqID_80673
aaggaaaatagaataatttagtagaagaaaatttaattagaaggtaacttctatttgtattgcttgccaatgtgaaccttcatttttttgtgcatgctcctatttctattctcataattcagtccaaagcttatgtcatcattttgactttccgtctgtgcatccagttgtatgttttagtcataagtatgtagctgattcatagctgactactttcatgctgaaccatgttttttttaatcttagataattgtatatgtttattgtagatgctaccagctaggaaacttcaagcgtttcttttgcatgatagcagctgaagcaaccgatcttcagttgcgccttgtagaacccttttcccaatgaggtgagtccagatgagatggcaaaggttggctatttttcgttaagg

SEQ ID NO: 14700 - DNA, 756 bp, Setaria italica
  misc_feature (682)..(682): n is a, c, g, or t
  Peptide Sequence Number=SeqID_80674
ttcgttctaggtcccgcaccgaactttccacgccgcttagccaggcagaggcagcaaccatggaccgccgcggcgaggcgagccaccggggctggagctcctcccgcggccgagactggcgaggacgcggacgcggacgaggcggcggcggcggaggccgcccctccccaccacctccttcctctaccgcctcctccgcggcggtcaaccttgccccagcctctaccgtcgacgacgcagcgccgatcatgggcacctgccccgacatgtgcccagcgagggaacgagcgcagagggagcggctgagggacctggccgtgctcgagcgggtgggcggcgaccccgcgcgcacgtctccttccctcgccgtcaagaagttctgcagaactatatcttccacaaatgtaatggcatcagatatacgtcctctaccggttttgcgagaaacaatggattatcttttgcatttactggattcttcagagcatccatttgagacaatccatgatttcatctttgataggacaaggtctataagacaagacctcagtatgcagaatatagtgaatgatcaagcagttcaaatatatgaggatgtggtaacatttcatattaggtcccaccagagacttgctaggtcttgccaggattcagatgcttcattgtgttttccctaaaaacnttgggagcagctaacaaaatagcttgctttcactgttgatatgtatcacgtaatccatgagagtgattcccaca

SEQ ID NO: 14701 - DNA, 825 bp, Setaria italica
  misc_feature (203)..(203): n is a, c, g, or t
  misc_feature (245)..(245): n is a, c, g, or t
  misc_feature (777)..(777): n is a, c, g, or t
  misc_feature (813)..(813): n is a, c, g, or t
  Peptide Sequence Number=SeqID_80675
gttgaccaaatattcactccatgcacatgatatcaggcaggataactagatatgctcaaatggttgtttaggttctcttttgttctcaattcggaatagaaattatgtttttttctctgaattattgtttaatgggtcataatttctgtcaggcatttgctaccagttttaactcacttggtagccttttttttaaaaaaaanttggccttgttatttgttatatttctgcatacttttttttcncagctggagcaatatcattgcttccagtgcaaacttatattaaagtatttctctttatagctttatctaatacctgtctacttcctaggtaatccatttcatataagctcccaccagagacttgctaggtcttgccaggattcagatgcttcattgtgtttcctaaacatggagcagctaacaaaatgcttgctttcactgtttgatatgtatcacgtaatccatgagagtgattcccacagcaaaagagaggccgaatattattccttctatgtgcttctacatttaggctgcaagatacccaaaatggtagattcactctctttgtggtatagccgattagctactcaagttagacaatcgaaggaaatgatatttgtgagaaatttattgagatgctaccagctaggaaacttcaagcgtttcttttgcatgatagcagctgaagcaaccgatcttcagttgcgccttgtagaaccttttctcaatgaggtccgagctagagccttaaatgtactttaaccatagcggntacaaaactccaacaccaccctttggaacatttgcnggaatcctgatg

SEQ ID NO: 14702 - DNA, 796 bp, Setaria italica
  Peptide Sequence Number=SeqID_80676
aggaaatgatatttgtgagaaatttattgaggtaacttctatttgtattgcttgccaatgtgaaccttcattttttttgtgcatgctcctatttctattctcataattcagtccaaagcttatgtcatcattttgactttccgtctgtgcatccagttgtatgttttagtcataagtatgtagctgattcatagctgactactttcatgctgaaccatgttttttttgtttcccaagcaaggaggccgaatattattccttctatgtgcttctaacatttaggctgcaagatacccaaaatggtagattcactctctttgtggtatagccgattagctactcaagttagacaatcgaaggaaatgatatttgtgagaaatttattgagatgctaccagctaggaaacttcaagcgtttcttttgcatgatagcagctgaagcaaccgatcttcagttgcgccttgtagaaccttttctcaatgaggtccgagctagagccttaatgtactttaaccatagcggctacaaactccaacaccaccctttggaacatttgtcaggaatcctgatgattgaggagttggaactagaaactctttgtggaatatgtggacttgaaatcaggacaagcgaaggtatgaaagcttttgcgcctaaacagacaagcttcagcctaccaacatccatgccccgaagtaatggcatttacatctcaagggaggttgaaagatgaaaagagcactgtaattcaggttcaatagattgtgtatcaagaaattactttgttctacgtct

SEQ ID NO: 14703 - DNA, 1064 bp, Setaria italica
  Peptide Sequence Number=SeqID_80677
ctccagattctaagttatatgccagatggctttgttgcatgtcgctcacgctattcaaatgatgttgagttcagcccgattcctgaaaatgtggataatactgcagacgaagatctatggatgcgcctgaacaaaggttgtgttactgatcttgacatgcttgagatgactcctggtctgaaacgtgagacatccttgcgacgagacgcaacatcagctgcgccattggaggagcctactgacgcaaggtgccagaagttagaaaaggactgtatctctgacccgcaacagctggaggaatcaaatgcgagatgtgaggccctcgagaaggagtgcgacctgctgagggacaagaactcgtccctgcagcaggagctctccgagtccaagcgcgaggctgaccgtcttgttgccgagaagcaggctgagttggaggactcaaaggctacgtgcgctttgcttgagagggagctctccaagtctaggcaggatgccgagcgcctcgccatcgagaagcaggagttggccggggagctgggcgtggagaggccagaagatggaggagctgaaacaggacatccgggtgatcagccgtgccttctcgcagcgggaagggcagctcacttcgctgtacaccaagtccaaggcgatcctggaaaactgcaaggcctcgcacgtcgctacccttccttgatggctgagttgagacgcgtgcacactgctgggtaagaaatgtctctgcacagactgcatctatgcgctggctataggtgtgctggatctcttgtgtgtgaaaagtttcagtgggatacgggtaaaaagtgtgtgcaagcgatatggaagttgcgtgtaaacctgaaggaaacatcggctgcctctgccactagtgttgagttagcgtcaaatgtatttgacctgtgaacgtggtgtgtttgttaagtaatgtttataaaccagtcagattgccatgagtgtacaaacattcacaaaaaatccctgtcccaagtgcactgtaggtcatctgttgctgtgaccactattccgtactcaatgctttgggtacg

SEQ ID NO: 14704 - DNA, 805 bp, Setaria italica
  Peptide Sequence Number=SeqID_80678
caatgccagcaagagccttggaaggagccattttggagaatccaaacttcaatgttcgccgctgatcctggttgctagggcctgcgatgttttttggtacaacaccctctgctggggcctctgaattctcttgcttctgctgcttcctgtgagcatctgccctgaaggtccattaaggaaattaaatgttccacaaacatcctaaatttctaatgcatatcttaagaatagccatagcttagtattggataaaccattaagtattaaaggatacagttgggcaatttttgctagttccttctcttcacgttgttgttcacgtttctgcctgtcatcgcggctaccactgctgctctgcatttctctcatttctttaaacctcttcctatggttgtggtcatatgagcttaggtgactctcaaattcatgagccagcttgtattgcttattgcagaggctgcaaaagaacaccttctgtatctccttgacttcgctgcggattttgtgctcgcgctctgctatgacctggattgtcatgatttgcaccaagcagggaaaagaaaccaccaaataaaaagtgcaccaaatgctcaagaatcttgatggttgatgctagccatccttacaccatgaaagcacagctatctacaagctatatgatgcttacgactagaaacaggtttccagcatgtcaagcatcaacccagaaaatatacttgaagaacatacagaaattagatcaagatgagtgcatacctcacgcttctttatatgttcctcagtctcctcaagctcaatattcaat

SEQ ID NO: 14705 - DNA, 1369 bp, Setaria italica
  Peptide Sequence Number=SeqID_80679
ttttttttagacaatacaaaataacaaaggtataacattaaaagcaaacgacggttgtacagactacaaaggcggattgcaaattgaagggcattgtccgattgcaaggacgaatggtacaaatagctttcaaaatccagcaagttgcaaggacgaacggtacaaatagctttcaaaatctagcataaacaatacagatttcattgtacaatgtaccctctacttcatacaattcacagggttgtgttcaagttcttgtttgttcacgtgaggctgtggagatgccaccatccatagcgaggccaagccagtgacaaaacagaaggcgatacatacatggcatctcacgtttccatgggtctttgaagtcgttttccttgtaagtgctaccactctccagcaaagatcacgagtcctcatcactgtcattgccaaagactgaagaaacttttgtagcaacctttggtctcttgctggcattgccaactggagccttggaaggagccattttggagaatccaaacttcaatgttcgccgctgatcctggttgctagggcctgcgatgttttttggtacaacaccctctgctggggcctctgaattctcttgcttctgctgcttcctgtgagcatctgccagttgggcaatttttgctagttccttctcttcacgttgttgttcacgtttctgcctgtcatcgcggctaccactgctgctctgcatttctctcatttctttaaacctcttcctatggttgtggtcatatgagcttaggtgactctcaaattcatgagccagcttgtattgcttattgcagaggctgcaaaagaacaccttctgtatctccttgacttcgctgcggattttgtgctcgcgctctgctatgacctcacgcttctttatatgttcctcagtctcctcaagctcaatattcaatttctttctttgcacgttctcttcagatgtgaagaagtcatcttcctcttgctttccaacacctaattttgcatctctgatgtcagctcttattggctctagtataccttgctcgttcttgccgagccccttgccggtcttccagcccatcttctggagcagccggaagccgacgttggacgcggtgagctgcgtgtggacggaggcctgctcgaggccctccgtgtcgaggttctcggtcggccggtggctcatcggcagccggaactcctcgaggtcgtcctcctcatccagatccactcggtgaccgccgccgccgccctccgccttcccacgctgcttgctctccatgcctggccgcgagcaagggagaaggaggaggggggcggggcttccacgttggggtttcgtaaggggtggggaagaaggagc

SEQ ID NO: 14706 - DNA, 233 bp, Setaria italica
  misc_feature (224)..(224): n is a, c, g, or t
  Peptide Sequence Number=SeqID_80680
gtccaatcgtccaaggctccaagcccctcgcaagctcgcagctcgcacccacccatcgttccctttccgcaagccgaccggccggcaggccggcgaccgccgccttcgccgatggcctcagagacgcatcctagccgccatcgccggcttcggaaggcctcagatctctctactgtcaccaccgcctccccactctccaaacgagtacgtattcggtcgaaagntgacagtta

SEQ ID NO: 14707 - DNA, 374 bp, Setaria italica
  Peptide Sequence Number=SeqID_80681
tcaaaaatgtgattggcgagcaatatatgttacagaaggcaaaattgggacacggagcacaggaaacttaagttgaaagcaaagatggtacagctgaagatgagaaataagaaaacaatacaggcctaaaaagggaaatcgcaatcccgacaggcagaattcagagtcatgacaactgtcctcactttccaaaagaattaactataagagtaggcggcctcagctgcttgatcatagtagccaatatattttctacacgtgcagcatcctcagaatatttacctatcttcattcaacaacttcacaaagcccatttgattaaatttggaccacaactctgctgaccctagctgaactcaatacaatgcagagaa

SEQ ID NO: 14708 - DNA, 634 bp, Setaria italica
  Peptide Sequence Number=SeqID_80682
ctgatatttcactttgaagatgaagaaaggcagtcgctatgtgttgcctaataatgtctcgagtagtctgaagctagagactcctatgccaggaatcactgtctcaaagagtatctgccaaaatactaggccttatgaccctgccccatatgccttctgtagcaagttgaagcaaataacaatacaccagccaagaaagcactgtgatctatgccaaatttccatattaataagctaagtgtataatgcacatttagccgtatggtctctaattgattctaggcagaatataaaagctgattgaagacggaaggcataacattaaatcagttaaaggatatttcaacgagaggaaaaacatatgattcttgtctgtgaaggtaatgatatcaccgaatggaaccgttacaaatgtgcaggtaaaacctccaacgaaaaagctggtagcgcagcctctggaataacttcatcaattgcagatgcatcctcccacaaggaccgtagcattgccagcagatctgttgatggaattcttttcttcagactctctctgactgtttcatatcggtttgagaacaaagcttgtgcaagttcaatgagacgtctttctgaatcaggaaatattattaaataa

SEQ ID NO: 14709 - DNA, 2652 bp, Setaria italica
  misc_feature (53)..(53): n is a, c, g, or t
  Peptide Sequence Number=SeqID_80683
aaaagactgattgaagacggaaggcataacattaaatcagttaaggatatttnaaccacagaggaaaaacatatgattcttgtctgtgaaggtaatgatatcaccgaatggaaccgttacaaatgtgcaggtcaaaaactgtcctcacttccaaagaattaactataagagtaggcggcctcagctgcttgatcatagtagccaatatattttctacacgtgcagcatcctcagaatatttacctatcttcattcaacaacttcacaaagcccatttgattaaatttggaccacaactctgctgaccctagctgaactcaatacaatgcagagaagaacaatttgatggacgcttgaaaagcaaaagaggatgctgagagctcaaccgtgtcaaattaagtatactagtataaatttggggggtgttgttcggttcaagtgtactccagatttacatacagtcgacaacatgctacatgccctaaaccatatgcagttgcgcacctcactctaaagagtgtcaattggatgttaccaatctgtgcatagctactgcatatttgggttttgctctttaatttttgctagttttgcatttgtgagcttatccaatatggggggctcaagagggattgggtcaagacatctctcatgtgcagcattgttcacctctttgagtaaaaagctaatagctgcttcatcatccacaaactccttaagggagctcttgagaaattccatatccaactgaatctgctgaaatccacttctgttgaaagtttgaagacggacaaattcttgcaagcttttcaggcagagcttgaggacagtagatattacagattcctgtgtgtattcaactttggtgaatatttccattttttgctcaaataactttgctaggtggttttctaaaaactgacttctagcacggtgtgtgtttgatcggttcaacatgtcttcgcgcatcggattgcttctagatgaagttgtgctgccagtgctatcagaatgccgatgccgccgaatttgaccaggtaagatctgcttgacttcagataccacaccattgaactcaaggagaagtagatcaacaaacatgtttacttcccgtggttccttgtgctttatccaaacaggtgttgtaaatcgcttattaagaagtttggagatcttctgagtcttcatatttatgtaatggtgtaagaatttctccccagatgaacgatatagccgacatatctctccaggtacgaaaggtggtccgtattcataactacgtgcaccacctccagaaaacgaagaagccagctcctctgtgactttaggaattgttgtttgttcaatgtaaacacagagttgcgcaagcataagcaccaacactgttgggaccttatcaatttgcacagaatccagagcacttgactcctgtggaaaacccttgcttctcccagagagcacatgaaaatgaccatcaagtttctggaaaaagtcttgaaacccttcttgtacccaatcaataatcaaatctctcagctttacaagcaactctgtattgccatctatcagattatgaaattcctgcaggagatctatgcatccttgagatactttgattttgcttgtatccatagcagtttgcagctgtgactcttctaatttctcatttgatgttgaatgtgttctgaccaatgcacctgatatttcactttgaagatgaagaaaggcagtcgctatgtgttgcctaataatgtctcgagtagtctccaacgaaaaagctggtagcgcagcctctggaataacttcatcaattgcagatgcatcctcccacaaggaccgtagcattgccagcagatctgttgatggaattcttttcttcagactctctctgactgtttcatatcggtttgagaacaaagcttgtgcaagttcaatgagacgtctttctgaatcaggaaatattattaaataagcacggaatgtctttgaaatgtcgccgattgaagcctgtgtagactcattctggagattcaagagacaatcctctaacttctcaagtagattagattttaggttgtccactggaaagttcaattgtttaaggagaactacagcttctgctctctcttcaataggttcagaatctgagtataacttcgcctgaagatgttgtataactaaatccattgcctcctcagatgcctttttacagtcttgaaaggatgtatcaccataggcctcaaaaataggttttgctccagtaaaaaacctgacagcatctgcatatgcttctgtcttgatgcatttgttaagccgagttggaaggtcatatatgaattgaacttttcgaagaagattgcgtgtacggtgtaatttctctatgtttcccttttgtcgaaaagagatgtattcactgtgtcactttttgactgcactgatgttatctttgaaaggagctgctccatacctgcctccattccaacaatgttagtcttcatcctttttatagtgtcagttgcactaataaacttgttatagttctcatacactagcatctgtaagtctgtgtctaggttcttgatctcagcagccatcttcacatgcctctgtagaagaccttccagattggattgttgtaccaggacattcatg

SEQ ID NO: 14710 - DNA, 958 bp, Setaria italica
  Peptide Sequence Number=SeqID_80684
tggaggcacacacccgccgcagccgccatgtcgaagaccggggaccagcagccggcggacatggaggtcgaatcttccgctgtcgccgaggagaagccggccgtcaggttctccatcaacgttctggagctcatgagggaggcgcagatgcagcacggcctccgccagagcgactacacgcggtacaggaggtactgttctgcgcgactcagaaggctgtacaagtctctcaagttcctgcatggccgtggtaaatacaccaggaggaatataactgagtcaacagtcacagatgtcaggtatctccacatagtattttatatggctgaaagagcatggagtcatgccatggaaaagaaaactgctggtacaaatgcacaacaacgtatctacatgttgggtcgatttaggaaagcagttaaatgggcatcacttttttcgcaattatgctctgtgaaaggagattcgagaacatctctggaagctgaggcatatgcgtcatatatgaaaggtgctttgttttttgagcaagacaagaacatagaggcagcgatgataaatttcaagaatacaagggctgtatatgaggagcttgggaagtatggcagcatagaaaatcagcttttatgccgtcagcgcattgaagaagtggagcctatgattgatttctgttcacacaaacttggtggatcatctttacaagcacatgaactcctagatactgctaatgatcttctcaaagcgaagatggaggctgtgttgtctgagacaaggtcacagcaggcagcttcaatgaccgagtttaactggcttggtcgcagatttcctattacaaatgcaaagactcgtgtctccattctgaaagctcagcagcttgagaaagacttgaacggttcagcgacagaatcgattgcttctgaataaaaaagtcttggcatttttgataaaatatttctgc

SEQ ID NO: 14711 - DNA, 746 bp, Setaria italica
  Peptide Sequence Number=SeqID_80685
cgatctggtccccgatgttgacgaagaggcggccgctcctggtggggccgacggggacccactcggcgccgcccctgaggaactcgagcccgccgacagcgtcgtcctggaggagcaggatgatgcccccggcgtcggtgtgcgcgcgcaggccccacactcgctccgggcgcgggcagggcgggtacatggcgaacttggtgccgacgaacggcggcgcgaaggcgccggcgacgtggcctccggggaggcccaggttgaggctcacgcactcggcgaggcgctccgcgagggacgccatctgggcgatgtacgcgtccagcgcctccctggccgccggcgcgatctccgggaagtcggcggcgttgttcctggggcggtgctggatgaagtaggtggactcccagtccacctcgtcggagggctcgccgccaccgtcttcggccggcaggttcctggcgacgttggaggcgtagaacttggcctcgaggtgctcctcgtagtggccgtagacgaagcgcttcacctcgtccatgagcgccgcatccacgccgtggttctccacccagaagaagccccagtccttgcaggcctcgtggagccgcgccatggtccacgacctctgctcttcgccgccgccgaggccgccgaggtcgatcaccggaatctccatcggtcccgtcatcgcctcgttttggaacacaacactagtgtacttgtatctccttgcagtgtctaaacttgtg

SEQ ID NO: 14712 - DNA, 373 bp, Setaria italica
  Peptide Sequence Number=SeqID_80686
catccgcacgcctcttgattttttgacgtctattcttggcaaagtttccagcagcaggtccttgagacttgctgtcaaagtgacggtgcctgagaaatgcactttgttccaccagtgcttcaaccccatcttcgatgccactctgctggctatcttggcggtgtcacgggtgcacacgtcgaagatattgaactgaccaatggagcccgaccacctcctctttcttgctgctctgacgtgccggcgaagagatttcagcaaactcagaggctgcccccagtccaggcagtacaacaaagcacacatccaggttgaccctacagccctgcacactgatacgatctccaagacaaccaaaaggaaccccaaacaa

SEQ ID NO: 14713 - DNA, 331 bp, Setaria italica
  Peptide Sequence Number=SeqID_80687
gtttctccccctcgtcgcgtcctcgtcctctcctctcctctcctgcccgtccccctcgcttgtcttctcccccacctcctgctccgcgctctcgtctcacccgccgcaggcagcttacccgttcgtctcgatcggctccgccgtcccagcccagccgacgccgccccgctccggccggtcctcgtggaggtgttaggagttgtttgggctgaattgatcggtggaagactggaagctgcacattcacttttatctcagatttgaaaagtgattaattgatctggcaggctgataaattgtcagataaataatgtctttcgttaggcaagca

SEQ ID NO: 14714 - DNA, 376 bp, Setaria italica
  Peptide Sequence Number=SeqID_80688
ctgacaggagatagagggggtgatctaaatcataacaacttgaggggtgaaagaaatacacacatgagaggcggtgagtttggctactcactactcatacatgtatcatataatgaagagaacctttacatgtctctgccacaaaataacgcaaatatgtacataattagcagaaaaatggtcacaacttgaacggagcagaaatgaataagggcataagaccgccagtctgtttgcgtgtgcatgccaattatatgcaagtattcaaagtgtatttcacaattaagcaaatgagcctctacacatactgcattgcctagaaacatggggacaccaaaatatcacaggttgcaaacaacatgtaaaaacatgagag

SEQ ID NO: 14715 - DNA, 273 bp, Setaria italica
  Peptide Sequence Number=SeqID_80689
aagcaccttcgtcgtcgtagttggatagctgtggatcgattgtctttacaaattccagcagctgggcccatgtgtctctagatatggctttattgtgcctaacctgtaaaaactggcaccaatgatccagaagaggccagttcctttcagcaaatagcaactgccacattccaatagcagtctccagtgagagagacttttgaccctgttcacttgggcaagggaaaagggtcaaaagtctctctcactggagactgccacattccaatagca

SEQ ID NO: 14716 - DNA, 610 bp, Setaria italica
  Peptide Sequence Number=SeqID_80690
caccttcgtcgtcgtagttggatagctgtggatcgattgcttttcaaattccagcagctgggcccatgtgtctctagatatggctttattgtgcctaacctgtaaaaactggcaccaatgatccagaagaggccagttcctttcagcaaatagcaactgccacattccaatagcagtctccagtgagagagacttttgacccttttcccttgcccaagtgaacgcgaagttgtagatctcacgaaacttatctgggtgagaaaagtgtaaacacacaggttggatatggaaaagaaaaggaactcatttcactctacacatctaattctaaagaaaaggaaaccctttgccatgaatgcagactttctacgcattgcagaataactttctgaactaacaagaggccacatctaaactccaatagtagagaagttttccttgaaaaaaaggaaactcactgtcatcttttagctcagctcgtaatgatggtaactttccacgaaatttctcaattgaatctaccccaattgactgcagtccaccaatgaattcctggcgagtaaattcacacattgtggcggctttcatgtgccacgatatgacaagcatg

SEQ ID NO: 14717 - DNA, 1336 bp, Setaria italica
  Peptide Sequence Number=SeqID_80691
tattagtctaacttgtcctactatttcctaattagtctagttcttcctagttgtagtagtagtacatagatcagcaagatgtggactggagaatacacaaacagaagacatggcaggatgagggatagtagaactatataggtgacagggatacatctgaaacaaatcatatcgttaaccagagtcccaaactcttgattgcatttttcgataagttcacgatcgcaggttcagagccaccacttcccaggctaagttacgttttctccgcgtttatcagcaaattcagtcatgcaatgatatgccaaacagtttggcgggtggattgagcaggagtgccaacatcaggtcctgggcatcatatagaccgagatgaatcatgtttgtacagcccaaccattgcttggtggagaacggagcctccccatcgtcgttcacttcttgcgctgaacgaatccgttctcggtcaggtactccacaaactcatctatgaggtagggccaagcaccttcgtcgtcgtagttggatagctgtggatcgattgtctttacaaattccagcagctgggcccatgtgtctctagatatggctttattgtgcctaacctgtaaaaactggcaccaatgatccagaagaggccagttcctttcagcaaatagcaactgccacattccaatagcagtctccagtgagagagacttttgacccttttcccttgcccaagtgaacgcgaagttgtagatctcacgaaacttattgtcatcttttagctcagctcgtaatgatggtaactttccacgaaatttctcaattgaatctaccccaattgactgcagtccaccaatgaattcctggcgagtaaattcacacattgtggcggctttcatgtgccacgatatgacaagcatgacaatatcctgaggatccacctgcagatcattgcaaagttgagatactccctccaccatgatcatatcagcatcaggttctttgtatctattgaaaatgtcttcaaggtgccgagtattgaccgcagaaatctgaggctggctatagaagaagtcaaaagctccttccaagtgccaatcactagctttcagtgcctgaagggcaaccttctcactggcgccagttatggtcatgaactgctgcaccttgtcgcggtttcctctccccagcttatacatcttggatcggagcgcgaggaggacgccggggaggggaggggagggggcggcgctaggtggggtttcgccgtgaagcttgagctcttggcctctagcgctctctcgccgcctcgccctccttttattcccctctccttctctctctctct

SEQ ID NO: 14718 - DNA, 1676 bp, Setaria italica
  Peptide Sequence Number=SeqID_80692
aagccaccgtatcgagtgaagatcagaatgataggcatggcaatgacagcaacatccagtgtgctgaatctgatggtgcttgtaaaccaatgccagaaatggactccaagagcatcaacggtgagtgccccgatgaagtgcctgaaattggatccaagagcagtaatgatgacaactgtgggagctctgaagaaatgcccagaattggaaccaagagcagtagcgacgacaacagtgagtgtgctgatcggagctctccccgtgccgtgctagatatctcagtgtctggtagtgtggactctgatgacagcgcctcggtggagcagtcagcagaatcaaaccataatgtgcagtggaggaacctgatcagcgggctaatacttagaagaaagaagtccatgggtagagcagtgacattccctcagagatccaagagcagagggcttagagggtatctggagagaatgcggagtggtaagaaccaaatggactgcagtgccattgctcctgagatccttcctgagattgggaagtggagaccatcatggcgaagctttgactacgaagagctttgtactgcaactgacagatttagttcagaaaaattgatcggcaagggagggcatgctgaggtatacaaaggacagcttgctgatggacaatttgtggcagtgaagagattaacaaaaggcggtaacaaagaggaccgagttagcgacttcttatctgagcttggaataatagcccatgttaaccacccaaacgcagcacagctcttggggttcagtgtggaagggggcttgcacttggttttgcagttctcacctcatggaagcctggcttctgttctgcatggtacaaaggaacccctgaagtggaaagtcaggttcaacattgcacttggaattgctgaaggattgctgtacctacatgaaggatgccatcgccgcataattcacagagacatcaaggcttctaatatccttttaactgaagactaccaacctcagatatcagattttgggcttgccaagtggcttcctgaccaattgactcatcttgttgtatatcccattgaaggcacattcgggtatatggccccagaatacttcatgcatgggatcataaatgagaagacagatgtgtttgcatatggagttctacttcttgagctagttacagggcggaaagcagtggattcctccagacagagcctagtgatatgggcaaaaccgttgcttgatgcaaacaacatcaaagagctggtggatccttccctcggcaacgaatatgaccctgaagagatggtgtacatcctagcagtggcatccttgtgcattcaccacagctcaacctcacggcctagtatgaaatcggtggtctgtttcttgaagggagaccgggagtcacttgagctggtcagaaggcctaaaatcgtaaagcccctgatgtttgactcatgtgattcagaagattacacacgctcaagctacctcaacgatctcaaccggcacaacgcaacttgccttggagcagtgaactttgaattgagtttggacagattcaccgtaattttgtacatcattcactatctagctacactgtgatcctcccgctttccacgtaggtttttaagattgtatggattgatgtgagggatcagttatcattcactc

SEQ ID NO: 14719 - DNA, 460 bp, Setaria italica
  Peptide Sequence Number=SeqID_80693
cgctcagagcgtaacgggtgaggaacttgatgacatccagcgggaagtagaagacaacattgtaaagccagatgacaccggcccagccccatccaatacccagctgcgccaccaagaaagcaaagaccagcaagaacccaggacgctccacaaacgaccagctgcgagaccgtgtcacaaagatgagggcttgacttatggtgctgacttgaaggtacacggcagaggcaagcttctgaaaatcatcctgggcagttttctcaaggctttcgacaccaaacactcgctgcagattaggaaccatgacaagggtgatcactacaccgattgacatgtacaataaattgcccaaaaccttaagatgcttaagaaactatttggtccataccgggaagaagtcagtcttgtatgcagcccagaagaaaatgactgtcatcatggccaaatatccaccaagaac

SEQ ID NO: 14720 - DNA, 327 bp, Setaria italica
  Peptide Sequence Number=SeqID_80694
tagttgttgtagttagttaactttcctagtcttattctaggtcttgttggtagataatggtaccatcgttgaggatggcaattatcatggccaaatatccaccaagaactactccagttgcaaagatctcagctaacttccagctatcaggctgtggagatggttttactctgtccttcgagatagtcataatggtaccatcgttgaggatggcaattatcaggaccataaagggtagggaaagtacaaaacttaccaataatacaagacgacaaagaaagacaataaaagaccaaagacaacaaataacggaataggtaaattaga

SEQ ID NO: 14721 - DNA, 515 bp, Setaria italica
  Peptide Sequence Number=SeqID_80695
agagcagccgccgaaagctgccactgccccccagccgtggcactcttctcttcttccctccagcaaccaagcgaggaaggaggagcaagcctgttccttcggcacggcctggtacctccctcttgggcaacggcgatttcttgaagcagaaaggtgggcgtagcttctccttggaagctgcgtttcgttgcttcgatctgagctaaggccgagctgaaattggtctcctctggaggcggccatggtgaggagcgcaggcggcgtccacaggcgggggacgtctaccaagccaacaagttgctcacgcgaaattgattggattgcagaagagcatgatgagcccctacaagcttctgaatatttcgacgatgaagaaccggaagggacagtttcattcaagaggaggggggcatggtcacaagaggaagatgagattctgattcaaatggtggatacacattcctcaaaagattggtcaagcattgcacgggctgtgcccggtgtagtcgaaagca

SEQ ID NO: 14722 - DNA, 414 bp, Setaria italica
  Peptide Sequence Number=SeqID_80696
cgaggccgacggcggcgtgcggcgggaggcggcgcgagcgcaggacggcgtgcgcgaagggcatcccggggccgacgccgaggacgttgtgcaggtcgatgccctggtggagcggctcgcgcgcctcctcccagcggaggtccggcgagaggcggaggatgcgcggggagggagcgcactcgggcggcaccacgcggtcccaggtgccgttggtggcgccgccgcggccgcccatgttggactgccccgcaagcaggaacaccaccgtccgccttcctcctccggcggcgaggaaggaggcggcgaggaagcagacgaggaggaggagcagtgtcgctgtcgccattgggtggcgtcagagaggcacgcggtacgggcagtgtttgttgcagtggtagcttttatttataaaag

SEQ ID NO: 14723 - DNA, 1743 bp, Setaria italica
  Peptide Sequence Number=SeqID_80697
cctgtcaaagtaatgaaatataaccatgtccataatgttgtgatatctgctgatgccaaaggacttttggactactggtctccatctaccctcgagttcccagaacaagaagtgaggtttcgtgtgaaatcagatacaaatctatttgaaattgcaaaatgcaagacaagtgtttctgccatcgaggtgagcaacgatggcagtcaatttgctgtcacatcccctgatcgtaggatccgggtattttggttcaaaactggaaaactaagacgtgtatatgatgagtccctagaggtggcacaagatcttcaaagaagtgatgtcccattgtatcaccttgacgctattgattttgggcgacgaatggctgtggagaaggaaatagagaaaacagaaaatgttccacaacctaatgctgtctttgatgagagcagcaactttcttatttatgctacccttttgggcataaagattgtaaatttgcacacaaataaagtttcacgcatcctgggtaaggtagagaacaatgagaggtttctgaaaattgctctataccaaggtgacaaaggcaacaagaaggttagaaaaattccttcagtagcagccaatgtcaatgatactaaggaacccttatcagaccccacgctgttatgctgcgctttcaaaaaagcatcggatatatctctttagtcgtagggaacctgaggagcctgaagatgcaactaagggtagagatgtgttcaatgaaaaaccaccaccagaagagcttttggctgtatcagatttaggaaaaactgccacgacatcattgcccgataatttggtgatgcatacttctatgggtgacattcacttgagactatatccagaagagtgtccaaaaactgtggagaacttcactacccattgccggaatggatattatgacaatcttatatttcatcgtgtaatcaaaggattcatgattcagactggggatcctttgggggacggcactggcgggcaatctatctggggcagtgaattcgaagatgaatttcacaaaagcttgaggcatgacaggccttttacactttccatggccaatgcgggacctaataccaatggttcccaattctttatcaccactgtggccactccatggctagataacaagcacacagtgtttggtagagttgtgaaagggatggatgtagtccagcaaattgagaaggtgaagactgacaagaatgacaaaccatatcaagatgtaaagatcttaaatgttacagttcccaagacataagcttctgccgggtcagtagggttgggacattgtgcctgaactacctccttagttcctttgttggactttggtgacccgctgaagagaaggtgctcgcgttttacaagaacttctgtatgctttggtgaaatgagcacggctaaagacttggtcttattgggaactatgaaccatgcagttttcaggattgatgatatctctggtgttgtccgagaacttcagttagctttgagtcctgaatcatggggcagagggtttatacctttgtaacatggaattaatcttgcagggtgaaatggaaaaaaaaaccgtggagctagctgtttaatttgtggcaattgtatgatgtgtccagtgtatgatcatgtacgtttcagagttgctggaacgtctctatcgttgtactattactaaagaaaattttggtatgaaaacttttagtaacaaaaaaaaaaaaa

SEQ ID NO: 14724 - DNA, 340 bp, Setaria italica
  Peptide Sequence Number=SeqID_80698
acggacttgtgcaggtaggagcggacgtcgtcggcgttgagcggctggaagccgtcggcctcagcggcgaacgcgtcaaaggtggcagggttgctgtcaaggctgcccattttcagatcgattggttgtttgatgatgatgatgatgatggttaatgacctagctgctagccgaaactcgaaaccgtggacgcgtgatgagcttgtccaatcgagctagcgaggacgatgatgagactcgcaagctcgagtaagctaggtgctaggtcattaaccatcatcatcatcatcatcaaacaaccaatcgatctgaaaatgggcagccttgacagcaaccctgc

SEQ ID NO: 14725 - DNA, 323 bp, Setaria italica
  Peptide Sequence Number=SeqID_80699
ctccgctcatgatctcggtggtcttcttcctgatgagctcccacgcgcttcgcacatgcctctcctcttgcagcgacgaccccaccgcgaaccgcagcacaaacttgccgccgatcacggtgtgcgcaaggtacgccttcccggtcctgttcaggcgctccatgagctcacggttagctgcctcagtttcctcctctgtcatgccagcgtggggcttgaccctgaagcacacaagcgcgaagttcctcggcacaacgacctcgaaccggtcgtccgcacgcacccattcctcgaacaacttggccatggcgacgtcgctgcgt

SEQ ID NO: 14726 - DNA, 289 bp, Setaria italica
  Peptide Sequence Number=SeqID_80700
agcgccgaagcggccgaagcagccgctggcggcggtgacgagcgccaccgcggccagcgagagcagcgcggcgaggacgccgcagcccagcgccggcgtgcgccggtactcgcagcggaacacgtcggacctcacgaaagccttgttcttgaaacgctccgcggcgaaccccagcacggccgcggcgaggccgagcacggcggccgccgcgcacacaaccaacgcgcgtttctgcatcgcgtatcggctggcccttccggtcgctctcctctctctctgtgaagctctg

SEQ ID NO: 14727 - DNA, 1906 bp, Setaria italica
  Peptide Sequence Number=SeqID_80701
tttttttttttaaattccactggaaaggaaattatttattgaatacgcacacaatttcgagatacatggatgcatgaacaaaaatccagagcttcaacaccccggaaagggtttattcgacgaccgtctttctcttgcaacaaaaacaacaaccacactccagtaccatctgcaagaacaacaatgtcagaataatcagcacccatcctcatgcacgcacttcttctctccctccttcatgatctcatcggtggtcttcctgatgagctcccacgcgcttcgcacgtgcctctcctcctgcagcgacgaccccaccgcgaacctcagcacgaacttgccgccgaccaccgtgtgagccaggtacgccttcccggtcctgttcagccgctccatgagctcatggttggccccgtcggcgtcctcctccgtcgtcatgccgccgccgtggggcttgatcctgaagcacaccagcgcgaagttcctcggcacgacgacctcgaaccggtcgtcgctgcgcacggattcctcgaacatcttggccatggcgacgtcgctgcggatgtgctcctggagcctggtggaaccgtaggtccgcatgaccatccagagcttgagcccacggaagcggcggccgacaccgacctgcatgtccttgaggtcggtgacggtgccggagtcactggcgtcgttcttgaggtactccgggttggtctccagggagtcggtgaggcggtgcgcgtcgcggacccataggcaggtgcagtcgaggcacgtcatcagccacttgtgcgggctcatgctgatggagtcgacgcgctccacgccgtcgaggtggtgccggaactccgggcagatgcaggcgctcccggcgtaggcggcgtcgacgtggacccacgcgttgaaccgggcggcgacgtcagcgatggcgcccaccgggtcgacggcgttcgtcgacgtggtgccgaccgtggcgcagacgtaggtcggcacgaggccagtgtcgacgtcggcctgcatggcctcaagcagcttcgacgggtcaaggccatagtccgtgtcggcgccggtggggatggacctgatgttggccgggtcgaagccggtgaggcggcacgccttgaagaaggtggagtgggtctggtcggcggcgtagacgaccagccgcgtgatcccggcgacgccgctggagcccatgcgtcgcagcgcggcgtcgcgggcggcgacgagcgtgaccagcattgcctcgctggtggtgccgaggatgacgccgccgccggtgccgcggccctcgccggcgtcggtgcggtgcatcatgaagctctcgggcaggcgcaggagctgcgcgagccagtcgagcgcgagcacctccatctccgtggcggccgggttcgcctgccaggtgaacccgacggtgttcatggcggaggcgatgagctccccggcgatggccgcagcgctgttggtcgcagggaagaaggcgaagaagttggggctggcccagtgggtcatccccggcaccacggcctcccggacctccttcatagcgatgtcgaacggtgcggcggcgctgggtggtgcgcactgcagcaggcggctgaggtagcccggctcgacgtcggggagcacgggcagggactcgacggacttgtagtagtcgtagatgaagtcgacggacttgtggaggtaggagcggacgtcctcagcgttgagcggctggaagccgtcggcctcagcggcgaacgcgtcgaaggaggcagggttgctgtcaaggcttcccatgtctttttattggctgtggcagctaatgccctagatttctaggaaggaaaagcttgatcgagctgtgcaagcaacagaaagctgttgcgttgcaagctcgagtgaactgagactcggaagctcgaag

SEQ ID NO: 14728 - DNA, 238 bp, Setaria italica
  Peptide Sequence Number=SeqID_80702
cactgctggtagctcacctaaaacaaatctgcaccggcctgcgtcgttgcacagtgcagactttactctgctgcctccctgcctgcgtcccagcttcttcttcgtctccgtctctcgcgatgcgcgcggaggtgctggtgctcgtcgccgcggcggccttcctgtcgctcgactcgctcagcgacgtcaggcggctcgagataggggacggcgacgtcgagctggtcccgctcgacgg

SEQ ID NO: 14729 - DNA, 990 bp, Setaria italica
  misc_feature (1)..(55): n is a, c, g, or t
  Peptide Sequence Number=SeqID_80703
nnnnnnnnnnnnnnnnnnnnnnnnnnnnnnnnnnnnnnnnnnnnnnnnnnnnnnnttttttttctttatgttatcactgaatcactcaacataatcatgataattatttacatgctaaattttggaagtaaaatatagcgaaatttgcctagatttctaaaacctatggcacgtgcatctcctctagtaaagattaacaagtggcattttcatgaaaagttcactagaccatcttaatttcaactgcagaaacacaaactgagatgtccgagctccttattttcaataataatacagctcagaagagcgacatacagaatctgaggacgtgattcacaaaccaattatggtgtggtgtcaagaagcttctggatgtcattctctatcttcaaaggagaactcgtcggagcatatcgcccagcaaccttgccatctttatcaacaagaaatttggtgaagttccatttaatgccatctccaaggaagcctcctttctgtgatttcaagtacttgaacaatggtgcagcgtccttaccattcacattaatcttctcgaaaataggaaactctgctttgaacctagtacaaactgtctcctgaatatcttcattgctgccaggctcttgaccagcaaattggttgcatggaaatgcaagtatctcaaggcctttttgtctgtacttgtcatacaagacattcagctctttgtaattcgaattagttaatccacattgcgatgcaacgttaacaataagaagaacctttccagcgtagtcactcagttttatatcattccctctaatatccttgacggcgatgtcgtagatggaggcgggcaggtcgtcggccatgtccgggaccgtcggggcgagggagcgcgagacgagggcaatggcgagggcgaggacggcgagggagaggaggattcgggggccgctgagcccgcctcttgtagccgccgcaatcatgggggttggcggaggtgggcgg

SEQ ID NO: 14730 - DNA, 478 bp, Setaria italica
  Peptide Sequence Number=SeqID_80704
ttcgcccgttgcactttgcagacattgttaacaagataagcccctaaaacaaaataaaaatcacatcaagcaatgtgatctagtgagtgcctatgccgtagaaaattaagcaagtttaccttgctaaaatggcacaagctaaagaaatttcggaaacatcaagagccaatagggtaattcgtagggacataaatgaaacgttgtatggtctttcacctattgtaatgtttaaatatatgaaagatgcaccataccagtgtacagaaagtaaaataggtgcagtttaatagttcatggtgatatttggccacccccaatagttctcatggctcacttttgtttctactataaagggaaggggtgaaaactaagcatatggctgaaacattagacctggcctgtgaatggtgttcgttattgttttgtacacttcagtgggacatatatagaaatgctagaagggaagagaaatgtgtct

SEQ ID NO: 14731 - DNA, 577 bp, Setaria italica
  Peptide Sequence Number=SeqID_80705
acgaccctctccttccttccttcccttggttcccgtccaatccccctgctttctttatccctcccgttgctgatcaagaacttgctttcttgctctgttcgatcgtcctgggcttggttcttgccgcgtgagagctcaagcagcgtgtccttttcgcttccgcttgatccggccttgcccatccacttcaatccaatcgaaactcctttcttgatcccaaagggacgagaaagatccaggagaaacgacgacggcataaaaatccggagacaacggccatggccatgcggccagttggtgctctgttgttttccatgagcaccgccgtaccatccgcttaagggaccaatcatcatcttcatctgttcttggtagcacctgaacaactcgggcctcgaccaatcaatcgccgtcagaacaagataaagagctggtagcagaagctctttgcaccagaggagagaatgcggcagatctcatcgctgctgcagggcctggcccggtcgctgtcggtggggagggagaggagaggggacggcggcggcggcgaaggcaaggccgccgcgccggcggtgct

SEQ ID NO: 14732 - DNA, 349 bp, Setaria italica
  Peptide Sequence Number=SeqID_80706
ccttccagacgagcaggctgatgtcgaactggccggcgttgtaggcggaggtcggggagatggcggcgcccatggcgatgcggctgttggtctggatgaaccccgagcagaggaggttgtagcaccccgtggtctggtacgcgtccgtggtccagtaggtgaagaagcgcggcgagttgtcgccgtagagctgcgggctgacctgccacccggcctcgatggtgttgaggtcgttgccgaaggagcccgcgatgacccagatctgcgacaggctgaactccgacgccgtgctcaccttgggcgcccacacgttgatgctcgccttcgcgccgtagtactcgtcgcccgg

SEQ ID NO: 14733 - DNA, 817 bp, Setaria italica
  misc_feature (1)..(34): n is a, c, g, or t
  Peptide Sequence Number=SeqID_80707
nnnnnnnnnnnnnnnnnnnnnnnnnnnnnnnnnnattttcctgttaattcttcagctattcaaatttcaacaacaccacggtcacaagacagctgtttcaataagaaagatcgaagtagatagtagttcacaacggacgcttatttctaatgaagatttgggcacactatcgaaaacacactgtgcaatggacatatgggtcgtgctatacatatggagaaagcactctatgtgaaatccgtcatgtatacataactcaagaaacaaaacaaaatcagaacaagcaacgaagccgctcatcacatacaccaccactcgaaaccttttggctctactactacccgcccgcgtgtagctgggctcaaaactatcactagtaataatcatcttgctagcttagcaccgaatgctacaaccattttccggtggcggcgttgatcggcggtcgaactccggcggcatcaccggcgatccctcctcctcctccttctatgtatctatgtagtatttgctttagtctcttcttcatgcatggttatgagcttcagctactaggggcagtgcacgttcctgccaggcccgccgtagtagaagtagttcccccatgcgcggttgtaccctccccggctgtcgtagcagccggggtggtcggcgacgagccggagcgtggcggcggggacgaggctgttgtcgccgtccaccacctgcacgttgcggaagtaggcggcgcggttgaagccttcccgcgggaagtggccgctccccatctgcgtgggcgtgtgcgagcccgacggcgcgagttcacaacctcgccgcc

SEQ ID NO: 14734 - DNA, 982 bp, Setaria italica
  Peptide Sequence Number=SeqID_80708
ggggcgttttactattacagctcatcactacctgatgaccttgactagtattgcactgacctcacctggcactgaaatttgttttagagcaccaaaaaagagaaaagaaaaacgaagaaattacatgatcgattctcccttttgagaaatgaaccttttgcaagaaaaagaaaagaaaggaccaacatggaaattaaaccaaaaaagtatcctcctctgcatgactgcctcctgttcttcaatccccttggcccttgcattgctgctagcctgctacgtgcatttgacgttcctgcctggcccgccgtagtagaagtagttcccccagacggcgttgacgccgccctggatgtcgtagcagtttgggtggtcggcggtgacgtggaatccggcggcgagtggcacgaggctgttgtcccagtccaccacctccaggttcctgaagtaggaggcccggccgaagccctcgccggcgaagtggccgctgcccatctgcgtggccgtgtgcgaccccgacgcccgcgtgttcaccacctcgccgccgaactgcaccatgctcgcgtgcgacgccaggtggctgaacagcagcgacggccagtaccccaccagctcgccggagccgaactccagccaccagttgccgtggttcggatccttccatatgagcaggctgatgtcgaactggcggccgttgtagacggaggtgggcgagatggcggctccgatggcgatccggctgttagtctggacgaagccggagcagtgcaggttgtagcacccagtcgcctggtatgcgtcggtcgtccagtacgtgaagaaacttgctaacctatctccatacagttcagggctgacctgccatccggcctcgatggtgttgaggtcgttgccgaaggagccggagatgacccagatctgggagaggctgaactccgccgccgacgccaccttggccgaccacacgttcaggctcgccttggcg

SEQ ID NO: 14735 - DNA, 692 bp, Setaria italica
  Peptide Sequence Number=SeqID_80709
cttccgcccaaggaggccggcctcgcctcaccctccactcccgcccgccccccgcccgatccatccacccaataaagcgcctgtacagatccaaccctaaggatccggatcgccctgccccgcgccgatccgcgcgatttgattccaatttcctccgattttttttgccccggatttttgttgcgggttttctctcttctccgatcggggtgctagggtttggggcgcgaggggcggcgcattccagggccatcgtcgtcgccggggctagggtgtttatctcaccgggggaacggggtgcgagccgaggcgcgatggagcagaagaagaaggtgacgatcccgctggtgtgccacggccactcgaggcccgtggtggacctcttctacagccccgtcacgcccgacggctacttcctcatcagcgccagcaaggatacaaatccaatgcttcgtaatggtgagactggcgattggattgggacatttcaaggtcacaaaggtgccgtttggagcgcttgtctagacaccaatgctctgcgtgctgcctctggttctgctgacttttcagcgtatgattctcactccgcaaagtccccttggtgttaccttgattataatccttctgcaggagttccgtttcatctgacgtctgcccaccaatctctagctgaaaaaattgtttgttatctc

SEQ ID NO: 14736 - DNA, 754 bp, Setaria italica
  Peptide Sequence Number=SeqID_80710
tagggtactaacctaattaggttaccttagttacctaacttagtacgttgaagtaagccaagatggtcggtttatcacgacaactgatggctcaagtgtgaagttttgggatgcaaatcactatggacttgttaaaagttataatatgccatgcgcagtggagtcagcttctcttgaaccgaagtatgggaacaaatttgtcactggtggtgaagacatgtgggttcgtgtctttgatttcttcactggagaagaattagcatgtaacaaggggcaccatggtcctgtccactgcgtccggttctccccagtcggtgaatcttatgcatcaggatcagaagatggcaccatccgaatctggcagctgggcccagctaatagcgaagaccaggaggtggcaaatgcaaacgggaagacgaaggtcggggtaaatgatgtcgcacgcaagattgagggctttcacattcccaaggatgggcaggcagaggggtcgtgatgcatcacttcgtgccggcgatgcttgccgcgagactgttgtcaatgctctgttggtggtctgttgtgttgtaataggggttgggtttcatgtaacagcacccggacgaaatggtggaattttgtagggagcctccttactccagttgcagcagagtctgggaaaaaagatagacaaatacaagcaagttaaaattgacttttgaccatgtctttattctccatgcgaaggtgaaattgatcatgtttttacctcgtt

SEQ ID NO: 14737 - DNA, 1856 bp, Setaria italica
  Peptide Sequence Number=SeqID_80711
cgctccctcgcactccgatacaagaagctcttccagatttttccctcttcacctctcgatccgtaggccgtagctctccgtctctcaccatcaccacccagtgtacatacatatcaaaccacagatccggatcatccaatcccgcgcggctcccccaatttccccctgattttccgctcctttttggtgctagatagagctactgcgccgcgccgttttgaggttttgcgcggcggcggtgaggcgttgaagctagggttaggatttccggggaagcggggggatggacaagaagaaggtggcggtgccgctggtgtgccacggccactcgcggccggtcgtggacctcttctacagccccgtcacgcccgacggctatttcctcatcagcgccagcaaggactcaaatccaatgcttcgtaatggtgagactggcgattggattgggacttttcaaggtcataaaggagctgtttggtgctgttgtcttgacaaaaatgctctgcgtgccgcatctgcttctgctgacttctcagctaaagtatgggatgcgctaactggtgatgagctacattcatttgaacacaagcatatagtccgggcctgtgctttttctgaggatacccacctgttactcactggaggcatggagaagactttgcgtgtgtatgacatgaatcgtcctgatgcagcaccaagagagcttgacaaatcacctggttctgtccgaactgctgcttggcttcatagtgaccaaactatattaagttcctgcactgatatgggtggagtaaggctatgggatgtgagaactggaaaaattgtccaaactcttgaaaccaaggcttctgtcactagtgcagaagtaagccaggatggcaggttcatcactacagctgatggctcaagtgtaaaattttgggacgcgaatcacttcgggcttgttaaaagctatgatatgccatgcaatgtggagtcagcctcacttgaaccgaagtccgggagtaaatttgttgctggaggagaagatttgtgggttcatttatttgatttctttactggtgaagaaataacttgtaacaaagggcatcatggtccagtccactgcgtcaggtttgcacctggtggtgaatcatatgcatcaggttcagaagatggcaccatccgtatctggcagcttagccctcctaatgctgatgacaatgaggcggccaatggcaagccggctgatggggtgaacgaggttacaaccaagatcgaaggcttccacatcccaaaggaggggcagactgagggttaggacagcatggcatctctggcatgcttagcggtgattggttcgtattgggaggagattgccatcagagctgccgtggtcattcaatttctcccatcatcagcgcctgtttgctacgcaagggtatagcctggcttcttgagtcatcacagcactggggaaaaatccatatcccttcgtaagcaaatggtggtgggtttttgtatggggccctcgcttgatagaacagtatcaacatagtgactgtagtgtcgaaaataaacctgagaaaagagttgggtagtttaggtaccgtgtttgcgttcaggaaagtggagtattttgtatcgccgctggtaaccgtgattgtgttgacccgttttttgcttctctgttttccaatccgtacgatgcatgagggcttcactgacctgtaagttttgtagcttttgaagtttgaatgccgattttgaagttgtccaaaaaaaaaaaactaaaaaaattcctattattccctttcgttaagtctaaatttggtttggttttgggttttttttgttttattttggggttttctttt

SEQ ID NO: 14738 - DNA, 630 bp, Setaria italica
  Peptide Sequence Number=SeqID_80712
aattcatatgttctgtttaaaacaatagacagaaatggcaccactttggtttatctatgtagagtttaaactgtcaaattgtaaagaggacaatctacgtgtgcacagaagtgatgtacccactgttgcaaattaaaaaaagatgcattacagatgttgttatgtttgtaatgattctttttgaggcttcaagtatctacttatgtactgcagtggatacataggctcaccttatttgaaagctgcagaagcattccctgatagtacataattattttgccactttttgtgcaatgccagatggcttatcgatgccatgtcatctgagtaggaattcataatggaaagtagggattgcgatatttgatatgcttatggcaatgcttcataaaaagggtatacacctttcgttcagtagtaatatatgaagtcataagttccctatgcacacctttcttctcagtgccatgctgttggattaattcataggaacgcactgtaccatctgatttagcagtgagcatgaatacttggttatgtcatatgtttgttgagaagacaaatttttgtaatatatgcaactaatctgaatatttgatttactatagatccattgagggatatcttttg

SEQ ID NO: 14739 - DNA, 879 bp, Setaria italica
  Peptide Sequence Number=SeqID_80713
ttacaaccaggacaatcagcaagcatccatccccaacccacgtgcatgtcagtcagcaaggtaatggattcatgcctgtacaaccaatgtcaaggggacagccaggaggaatgcagttgcagccggtcactggcacacagctggtgcctccacagccacagcctatgcaaatgaacatgcagtacggtgtaatgtaccccttgatgcaaatgaaccaaagaatgggcatgtattcccagccggcgtttggaggaggattttatgggatgaaccaagcgcagctgtatggtgttcagatgtctggttacggatatggccaaccatctgggggctactatattccaaatgctgcatatgcgtatgctagcgcaaatgagcattcccagaggatgaacggcctttcagttcaaaatggtggtccaaatggaacgacgacaaataagcagagcagacctgaagattcactcttcggtgatcttttgagcatcgccaaaatgaagcagagcaaacctgcagctggtaaggttggcagttgacaagggcaattgcgtggatacataggctctcctaatttgaaagctgcagaagcatttcctgatagtacataattcttttgccactttttgtgcaatgccagatggcttatcgatgtcatgtcatctgagtaggaactcataatgggaagtagagattgcgatatttgagatgcttatggcaatgcttcatagaaagagtatttatatgtaaattcttgagttcagtagtaatatatgtagtcattagtttcctatgcacaaaaaccatgcagaaacagaggattcctggtgtccctagccatatacacctcccattaactccccccccttaaaaaaaaaaaaa

SEQ ID NO: 14740 - DNA, 298 bp, Setaria italica
  Peptide Sequence Number=SeqID_80714
tactcctacattctaagcctaaaattaaaattgatagatttccacgctcttgccactacatcatcatgcaacaagcttaatttgatttttttcccttttttgggttggggcgaggggaattatcttgcttgtagcagtaacgcttcatataaaacaaagtaactcgtttccagaacaaggccaaatggaagagctttaatccaaaaaaaaggtgaattctttacgcaaaaaattgaattagagttctgtgtttttccggatgaacttgaaacgggcaccaaagcacaaggattcaaag

SEQ ID NO: 14741 - DNA, 314 bp, Setaria italica
  Peptide Sequence Number=SeqID_80715
tccgcaccagccccgaggagcaccccatcaagttctcccagcttgatgatggcttggagttttcctccttgggtaaaagaagattggaataaaagctcgtttaattgatcaggtgatcagcatctagcaatataagccttgtctcagcaaaaaagtttccctgcaatatacacacttcgagttggctggagtgatagaaggacattgcacttgttgaactagctgaaacctcgttacataggtggttaaattttcagaattctgtatttgagttgcttcagcatatgttgtacttgtgaatttctgcaagtagg

SEQ ID NO: 14742 - DNA, 733 bp, Setaria italica
  Peptide Sequence Number=SeqID_80716
gacatgactaacagatttagagcaaatgccacattgacttaaaaagctaaaaggctagaactgtacaatgtcatgttcggatagtatgtacaatatgatagcatgacaatcctaatggcgttcagaacaccaagcgtggaaatcattgggttgacgaccatatttggcaacgtcagcacggagggtgcaacgcgtaatgcactgttgctgtgtgagagagcagggcatcctgaagttccagtagcagagggcagccctgagcccctaaaggtgtgttagctcatgatattcccttgtgttaggagtatctgtctatttgttagagggaacactgcaagaaactcgctactcttctccaacaaatctacaatgctataactgcctctgtttcacggttcatgtacctttcatgagaaatcgaatttgacatgtcaacctgtgtggcttgaagattattaagaaaaaataagttggcaaagcagcagtctgaacttaaccaggatcatggaatcatgtcaagaaaatttgctgaatgaagaaatgaagtttcagaattgaagtgcaagtgtctgcatgcgcaaagctttttaaatagaattgatccctatgtataagaaataaaggaatatgtaatatctacattgtgtatatggatgattgactctatttgctctaatattaaatgaacacatttcatgtggttttcgacctgaaacaaaaaaaaaaaaaaaaa

SEQ ID NO: 14743 - DNA, 506 bp, Setaria italica
  Peptide Sequence Number=SeqID_80717
aaaagggaaggaaagcctcgtattgctgattttgttcatgggtcagatggcattgggaatatgtttcttcctgaacccacttctaagaaagttgaggaaagtgctgctgagttcctggtcaataaggtctctgagtttccaggagaggtctcagtacttgctttggggcccctgacaaatgtagcattggctatcaaaagagacccatcttttgcaagcaaggtgaagaaaatagttgtactgggtggagctttcttcgcggcaggaaatgtcaaccctgcagctgaagcaaatatccatggagatccagaagcagctgacattgtttttacctcaggagcagatattgtcgtggttggcattaacataacaactcaagtctgcttgaaagatgaggatctcttggagctaagaaactcgaaagggaagcacgcacagttctatctgagatgtgcaagttttacagggattggcatgccaagtctgatggtttccacggaattttt

SEQ ID NO: 14744 - DNA, 1922 bp, Setaria italica
  misc_feature (1883)..(1922): n is a, c, g, or t
  Peptide Sequence Number=SeqID_80718
taactaaaaaaaagttttaaacccttaagacaaattaataacaacaacttcgagttggctggagtgatagaaggacattgcacttgttgaactagctgaaaccctcgttacatagggtggttaaattttcagaattctgtatttgagttgcttcagcatatgttgtacttgtgaatttctgcaagtaggaaaatctttgatattatactctagcaaaaaaaaaggaatattcagttaggttgtttatcaatactgatttgaactcttcacatgctaattacttagttctaacatctattgcttgccttaaacacctgtgacagttgtcagttttttaagcttgcatttgcttgccttaaacacctgtgacagtagtgctgctccagtattagtgatgcttgatttaatttgttcttgcaaaataatttgatattaccttagaaacaatggtgtttttcttcacgcggctccgcaagcagaaaccctacgggctgacatcaatttttgggcctcaaaatgtctttcaaatgctgttgaggagcccacggatgtctacgatcttaatactatatagtttttggctgaaagggttttgcttgccatgtcaatgcaggtttatatgtggttttgctgagtaagcttcttttattcaggttctgaataatatatccaaatcaacagcgaagattcaaggacgactaaataaacttacgtctttggtcttcttagcaatgcaaacttattgacctgttacaaccaaacattcgatgacatgactaacagatttagagcaaatgccacattgacttaaaaagctaaaaggctagaactgtacaatgtcatgttcggatagtatgtacaatgtaaggttaccatgtgttatccatttgtaatatctgaattcttaactgcatgtccttttctcaaaaggcattcaaattataaggtatcaatctacacatctcactgtctgttctattcacattcctatttctagatgatagcatgacaatcctaatggcgttcagaacaccaagcgtggaaatcattgggttgacgaccatatttggcaacgtcagcacggagggtgcaacgcgtaatgcactgttgctgtgtgagagagcagggcatcctgaagttccagtagcagagggcagccctgagcccctaaaggtgtgttagctcatgatattcccttgtgttaggagtatctgtctatttgttagagggaacactgcaagaaactcgctactcttctccaacaaatctacaatgctataactgcctctgtttcacggttcatgtacctttcatgagaaatcgaatttgacatgtcaacctgtgtggcttgaagattattaagaaaaaataagttggcaaagcagcagtctgaacttaaccaggtaaaggctcttctttctcgtctgaacttgctatataggttggattggatgacctgtagttgaatgacaaccaaataccattctagctgggacagaggctgctttggttggttcgtgtgagatgttgatgacaatatatcttgagcaaaatccctgtgcaagtatttcataacttatacatgtaatccttcagtgtttctatgtagatcagaaaaagatattcacatgcattatttaatataattttttaatttaacctgcaggatcatggaatcatgtcaagaaaatttgctgaatgaagaaatgaagtttcagaattgaagtgcaagtgtctgcatgcgcaaagctttttaaatagaattgatccctatgtataagaaataaaggaatatgtaatatctacattgtgtatatggatgattgactctatttgctctaatattaaatgaacacatttcatgtggttttcgacctgaactnnnnnnnnnnnnnnnnnnnnnnnnnnnnnnnnnnnnnnnn

SEQ ID NO: 14745 - DNA, 1590 bp, Setaria italica
  Peptide Sequence Number=SeqID_80719
tcgttcttctattcttcgttcttattaaggtccttccttgtcttccttgtactaagtaagaggaggaaggccaaaaggaagccaaaaggccaggccaaaaggcagaatccgcgagacgagacaccgagagagagagagagaaagcaggagggagagaggttgcgtccctccacttgccatctcctctcccgcttcggcgctcttcttcgtcttcctcttcctccgcttgcgaagggctctccagattcagattggggcggcgtttgcagtaccagtgctgcgtgctgctgctcctgacgacgacgaggagagggcgctcgggatggggcaggacggccaccagatccgcggcaacaagctcatcatcgacacggatcccggcatcgatgatagcatgacaatcctaatggcgttcagaacaccaagcgtggaaatcattgggttgacgaccatatttggcaacgtcagcacggagggtgcaacgcgtaatgcactgttgctgtgtgagagagcagggcatcctgaagttccagtagctgagggcagccctgagcccctaaagggaggaaagcctcgtattgctgattttgttcatgggtcagatggcattgggaatatgtttcttcctgaacccacttctaagaaagttgaggaaagtgctgctgagttcctggtcaataaggtctctgagtttccaggagaggtctcagtacttgctttggggcccctgacaaatgtagcattgtgtctgttcttgcttaggctatcaaaagagacccatcttttgcaagcaaggtgaagaaaatagttgtactgggtggagctttcttcgcggcaggaaatgtcaaccctgcagctgaagcaaatatccatggagatccagaagcagctgacattgtttttacctcaggagcagatattgtcgtggttggcattaacataacaactcaagtctgcttgaaagatgaggatctcttggagctaagaaactcgaaagggaagcacgcacagttcttatctgagatgtgcaagttttacagggattggcatgccaagtctgatggtttccacggaattttccttcatgatcctgtgagcttcacggccctagttcaccctgagtacttcaccttcaagaagggtgtggtgagagtagagacccagggcatttgcactggccacactttgatggatcagggattgaaaaagtggaattcagagaacccatggtcaggctataaaccgatttcggttgcatggatggtcgatgtgccaaaggttatcagcttcataaagaagctgctcatggcaccatgagaaattgcaaccattcaacaacctctggcgctttctgatgtccacgaaaatttgaccaagtacagagcctctatcccagctaccttgtaagttgtaactagttcctggacataggaagctttcttcagtgtcctgagaaacataggaagcttccttgtgaaaggttacgcaacagcctcagaaaccacggagtaaattctgcatatgacagcattgtttcacacatttgtatcagtacattcgagaatgaaatgaagtttcccgcatacgcct

SEQ ID NO: 14746 - DNA, 641 bp, Setaria italica
  Peptide Sequence Number=SeqID_80720
tttttttttttgtttttttcaacattgcaagatggatattgtgagatcctaagctgcgacatacaaaactgaaagcttgcgccgaaatctagacaacaagattacaaacgatccggtcatgatcaacaagacatcttagtacaaacacacccttcagctggcatcatcatcaccaagcttcaacctatccacacacaaagacacagctaacataatccagcagcaataggaagattcttattgcatctgtacaagaattacgcagcagcagcagcaagcagaggaacttaatctcgctaaagctagtttctgaatgctagtagacctgatagcttcgcccaattatagcagcgaaattgcggcagacttgctagattccaactgtcctggttcgcaccatcacgatcctgccttcctctccttctcattgcaggtcgtagacggtggaatcggcggcgtagcagccgagcacgcgcacgaacacggcgaacttctcgatctcctggatggcctcgcggacgcgcgggtcgtgggcggcgcccgcgcagtccacgtagaggacgtgcgggaacgcgcgcagcgtcggcgcgccccgggcgctcgtgtccaggatcatcaccggcgggcgggcacccgcaccg

SEQ ID NO: 14747 - DNA, 219 bp, Setaria italica
  Peptide Sequence Number=SeqID_80721
gtgcgctgaagcagctgcagtttggcttgcggttgcagcagtcgctggggcatgagcagcaccccttgcaactgccgcaggggttgcagccggagcagctcggcatggtacaggtgcagcagtttgggctgcactggaacttgcagcatgaggggagcccaaagcagctgcatttttggtttgcagcatgagccgcagttcggtttgcagcacgtgctg

SEQ ID NO: 14748 - DNA, 469 bp, Setaria italica
  misc_feature (42)..(42): n is a, c, g, or t
  misc_feature (50)..(50): n is a, c, g, or t
  misc_feature (456)..(456): n is a, c, g, or t
  Peptide Sequence Number=SeqID_80722
atccggtggcacagcacggattccggcacccagaacatcganacccttcngtaacttcttgcacgaccaaacacacccgcacgagcacccggggcacgaaggcttcggaacgctgcagcacgatctccagcagcagctgctgccgtcttcaccctcgcagcaagacgactggcacttgcagcaggagggtgcccccttgcagcacgaggactggcacttgaagcactgcttgcaggagcagcacccccgaacaggttcgagcacttccacgatttaaagcacccgaagcaactgaagcagctggagcaactggggcaggtgcaggagtagcattccgcgcaactgcaacattgtgcgctgaagcagctgcagtttggcttgcggttgcagccggagcagctcggcatggtacaggtgcagcagtttggctgcactggaacttgcagcatgaggganccaaagcagctgc

SEQ ID NO: 14749 - DNA, 2059 bp, Setaria italica
  misc_feature (1998)..(2059): n is a, c, g, or t
  Peptide Sequence Number=SeqID_80723
cccgccgcagccgaatcctcccgccccgccgccggcgccgccaaccgcttcccgccgaggtggtcgccgtccggggggactcagccgcggcgccgcgctctctttccgcgccgaccgtccttcgccctcccccgccgctatgatctgcgcgatctccggcgaggtgccggacgagccggtggtgtccaagaagtcggggctcctcttcgagcggcggctcatcgagcgctacgttgaggaccatggcaagtgtccggtcaccaaggaggagctcaccatggacgatattgtgccggtcaagaccaacaaggttgtgaagcctaggcctttgcaggctgcaagcattccaggactccttgggatttttcaaaatgagtgggatgctctcatgctttctaattattctttggagcagcagcttcacacagcaagacaagaacttagtcatgcgctctaccagcatgatgccgcctgccgtgttatagccagattaaagaaggaaagagatgaggctagaacacttttggctcaagctgagagacagattcctgcatcagttgcagcagctgctcctgcagctgttgtttccaacggaaaaagagcaacggaagatgaaattggccctgacgggaagaagattcgtcctggtatcaaccctgtcatgattgatgaacttacagagtgtaataccatgctttcagcacagcgtaagaaaagacaggttccgccaactctggcgccgattgatgcacttgagagatatactcaaatcagtagtcatccccttcataagacaaacaaaccaggcattttgtccatggacattcatccttcaaaggacattgttgcaactgggggtatcgacacaaatgcagtgctgtttgatcggccatctggtcaaatcttgtgcacgcttactggtcactcaaagaagataaccactttgaagtttgttccacgggatggactctttgtaactggatctgcagataagactgttcgcatttggcaagagagcgagaatggaaactataactgcatccatacattgaaagatcatactgctgaggttgaagctgttacagtccatgcaactcaaaagtatttcgtgactgcttccaaggataactcctggtgcttctatgatatatcaacaggatcttgcctcacacaggttggcgaggcttcaggacaagagggatatacatctgcatctttccatccagatggtcttatccttggaacaggaactactgatgctgttgttaaaatttgggacgtgaagactcagtcaaatgttgcaaagtttgaggggcatgttggaccagtcactgctatgtccttctctgaaaatggttacttccttgctactgctgctcatgatggtgtcaagctttgggatcttcggaaattgaggaattttaggaccttctctccctatgattcagacacgccgacgaatgctgtggaatttgattttagcggaaactatcttgccattggtggttcagacataagggttcaccaagtagctaatgttaaggttgagtggaatcttatcaagacgttaccggatttatcaggaactggtaaagtaacttctgtgaagtttggagccgatgctaagtacattgccgtaggttctatggaccgcaacctacggatatttggactccctggagatgaccaaatggaggaatcaaacacagcagctgagtgaggaaatccattgtacttgatttatttcttttttgcgatgctcccaatgtcatttgatgatggatagactgcgtgcccatggatacatcaacacaagagggaaggaagatcctggcggggagcctggtctggactacggtcggtgtaaacaagcttgtgacattattgtattgtagggcttactaatttatctgatgaggatatgatttgttttgttctgaagacgagtacgatgctaaagttccgcgcaaagttcagcgattcaaaataagttcacannnnnnnnnnnnnnnnnnnnnnnnnnnnnnnnnnnnnnnnnnnnnnnnnnnnnnnnnnnnnn

SEQ ID NO: 14750 - DNA, 1155 bp, Setaria italica
  Peptide Sequence Number=SeqID_80724
accggtcactggacaatgtgctcgtgcccatgctcaagttcctgcagtccacggggtctccgctcatgctcaacgtgtacccctactacgactacatgcgctccaacggcgtcatcccgctggactacgcgctgttccggccgctgccgccgaacaaggaggccgtggacgccaacaccctgctgcactacaccaacgtcttcgacgcggtcgtggacgccgcctacttcgccatggcctacctcaacgtcaccaacgtgccggtgatggtgaccgagactgggtggccgcacaagggcgacccatcctccgagcccgacgccacctccgacaacgccgacacctacaacagcaacctcatccggcacgtgatgaacagcaccggcacgccgaagcaccccggcgtggccgtgccgacctacatctacgagctgtacgacgaggacacccggccggggtcgacgtccgagaagtactggggccttttcgacatgaacggcgtccctgcctacaccctgcacctgacgggctccggcgtgctgctggccaacgacacgacgaaccagacctactgcgtggcgcgggaaggcgctgacccgaagatgctgcaggcggcgctggactgggcgtgcggccccgggaaggtggactgctccgcgctgatgcaggggcagccgtgctacgaccccgacaacgtggaggcgcacgcgacatatgccttcaacgcctactaccacggcatggggatgggctccgggacgtgctacttcagcggcgttgcggtgatcaccacgaccgacccaagtcatggatcttgcgtctactctgggaagaacggatctgcgttgctgaacggaacctcgctggcgccgtcgtccaactccacggatgggagttccggcgtgcaccgggggatcggcgatgtctcgtcagtcgcccgcgtcgtctccaccgcgctgctcttgagcctcctcctgttgtaggcagtagtttagtagcagtaggcacccgcaattatgcaaagacttgcagggttaggcgttcgcgagagggatgattctttttgctgtcaagtgggatttggcctgggtgttggtttggtggaggtggactattgtcactcccaaatggaacgggatgggcttctgttgctct

SEQ ID NO: 14751 - DNA, 304 bp, Setaria italica
  Peptide Sequence Number=SeqID_80725
gtgccacaaaatcaagagatgcctcctcagatgcaaaggagtggaaagggtggaggtgaacatggcgcagaaccaggtgatggtgaagggcatcgtagatctgcagggcatctgcgagcgcctccgcaagaggaccatgcgcaacgccaccgtcatctccccgccacctcctcctcccgcagaggccgacgcagcagccgcccttaaggaggaaccggtcgtcgttcattcgcaggtgagcgaggtgacgacggtggagctcttcgtcaacatgcactgtgaggcctgcgcgcagcaattgacg

SEQ ID NO: 14752 - DNA, 1323 bp, Setaria italica
  Peptide Sequence Number=SeqID_80726
gtgcatcatcaaagacaaatgtgggtgcatgacagaatagctttgtgaagtcctctaaatatgttactgtggaaagaaagagtaggtactgacagtaaggactaaggagtaaggttgaagtaactatgattcctcattttggacaggagtccatcttgcagagttcctttttctttctaacaccaaatccagcaacgaaaccaagcagcagtgcaagcaatgcacagccggcaatttccacgtatgtctaattttttggcagcccactaaccagcttatcaggtgtggtatcattatccatttgcagtgagaatatttcaactttgtcatggacttggccatcatgattcccagtatacgtcagaataagcttctctcttgtagccacaagttttgtgtacccaaattcaccaccacggtacatggacctctgtggctgcgggaatatggggacgttggggtggtcaggtctcggttcccagcttggctggtggtcctgaccagccatcccgatcacaacatgtgcaggagcaccagggtacacaaacctcgacgatgtgtttaggcattggtagttttccatggggcagaacctctcatacctgtggatgtgcccccacagagcaagtgtcacgttgtgtttcacaaagagtggttccaggtgctgaatcatctgctccctgtgagcagtgtccttggtctcgttgcttgaggtgtacattgggccggtgaccctggaacacgatgtatggtgttcgactctggttgacatgctcaaggtcagcctttatgaagttgtattggtcactgccttgagtgaaatcagtttcagtagacatatagacaaaatgaacaacacctgcatcaaaggagtagtagagattccgggtttcaggagccccagtgccagtagggaaagaagaattgccaggcattctgaacttgatgctatatggtattccgcattcgcctccactatccttcccattatagatgtttgcagcccaagagggtttccaaggttgggaaggccagtcatactcatgattgccaatgcagacatgatatggagtattggcagcaataggttcgatctgttcgaagaaatgatcccataaccatgcataacccttagcatagctgatgtcaccaatatgtgaaatgattgcaggtttgtcgccaagggcttcaaggtcacggaggatccatttcactgttgataaactttcaagcggtgtttgaaagtaggtgttgtaaggaacataagtgcccaagtcaccaaagaggaatgcaacggtctcatcagcctcagtgtcacgtgag

SEQ ID NO: 14753 - DNA, 434 bp, Setaria italica
  Peptide Sequence Number=SeqID_80727
ggcagccgtccgccaccacgcacgtcactgggggcgcatcgccggcggccgcgcggcggttgaggtcggcgaggagggccttgaagtggggcaggcaggtggtcatggtggagtagcagagcgccaccgtgtcctgcgtggcgtccgcgtcgcacggcggtaggccgtccgggatggtggcgaagctgaagcccgggaggcccgcgactgcgccggcgccacgggagcggacgaagcggcggtggttgtacgcggagttgacgtaggtgacgtggaagcccctgccgtggaggatcttggccagcttcatcatcggcgtcacgtgcccctgcgccgggaacggcatgcacacgacgtgcgcttctcgcccgccgccgtcggagtacttgtgccgctcatgctgccgcgcgacgtctaggtataagaatacttac

SEQ ID NO: 14754 - DNA, 399 bp, Setaria italica
  Peptide Sequence Number=SeqID_80728
ccgtcgatcgcgatcacggctcctcctgtccttgtccctctcccgctctttctccttgtcgtcgcgatcccggtctcgccgctcccgactgctgcggtgccggtcgcggtcccggtcccgatcccggtgccgctccttgtcgcggtcgcggccttcctcggagcgagaacgcttagatctgcgctcgacgtcgtcgcgctcttcgtcgccgcccgaggagcggcggcgggagctgcgctccttgtccttctccttctcccccgacccgggggccgcggcgccgttggacggcaccccggacgcttccaccgtcttctcaaggtactcgtactcgtcgaagtccatggcgtcacgcggcggaggctagccgacggcgaggcggagcagatccgcaaaccc

SEQ ID NO: 14755 - DNA, 527 bp, Setaria italica
  misc_feature (471)..(471): n is a, c, g, or t
  Peptide Sequence Number=SeqID_80729
tgtccaagaagaaaagcaaaatatgaacataccagtcttttttgttgtgatacattgtcatttcgtgagacagaaaagtgctcagtttaaagcagcatcctttgtggtcaattctgaccatgtgacgacatcagtggatttttataagccctgtgatacgttattgtcttataatcatccaatcatatggagtggttactggacctggaatggatcgatcccagtaaatactgatcatggaacaacatgaagtggatctaaaagtcggtttccgtacctagattgagtcacccactgatgaatccagaaacatccttgcttgctagtatgccagtttagtttcagcaaatgagcggatctgattcgtgaaactctgcaatagtcgcagagatcgatgccagcacaactgactcaattctgatgccgcaaaaaacccatcctacaccatcaattatcctccaaaaaaccttntcaccgaacagattgcgtcggaagctctcgctaactctaaaaacctttgcaaccgg

SEQ ID NO: 14756 - DNA, 574 bp, Setaria italica
  Peptide Sequence Number=SeqID_80730
gtccttcgcaaagccgccgccgcgttctcctctcgtgcgcgcgcacatctcgagaaggcagcagatggctggcgcggcggcgcaggacgacgccgagcagctgctccacctgaagctcgcgttcctcgccggggagcctcccgcctgcatcctcgcactcgccagaaaagctgggggaggttctatcacaccacatgtccaaaaatttcttttggagaattgcactgatactaatgtatatggacgccaaaactctacttatacaacaactatttttaagaggattatatctgaggttgaattatcatcggacattgtgattgatgcactttatgaggaatttgctcagcaaagattcattgttaaataagacgaatcatatctataaagagatatcatttctttcttctacacatgataatgtttcctcaagtttaataagtgttgttgctcgactatcatgttcttctaatatgcttgaaggtgatacagggtgctccctttggccattctaagttttatttctttgttcttgttagtttttattttctttttcttatttaccctttgttaa

SEQ ID NO: 14757 - DNA, 931 bp, Setaria italica
  misc_feature (887)..(931): n is a, c, g, or t
  Peptide Sequence Number=SeqID_80731
atcatatctataaagagatatcatttctttcttctacacatgataatgtttcctcaagtttaataagtgttgttgctcgactatcatgttcttctaatatgcttgaaggtgatacagggtgctccctttggccatcaagtttattcttgtctgagtttattctttcataccctgaaattttctccacaaagtgttgcttcgagctaggttctggtgtcggtttggtgggtatttgtcttaactatgttggtgcctctaaggttattcttaccgatggtgacacatctacacttacaaacatgaaggaaaatatggaactgaataacgtatgcattaaactggaagattttgaagagttaaaagaaagcaagaataaggtagagtgcaaatatctttcttgggaagaagcatctgaaagtgatttacggggctaccagccagacatagttctcggcgcagatattgtgtacgatccagtctgtgtgccacacctcgttcgagtgctctcaatgctgttaaggagagacagcaaacaaggggaagtcaacagaaaatctggtgatgaattggaaatggatggtccggtcgcgtatattgccacggttgttcgaaatgcggagactttcaactgctttgccaaagcagctgctgacgccaagctgtctgctattaacattggcagcagtacggctccttcaaattttctaccctatatgctatcatatgatagatcaagtgtgcagcttcttaaaattactttatcgtcatagaattgacaaatttgcatctttttgaagtattgccatctcgactctcattgtaagggcatcaaccatgccattacatttgttgtactttattgtcatagaattgacaatttttttttnnnnnnnnnnnnnnnnnnnnnnnnnnnnnnnnnnnnnnnnnnnnn

SEQ ID NO: 14758 - DNA, 140 bp, Setaria italica
  Peptide Sequence Number=SeqID_80732
tatggcccaatgcacaagaaagtcacgaagacaaatacagagttgcacaaatgctgttgctgtatttgttttccagacctgttggtggaagagtgttcttcacaaagatgaagatagccttctcggcactgagcttgatt

SEQ ID NO: 14759 - DNA, 245 bp, Setaria italica
  Peptide Sequence Number=SeqID_80733
acacaagcttatttattagtagtgtcgtcaatgagttgccagtatcaaaagatttccaatgacaccatagatcatgatgtaattggggcaatttaatagaacgtgcgcacaaatgaccacagaacaatactgttgcatttatgtcttggggcagcccaataatgctacgatggcaccaactaccatcagttatcaggggaaagaaaagccctgctagcattactcataaaaaaatgtttatgata

SEQ ID NO: 14760 - DNA, 586 bp, Setaria italica
  Peptide Sequence Number=SeqID_80734
caatgtcaggaatatcactcctctcagccttctcaacaatcacaggaattctgtcagggtacttctctctgatccggtcagcctcagattgcctcttctctgtaacacaaggcataacagcttcagaattcagtttgtaacctgaataaaaagataaattctcttgcgagaaaatgatggaggaacatgttggaaattattgctgggatgtatagaattggtattgtgaaagaacatgaaccaacagagtcgtcaaatgttgccaagtgcaaatttatcttatctgcttctcaagggataaaaaaatctactataattatccaggtcaagtaaggcacccatgtcaatcaattgatgttaatcaactaacgtcaactcaaccataaatgctagcaaaactgttacgttcagctaggaaatagtaacaaattagcataaaagtacgactgaatcttattatcctgtaacttgtcagggtcatgagcacacagtcaaccatcaggaacctttcaatattaaatataattttgaaggcacaactgcagcttcccactaaagcctcaatcagaggtgggatatagaattg

SEQ ID NO: 14761 - DNA, 642 bp, Setaria italica
  Peptide Sequence Number=SeqID_80735
ccttactaatgcctcctgtaaataaggaagcaagggtggacgattgcggtgagctgtggcgccatctagtgcagcccgaaggtgttctcgccactgtaagtcatgtacaggaatccatcctcgtccttgttctcttcatagattgcggacatcagagcagctgttggtggaagagtgttcttcacaaagatgaagatagccttctcggcactgagcttgattctcttcctaacaacgtacacgaattgtccaactgtaagatcagcagggacgaggtacctgcaaagtgatgggcatcagaaaatcagaacagcttatggctgccatggcacataatgctttgatgtgtgcaatattgctttcatgcagcagcatttcctttgatccacaacggtactggagttccttgaagcaaaacctacttaaataacaaactgtttctggaccacagaagtgtggaaactatatttaactcgacacaagcttatttattagtagtgtcgtcaatgagttgccagtatcaaaagatttccaatgacaccatagatcatgatgtaattggggcaatttaataagaaacgtagacgacaacaaaatagaaccaactaagaaacaaattaacttagtttagtactaatttta

SEQ ID NO: 14762 - DNA, 796 bp, Setaria italica
  Peptide Sequence Number=SeqID_80736
ttttttcacaaagaaacaccagtaacaaccgtagcaacagaaatcaagagcctaacatgcggacacttttgttacatattgaccagttgttgcaaggccagtcaattacttgatttaaacgatgtatattaaggacagctgataggtgtttagtagtagagtgcagtcacttgcaatgaggaaaccaggatatacacagttgcttggcaggtcttatttacaggaggcattagtaaggaagcaagggtggacgattgcggtgagctgtggcgccatctagtgcagcccgaaggtgttctcgccactgtaagtcatgtacaggaatccatcctcgtccttgttctcttcatagattgcggacatcagagcagctgttggtggaagagtgttcttcacaaagatgaagatagccttctcggcactgagcttgattctcttcctaacaacgtacacgaattgtccaactgtaagatcagcagggacgaggtactttttcttgtcaatgtcaggaatatcactcctctcagccttctcaacaatcacaggaattctgtcagggtacttctctctgatccggtcagcctcagattgcctcttctcgagggggtgctccagcttgaacgagctggtcttggccatcatgctccttcctgcgagttgggtcgggttgcgtagggaagcgacgggatcggatgaaggcgatgaactgctcctggcccggattcggctggaatggatttgtgggcgagggtttcgtcttcttccaaggaagcggcggagagacgggagcgggtgg

SEQ ID NO: 14763 - DNA, 346 bp, Setaria italica
  Peptide Sequence Number=SeqID_80737
tgagagcgcaatagtctcaatggtgttagcattgccgtcggatgatcaggctgatatactgtcggagtggatgaagaaagcagagcagttcaggtatcctgatctcactgaggcatttgaggtgtggtgttatcgcagtaaaacagcaaagagaaggctggtggacaatggagcaagcaaccccacagtcagcttgtaagggtactattaatttaatccttttgttgtagttttatagtcagctgaattaggtggttggtaccaagtatataccaactaatttctcattgttgtatgttgtaaaacagctcttcatgtttaataaaattcagctttattgcagaac

SEQ ID NO: 14764 - DNA, 742 bp, Setaria italica
  Peptide Sequence Number=SeqID_80738
tttctcaaaccttcctgaaccacacttaggactgggctagacctgttgtgcactgagtttgatcagtcacctgatcaggcagagcaaaggattctgtgcagcttagctgacattgactggatagcgaatctcctggcaaagattgagatgatgcacgactttgtttctggctggtcagaaatctctgaccatgttctttcagtggttcaggataagaagtatagctcagacttgtgggctgtgaagtcaaagcttattgaagtgaccggaaaggccctggatgctgttggctatggctcagtggttctcccatcatcattcagagttcatttcctgaagacatggcttccttatattcaaatgacaaagcatttgctagatgaaaatagtaaggatgaaacatcgctgcagatggattcagactcgtgtcagaatattgagagcgcaatagtctcaatggtgttagcattgccgtcggatgatcaggctgatatactgtcggagtggatgaagaaagcagagcagttcaggtatcctgatctcactgaggcatttgaggtgtggtgttatcgcagtaaaacagcaaagagaaggctggtggacaatggagcaagcaaccccacagtcagcttgtaagggtactattaatttaatccttttgctactcacactgagtcagcactctcacgtggttggtaccaagtatataccaactaatttctcattgttgtatgttgtaaaa

SEQ ID NO: 14765 - DNA, 1083 bp, Setaria italica
  Peptide Sequence Number=SeqID_80739
aggaataccaataccggaactacggaattgaatttcttcgttctggctgctgttttctgaacttctgttgctaataaacatggaggaacaataccagtaatctcaagtgagatatggagccagtcaaactggttgaggggtacaagtttgatgaccatactacaagtgatgtccgtgtttgcttcaaattgattgatgagcagccagaatggttttcctgccattcgtctgtcctttcccaaaatagcaagtactttgcagactggtttggtcaaaatgatattcgttctaataattgcattgaaatcgagtgcccaagggttgagtatgaccattatgtcaagatgctaaagtcaatgtatcttcctagagaatcagttatagattcatttgattctgtgaagtcagctgttggtgttcttcgagcatcaaattctctcggatgcgagttggttgccaaaagttgcattgaatacattgaagctgcttcctgggatgaaaaggaggaggaggagattttagaagtagctcgaacccttggctccaaagcggtgtctttgttagcccgtcttcaagcccccagtgcggacgctgttaagaatgtcttcatctctgccattcgttttgctacatgcatggaaactccattccctcctttcttggacgacctcaaaacttctgcccaggagcaaattgacttcatgatccacgaggatgatgacactgctttggttactatggatgaagacgtaaaatctgtggttcaggaaggtttgagaaaactgttatccacacttaggactgggctagacctgttgtgcactgagtttgatcagtcacctgatcaggcagagcaaaggattctgtgcagcttagctgacattgactggatagcgaatctcctggcaaagattgagatgatgcacgactttgtttctggctggtcagaaatctctgaccatgttctttcagtggttcaggataagaagtatagctcagacttgtgggcttgattctaggtctagtagtctaaaggtatttcttgttgttcttagttctttttagtttcttttgtttactttt

SEQ ID NO: 14766 - DNA, 415 bp, Setaria italica
  Peptide Sequence Number=SeqID_80740
gcgcttgagatggattataggagagaggctgtgtggagatgttggtttcatctgatgtcgcctcatctggtttatgatgaaccatctttggatactgaaataacttctaattaaccgggcgggaaggagacggggccctggccggcccttgggcgcgcgtcctgcgagcaaatggagcgccggccgctcaagcttcccaccaggaccgccgcatttggcctgaggccaaggacgccgggccgccgggtgcagggcgtgcgcaacgaggactcggagatcgagcaccgccgcgcccgcttataatttatttgtatatatacagaagagaatttgcagggtcaaaggaacgatctcccttctacaaatggagagcagcaatgatcattcatgggtgtctgtctggagcgttgcggag

SEQ ID NO: 14767 - DNA, 772 bp, Setaria italica
  Peptide Sequence Number=SeqID_80741
ttttttttttaacttaacaaacgacaacctaaaggtaagaaagttaggttttttaagttaagactttcaagttttttcttgaaagccaaaacactttgaaagctcggagcctcggaacttcagcagatgcatgctctcgtcaaaggcatgacccacttgacagtgactacaaaaagaagctaccggagcctgacccccctgagcttcagctatagcagtagataatacagtatctctcacagtaaagcacaaacacacacagtccaatgcgcacaaacctctctgctagtgctagctgagagtagaattttatttctgcaagtgaccaaccatcccagcgtgcagcgcgcagccaagcagcaggaccaagatcgtttcagctagaactcgtcgacggtgatgccgcccctgacgacctcgtacgcgtcccggctgcgcgacctcttgatcccggccgtgaagtgcaccttggcggcgtcggccttgacggcggtgaccctggcccagacgagcaccttggtcttgatcccctccacctccgtgaggcggccgtcgcccagcgtgccggtcaccgtggcgtcgaaccgcagctcggagccgtcgcggtagccgacctcgcagggggacgggatgtgcaccgtcaggcgccgcgtctccggctcgaactcgtagttggtggcctcccgcgggaagagccccaccggcaggccgtgctccttgagcaggtccgacagcggcttctgcatcttgcctttcagcttgttcaccagcc

SEQ ID NO: 14768 - DNA, 718 bp, Setaria italica
  Peptide Sequence Number=SeqID_80742
tttttaacgttttaacggggtttttaagggtttaaagtttaattttaggtttaacggttacggttacgttacgggggttcggtaccgggccgggcacggccggaggagcgtctcctcctcctccgcttccaggaggaggctcccgcccgccgagaacggccacggccatgacggcgccgccgccgcctccaggaggtcctccgcctccatctcccggggcaactccacgtcactgaccggcgagagaactgtgaaaaggctgagattgtccaaggctctgacaataccggatcacacaaccgtgcatgaggcttgtcggaggatggcctcacgaagagtcgacgctgtgttgctgactgactccaacgctttgctctgcgggatcctcactgacaaggatataaccacaagggtgattgctcgtgaattgaagatggaagagacaccggtctcgaaggtcatgaccaggaaccctgtatttgtgcttgcagacacgcttgcagttgaggcattgcagaagatggtgcaaggtaagttcagacatctgcctgttgtggagaatggtgaagtcattgcactgctggatattgccaagtgcctgtatgatgctattgcacggatggaaagggcagcggagaaaggaagagcaattgctgctgctgttgagggcgtagaaaagcattggggaacagctgcatctggtcctaacaatttattg

SEQ ID NO: 14769 - DNA, 503 bp, Setaria italica
  Peptide Sequence Number=SeqID_80743
atttcagcaattgtccattggacctctagatgatgacgatgactccagaagtgaaggatcaacaaaaagtggcatctgaggcaacagatatagcaagatctgccttttatccagcttctggtttatcaaacatgttcgggttcaagattcaggacaagcaaggaaggatgcacagatttaactgcggtacaaattaaataatctttttagttcggtgatttaacttgctttctgaacttcatgcgttttgaatgtcagacacgagcagcttgacggacctgataactagcattcttcagaggctcggcgatgacattgatagaaaaaatctaccacaaattttgtatgaagatgaggatcatgataaggtcatactttcatcagacagtgaccttatagctgctgttgaccacgcaagacagatcggttggaagagtttgaggttgcacttggattatgttggtgttggccgccggaagagaggtcggtcggtttctttacta

SEQ ID NO: 14770 - DNA, 763 bp, Setaria italica
  Peptide Sequence Number=SeqID_80744
gcaccaggaactggctacgctgctcgacctcctgccggtcgccgagctgggcctcgccgaggacgtcgtggacctgctggcgctcgcgtcgcgccagtgccggcggttcgcgccggcggccggggcggagcaggcgctcaaggcgagggtgctgtcggtgatacaggaagtggagcgggagatcgtgccggagcgggagaggctggaggagatcctggatgaggtgggcatcaacgacgcggcgacctgcagcgacgagatcgagagcctcgagcgggagatcggcgaccgcgcctccgagaggtgggctgacgccatgatcgcgctcgtcggcctgctccggtacgccaagtgcgtcctgttcagcgccacgccccggccatcggattccaagccggaccccgaggtcgacgaagagggcgagccaccggcgccgccgccggacttccgctgccccatcaccctcgacatcatgcgcgagcccgtcgtcgtcgccagcggccagacgtacgaccgcgagtccatcgcccggtggttcgactccggcaagtcaacgtgccccaagacagggcaggtcctcaccgtcctggagctcgtgcccaacaaggctctcaagaatctcattgccaagtggtgccgcgagaacggcgtcgccatggagagcagccaggccagcaagagcgagccggcgcaggcggtgtccgcgaacaaggccgcgctggaggcggcgcgcatgacggcgtcgttcctggtgaagaagctc

SEQ ID NO: 14771 - DNA, 350 bp, Setaria italica
  misc_feature (1)..(43): n is a, c, g, or t
  Peptide Sequence Number=SeqID_80745
nnnnnnnnnnnnnnnnnnnnnnnnnnnnnnnnnnnnnnnnnnncaggtggccgctgcatcatttcgttgctcacatcttaaggttcatgagacccttcattctttacatgtacccatacaaattgaaccttccacatgttactatcatgagccttctgactccaacaataaagccatcttagagcttagaaaagtaccactagttactaagtaatctagcttgctcagcttggtacattccaatccccatatgtagcgaattcttcacccctgtatagcatgccaacacaaaactattaagaaccaaaggcgattctctgcacaagatcaggccttctcttgcttggcat

SEQ ID NO: 14772 - DNA, 278 bp, Setaria italica
  Peptide Sequence Number=SeqID_80746
cggggcgggggcgacgagccgggcccgttcttggagcagcggagcaggcggtgcgtgccccagctgacggtcgggaaggagaagtcgtggaggcgcgtgcgggacgacgacggctgcggcggcggccgcgccgcgtgagccagggaattcgacgggggaggagcgaatttcacgccgcggtggtggtcgttctcgacggcggccatgaagaccatgggagggtgggagaggagaggagggggcagggcgggcgcgtgggagagggagatggacaggag

SEQ ID NO: 14773 - DNA, 879 bp, Setaria italica
  Peptide Sequence Number=SeqID_80747
ctttaaagtaagcatcactagaagcacagggggttttctgaaaacagtttggtgccaatgggcaccacagcttgtacatacatccaccacgtagcaaaaatgatgcgcaagtagtcactgacgggtcgaaaattcaggtaaacacaccatgtaacaaggtacctccacaactctggcagcaagggggttgtgaaactgaaggagaaattacatggacctactccgcagatgtagctacattggagagagggaaactatagtcaacattacaaggccttaaagttatacatgtaactcctcaatgtgctgatatcttgcatcgattccagcagcacatggtccacatacaggctcaatgcaccagctattagggggccaagtgggagccatgccacatcccatcggattcttggcaacctcaagatgtagtatgtccaaaagatggctaccaaaatgccaatatagcatgaataccacatccacttctttgacgggcctgaattctgtagtaatcctttaacagcaaagagacatgctagggcagatatccaatctgcaattatgaccattggtgcaggcaaatcttccatgaagtaagcatggtaccgcagctcccagggagaccaggcgtggtggaagctggagtagaccaggaaggccgcgtaagccaggacgaaccccgcgaagacgcgcctccaacggcggctctgctgcgcctgcttctgctccagcaaccggaccagctcctcttgctcttgggtgtccatgggaacgaggtcctcggcttcatcgtccccgccgtcgcgccgcctccaccaccgcctagtcgccatcgtcagatcgtctccgcagccggctccgtgcggacgagacgacgat

SEQ ID NO: 14774 - DNA, 447 bp, Setaria italica
  misc_feature (404)..(404): n is a, c, g, or t
  misc_feature (435)..(435): n is a, c, g, or t
  Peptide Sequence Number=SeqID_80748
cgtgagttccttcgcaaaatcgcgaagattgcaactgcagagattgttagctcaaaggaattcaatgttgattggcaaagagcagctgctaatcttcttgttgccataggttcacatgatccagacttgatgatggaggaaatatttcttcacttctctggaccaacttctgctttgccagccatgttacagatacttgcacattttgcgtcagctgaagccttgcagttcaccccacggttaaaggacgtgcttctgcgtgttttaccaatcctaggaaatgtacgagatggccaacggcctgtttttgccaatgcatttaagtgttggtgccaggccgcatggcagtacctaggagatgccccctcagagcgtccttttgatactgatgttatgtcttttangaattcagtgtttgaattacttataaaagtntggatgggttca

SEQ ID NO: 14775 - DNA, 511 bp, Setaria italica
  Peptide Sequence Number=SeqID_80749
cgccccgcatcctccgccgccgccgccggaggctcccgaggaggacgaccagcccatctggccgccccgcagccgctactgggagcgctacaagtctctacggaatatggagtcaaacctggaaaattccatgatcggttctactgtgaactctgtgtctctaccatctgggaagagacaaaagacattatctgatacagatggtgaccagtatgatggtgcgtcacagcaagtagtcatttatgggaatgacaaaagtgttatgggacaagatgaacagagtgaaagccatttcgcacttgaaccatcaaagccatcaaagacaccaaagcgtgcatcggggaagaagattggagcctttgctgtccaatgtgctaagtgccagaaatggagacttgtttcaacaaaagagaagtatgaagaaattcgagagcgaattagagaagatccttttgtctgtgaaaaagcccatgagtggaagcctgatgtgacatgcaatgatccatcagat

SEQ ID NO: 14776 - DNA, 404 bp, Setaria italica
  Peptide Sequence Number=SeqID_80750
ggaggcggccgactcgaccatgaagccgccgccgtggaagtacacgaccacgggcagcttgccgccggcgccggccgccgccggcggcaggtacaggcggacggagacgttgttggcggggtcgatggtgacgtccttggaggccacgccggtggtagcgtcgtggagggaggcggggaccgtgtcgtcgacgatgaggcgctcgatgcggccgctcttgtagaggcggatgaacggcaggagctcgacggcgacctcgtcggcggctgcgtcgcgggaagccatccggggtgcggccggtgggcggacacggtgaccagcgacagcgatggcttccgcggagaagtgccgtgccctttctggcctcaagttttctaactgatgagtgtgctgcgatagtaatt

SEQ ID NO: 14777 - DNA, 1772 bp, Setaria italica
  Peptide Sequence Number=SeqID_80751
ttattagttaaccaacgagtcctccggctcataaatgcatgttttctaaaccaaaattgttagtcaaaatacaggaacagtataactatcactttttgtaccacggtgctgtgcataaaggctatatctggttaatttaccgactgttagaacagacacaaacaacagcatgagaatcctgtttcccgtccaatttgggattttgggaaacaggcgagacacagtagatggaccagcctggactaagacgagtttagggcatcaagttgccgctggagctcctcaagatcatcatcgatagcactggagctcgccgcagcaggtggttctgggtacaaatcagcagctgggagttcacggacaaggccttctggtaggacatctgcagtgcttcgaatacttgatgtcgctgtgtcttcatcatcaacaacactaatgttccactcattatctaggtgaacaggacattcatttgctgcagatgcttcagcttccatcttagcctttgctgctgcatctctagcaggtttggagtccatatattctttctgtctctgaacacatgctggatttgaacactgcggatttggcctcatttccattgttgggaaataatccttaagtgagttataccccaagtatggggaaacttgtccaaagttcaacagatatttcagagcattctgcaccaggagaccagcaacaacacccattgtagttggcaaagaggcagcacaaacaccttctctcttgagggtacgctcatccacgccagatgctactaccaatggaggagcacatgcaaaacatgcagtttcaccaggaaccagcagttgtatatgaccagaaacagcatcttctgagacaccagattccatccacgtctgaccaagctcattgcatgcctggtttacaaccatacgagcttcgtagttatcgacacagctcaagacaagatcaactccagtgctacgcccatgagagctacgggcttttaggctttccaaaaatgtttcaaatcctttgactgtagtaatattcaatgagtagctctccaacacaacatcaggatttattccagaaagcgtttgtacagcagcatctgttttggtcattccaacctgttctggacgaaagaacaacctattcatgttagccaactcgacagtgtcatagtcatacaacaagaggcgtccaattccacatctagtgagcatctccgcagcaacactaccaacaccacctatgccaacaatggcgacggagtagtccctgatgcgctcataattctccacaacgcccatccgctgcagcgccataagtctgctgtaggggttgctgtccaccacctccgcactcatgtccttgatcttggatcgagaagcggcgccggaggccgggctcaacatcgccaccacccgctctcgcatccgatcgatggaggcggggtcgtcggggcgctgcttgagcgcatcgaggtcgtggagtagagcgcgaagctgctcctcctccatggtcgcctcgccgccgcttgcttgctgctctgctcctccgccgccggtggccggtaacgcagacaggatgcagcgtgacttcagttcagaccttatgtgcctggtgtagacgcgtagtagtgtccctcccgccgtcccgcgagccggaatcccgtggacggtcagcagcgagcaagggcaggccgtggcggcggcaccggccggcagcgtcaggcagaaccgttggagttagagttgaggattgttgggtccggtcga

SEQ ID NO: 14778 - DNA, 914 bp, Setaria italica
  Peptide Sequence Number=SeqID_80752
cggcctactcgctcaacttcttcttcatccttcctctgctcaactctggtaagcacaatttccatgtagttgtatccacccaagttcatttaccaacgttgtgggcctaattccgttggtgagtttgctgggcagtgtagctggcgttcaactgctggaatcgccagtgcttcaccctgtaagtaaccgattattcaaatttgttgcaagacagtaatgcgcagttgcacatacattcttgcactgatcaatgctgtgccttctccccaccagatggcagaaggattgtttaactttgtgatcgcttggacgctgatgtttgcgccactgctgttcacggattctaggagggaccggtaccagggatcgctcgatgtcttgtggggttttcagatgttcctcacaaacactttcttgattccttacatggcaatccgactgaatgccccggataccgaccagtccccgtcaccaaggtcacaattgggttcagttatggttaaaggtgcacaggttgtgggcaccgtcggtggggctgtctgcattttgtccattgtttgggctctctttggccgtgcagatgctggttttggcgacttcgtggaacggtggcagtatgcacagagctatgtggtttcggagcggctcgcttacgcattcctctgggacatattgctgtactcaattttccagccatggttgatcggtgacaacattcagaacgtgaaggcagatgctactgagttcgtgaatgtagtgaggtttatcccggttgtaggcctagttgcctacctcctctgcttagagaaagaggactagctgctacctgtgtttttgtaaatttttgtggtcatttagataagcaatcgagtgaatcatgtacttggtggcggcattttctggaaagactttct

SEQ ID NO: 14779 - DNA, 839 bp, Setaria italica
  Peptide Sequence Number=SeqID_80753
ctactccggcagggtccccggaaagcccgcgcttttccctccccgcgccgtctccgaggaccgcgccgacgccacgccgcagtggcagctcgactttctgggggcacgctctggggccctcgacccgcctgaggaggaggacgacgacgacgagcttctccccgccgaggccaacgactggtgcgtccgcgcgcgccgctccgccctgcgctccatcgaggcgcggggccttgcgccctcgctgcagcggatggtgtccacgcccaagaagaagaagaagaagaccgccaagaagaaagacctcaagaaggcggccgccgagctcaagcgccgcaagaagcagctggatgctgcccgggaagacgaagatgaagacgaagacgaagaggaagaagacgatgacgtcgttgatgatttgcgggacatggacgacctggagctccgggtcgcgcagttcgcggacggcatgttcgacgaaaagcgccagaggaacagggaggcgttcgtccagacgctgtccaggttctcggccgcgccgtccaacaagagcagggaggtgtccttgaaccgctccatcgtccaggcgcagaccgccgacgaggtgctgtccctcgcggcggaggtgattgccgatgtcgccaagggtctcagcccgtcgccactcacgccgctcaacattgccaccgcactccaccgcattgccaagaacatggaagcggtgtccatgatgcagacgcaccggctcgcctttgcgcgtcagagggacatgtccatgctcgtgggtatggccatggtggccctgcctgagtgctcgccacagggtatctccaacatagcct

SEQ ID NO: 14780 - DNA, 1037 bp, Setaria italica
  Peptide Sequence Number=SeqID_80754
tttgttttttgttgccggctttttgaccttctcagtctgctgcaacgatgctcctgatgaacagccagagaaatgccttggaagttcatcaaagttggaggatagcaaccattctggttccccatcctcaatggatgctgtacagaatggtcaagccattcctcaggcgtcaagcccaatggaaggtatagctagtgcgttttgcaatatcttgtgtcatttgctttgattctttgcaactgttgccatatagtccttgtgcttatgttttgttttccaattggactatactagcagtgtgcttcatttgtattttcatataaaaaacttgcagaccattataccaagaaaactaagtcgtgcaccctccatggtgaaaaatggtggaatttggttctcagtttaggtcacagaatgttgtgaaacgatgatgatgcactaatgaaactatagattacagcatatttaaagtagagtaagttgctccagaggacttccgggcagggattgaatcttggcatttcatgttgtttcaagtattaccgtcagtgtaatgctaactcttcattcacggacatgatgtatggcagtggacaactctactgctgaagacccagcggaagggccaaactcaaagcggaagcggcgactgtccgtgaaggggctcgagttgcagcagactgagaaggtcaaaaagccggcaacaaaaaacaaatccaacggcaagtctgcaaaatccagtgccaagcagatggaatccaccaacggaaacagctccgccgttgatgatgaagcaactgaggatgatgagattaacattgatagctagattttctgaccgaggacagtagctggggggaatataaaaggctgttctgtatccccccaaagagaaaagaatgctctgtgctgggacaaactaaacctattaactatcagtgctattgcctgtaagttgacatttgtagttttgttgtttaagtaaaaagtattatttcgttcttgtttctttttgttaggtttgttttcttaaaaaa

SEQ ID NO: 14781 - DNA, 1815 bp, Setaria italica
  Peptide Sequence Number=SeqID_80755
cattagactgagtccttcctcctccgtgctatcttcgccaagaaccgctgctgcgacatgccagagtcaccgccaagcgactccaaagatccatatcagggggaatttccggagataattgaggagtacttgcagcatggtaccatgaaatgtatcgcgtttaaccgtacagggacgcttcttgctgctggatgctcaaaaggtagctgtgttatctgggacttcgaaacaaaggggctagcaagagaatttcatgataaagattacagtgcatctataacaagtgtgtcctggtccaagtatggccaccgtttgctcgcctctgctactgacaagtcattgacactttgggatgtgttatctggggaaaagatttcccgaataactcttgagaagactccgttgcatgccagtcttcaacctagttgtccaaccccatctatttgtttggcatgtcctctgtcttctgcacctctacttgttgatttggataccggaagtaccagagttctccctgtttctgtatctgagaatagtaacccacctgcacctaatccccgtaacaaattcgcggatggtaccccaccttttacaccaacagctgcaatatttgacaagcatggggatctgatatatgtgggcaactccaagggagaaattttgatcgtagattcaaaaagcatccaggtacatgcagtaattcccacccctggtggaactgttgttaaggatattgttttaagccgggatggtcaatatcttctaacgaattctaatgatcgggtcattagagtctacaagaatatgatgcctgttaaaggttctggagaggagattagaaacataagcaacaacaataatgactatcaaagtcactatgataagttaaaagcaaatggtgcaagctgccttattctttcctgtgaactttcggatgccattacaaagatacagtggaagacaccatgcttcagtggtaatggtgagtggatagttggcgcttctgcaaacaaaggagagcacaggctgcagatatgggaccaaacagggcgacttgtaaagatccttgatggtccgaaggaagctctcattgatcttgcctggcatcctgttgaacctacaattgctacagtatctgtaacaggctttgtatacatttgggccaaggagcatgtagagaattggagtgcatttgctcctgattttgttgaattagaagaaaatgaagagtacgttgaacgagaggatgagtttgacctgaacccacgtgaagaagaggctgaggaagtagtgatagatgagaatgcggaaattgatattgaaacatatgagaagaatgcagtgttcagtgacgtggaggattctgtggatgagattgtcttcttgccagcaattccttccccagatgctcctgatgaacagccagagaaatgccttggaagttcatcaaagttggaggatagcaaccattctggttccccatcctcaatggatgctgtacagaatggtcaagccattcctcaggcgtcaagcccaatggaagtggacaactctactgctgaagacccagcggaagggccaaactcaaagcggaagcggcgactgtccgtgaaggggctcgagttgcagcagactgagaaggtcaaaaagccggcaacaaagagcaagtccaacggcaagcccgcaaaatccagtgccatggatgatgaagcaactgaggacgaagaggttaacatcgaaacctagtgtttccgacgactgaccaagaacaagataggcatggtggggaatagaaaaggctaccatgcgttaccc

SEQ ID NO: 14782 - DNA, 336 bp, Setaria italica
  Peptide Sequence Number=SeqID_80756
cgcacacacgcacggccggcctcctctgctagtgttgggaactgctgagatcagaggaaggctccagctccaccaggcattccgatcgaggcaggggtttcgtccgggagaagcaaaggaaacctcggcctgcgacctcgatcgatcggaggccgtcaagcttcagctccagttctacgaggagttggtagcagaaggccccacaccagcacatcttggcgtccgaggatgttgcagaaacgatggcagggatgcgtcttctggctcgccttccttctctgcagcgcatcaggcatcatgatcccctcagaaaattctccgtcagagttcgccaag

SEQ ID NO: 14783 - DNA, 279 bp, Setaria italica
  Peptide Sequence Number=SeqID_80757
aggaggaggaggtcaccacccaacccgactccgacacgtcactcatggaagcctcgacggcagaggcggcgccggcgaagaccgtgctgagggtggcggcgatctccggctcgctccgcagggcgtcggccaacaccggcctcatccgcgccgccgcggagatttgcaaggagtccatcccggggatgcaggtcgaccacgtcgacatctccgagctgccgctgctcaacaccgacctcgaggtcgacggcggcttcccgccggccgtcgaggcgttcc

SEQ ID NO: 14784 - DNA, 951 bp, Setaria italica
  Peptide Sequence Number=SeqID_80758
ctcccaggtaggaggaggaggtcaccacccaacccgactccgacacgtcactcatggaagcctcgacggcagaggcggcgccggcgaagaccgtgctgagggtggcggcgatctccggctcgctccgcagggcgtcggccaacaccggcctcatccgcgccggtaagttccgcttcatcaatcactcctggctacttgttttcttatctgaattacttttaccctccgtggacttgcgtggctgctgactgctgagcaccgtgtccatgtgtgaagccgcggagatttgcaaggagtccatcccggggatgcaggtcgaccacgtcgacatctccgagctgccgctgctcaacaccgacctcgaggtcgacggcggcttcccgccggccgtcgaggcgttccgcgccaacatccgcgccgccgactgcttcctcttcgcctcgcccgagtacaactactccatttcaggccctctgaagaacgcgctggactgggggtcgcggccgccgaactgctggagagaccgagcggcggcgatcctgagcgcgtcgggcgggtccggcggcagtcggtcgcagtaccacatccggcaggtcggggtgtttctcgacatccatttcatcaacaagccagagatcttcaccagagcacacatgcccccgaagaagttcgacgacgacggcaacctgatcgatccggagaccaaggagcaccttaggaagatgctcctgtcgctgcaagctttagcgctgaggctccaggggaagcctgcaagctctgaacaggggaatggggaatcgatgcttccatttatgtcttgagatgaatagcactcaaaatgtcaaagtgatctgtgctagtgcacgctcgaattgatgtcttgaataactttgtggcaccgaacattccggtggcaataatgcagaacaacatttatcatcttagaaaccg

SEQ ID NO: 14785 - DNA, 546 bp, Setaria italica
  Peptide Sequence Number=SeqID_80759
tgccgggcatctaaaggtcggaggacggaggacgatgcccgagcttttgctgcagctctcattgcctcattgctatccagctttgcaagcttccaggcactgatcttgacttgcttcttggttttgattgctctttcagtatgtccagcagcatcagggtcaacagttgatggtaccatgcctggctccaaatgtgggatcacctcatcctgatcaacaaaaatccttggaggtgtgcaccatgaacccttgtagtgaagactaagtgaagtagcaccactgaacccagtagtggctgaatttgttggggagtaaacaatgtttacccctcctggtcctcttcctcttgaggttcttcactcatagctctcattgcgacaacatattcataagttgtgattccctttctgatcaagatcatatggaagaagaaaagttcccctaaaggtacacaagcaactagagaaagaagagtaaaaatgattacaatggtagcaaaagcaggacgaggaaagccattcccaagcctatcttgaataattctct

SEQ ID NO: 14786 - DNA, 435 bp, Setaria italica
  Peptide Sequence Number=SeqID_80760
aaaaaaaggaaaaaaagaaaaaataaaagaaaattttttaaattaagaaactaaagggaacggaagaaatagcaaggatggactcggtcctgaagcataataaagatgacattttttgttttagataacgcggggaattaatttttaagaacaataaaggaggatttttaatgataatagggggtgatttatttttctttgcgtaacagaggaggaattttgtaggaggtaagaactatgtataagaactagaaaaggaatatggtgaaaaccaaataggggaagtgatatgtgtgaagatggacagaattggagtaactaatgggaacacacagaaggatatgctaatgtggagcaacaaatgggatagaatgtgggaggaacttacccataattgtgaaatcagcggtgaagtgcatccaacatgaagcccgg

SEQ ID NO: 14787 - DNA, 517 bp, Setaria italica
  Peptide Sequence Number=SeqID_80761
gagttgttaaggctactcatgatgatacgcagcggtggtggatcccggcatattttgttaaatgagaagcttactcatattattcttggtgcgccttcagaggatgaaaaaaaggaagtaagatgtctggcttcatggggtgtaataaatgtagtgaaagtaacatggttagaagattgcaatagagcaaaaaaggaagtaaaagtatccccaactcatgtggctactgagctactcttgaaagagttttcacaagtgactatggaaaaatcttctgatacacgtgaaacgaaggtagccaagagctcatgtgggatttttcatgtcccaactgttaatgactcacatgacaaacaacttgaaaaagatatgtcatctgaaagaaaaccagcaagaggcaaacatgaaaacagcttgaatttgcagacctggttgctgaccgggtttcatgctgttaattcaagccaacataatggggtggtcaacataagcaagtaccatcccaaatctaaaggaa

SEQ ID NO: 14788 - DNA, 257 bp, Setaria italica
  Peptide Sequence Number=SeqID_80762
ggtgacgccggtggtcagccacagcttgcccttgctctccaccacctccgcggcaccggcctcctccacccaccgcgcgcgcgacgccacattcctgaactggaccctcgaggaggcggacggagctacgtcgaggaaggggttgacgtgctgctcctcgccatcatcgtttcccgcggcggcggcggcgccaccccctggagcgcggctccttcggcggcggtcgcccgcagtcgctgtcgccgctgccatgatta

SEQ ID NO: 14789 - DNA, 447 bp, Setaria italica
  Peptide Sequence Number=SeqID_80763
ctcaccctcgcctgcagattcagatactcccggaggaaggactcgaactcaatctcctgatcgctgtcggggtacgactccgacaggaaggcggcgatctcctcctcggagaccacctcattgagccccctcagcttcttcatcagccccggcagattcttcgtggtgacatggccggaatctctcttcagagacacgaacttggccttgagcgatcggagctcgacctgcgtgaactgcccctgcagcgaggggtcggacacgacgaccccgacgaatccggcggacatctccccacctccgcggcccgactccgcccgcgcccgcagcggctttcgaattggtcacggcaatccctccctcccgtggtggcgcgcggtttccttgcgcttgacggaaaaggctagcgagcaatggcgtccaggtctccagatttcgtgggggccg

SEQ ID NO: 14790 - DNA, 456 bp, Setaria italica
  Peptide Sequence Number=SeqID_80764
ggcgccggcgctgcaaaccggagagcgtagggcgcaggtgggcgagacggagccggacgtcgacaacgtaatgccccgaccaggctgcacgatgccaccgtcgccgccggcgcaagactcggaggggtcctccgacacgcagagcgccgacggccgcggaggaagcccactgcacggggagaagccgaggcaagcggcgggcgcgagcgtgaagcgggacgtggccgcctccaagtcgaggctgctcgcgttccggtccttctcgcgggacaagaaggcgggcaagcccgggggtgtcgcggacgacacggcttctccggagggacgcaaggcgggggaagagggcgcggcggagcacaaggagaaaggcggggggagagggcgcggcggagcgcagggagcttggtcatcaaagtggtggtgcgctagtttttgccgtgcacgtcttgcgggcgg

SEQ ID NO: 14791 - DNA, 285 bp, Setaria italica
  Peptide Sequence Number=SeqID_80765
gaacaataaatccaaagactaggttaggcagtttgtggcgcggaacgggaagaacttcttgacgagcctggcgcagcgcgagagcaccaacatgcagttccacttcatccggcccactcacagcatgttcccattcttcacggctctcacggacgcatactccagggtgcttaggccggaagaaggggtgcctgggctgctaaaggagctgagagagggttcaaaggaccttactacagtgctggagagatgcctgaaccggttggagtgggatcggtcgcagga

SEQ ID NO: 14792 - DNA, 359 bp, Setaria italica
  Peptide Sequence Number=SeqID_80766
gctgcagttaagtggaaaaatacaacgttgacatagtgcaaaagatattcgtgcttaacttataaaacaaactaatacgaagcataagacatcaagatccagcacaaaaggctttccatgaaacgttgacatagtgcaaaagatattgtgcttaacttataaaacaaactaatacgaagcataagacatcaagatccagcacaaaggctttccatgatagctgttgaagtatagttgtaagcattaacctaccactacactgaggtcgaaaagctcatttctttctcccaccacgctccctcagtgtgagattgatcacaactccaggacccacattgtagtaagcaagagtaagattg

SEQ ID NO: 14793 - DNA, 289 bp, Setaria italica
  Peptide Sequence Number=SeqID_80767
ttttttttgttttttttttgtcaccacacaacacttaactgcagcaagataagaggaaaatacaacgttgacatagtgcaaaagatattgtgcttaacttataaaacaaactaatacgaagcataagacatcaagatccagcacaaaggctttccatgatagctgttgaagtatagttgtaagcattaacctaccactacactgaggtcgaaaagactcatttctttctcccaccacgctccctcagtgtgagattgatcacaactccaggacccacattgtagtaagc

SEQ ID NO: 14794 - DNA, 314 bp, Setaria italica
  Peptide Sequence Number=SeqID_80768
ccgcctggcgccgacgcctccgcgggcaccgagcctgacgcggatcccgccgacgctccagcagcggccccggtcgacggcgccgctgcacccgcagatggcgcctcggcggacgcgaaggcagaccactccgcgcccttccgcgtggcgccgccgcccaaggtgctggtgccgcccaaggcggagctgtacacggtgcggctgcccgagggtatcacaggggaggagctggacataatcaagctgaccgcgcagtttgtggcgcggaacgggaagaacttcttgacgagcctggcgcagcgcgagagcaccaa

SEQ ID NO: 14795 - DNA, 2009 bp, Setaria italica
  Peptide Sequence Number=SeqID_80769
aagaacaattagaatttgcagaatagaatagaagtaacgaagggaacttcatgcagttccacttcatccggcccactcacagcatgttcccattcttcacggctctcacggacgcatactccagggtgcttaggccggaagaagggtgcctgggctgctaaaggagctgagagagggttcaaaggaccttactacagtgctggagagatgcctgaaccggttggagtgggatcggtcgcaggagcaggcgaagcagcaggcagaggatgagatcgagcaggaacggatgcagatgtcaatgattgactggcatgattttgttgttgttgagacaattgaatttgcagatgatgagtacgagggacttcctgtgccacctacattagaggagttgaagcgccggaagaggatgcagaacttgggagaggaggaagcgatggaattggctgaacctgctaaggaagttgagatggatatggatgaagaggagatgcaacttgttgaggaaggaatgcgggcagcaagacttgaggagaatgatggaggagcacaagttaaggtggctggtgatgatgaggcacctatgaggattgtcaagaactacaagaggcctgaagagaggatccctgcggagagagacccaaccaagtttgttgtctcaccgataactggggagctcattcccatcagcgagatggaggagcacatgcgcatctcactcattgatcctaagtacaaggagcagaaagagaggatgttggccaagattaaggagaccacccttgcaccggatgatgagatttcacggaacattgttggtcttgctcgcactcgtccagatatttttgggaccaccgaggaagaggtctctaatgctgtcaaggcagaaattgagaagaaaaaggatgagcagccgaagcaggttatttgggatggtcattctggtagcattggtcggactgctactcatgcactgtcacagcctcagggtggcgaggaacagtttgatgcttcaaatgttgatgggagacctgttcctggtccagctccacttgtccgacctggcatgccattgccccgacctcctcagccacttcctcttgctaatgttcctcgctttatcgctccaccagcaccatatccccctcccccaggttctcatattcctggagttccgcagatgatgcctcacatgcatccacctccacaacagataccagggcagccaccgatgatgaggatgccaggccaaatggttcatatgcccaccagtattcctccgcctcctggtcaggttcagttcatgcctggtccaccacgctcatttcctatgcacccaccaccgcacatgccacccatggtcaatcccattggtgtccctcagcctcctgcaccgcctcttcctccgcagcctcctgctgaagagcagccacctccacctgatgaaccagaacctaagaggcagagaacagatgatgcttctcttatcccagcagagcagttccttgctcagcatccgggccctgctagcatctcagtatctgtacccaaccttgatgaagggaacttgcgaggccaagttttgcaaattcctgtccaatcactgtcagacacggtaggcagtctgaaggagcagattgctggagagctgcagctccctgcaaataagcagaagctgagtgtgaggactagtttcctcaaagacaatcttactcttgcttactacaatgtgggtcctggagttgtgatcaatctcacactgagggagcgtggtgggagaaagaaatgagtcttttcgacctcagtgtagtggtaggttaatgcttacaactatacttcaacagctatcatggaaagcctttgtgctggatcttgatgtcttatgcttcgtattagtttgttttataagttaagcacaatatcttttgcactatgtcaacgttgtattttcctcttatcttgctgcagttaagtgttgtgtggtgccatgctttgccatatcacctagc

SEQ ID NO: 14796 - DNA, 1141 bp, Setaria italica
  Peptide Sequence Number=SeqID_80770
ggtgacttcaatggctgccgagcttaaggatgcaaggaacaggcttgcttcaaaggaactgttgtatgctcaggaattagaggccagaaaggtatgtttcattctgtgtatttgggaagttttggtgctctaaaatggattggaaaatatattgaaaggttgctgagctaaaggcaacagacttggaggatgaggtgaacaaaatgcagaaatgcttagaggacaaagaagagcaactgcgtgcatccctaagtatcaatgaacagtgtcgcaggaagttggttgatctcagatcacaacttttaattacccaaactactgcagaatccactgctgcatcagccaattcagggctgctgcattgctcatctttgttggaaaagttaaatgacaatgaaaattcgctgagtgaggccacatatccggtgggcaatgtagcagaacagctcaatcattttcacgagtacctcaagagcagggatccctcacgaggacatatcaaagattactatttgacaactgagtctgacatcatgaacgcatttgccaaagctggggttgataacgttaatgagcttatgaagatcatgtctgatgtttcaccaaagaacagcgagaacattaacgaggacttgatttttgaggatgatgataacgccaatctgagagagggtataagggtactatctgcacactgggaaaacaaaatcaaagaattagaatcacagttggacaagcatgtggggatagtccaggagctgaagaggtggatactgaaacttgaattctcccttcaagaaccacgatctcggttgcagaaactccagagggtaagagaaaaaggtccaaggcccttactcttaaagaactacggaatcaggcggccatggaacagcccagtggtggcggatcaggcgacaagcaaaaccttgggaagagctcaggcttcaagctcatagcttccatgtcaatgctggtcctatttatactggcaaagcgatgacctcgcgaccagctggtatctcttgtgtacagataatacagacagagatgtagcagtgtcagaatcaatagctacttcatgatttcgaagataactgagacacgcaacaggggatatgcaaggcacacaggggatagg

SEQ ID NO: 14797 - DNA, 264 bp, Setaria italica
  Peptide Sequence Number=SeqID_80771
agctggctagctccatcaccacggaatcacacagcatgggtctagctcgccgccacctccaccacgccactgtcggggcgctcctcgccgccgcgctcctgctctccaccgccgtcccgggcgccatggctcaggaggaaatagagggcgagcacgagttcagctacgacccgcacgcggagaacgggccggatggctggggcgagatcaagccggagtgggcgacctgcagcgatggccggtggcagtccccatcgacctcta

SEQ ID NO: 14798 - DNA, 610 bp, Setaria italica
  Peptide Sequence Number=SeqID_80772
tggtggagccgctgccgtcgtacgggcgggggcgggagctgccggggccgaggtacgctagcttcatcaccggcgacggcctccgggatgtcgtcatcacgggtgacaagggagtcatcgacggccaaggggaggtgtggtggaacatgtggaggcggaggactcttcagcacaccaggccaaacctcgtggagttcatgcattccactggcatccacatctccaacatcgttctcaagaactcacccttctggaacatccatcctgtttactgcgagaatgtggtcgtaaccaacatgatgatcttggcaccacatgactccccgaacacagacggagtggatccagattccagcagcaacgtgtgcatcgaggactcgtacatctccaccggcgacgacctggtggcgatcaagagcgggtgggacgagtacggcatcgcctacggccggccgagctccggcatcaccatccggcgcgtgcgcggctcgtccccgttcagcggcatcgcgatcggcagcgaggcctccggcggcgtgcgcgacgtcctcgtggaggactgcagcatcttcgacagcggctacggcatccacatcaagaccagcgtcgg

SEQ ID NO: 14799 - DNA, 281 bp, Setaria italica
  Peptide Sequence Number=SeqID_80773
ttttttttttttttaataccaagccagaatcaaggcttctttttttttgctttctataatttacaccaagaaggaacatcagtggcaaagagaaatacaatcataccagaaactacaagcagacattgtaagctataagctgtgagcagaagtcttacacaagtttttgctcactttccagctattgtgggtaatggttaaaggtcgttcattttctaacaatcagcaaaattccatgacattgagttgcccaatgacgcagttcaccgtccgcaagcctt

SEQ ID NO: 14800 - DNA, 624 bp, Setaria italica
  Peptide Sequence Number=SeqID_80774
gcaatattgcaataagatatgtagtatatttaactggcataatttccttaataagtgtagatctctatcctttacaccttgccctcccctaccccttcaacaccacagacaatctgaaactctgagacttgatcattcgtgtttgtgcttatgaataatggtgcacagtacaccataaaaatctttaaatataagtcgttttaaaatctgtgttggtcaaacttttttttagttttgagcagaaatatatacgtgatacatagattgaatacataatatgtgctttactagatccatcacaaaaaaacaccctcatagtacactttttttataaaaaaaataaattcatagaaattggccacccaaatcttggagaccgtcatgtcctacactgatttatattttggaccaaaaggggtataaagatatgtcatgcagcatctatgtcatagacgtatgaaacaatttctcagaaagacaagaaaaagtcacacctatcaggatcttatgtaaacatttgatatcaaatcactgagatgcaatacaaaatcacctggaagggcagtgaaggcaagggatcagcatcaaacaaaagatcatcagtcttccgctccatgtacattt

SEQ ID NO: 14801 - DNA, 1265 bp, Setaria italica
  Peptide Sequence Number=SeqID_80775
tttttttttttttttttacggttaacaaccacgacaatcccgttaattaccgttggtgttttccaggtccgttttctcttgagggcaatggtgtttctgggtttcaggctccgataggtataccacatattaaaaccggtaacaaagctgagcagatctacggactacaggtgcaaggtttcagcaactaagcttcaggatcagtgaagtaaacagggctctctaggtcatcattgttcgcagaagcgaatgaatcgtcagatcctgacgttgatggagttgcgatgctctcatcagaatcggacatctcatcatgcagagcaacatgttcttcaggttcaggttcctgctcggcctcaggctcagactcggatccagaggtccccaacatgagcttgtgaattgcagccttggcagtttcgagaaaccactcatcctcaggaagcgcactttgtgggtcaacattccttgctgagaaagcagcgatcgctctggttatgattgttgacacaagctgctgaactggtctgtgtgggaaacgcccgcagacagcaatctcaacaatgaagtgcatatcaagaataagctgctgcaaccctgaaggctggagttggacagaccggtcctcaaaaacatcccagaattcttgctcattggagagccacatgacaaccgtttcagttagccttgagagtaagaccttctgtatcttatcttttcccaggagaacatcaccagcaacactagctagctgttgcaatcttccaaacagcgcctggaagggcagtgaaggcaagggatcagcatcaaacaaaagatcatcagtcttccgctccatgtacattctagcgtccaatcgtgacttcccttccaagtaaataaatgataagacgtactgtcggcagaagtgatccctcagtttgtccaatgaatgttgcaaatgacgtttccactctttgtattcaatggagtatatggacccagagccaaggctttcacttgatccaacagttcctttcttttcagtctgcatatcaaagaacttggatacagcagctggcaataactcatctgctatagtgtatgccgctccaattagagtaagttgctgcgcatcagtttcagctttaaattcaacaggctctttagaccttaagttaagtaagttatcttcagaaggtccaggcaagactttgatcagcgtttgtacatatctatcaaaaagctggacatatttattcaagattgctccaccaaagtgaaca

SEQ ID NO: 14802 - DNA, 792 bp, Setaria italica
  Peptide Sequence Number=SeqID_80776
tgttcttccgtacttctagttcgtctacttagttctttaatttaagaaataataatatatggacccagagccaaggctttcacttgatccaacagttcctttcttttcagtctgcatatcaaagaacttggatacagcagctggcaataactcatctgctatagtgtatgccgctccaattagagtaagttgctgcgcatcagtttcagctttaaattcaacaggctcttttgactccagtagagtatcatcttcagaaggtccaggcaagactttgatcagcgtttgtacatatctatcaaaaagctggacatatttattcaagattgctccaccaaagtgaactatagtcattggggtgacttgatccaaaatatcattgacaatggacatgaacttcttcccactgcttgtaagcataatgtttggggcaactgcaccagagagcggtgatccttcttgaggggtgagaagcagaatatcatcattccttgctgcatccacaatctttcttctcacccttctaaaatttagttcaagaacttcttcaatataagggtgcagtagcaccataagtaattttgagaatttcagcccatacgattctagaaaagagcaatgagagagactagtttggatgcatatacaagcagcgcgaagggcagaaacactctcaggcaaaggagaattttctttgaccaagcgtgcaaatgtttcaatttcgtattcagcccattggatgatacggttcatattcatctatctatctccttatagttcctaattagttgt

SEQ ID NO: 14803 - DNA, 272 bp, Setaria italica
  Peptide Sequence Number=SeqID_80777
ccccaaggcacccaggcccgtgccgccctgcccagccaagccgcgcgcggaggtgaggcgctcgcatcgcacacctctcgccgcgctatatccccgggggcgccggtccctccccctctcgccgcgcgtccttcgcctccgatcccccgcgccaccaccgctgccaccggtgcgcccgtcaacagcggttgcgcgttcctcgagagggcaggatgctcgggttcaggacgcagatgccgtggtcgtcgtcggcgcaggcgtcggcgcaggag

SEQ ID NO: 14804 - DNA, 281 bp, Setaria italica
  Peptide Sequence Number=SeqID_80778
aactccgatgccttattgatgaggaagacagcctcattggctgcgcggatggtggcgtcctcggcccgcatcagctgccgcacccgcgccatcgggaagctgcacgaacccatgccggccgcagccgccttctggtccttcctcttcttcacgggcgtagatgcgggcacatccccatcgccggacgccctcttcgggctcctgagctcctttgggggctcatcgtcaccacgctttctcttcgtcggcgtgggcttctcgcgcttcttcatgggcgaggt

SEQ ID NO: 14805 - DNA, 969 bp, Setaria italica
  Peptide Sequence Number=SeqID_80779
ctcggacaccgccgccgccgccgccgccccaggcgctcgcttaccatcctcccccgaaccccggcgcgggatactgtcggtaggctggtgctcgtgcgtcggccgcggctgctgaggggctcagacgaggcgaggccgaggcggagcgggcgagagagcgcgatggcatcgctggggcggctcaagtctgccatcttcggtagggaggagaggaagatgcagtaccagtcgcacatccgggggctcaacgcgtacgatcgccataagaagttcatgaaggattatgttcagttttatggccatgagaaaaatgtggataacagtctgccgatcaaaactgataaagatacattgagagaaggatacaggttcattctttccgaggaagatgacatggattcaacttgggagaagaggctggtcaaacgttactatgacaagctttttaaagagtattgcattgctgacatgacccagtataaaaaaggcaagattggattgagatggagaacagaaaaggaagtgatatctggcaaagggcaatttatctgtggcaataggcattgtgatgaaaaacatgggctaggtagttatgaggtgaatttttcttatgttgaagcaggggagcagaaacaagcactagtgaagctggtagcttgcaagagatgtgcagaaaagcttgcttataagaggctgaaggagaaagataaagagaaggaggaggagccctacggtgaaaaggaaattgagttgaaagacagggacaagagaaagagagaacatgaagaaaatgatgacacctcagaggatgaggccaagaaagatagaagaaagaaaaagatcggaagggagcttcttcaaggagttcaggaaacaacgatgaaggtttcgaagagttcctcgaaggcatgttcccatgatctggttatcttagtggctacaaaaagttcttccatgctctttcggggg

SEQ ID NO: 14806 - DNA, 623 bp, Setaria italica
  Peptide Sequence Number=SeqID_80780
tggtataaatattaaagtagtaaggtaggtaggtagtcccttacggttgtaaaaggtaaatttgtagattggaaagacagggacaagagaaagagagaacatgaagaaaatgatgacacctcagaggatgaggccaagaaagatagaagaaagaaaaagatcggaagggagcttcttcaaggagttcaggaaacaacgatgaaggtttcgaagagttcctcgaaggcatgttcccatgatctggttatcttagtggctacaaaaagttcttccatgctctttcgggggaaaaaacgagcacggatcttgtaacaaagccattagtagtggagtagcaaatcgttgcaaatccgacccttgatgtgctttgactacaagtcaatgtaggtgcgctatctgtaattatgtgtgcccgtgttgtttcattttcacatcgctttcgtagctgtgagagatgcctgttactctgttagtcaaagaaaagatgaatgtaactactcgtgggtctactttagtgttacactgaaggagtgaaggacaatttcagcaactttgacttctgtatctatatcagtgttctggctggagaggttcggagttttaacctaaaaaaaaaaaaaaaa

SEQ ID NO: 14807 - DNA, 333 bp, Setaria italica
  Peptide Sequence Number=SeqID_80781
ccggcggcggttcggattacgaatcgagccaccccgcgggtgccgcaagcgagatggaggctggcctgcggctgcgcgccctcggccaccgctactactcctgcggcggattcaaacgcggtgggctcgcggccgctcgaggcgagcggcggcgccgcgtgggcacggcatcctgctcccctgctttctgctcccttgctgcgagtggaaatggcaatggcgccgcggttgggcccgtggggagcggcgcggaggtggcgtgcgccaggaggatgcttcacgtcgtgctggtttcgccgctgatcccaggaaatacaggatccatagcaagga

SEQ ID NO: 14808 - DNA, 1507 bp, Setaria italica
  misc_feature (1444)..(1507): n is a, c, g, or t
  Peptide Sequence Number=SeqID_80782
gaaaaagaaaagaaaaggagaggcccgcgacctagtggagacgcagtacagtagtgggggaagggggatgcctcggcaagcctcgacgctgccggcgccgccaccggagcgcggcgagatggccgaggtggtggaggcggacccggacgcggaggatcaggaggagaggtgggcgaggctgctgccggagctgctctccgacgtggtgcggcgcgtcgagacgtccggcgccgagcggtggccggcgcggaaggacgtggtctcctgcgcctgcgtgtgccgccggtggcgcgaggccgccgtcgccgtcgtgcggccgccggcggagtccggcaagatcaccttcccctcctcgctcaagcagccagggccaagggagctcccaatgcagtgctttatcaagcggaacaaaaggaactctacattcctcctctaccttggctacgcaaactcacctatggataaagggaaatttctcatggctgctagaagatttaggcgaggtccacatactgagtacattatatcccttgatgcagaggacctatcacaagggagcaatgcgtacatggggaaactgagatctgatttctgggggacaaatttcaaagtatacgatagcaagccaccatatgatggtgctaaagcgtcaagcagtcgatccagtcggcgttttggaagcagaagaatcagtccccaagtgtcagcaggcaactatgaagttggacaggtttcatacaaatacaacttgctcaaatccaggggtcccaggcgaatgtattgcgctcttgaatgcccttcagcccaggagacctgggaaaattcactgaagacgaagttcaggaagcccatgggccccacagctttgcggaataaagcaccccgctggcatgagcacttgcagtgctggtgcttaaacttccatgggcgggtaacagtggcatcagtcaagaatttccagcttgtggctgctgccaaccccagtgaccctgctggcactgtggatgaggaaacagttctgctgcagtttggtaaggttgacgatgatatgttcacaatggattatcggcaacctctctcagcgtttcaagcctttgccatcagcctcagcagctttggcaccaagctagcttgtgaatagcgatactgtttgatgctcattgtgttgctatgtggtttgtggtagcggatgcttctgttgttaatgttgtttgttgctatgtgatccgttctttttttagtttgaaaacataaatattgtatgtactactatatgtactaatgttctttgtacaagagatgtatcctgttgtattgtcaaagagatacttgtaccaatgcaagaaggaaattgtgtgttatgaacttctgctctgaactgaagcaaaagcctgtccaatgtacataagttcatggtgaagtgaaaaactctttttccttcttnnnnnnnnnnnnnnnnnnnnnnnnnnnnnnnnnnnnnnnnnnnnnnnnnnnnnnnnnnnnnnnn

SEQ ID NO: 14809 - DNA, 559 bp, Setaria italica
  misc_feature (23)..(23): n is a, c, g, or t
  Peptide Sequence Number=SeqID_80783
agtacacgagttccagggagatnaaggggcctggttcatcggtcatctcatacagtacctcgccaacagcggtcctgaactgcccattggaccattcctgaacctgcttgccgattgtgacaagcatagagcctgcaggcgaagtgaaaatggtcgagccgccctggttccggagacaaatctgtcgatctcgttcggagaggtggatgttcaaagcgtgtgagtttggaggatcagtgctgccaaactcatcccaacttgttttcgacttgcagctgttatgcaatgtcaggcgaaggattgacggcgcttctctggacatagcagagtctttagggttcttgacattatcagatagaaccttgatggcattttttgcaacgttctccattctcgatgcaacagtgtccatcctgtccctgaacacccggtacgtcgagccgggcaaggcggcgcccagcgcgcggtcctcgtcggggctcaccggccggaaccagcagaactcctccccgccggcggtcggctcatcgtccttccgccggaaccatctggccagctg

SEQ ID NO: 14810 - DNA, 332 bp, Setaria italica
  Peptide Sequence Number=SeqID_80784
cttctttgggatacaagagacctgcaattgttcaatctagatacatctttaagcaaccaggttttggtgctgaggcaataccacaccaggataatacatacctacacacagaacctccatcatgcacggggttatggcttgcactcgaagatgcaacaattaacaatggttgcctatgggcaattccaggatcacataaaagtatttcttttgtgtccatttgatgattaaaataaacttcttttgaaaagctagactatgtgacttttttctacttttaatgttttgcatcagatggtctgaaaatacgaatgatcaaagaacgaaaatgg

SEQ ID NO: 14811 - DNA, 260 bp, Setaria italica
  Peptide Sequence Number=SeqID_80785
gatttgtccttttctatttcttgtccagtaacttgttttagtcttattttcttgtagctttgagaatctttctccagcttcaagacatgcattggtcttgcatgttatagaaaccaaaggatgtgaatggtccaatggaaactggttagttcatgatgggattttttgagatggctccaattatatgactcagttttatttgtttattgttttagaatatcttgacacaactaactgtgcatccataaagaaaaaaattt

SEQ ID NO: 14812 - DNA, 485 bp, Setaria italica
  Peptide Sequence Number=SeqID_80786
ttacacttgcgctgtttcatctcccaataccgaactctggagtactaggcgcgtagagagtacaccgcaacagttctgtatccgcttgaaattataaaccggagttgcaggtatcaaacttagtgaaatgcatgtttagcgtctaatcaggctaagtgtctaataattgataaatagagttatgttgctcagtacgatcgcaaaggtgcgcgtgcgccaattgaaaattatcatcgcaaggatcatgggagttgcaagatatacacaccattttttcagcttcattgttaccaggccatgatgcgaaatgacggatttgttggcaccgtggttaatgcataacctgtttatttttgtttggcttaattaaaagtagtactttttttgttgcagcggatggcaatggatgactactactttaagagcggggataatatatcattcttctacgaggataaagcatttggagatgatggatgcttgaa

SEQ ID NO: 14813 - DNA, 443 bp, Setaria italica
  Peptide Sequence Number=SeqID_80787
caccgctgagcagctcggcctcttcgacgccaacggttacctcgtgctggagccgttctcgagcgaggaggatgtgcgggcgctgcgggacccgatggccgagctcgtcgccggaatcggcggcagcaacaactccaccggatcctgcgagcatcacgtatctgatcacctcgagccctgccttacacttgcgctgtttcatctcccaataccgaactctggagtactaggcgcgtagagagtacaccgcaacagttctgtatccgcttgaaattataaaccggagttgcagcggatggcaatggatgactactactttaagagcggggataatatatcattcttctacgagggtatctgatttattttctattgacttgtaggcatgagtcacacagttcattttttttacttataatttggttaggcatttactatgttta

SEQ ID NO: 14814 - DNA, 1217 bp, Setaria italica
  Peptide Sequence Number=SeqID_80788
atcaacatgaacatttttaagtaacttgctgagcaaccaatgcccacgccccacggagctcattttggcgggtctcccgacgcagtagcaagcagaagcagatccgcaccgtctcctccaccagtcaacccattctgagtagtacctccacccactcccggcaacctccgcacgctgccatgccgccggtcggtagcctcaccgctgagcagctcggcctcttcgacgccaacggttacctcgtgctggagccgttctcgagcgaggaggatgtgcgggcgctgcgggaccgcatggccgagctcgtcgccggaatcggcggcagcaacaactccaccggatcctgcgagcatcaccggatggcaatggatgactactactttaagagcggggataatatatcattcttctacgaggataaagcatttggagatgatggatgcttgaagcagtcgaaggaactttcaattagattcgttggccatgcattacatgaacatgatccggtgttcaaaaagttttctttatcggagagtgtttcaagcatattctcttctttgggatacaagagacctgcaattgttcaatctagatacatctttaagcaaccaggttttggtgctgaggcaataccacaccaggataatacatacctacacacagaacctccatcatgcacggggttatggcttgcactcgaagatgcaacaattaacaatggttgcctatgggcaattccaggatcacataaaaatggtctgaaaatacgaatgatcaaagacgaaaatggtacttattttgaccgccctatcccatcctatgatcacaaagaatttgtgccattggaagtaaaatcagggagtttggtaattatacatggagatctcgtacataaaagctttgagaatctttctccagcttcaagacatgcattggtcttgcatgttatagaaaccaaaggatgtgaatggtccaatggaaactggttacaaaggaaatcttaactaaacggggagttgcggctatggaagtgacttccagcccaggcttccagtaagcaaactacacggatggttttagacttttagtcactgtccttgttccaataaaataggggaatgctgccgagcaattcgattccatattcacatgtaaactttgtaaacactccccttaattaaatatcgtgacaaagtcgttgcttaaaaaaaaaaaaa

SEQ ID NO: 14815 - DNA, 813 bp, Setaria italica
  Peptide Sequence Number=SeqID_80789
atggccaggtttgaagacatcataagcaacaacatggaaccctgatttcagcaaatgagatgccattccaaagcccatagctccaagaccaatgaagccaatccgctttgctgctttagattccataacaagctggtcagctaatttgctcgcatcatagatttgttgactggcagcatctacgatgtttactccaaatgatgcttcccaaaccttcaggggtgaggcagatccatctccaattactgctgaagaaccatgtatcaattgttgataagcaacacccagaagtggcagtggaaacgttactgctttagccatatccatcacatagcttgcacttttctttgacgagtttaaaaagtcaataagcaaaggatcctcagtcagaagtttaggaactaactccacaaatatccttgagcttccagcagcatttgatattatgtcatagataatagatggatgaatcccagctcgaacaccaagatacattgcttcaacagatgcaataaaatgaatgctctccagcaaatcattcactagcctaattttgctgctagtgcaaaattcaccttcagcaaagtaaatggttttgtctagaccattgaaaaactgtcttgctctttctgctacatcctgtctcccagatgctacaacaacaatatgttgcttcaattcatcggaaagaccactgaaaatgtacccatcaagaagaaggacatccttcttttcatctgcaagtttctgatccagcttctccagctggctaggaagcagtgtcgaccgaatcaatacaacagcaccgcacca

SEQ ID NO: 14816 - DNA, 525 bp, Setaria italica
  Peptide Sequence Number=SeqID_80790
ggcgggcgcggtatcgatcgtggtgcgggacccgagcctgccgccgccaaagccgaagctggtggccaagggcgggaagctggaggtggaggaggagcaggtgggggtggcgcccaacggcaccgagttcgtgatcaccacggcggcggcgcccgagctggacgcgtcggcggtgctggtgggcagggtgctggacggcatggacgtcgtggccaagatcgccgccgttcccaccgtcagggacaacgccggctcgccatacttcagagtggccaagctgattggtgacaagagagcagtggttgcagagagaggattcaaccgtccttacaccaaggtcgtcatcaccaactgcggcatgctaagtaaaaccgagtagtactatgagaaaagcaacactccttttttctttaacgcgagagttcattgtcttcgtttcccctgtctcaaccatcacaagaattgagtggagagcccacggaaaaaagctagattggcgcgaaacaaaaaaaaaaaaaaaaaaaa

SEQ ID NO: 14817 - DNA, 624 bp, Setaria italica
  Peptide Sequence Number=SeqID_80791
tgtggagcagttaatttgcgccatcacaagtcctttaaaatttcatgagagatatcgcccttatctgagggatgcaggtttgcttgggctctcacaaatttgccagaagatgcctcagttggacaaagcgttgattactgcccttgttgagcgttggaggccagagacccatagcttccacttggcctctggggagatcactattacacttcaagatgttgcaatgttgtttgctcttcctattgatggccgtccggtttgttctaccactgatcatgattatgggcaggtggtccttgattgttttggtctggacgcaagggggccagcaatgcctggaaaatccttcctgcattacaaatggcttaagaagaacttctacgaattaccagacgaggcagatgacatgacagttgaaaggcatgttcgagcatatatcctgagccttttatgcggggtgctatttcctgatgggacaggaaggatgagtctgatatatcttcctctgattgctgatctttcacgtgttagcacatacagctggggttctgcagttctggcattcctataccggtctctttgttctgttgcctcctcacacaacataaagaacagtgggggttc

SEQ ID NO: 14818 - DNA, 507 bp, Setaria italica
  Peptide Sequence Number=SeqID_80792
tcccggttctccgcctcggtggggcgggcggtccacgcgacgtagaagacgtgggtgatgtcggtgaggggcttcagggcgtcggcgacggcggcggcgtcggcgaggtcgaggtggaggtgcgtgacggcgggggagggcggaggggaccagggcgggagcgggcggcgcgagagcgcgtagaccttccagggcccccccggggtgtcggcgagcgggaggatgtcgaggagggaggtgccgacgatgccggtggatccgacgacgagggccacgctctggtaggtgggctcggccgccgccgcctgctcgtcctgccgcttcttgacggcgccgatcgcgcccgtccaccaccagctcatcgcgggagccggatggattcggaaggcggcgttcgcgggcggaagggagggggaggggatcggtcgggaggagaagagcagagcgggggaggaggactggaggtgcgtgcggggtctcctcgcctgactgcggtctggtctggat

SEQ ID NO: 14819 - DNA, 261 bp, Setaria italica
  Peptide Sequence Number=SeqID_80793
tagctagtcgcgtaagggctgatggcacaaacgaattagtgtactatggttaaccaaaagaaatgtctcctggagcctaaacatttatcttaatggctatatctaacattgtgtctgttggataaataatcgataaaacaatatactaagccagctgcataaaactaatagcgacgtcctgctccagataaacatttcaacgacgataatgacatgtacactatctttattggcattaaacacagaaggttaagcaaaaaa

SEQ ID NO: 14820 - DNA, 1161 bp, Setaria italica
  Peptide Sequence Number=SeqID_80794
aagaaggaagaggacagtgttctccagctgtgccccaccagtcgatagtcttgttctccatagtcagcgagaagtacagcaccacacccatgaatgcaactccagcatcgagcgcggcagagagaatgtagttgtaccttgtccaccacttcttctggtagcggaacacaaagaaattgaagatggtgccaatgagcagccatgagttatagttcacagccgttgctgggggcatgcttgcagtggcaccaaggagcactggcagattgatcaatggtatccacctctggttggggtacatcctgtggagagcgtatacaataactgggcctgctgcgccaataaggaagaaccagttcagggcgccatagttcccagctgacccaaagatgcgcctcggaccaacaaggccccagatgactgatgcatcgaagaacacacggtcactagggcatgtccatgggctctctggtggtagtgaatccgagcagatgtccttgatggagccgagtagccaccatgctgtcccaaggttgaccgtgccagccacaatggtaccaatgaactgaacaaggaacatggacttgggagggatcttcatatagtgtccaagcttgaagtccgagaggaaagcaacagcctgtgacatgctcatgtagccataaaccttgaagcagacgttggcaataggataccccggcataatcagacccatggcatactcagtgatcacattcagaccaggcgtctggttggttgtcgcagtgatgatgctgatgggaagggtgaagatgaatgccatgccacacgcgaagatgaggccccaccacgggagctggacctcacgcttaagtacagtgcagaggaggagggacactgcaactgaaagcgccatcaacgagtagaaccaccacgcagggatgtcatcgtacttctccatcagcttcgtgtggatgtcaggcttctccttctgcgatgctttgaagcggcggtagatttcctttccgtagaagagcccgacgtgcgtgatggtggcagcaatggtggcgaagctgaacccataactgagcgcaaagaatatgctgagattgactctgccgcgctgattgtacgcgtccttgtcaagctcaaactgattgttcacaattgaagggatatcgt

SEQ ID NO: 14821 - DNA, 2012 bp, Setaria italica
  Peptide Sequence Number=SeqID_80795
attaaattgttcaaacaaaaatcatgaagcatttccaacagaatccagttcacagggatgacaaaacggttctctaatagaaagcaacaaaagtaaatatccggcttatctccatgcgctttattcgacaaaaggactagtcgcatgaagaacatcacatctggtagctgctgcacctgcacgccctcaaagggtctctgtcagtaatgcagcgtcacaatcaatgaagcgttcccaggcattgacctcaatccaataggcaagaacgtcggcaagaagagaacttcgttcagcgttacaaggagcagcagggaattcatttgaattccgaaatttcacatgcatttggcatgttgctccatgaggaagaaccaaacgtgatgccaccaccgaggacaggtttgcactcggcgttcatgtcgttgcccagtagaattgcgatggcattgttgaaagtggaaggatcagctgagttaccagagaatagtgcatctggcctcaggttttcaggatgaggtgaacctgccgactcatgtctaggctctactgcctgctcaccagagcccattgaaggactttgtgcaggagaaattttggagagctgaaagatatcaggtgatgcggcactaacaggagtggattcggtgaatgaatatccactgaaaggagcgcattcattgatgaaagaactgtgatgatcgtcccaatattccgggcagagatcaaactctgggctaaccaccgtagtagtctcacatggtgtattagcagaggaacttgaacttctgacagatggttgtcggttcttcccggatcgtccctgagcttcatgaagcagctcttccagaagcccactgtttcttggtgatgcacactcagatttcactgatggggttgctattggagagtgcaggtaaggatcaactaactcggtaggctgcattgcaggagccaaagtataattgtgccagctatttggatcagattcagtatcttggagtgaagggagctccctcttcaaaggaccattgatgggcctagaagcagagaagttgccatttaaaaaggcatggctgccagaaagtgcaaccccaaaaggtgcaatagtcttgctgctagcattggcttcattgagataatcaaaacctagagcctgcttgagcttctcagagccatttgaaaattggtccaccgaggaaagcacgccatcaatggtgtcgctcaatgcagggagcacacagccagattgtttcagcatccctgagtggtctacctgatccatgaagctacaattctttgatgcaaaactctggccgagcaaattgcctattgaaactgctgaaaggtgtggtgcataggataaagcatctggattagcaatgaaattgtcactggtaaaatctggtagataaagaccgttcccactcagaagatcattcgatatattctcgctgcagttaaaatcaccagagacttgctgatcttcacttgaagattgattgcatacactagcaggatagataggaagaccagctcgttggcatctctttattcgagtgttccagtaattcttaatttcattgtcagtacgccctggcaaattagcagccatcctcgcccacttgttccccatcttggcgtggagctggatgatgaggcgctcctcctcgggggtgaaggcccccttcttgaggttgggcctgaggtggttcgcccaccggaggcggcagctcttgccgcagcggaacagcccggtgttcttctgcaccgcgttccagttcccctcgccgtgcttcttcacgtagtccaccaggatggcgtcctccgccgacgtccacgggcctttcttcaggggcggcccgctacccctgtgaggcgacccctcgccgctgctcacatcgtcggccaccggtgagtccatctggtcctgcagcatcatgtcgcagtcgctctcgctcttcacccgatacatcgcggcgcggtcagggcgcctggccgatctcgcagcagcc

SEQ ID NO: 14822 - DNA, 836 bp, Setaria italica
  Peptide Sequence Number=SeqID_80796
tacaggtgatctctcgattagctccatttgagagaggtatatatgaggattatgttgcaaatttctggtgcagcacttcggttattatcaagtggaagatattgtttgcgattaaaccactgaaacttatgagtctctctgctaccgtactggctttcttgccttcatttgttcagcaagtcaagtctccaagtaatcttggcttcctttattctttgatgaacagctcattctctttctacctgttctcataccaagttcatgagaaatcaattttgcttcctcttttacctgcaagtcttctagcactaaaagaacctcagatgttcggatggtttgtgtactttgcccttttctcaatgtacccacttatctgccgtgatcagcttcttctacagtatattgctgttcttggcctgttctttctcatatactactcacctggtggaagccacggaaagagatttaaaatctcatgcggggcaaaggtagtacttagcttgccatttttatgctcacttttacttcacattacctacctgcaaatagagcctcccaagaggtatcccttcctctttgatgcgctgatagtgttcgtcagcttttcacaatttgtcatcttaactctgtacaccaattataagcaatggatgttggacacccattctagatcagtaggtgtgaagaaggatctatgattggaaattttgacagctaattttacagagaaagccactgcacctttgtaaccttgtctgtattcccttgtaacattgattcatttttgttgaatgaaatggatgaggttttgctcattgagcaaatgtctaaaaaag

SEQ ID NO: 14823 - DNA, 614 bp, Setaria italica
  Peptide Sequence Number=SeqID_80797
gcttttaggttctggcaaagcaattatttcaagttgtgcatgcactgttgcatccttcttgtcaaaaccgtgattcacaaggtaggagatgacagattgtcgcagttcatttttcatgctggggtacccatcctggatttctatagcaagttctccatcatactgttgaataaacgaaaatgggacatgcaacatgaacagattaatagatttcattcctgctacgacaccttcataaagaggagcactgccaccaacttgaaactctgacagaaacacaagaaaacggtctgcaattgttggtggcttcgcttcttcatcttctttctcaggcggggacgcatgagaaatagaaggatcgtgtccagatgtttctggctcaggtacctcttccttttgctttatccccccagatgccgatgttgctgacttgggaacctctatctcttcctccactttctttacgatgtttattggagtcttcttcttttcttccctttgtcaccacactcatccagttctgacagcttcctttccaaccactcagtagccttgtggatattttttgccccttgactggatcaaaatgcatggtaacatagaagctctcttct

SEQ ID NO: 14824 - DNA, 1007 bp, Setaria italica
  Peptide Sequence Number=SeqID_80798
gttgctgacttgggaacttctatctcttcctttcttggaggcttgttcttttcctttgtcaccacaatcatccacatctgacagcttcctttccaaccactcagtagccttgtggattatttttttgccccttgactggatcaaaatgcatggtaacatagaagctctcttcttccgtcagcgtcaaccttttccacagggcttctccaaattttgtcagaacgtgcccatctgtttctagtacaaacagatcaccagagcacttatagataacgtcaaactgatcattgatgcaaattattgcgagttgacgctcgcctatttctttgtgtaagatgcgcaacctaaattgttggaacagtacaaaaattgtatattaacttcgtgcataattgttaagagaaaaacaatggttctatgaatcaaaaaagcatacccatattttgttaggcctgattcagcaaacttctgaatctttttactcaaagatgacggattactggtgccttctacaagtttcgcaagtcctcccggccgactaattgatttcagcagggtactacgagagcaattgccaagaacactgaagaactctttgtcattcggatcacacacccaaccatgtatgactttaatattaagaacataaaacaagtagagctcatcacatgctatgaaatcttgacaccttcggcatcctggaatcagatgaagcccttttgccagtgaaggcacaatttgcagcaaacgttctttgttgaggaaaccagggacactaatattatgtttggcatagtgtgacacagtatactctagtgctgtcattatgggtttactgagcatactctcttccgcaaagggagggaagtccttgcattctgggcctactgttaggttgaagtagtttgatagggctatcaacggactagattctgtggaaagctgacacgcgatgaacttgttgaccccattgaactgggcgcgtgctaattggtaccgtgatttaa

SEQ ID NO: 14825 - DNA, 1703 bp, Setaria italica
  Peptide Sequence Number=SeqID_80799
tgtcgctcctgacttccatgtttctcacatcccattcattgtcccctttgccccaacatttacccatgtcaaacttatcaaacatgtgatttatgtagcctagtcccatactccttgcagctggtgttgttgcattgtcccatgtattgttgtacagttcgtatggacgaaccatttcattatcttcaacaaagctgataaacttttggatgcttttaggttctggcaaagcaattatttcaagttgtgcatgcactgttgcatccttcttgtcaaaaccgtgattcacaaggtaggagatgacagattgtcgcagttcatttttcatgctggggtacccatcctggatttctatagcaagttctccatcatactgttgaataaacgaaaatgggacatgcaacatgaacagattatggaggtcaataattattacaaaatacctctaccaacgcctggcgtttactaatacacacttttaccagaacatctgtgctggtcccaatgaaacatttgtatattatataaaaaggttctaatatggatataattcatgctcgaaacctggctattcaaaattaagtaaaaatcctagtgatttatttatttttagcagaactctagagtgaagcttactctgacagaaacttgagaaaacggtcagcaattgttggtggcttagcatcttcgtcttctttctcaggtggggacacatgagaaacagaaggatcgtatccagatgtttctggctcaggagcctcttccttttgctttatctccccagatgccgacgttgctgacttgggaacttctatctcttcctttcttggaggcttgttcttttcctttgtcaccacaatcatccacatctgacagcttcctttccaaccactcagtagccttgtggatatttttttgccccttgactggatcaaaatgcatggtaacatagaagctctcttcttccgtcagcgtcaaccttttccacagggcttctccaaattttgtcagaacgtgcccatctgtttctagtacaaacagatcaccagagcacttatagataacgtcaaactgatcattgatgcaaattattgcgagttgacgctcgcctatttcttcgtgtaagatgcgcaacccatattttgttaggcctgattcagcaaacttctgaatctttttactcaaagatgacggattactggtgccttctacaagtttcgcaagtcctcccggccgactaattgatttcagcagggtactacgagagcaattgccaagaacactgaagaactctttgtcattcggatcacacacccaaccatgtatgactttaatattaagaacataaaacaagtagagctcatcacatgatatgaaatcttgacaccttcggcatcctggaatcagatgaagcccttttgccagtgaaggcacaatttgcagcaaacgttctttgttgaggggttaaggtaacgaggaagcttggcaacgcatgacttaaaacgctctagtgctgtcactatgggtttactgagcatactctcttccgcaaagggagggaagtccttgcattctgggcctactgttaggttgaagtagtttgatagggctatcaacggactagattctgtggaaagctgacacgcgatgaacttgttgacccctatttgtaacttgggcgcgtgctaattggtaccgtgatt

SEQ ID NO: 14826 - DNA, 800 bp, Setaria italica
  Peptide Sequence Number=SeqID_80800
tcccgggcgtggcggcgatgtcgtcgtcgaccccgccgccggcgcccgtgcagaagtcggaggaggagtggcaggccatcctcacgccggagcagttcaacatcctccgccgcaagggcacagagtaccctggaacaggtgaatacgacaagttctttgatgagggcatttatgaatgtgctggatgtggaactcccttatacaaatcatctacaaagttcaactcagggtgtggctggccggcattctatgagggacttcctggggccataagacagacgccggaccctgatgggaggcggacagagatcacgtgtgctgcctgtggaggacatttggggcatatattcaaaggggaagggtttaaaacgcctaccaatgagcgacactgtgttaacagcatttcactcaagttcattccagcctcagaggaagcctgacggcagatgaacaccaacggcagaatgggagcttggcctttgttggttgctttgacaatgtagcctgatgaaagttgtaattcttctgataatatctgaatatgtctgtaattgtgatgcttttcacttgcaaatggtgatcttgtcgacaaatcaataaagcttctactgtaaatgattacatgtgcaactccagtcttactgctttatctaggaggtgcaaacaacagtacatgtcacacttattcgcacgtctgaatgtgcctgtaactgtaatgctttatcagtaatttttagtcgcaagtggtgatcttgtcgacaaatcaataaagtttctgctgtaaatgatctaaaaaaaaa

SEQ ID NO: 14827 - DNA, 598 bp, Setaria italica
  Peptide Sequence Number=SeqID_80801
aaaacacaattgatcttttaccgtagcaacgcacgagtattttgctagtatgctaaaaaacaagtaagatttctgcccagttttttcgtacgtcggcccctaatccatcgcgatgaaaatccggagaaaaacggtggaaactgagcttcccgacgtgaaaaatctggagtccgggtggtctacgagaaaaatcggagtccaggccgtcaggcccgcgaacaaaaaagaagtgaagaaaccggccagcctgcccaccaaccgaggaaaacctctgctaggaaaaaaaggcaaagtagaaatccaaaaacatgcacgggaggatctgatccattgacctctacctccccaagaagcacttccacttcggctacagttcatttgtgaatagaaaatagattttagcttattatacgagtaattaaggaaatcctaggccatccaccatcacctgccatacgtggcaatgatcatagccattttccttttggtaccatggtaaaaaaatattcttagcttacaaagaatatatatctatacaagtatttttaaaaatttctagctatctatttagtttccaaactatagaaactgtttgttg

SEQ ID NO: 14828 - DNA, 307 bp, Setaria italica
  Peptide Sequence Number=SeqID_80802
agaatggaaaccaaggctacgctacccataattttgatatgaacgagcaagccgaagatgaggattaccatgatgaatcaggtatttatattggcaatcaaacattttcctgcatgtgcaagacggagagctagaagagcatgctgtccaggatgaacaaggccatgctacccatcacttcgatcggctattgtagcatcatggcctcaagaagatgcagggaagaccatttggattcaacaagataatgctcgcacacatgtgcccgatatgaatgttcttgacctagattttttcgcctctctcg

SEQ ID NO: 14829 - DNA, 865 bp, Setaria italica
  Peptide Sequence Number=SeqID_80803
ttttttttttttgtatcattagcgccttttttctttaccgccaaaaacaattcagcgtaggaaaatgaatactcaagaggttacaaagcccatctagacattcagcgcatagagctcccctaccatctcctatacagccatttcttcaacacctccatgaaaactcacctagatctaaatgtaccactcgatgcaacaggagagcaaggccatgaagttgaagaaggtgaccaggtccaggaagatggattcgtccatgaagaacagagacatgctgcccatcctttagaacatgctgtccaggatgaacaaggctacgctacccataattttgatatgaacgagcaagccgaagatgaggattaccatgatgaatcaggtatttatattggcaatcaaacattttcctgcatgtgcaagacggagagctagaagagcatgctgtccaggatgaacaaggccatgctacccatcacttcgatcggctattgtagcatcatggcctcaagaagatgcagggaagaccatttggattcaacaagataatgctcgcacacatgtgcctgctgatgacgaagcatttcttaatgttgtggcaaaaacagggcttgacattcgcataatgcaccagcctcctaactcacccgatatgaatgttcttgacctagattttttcgcctctctcgcgaaattcatcgtcagcacctgcatcttgtccctgcagatcagggtgctccacgtatgcttcttcttccggtggttgagagtggccggcaatgtcatgccatgcaacagcttccagaccatctgagtacggcggcgccgtgaagggagcgcaaacggcacccggcttgtcttgttggta

SEQ ID NO: 14830 - DNA, 1203 bp, Setaria italica
  misc_feature (3)..(3): n is a, c, g, or t
  Peptide Sequence Number=SeqID_80804
tcncttttagtttttttttttagtaacaataactacatatattttcttccttgaccaagaaacagaaagattacaatacatactcttacggtcggttatttcatgaccagtccatccaacacgctagaatggttacaataacttgaatgattttcagacaacattaatccatccaacacgctagaatgcttacaataacttaatgattttcagacaacaatgtagttgatatgcccattcttgtatatgcccattcttctatgtcgtaatttaatcgtaataaaataaacacactcatggttggatggacgtggaacgaagatggatcgagaagacctagcatgcagctaattaatagctggattttattctttggacgccccctgattctgaagtgaactgatggacaggagattgcatgcatggtgatcggatcacccagatgagatcagtagtctgtggttggcaggtggtcgtgcgggcgctgtccgatgaagatgatgtcgtagacgagcgcggcgatggcggcgccgacgaagggcccgagccagtacacccagtggttctcccagacgccgctgacgacggccgggccgaaggacacggcggggttcatggaggcgccgtcgaaggcgccgccggcgaggatgttggcgccgacgatgaagccgatggcgatgggcgcgatgacgccgaggtcgcccttcttggggtccacggcggtggcgtacacggtgtagacaaggccgaaggtcatgacgatctcgaagacgacggcgttccaggcgcccacgccggcggacagcgagaaggctcccacggcctcgccgccggtggcgatcttgaggaggaggcaggcgacgacggagcccagcagctgcgccacccagtagacgacggccttgaggagggtgatgttgccgcccacgaaggcgccgaacgtgacggccgggttgacgtggccgccggagatgttggcgcccacggccacggccacgaagagggccagggcgtgcgccagagccgcggcgatgaggccagaaggagtggtggcgccgccagcggtgagcttgctgaaggccatgccggagccggagccggcgaatacgaagatgagcatggagatgaactcggcgacggcggccttggcggtgtcggggtggacagctcgcccggagcgcccacggagatcctgctcaccgg

SEQ ID NO: 14831 - DNA, 322 bp, Setaria italica
  misc_feature (283)..(322): n is a, c, g, or t
  Peptide Sequence Number=SeqID_80805
tgaccaagaacgccatggacgcctggaaggaattcaagaacaagagcgagctagccaagggctcagcagattccgccacctgatgtaacaccgtgtttgtagtttgcctgaaaccgaagatttctgtcgagtgctgacgtatccagggatgactattgaattcgcgtgtcctgtgatcctgtccaagtagctgcgtgtgaagttgtttcgatttcaatgcttatcactaaatgttctaatgaagacaatttatttttttacattgtataattatttaaccccnnnnnnnnnnnnnnnnnnnnnnnnnnnnnnnnnnnnnnnn

SEQ ID NO: 14832 - DNA, 765 bp, Setaria italica
  Peptide Sequence Number=SeqID_80806
aaagatgctttgcaagatgccgcattgtgttcttcttactatcaattatatttttaatgtctattcttaggtgatataatctgagtactaatatccccgcccttggacgatgcagcagcagctaggtgctgggtggttctggtgtccatggcggggaagcagcagcgtgttgcaatattcaccaccgcgagcctgccatggatgactggtactgccgtcaaccccctgttccgtgcagcatacctcgccaaggctggagactgggaggtcacgctggtggtaccatggctgtccaagggggatcagattcttgtttatcctaacaagatgaagttcagttcgcccgcggagcaggaagtctatgtgcggcggtggcttgaggagcggatcggggtgttaccgaggttcgacataaagttctatcctgggaagttttcaactgagaaaaggagcattctacctgttggggacatcagtcagaccatatctgatgacaaagcagatattgcagttctagaagagccagaacatcttacatggtaccatcatggacggaggtggaaaaccaagttccaaaaagtcatcggtgttgttcatacgaactatttggaatatgtgaaaagagagaaaaatggatatatcagtgcatttatcttaaaacacataaattcgtgggttacagacatctattgccataaggttataagattgtctgcagcaactcaggatgtccctaggtctgtgatttgtaatgttcacggagtc

SEQ ID NO: 14833 - DNA, 1521 bp, Setaria italica
  misc_feature (1472)..(1521): n is a, c, g, or t
  Peptide Sequence Number=SeqID_80807
tctattggttacctattctattggtacggtatcggaccgaggttcgacataaagttctatcctgggaagttttcaactgagaaaaggagcattctacctgttggggacatcagtcagaccatatctgatgacaaagcagatattgcagttctagaagagccagaacatcttacatggtaccatcatggacggaggtggaaaaccaagttccaaaaagtcatcggtgttgttcatacgaactatttggaatatgtgaaaagagagaaaaatggatatatcagtgcatttatcttaaaacacataaattcgtgggttacagacatctattgccataaggttataagattgtctgcagcaactcaggatgtccctaggtctgtgatttgtaatgttcacggagtcaaccccaaatttattgaaattggcaaattgaaacatcagcaggtatgccaaagagagcaggcattcttcaagggtgcatattatatcggaaagatggtatggagtaaaggttacacggagcttcttcagctgcttcgtaagcaccaaatagaattgtctggccttaaaatggagttgtatggcagtggggaagattctgatgaagtaaaagcaacagctgggcgactgagcctagatgttagagtctacccaggccgtgatcatggagattcaatatttcacgactacaaggttttcataaatccaagcacaacagatgtggtatgcacaacaactgcagaagctttggcaatggggaagattgtgatctgtgcaaaccatccttcaaatgaatttttcaaaaggtttcctaattgtcacatgtacaatactgagaaagagtttgtcaggctaacaatgaaagcattggcagaagagccaatcccactgtcagatgatttgaggcacgagctttcctgggaggcagcgacagaaagatttgttagggttgctgatattgcaccatccatgtctgtcaagcaacaaaaccccacttcacagcatttcatgcgcatctccccagaggaactgcagaagaacatggaagaggcgtcagcatttttccataacacgatctctggaattgaaactgcccgatgtgtgttcggtgcaataccaaataccctgcagccggatgaacagcaatgcaaggaacttgggtggaatttgcagggataacattagcttctcttgcgatgctatgactaaccagtccagttgtcggctgcggaactaactcagcaacacgaaaactgtcactcgaaaaggaactaagattgatcaggcagctcttattgcgattttctggtgtggcagtactcgatttttcttggcaaatcggaggcgttctgaagttcgtaatgcatatcgtgcaattgtaaatctaaagcaggtgaatgcaaatccgtgttatatgttggcttcctgattggcacatgcgtcaacattgctcttatcccactttaaatttnnnnnnnnnnnnnnnnnnnnnnnnnnnnnnnnnnnnnnnnnnnnnnnnnn

SEQ ID NO: 14834 - DNA, 621 bp, Setaria italica
  Peptide Sequence Number=SeqID_80808
aattctaaacccaatcatatttttacacaacactcgaaatttaaaatccctagagtacatacagtttttgatactatatttctagtacccattataccatcattcctatgttatcaaggtgtaaatgctgcaagatctggtatttttgcactaataagttgatatttctatttaataagatgactggtcctaatatttttcttatattaattttctcagtttcacctgcctacttttaattcatttcatgaatttccgtagaaggatagctgttgttccttgcttgcaatcttctgattttttttcatggtgtctccttcctgcaacccttgcttttattttttaatctgcctttggggaaatttgggacatttgactatttgagcattctgtctctgaggtttcactaaccatccaaattaatttgttaatctgcattccatccctactctaaaaaaaagcaaaacggcgactattttacggtcgtcattctaccgtcgcgcgatggccctcgctccgagcgatcgctgccgtgcgattcttcttctaccctccgcgtaacgcgcacagccctcccttccttttatcgtcctcggccgtccgctccgtcctccacgaccc

SEQ ID NO: 14835 - DNA, 436 bp, Setaria italica
  Peptide Sequence Number=SeqID_80809
agttagtggatttgctctgcacggtggtgaaggccccccaccctcccagcgtgatggagcagttcatcttgatgtcgaggtccctcttatagatgccgagcacgttcaccctcccggtgatctccgtgtagctcgtgaggttgtagtcctggccgaagatgaggtccgtggcgttgacgttgggcgagatgcggtcggcgagcacgtcgagcgtgacgttcatgcgcacggtgcggtcggcgccgacctcgccgtccggcgcgtacgccacgccgaccgtctccccggcgtagtagaagtccgtctcgctgcgggcgaaccggaaggaggccacgttggggttcttgatggagatgtcggcgctgagcgtggcgttcacggacaccgggtgccgctccgtgccgaggtcgccgtccacgccctccagcgtgacgcg

SEQ ID NO: 14836 - DNA, 483 bp, Setaria italica
  Peptide Sequence Number=SeqID_80810
agtcgcactagttttctgaatctgagagatagtggtgggattgtgatgcatgtaaatcaggtggtggtatcaaagtttctgctctctcattctctctcaagtcagtgtccctcacaccaactttaagcagtgtcgtaacagggattttgggggtgttgctgacctgtggcttctccttgttgatggagcatgtgttgaacctctcacgcgtcacccctgctcccctaccaccaacaggggaggagactggagcctagacaagtgccgtatccagcatgtccttgatgcgactctccacggttgggaacacctgtgcctaagtgtgagggatgagcgactcttctctcatggggtccaacccttaccagtttaaatgatgtggtgacattgcagcaactaaattgtagcttaagtctggctcacccatgatctgcaccagtaggttggtgaaggtagactctcttctttacgggttacttgact

SEQ ID NO: 14837 - DNA, 548 bp, Setaria italica
  Peptide Sequence Number=SeqID_80811
aggttgtttggtttctgaatctgagagatagtggtgggattgtgatgcatagtaaaatcaggtggtggtatcaaagtttctgctctctcattctctctcaagtcagtgtccctcacaccaactttaagcagtgtcgtaacaggatttggggtgttgctgacctgtggcttctccttgttgatggagcatgtgttgaacctctcacgcgtcacccctgctcccctaccaccaacaggggaggagactggagcctagacaagtgccgtatccagcatgtccttgatgcgactctccacggttgggaacacccatgatctgcaccagtaggttggtgaaggagactctcttacgggtactgaccttcttgcaccatgttgcatgttctccagagggggcagcaatatagttgcggtgtcctccatacccttagttgccgccacgatgacgggtggagttgtagcagtcctccaccatgccacggtagcaagtcatctgccccccggaggattgtatgcggtggtgcctcatgccgcgattgaagttgtcta

SEQ ID NO: 14838 - DNA, 2150 bp, Setaria italica
  Peptide Sequence Number=SeqID_80812
ccccatcagatattacagatcaccataagtactaaagtctattacataacatggctaaaataaatgacaactaaggatagttgcaaggtgacccatttggtgatggcctcaggcctcctaggctgcttgggcccctggtgctggcgctgacattggggtaatcatgctcttcttccggctcctgggctggttcccttgctccaccaaggtcttgattattgtcatcctcgtgctcattagaggttgtggaaggggttgtgcaagaacatcaacatcaatattagtaatctctttccctttcagtgtcagttcacccagtttgttgattaagactctgtaagctaattgtatgctatcctttcttgggtggagtttggctttgtctgctaaacaagtgcttttcctttggtggttgtttcgttttgactaccaacttgctgactggggttgcatcttggtggtgtgcttaggatgggtactggtggagggcgtgagatgaaatcgatgaaggcagtgagatcatcagcctgattgtgcgcttctacggttgatgtttggttgtcaggtgcccctgaaggctctataggtgttatagttttttgcaggtaccttggagctgttgttatgttattgagttgcaatgtgggttcaagttcagtatgtgaatgctgtccaaccagctccacatcaggttcggtttcagtatgagggagttgatcatctagctcagcattaggattttgtgtagttgggtttggtttctgaatctgagagatagtggtgggattgtgatgcatagtaaaatcaggtggtggtatcaaagtttctgctctctcattctctctcaagtcagtgtccctcacaccaactttaagcagtgtcgtaacaggatttggggtgttgctgacctgtggcttctccttgttgatggagcatgtgttgaacctctcacgcgtcacccctgctcccctaccaccaacaggggaggagactggagcctagacaagtgccgtatccagcatgtccttgatgcgactctccacggttgggaacaccttcttgcaccatgttgcatgttctccagagggggcagcaatatagttgcggtgtcctccatacccttagttgccgccacgatgacgggtggagttgtagcagtcctccaccatgccacggtagcaagtcatctgccccccggaggattgtatgcggtggtgcctcatgccgcgattgaagttgtcatcgtagtcatctatgtccctgcagggatggtagtcgcggtcggcatggttgtcatgtccatggccgctacgtcatttcccaagggagtccagcgccccatagttccaaaggaactcgcggcgtggcttcctgttgggtaggccatctccaactccccggccatcatggaaggagaggtccttcacaacgtctaggtggacatggagcttgtagtcaaaggtgcccttgcagccacatggcgggttgtggtactgtgtagtggtgtcatcgttgatgtgctccctgttaggatcagcgatcgtcaacaaaactcgcttgtggtagccccaaaggttgtaggtcctcatgcagtcctggtgacgggagtagcccttaacgtacttgatggtacaggttggcccgatgacttttgccgccacctcctcggaccaagcgtgaactggcaccccttcgatgtatagccgcacccgatactccaacttgctctccacggcgcctcgtccactactcgaagttgaacacccggccatggctccgcactccgtggtgatgcaggacacgttggtaggtgcggctgtcggagaagaagatgaggtactgcttggggaagtgcttgaccacctcactttgatctcacggcagtcaatgtgcaactgttcttccaggacgttggtgacgtggtaagtgccggagtcatggttgttgccgttgagccaacggaccatcgtcttgctgatgatagcctccctcttgcacttgatggtgactgtcgcagtgatggcgcagaccgccaggttaggttgggcacggtggtcgccatggtagggctccatggtcaccggctttccctttgcaacttggaggtaggagcgcccagccgagcagaaatgctcggcaggcgggtagga

SEQ ID NO: 14839 - DNA, 364 bp, Setaria italica
  Peptide Sequence Number=SeqID_80813
gcgccgagcagaaggattagcttaaacattcatgcgttcttccactaaaactagttagaagccacaagtatctaatcctgggactaacttaaacatcaatcaatcatcatctacagacacaccaccatgcacaaaccctgtcgtctcaacctgtggatctcccccattcccaaattgcaaacgaattcctctaattaatcccaccactacagattcgagattacagcctacagcagcaggagctgcctcaaatggtgccagagcagcgtcgccagtggcgctgccatcaacagccgcgccgaagcggctagcggggcggcggcgccggcggacgcgtctccggtggccatgttggcgagccacg

SEQ ID NO: 14840 - DNA, 904 bp, Setaria italica
  Peptide Sequence Number=SeqID_80814
ttgccaattactagaggtcttaggatacttcaagttataaatgctttggatgataacaaaaggtattactcttctcttttcaaaataacagaagatgcttctccaagttgttctctcatcatatcaatgttatgcttcctgaggatctaaggggtctccgacatctgagagccttagatttaagtcggagtgcattgacgtcattgccagagtcaataggagaactgaagctgctgagatacctctgtattttccaaacacgaattgccaagctacctgaatctatctgcagcctacactacctgaaggttttagatgcgagaaccaacacgcttggagagcttccacaagacattcagaaattggtcagccttcagcacctccttttagatttctggtctcccctatgcatgccaagtggaattgggaagttaagaaggctaaaaacattgacgaggtatagtgttggaacaggcaattggcactgcaacattgctgaactacatcatttggtgaatattcatggagaactttgcattacaggtctaggtcgagtgaccagcattgatgatgctcagacggcaaacctgatcagtaaaaagcacttgcaaattctgagattggattggtctgctggattctacgctactgaatgtgagcacattgttaatcagaataatgcaacatcaacaccagaactggatgagggtgtatttgagagcttaaagccgcagaggaacctcgaggagctagaggtaattaattatagtggctacaaatatccaagctggttggggatcctgccttttcacgtttagccaaggtgactctatggaagcaaaaatgccagtttctccagctcttggccaactgcctcaactccatgaacttgtgatcattcata

SEQ ID NO: 14841 - DNA, 242 bp, Setaria italica
  Peptide Sequence Number=SeqID_80815
atccgagtgcacaaggaattgctcgtgtgtagcatatgcctacgccaacctaagcaatgctggcactacgggcgacacatcgaggtgtttggtttggacaggggatctcatcgacatggagaaggccagctttgcagagaatttgtacatccggctaggtgaatcccctgatcaaaagaagagcaatttgctgaagattttactcccagttatagcatgtctgctgctactcgttcgtctag

SEQ ID NO: 14842 - DNA, 612 bp, Setaria italica
  misc_feature (500)..(612): n is a, c, g, or t
  Peptide Sequence Number=SeqID_80816
aggcagtcttctccagctactgtgctcattacttgagcaaagttacctggaaggtacagatggacaagatatgtatgtgaaactcgtggatatagttcccaagatagcagcttccttacaggagcaacatgatggctccaaaagtctttatcagtacttaaagcacaaaattctgatggtaatgatgcggctaaaaccttacatgcagcaagattgctcacgtattgtttgttatctgaaattacttcgacagtactttcatgaccttcttcatgaacctatctcgcaacatattgctaaactagataattgtttagaaggttctccatttttactgaacatggtagatttagtcgagagtcaggataagtcaactcggcacctgcaaaggcaagctatctatttgttcctcagtttttccatatgtttgtcttacaacagaaacgatggtacacttcaatgttcatgcaagagggatgattgtttgttgggtcaacaannnnnnnnnnnnnnnnnnnnnnnnnnnnnnnnnnnnnnnnnnnnnnnnnnnnnnnnnnnnnnnnnnnnnnnnnnnnnnnnnnnnnnnnnnnnnnnnnnnnnnnnnnnnnnnnn

SEQ ID NO: 14843 - DNA, 212 bp, Setaria italica
  Peptide Sequence Number=SeqID_80817
gccagggaacctcctggttaatgcaaactgtgatctgaagatatgtgattttgcattaaccaggaggttccctggctaatgcaaactgtgatctgaagatatgtgattttggagtatcccagctgaatgaaggtacttcatgcctcggagcagctgaaaaaggaagtactggcagtggtcattggaaagtggttgagatgatttaatatttg

SEQ ID NO: 14844 - DNA, 1638 bp, Setaria italica
  misc_feature (1)..(43): n is a, c, g, or t
  Peptide Sequence Number=SeqID_80818
nnnnnnnnnnnnnnnnnnnnnnnnnnnnnnnnnnnnnnnnnnntttttggatctggaaccaaggccttcagatttccatacagcagatcagaatctaaaattacaatacagcagatcagagtctaaaattacaaagtcttaataccgagttccacttcacatactcatacaacaacgtggtccatgtactacagaaacaagaaaaccccccacacatcttattgagcacatatttacacaagaggtcacctgacagcagtctgatacatatagggataacttgataggtgctgtaatcgcagtaagctcatacaaaacgtgaacatgtgacgatcctaatatagcagatatttgccacacgttcattgctgcctgtcacatgctcatccccgtcacaacctcagggtggtagtggatcatctcctgccacatcatttcgcggatcatgtctacgccaaggttttcatctatgtcgagatcgatgggtacttgagcaggagggtttgcgcttggatcatacagtggagacatgtaagggtgctccagagcctcggtgacactaattcttttggagggatcaaagactagcatcttctgcaacagatcgatggcaagaggatgtgcttgtgggtacatgctggtgaggggaatgcctggggtgtatggaagggacttaatgtacttgcgggctttcgggttgtcaatgaactcaaggtcagcctcactcatggtgccaagaacatttactatgagcttaagctgattgaggcactcagttcctggaaaaattggcttgcgtccaagtagctctgcaaatatgcagccaacagaccatacatctattgatgttccatagttgtcacagcagagcagcagctcaggggccctgtaccagcgggtgacaacatattctgtcatgaactgacccttagtgttgtttgtgcgggcaagtccaaaatcacatatcttcagatcacagtttgcattaaccaggaggttccctggcttcaggtctctatggagtatcccagctgaatgaaggtacttcatgcctcggagcagctgaaaaaggaagtactggcagtggtcattggaaagtggttgagatgatttaattatttgatgcagatcagtgtccatgagctcataaaccaagtaaacatccttgaagctccttctatgcaccggcatcattatatccttcagagcaataacattctcatgccttaagtgccgaaggagtttcagctcccgcagtgtccttagcgcatccacacggttgtcaaagacattgtttatcttttttattgcaaccttctcatttgtctcacggtttatagacgagcaaactattccgtaagctcctcttccaatgggcttgattggcacgtacttggtgtcaatctcaaatagtgtttgccacatggtgtagtaatgcttcccttggtttcccatgccattggggggatccaccatcatcgccattttctcggactcggaagcaacaggtggtgcgccggtgcggtggtgcgccggccgcctaagctctcatcacccagccagcaaccgaagagtagaagtcttaccgaccgaccgacccaagacccaaacggacaaccgggaacgacgactagacga

SEQ ID NO: 14845 - DNA, 725 bp, Setaria italica
  Peptide Sequence Number=SeqID_80819
tctgccaatttaaatcttgcatttgttgcgcaaatattccagcataggaatggtctaacgagtgacaccaaacaagttacgctcacacagacggcaacacgtgatgatgttctattgtctagagaagaaagagccttcagaatgtggatcaacagccttggggttgaatcatatgtaaacaatgtatttgaagatgttcgcaatgggtgggtacttcttgaagtacttgataaggtttctcctggatctgtcaattggaagctggcatcaaaacctccaattaaattgccattcagaaaactggagaattgcaatcaagttgtaaaaatcgggaaggagttaaagttttctttagtaaatctagctgggaatgatattgttcagggaaacaagaaactgattgttgcacttttgtggcaattgatgagattcaatatccttcagctgttaaacaagctaagattccattcccaagggtcccaaggaaaagaaattactgatgctgatattctaaactgggccaacagcaaagtgaagcatcaggaagaacttctcgaatggaaagtttcaaggacaagagcttatcgaatggattgttcttccttgagcttcttagcgcagtacagccaagggttgtgaatctcatcaattgccacaaaagtgcaacaatcagtttcttgttttccctgaacaatatcattcccagctagatttactaaagaaac

SEQ ID NO: 14846 - DNA, 1237 bp, Setaria italica
  Peptide Sequence Number=SeqID_80820
tctaaaaccttcctaatttaaatttgtcctatttctagtaaaacttggtagtaattagaattgcaatcaagttgtaaaaattcgggaaggagttaaagttttctttagtaaatctagctgggaatgatattgttcagggaaacaagaaactgattgttgcacttttgtggcaattgatgagattcaatatccttcagctgttaaacaagctaagattccattcccaagggtcccaaggaaaagaaattactgatgctgatattctaaactgggccaacagcaaagtgaaagcatcaggaagaacttctcgaatggaaagtttcaaggacaagagcttatcgaatggattgttcttccttgagcttcttagcgcagtacagccaagggttgtgaactggaaagttgttactaagggggaagctgatgaggacaagaagctgaatgctacctacatcattagtgttgctaggaagcttggatgctctgtatttctgttgccagaggacatcatagaggtgaatcagaagatgatccttacacttaccgctagcattatgtattggagcctacagaaacaacctcagtcacaatctgaaatgccagagcaatcagagccatctagcatgacttcagatgcagcctctgatattgcctcggaggatggagcttcaacgactgcgccatctgagtccgaagaggtgaactcgctgtctgatagcatgtccaatttgacaacggatgatgctacttcgaacgccccatctaccgaaaatggaaatggtgtggcaggatcctgatggttatgcagctgcagttctttttccacacagtcctggtttttaatagagggaatagtgctttcgtttcccaaagtcttcgctaccagaagtgattttttttactacttctgcttcctgtgtatggtagcttgatagatacaacaaatgcagatagatatagatgccgtttgttcattggattcgcttcatatcttactataggggaaaaaagatatagtatatgctgctggatgggtattttttgtattgctggtatacacccatgaaaatcttatgtgcttctgtatctggtcggtcaattcgttcatctgttccttggactagtagtcattatgtactacttggtggccatcatctattgtaatgcgttggtattctgatgaaacatgcctgtacataacatactttaaaaaaggttttgccgtgcccgatttttt

SEQ ID NO: 14847 - DNA, 357 bp, Setaria italica
  Peptide Sequence Number=SeqID_80821
cacacgcgcgaacgggggagagagagatcatcggagatgtcgtggacctcgctcgtggcgtggagaggtccggagctcgtcaggcggccggcgacttagccttggcggcgaagcaggcggcggcgcgcttgcaggagcggtagaggctgagcatggacagccactcggcgagggcgtcgcccagccgcggggactgccgccggccccggcgcaccctccacccccgcaggcgccccgcgcggtccgaagggtgggtgtccatcgcggcggcggcgtactcggcggggacgacggaggcgtaggggtcggagccgccggcgcaggacctggcgagcagcgacggcgggagcgggagcg

SEQ ID NO: 14848 - DNA, 1020 bp, Setaria italica
  Peptide Sequence Number=SeqID_80822
tggacacctgctcatgaagcatagagttctccttctctatctcagcccgcttcttgcgttcatccgcgagctgcttctggagaagctcaagcacacgggagtcttcctctagctgctcgttcagtccattgatctcacggtcctgccacaccaattccatggcaatagcttgtgtcagtctatgatgcacattcagcaacaacaaaatcgcctacagtttaccttaggcggcgcacaagaaagatattttcttatcacagacaaaaacagatctttaacgtttcaggatttttcagcctgatcatcgaaatcgatgtatttgctaggaaaaataacatttgaatgcggcgtgatatcatgctggtatgaacagtcagaccactagaaagattataaacctttctgttcatttcttggactgcaattctcctcatgctctccacaacatcaacattgactagcttgcgcttcttgcccaccaaccatcccttgggatatgatgtgggctcaaagtcaggtggcggaagcagcatttcagcactgcgcttgccattgataggttccagaggctcaaagagagccttccgcttctcagataagttagcttttgggtctggttgaacatcctcagctgtagctgttgtatctgttgcatcgtcgatcttcatggattcctcttgagcctgctcattcacttcttcggtagcatctttgtcaggttcttgttgcaagctccggccattggctggaacatacatattgttagtcagatcaattgtcagtgcactttcccagttaatatctaatgaacacatgacctctagaacatgattagatggaagttcgttcattttgacaactgaaaagttagcgagcagcaagaatgggtttggatgagcttatgaagaggccaagggacatgtttttcagttcctggttagatctttgcagcctttcagtgtcttacaattacaagtatgctacacgtatatatataccatccttgcaagtctgctacat

SEQ ID NO: 14849 - DNA, 1157 bp, Setaria italica
  misc_feature (1)..(42): n is a, c, g, or t
  Peptide Sequence Number=SeqID_80823
nnnnnnnnnnnnnnnnnnnnnnnnnnnnnnnnnnnnnnnnnntttttttttttttcatataacatgtacatacacttccattcaaatataatgtctctagtttctcacatacatttttttcaaggattttctcacatgcatttgaagcctagaaaggggcaggtgcgataaacaggcaccctttatctacagaaaacaagccacggaatggaataggacaaatgaaattctacacaggatatatctcttggttaccctgaaaccggcaccaggagattcatggttcgatattgtcgggaatggacagtactatatagtgcttaatcaaaggaatcgggaggtggagcttctccttcctcatcgaagccctcattttcgtcgagcatgttcattagcatggacacctgctcatgaagcatagagttctccttctctatctcagcccgcttcttgcgttcatccgcgagctgcttctggagaagctcaagcacacgggagtcttcctctagctgctcgttcagtccattgatctcacggtcctttctgttcatttcttggactgcaattctcctcatgctctccacaacatcaacattgactagcttgcgcttcttgcccaccaaccatcccttgggatatgatgtgggctcaaagtcaggtggcggaagcagcatttcagcactgcgcttgccattgataggttccagaggctcaaagagagccttccgcttctcagataagttagcttttgggtctggttgaacatcctcagctgtagctgttgtatctgttgcatcgtcgatcttcatggattcctcttgagcctgctcattcacttcttcggtagcatctttgtcaggttcttgttgcaagctccggccattggctgatcttcttgacttccagaaaatcctgggggggtcagcaggagtcgggtcctccatgccttgcagctccctccccgcacctctgctagcttgtctccaggctagctcggtttcctttctcccctgtggttgccgcgcgctcctctctcctccctctcgctctctcgcggcgtcttcttgtttgcgttatcttgtggctctgagccgagggatggatgtgtgtgctgtttcgagtgcgtgaggcggggtcgccttggaagacacctaccc

SEQ ID NO: 14850 - DNA, 716 bp, Setaria italica
  Peptide Sequence Number=SeqID_80824
cgaggatagaaaagattgaagttgaaggagtagtatcatcttcactcacaacgtcagcgagttcaacaagattctcattcaggtcaagaccatctggggaggctactttcatctgtgcagtcacagaaacaggaccaagttcttgacaaaatactgtccgcatagttttgacaagctcctttaccctgctttgcttgtcatcatcagcaaccttcttttggtttaactcttgaatatctcttaccaaatggacaaaaccaatcaggttgtgtgctctctcctggacttctacttcattgcactcaacaagcggaccaactgttgtttcaatcaagttaatcatgtaaagcatagattcatgtgaaaatgggtcctttcgcactgcgcttgccctaatatcttgctcttcagcagacccaagtgtaaccttgctttccccgctagcagtttgatcaatagccaacccatcaaacactacatccacttccttgtttgaatcacccaatttctcaacatatacactcaaacagaacgtaagcaccttaaacactgcatggacgtagactgctctcactgacataggcaggaggctggtccttggttgcaggagtgcttcaacaagctcgacaggatccttcgtgagctccgcatactcaccagaaatccatgcagcagctgaaagaacagggcagaggaagtggttgccaagcaaagcg

SEQ ID NO: 14851 - DNA, 271 bp, Setaria italica
  Peptide Sequence Number=SeqID_80825
cacgggttcagctcaggcggccctttcgtcgtcggccaacgggcattgcagatttcttgatgcgcaacacatctcttgagcagtcatgtccgtgccttagctagttccctgtggtttaatctcctgatggagccaccgtattcctcccgctaccagcttcacggttctgcttctcccatgacatggcggctctgtctcttcctgctgcttgttcttcagagctgctgccgctcggcgctttcggcctcgccgtatcttgtcggcatgggca

SEQ ID NO: 14852 - DNA, 255 bp, Setaria italica
  Peptide Sequence Number=SeqID_80826
gggggggggggacggttagaagggaaatagatatattctgattttatacagacaaaagattattatgcatgcctatgtaaagcaagatactgtctggccaacttgtttcaggaaatgatacagttgttctaatattggaccgtgacaattgcagcattgtttgtatcactgtagaactgcttaaatgttcatgcatgcaacaatagactacagagttactgggatttctagatacgtgcattgggtacactaggg

SEQ ID NO: 14853 - DNA, 490 bp, Setaria italica
  Peptide Sequence Number=SeqID_80827
ttcatcaggtccatcttttagtctgccacaaatagttgatgcctccacacagtctgatgcagcagcagcaacccttggatattcattttctgcatttggaagaaagtcataattccagagtacacaccagggtgggtctacttttgtttgctcatggctgctggatttggactacttatcagtgaagaagctttaaatgtttgggctggaatttctttatcacgtacactttcattggatggaacctggcaatctctcgttaactcgttctcggcgaatgcaccttatatagtttctacagtgctatggatttactggggtgtttgtctcagcgatatgatcccgttctttctggggaagctttttagacaaactaaagcatctgaaggcataagcagcaagattggaattggcaaggacaaagcactaagcatatcacgagcagtccaaaagtacgggtaaccttaatttggtcttttgttgtagtagt

SEQ ID NO: 14854 - DNA, 917 bp, Setaria italica
  Peptide Sequence Number=SeqID_80828
tttttttaagcatagccatttgtctcggagttatacgatttaaggcttgtacattattggtttgcagtttgcacaaccacactaatttgtttgttactccccgaaccaaacgaaaagaattacaaatgacactgacaaaaacacattagaaagttgaagccctgctgcctagttcttggggaggagcacgtcgcggaccaggtcgtcgaagttgcgttgggacgcgccgccgggcttggccgcctcgatggccttgtccctccactcccgagcctttctcctcatctccttcccctgctccccctccatgagctccgtgatgaggctcgccacggcgtcgcggcggacgttgctgtcgatctccatgccgacgccccactcgctgcactggtaccggcagttggtctgctggtcggcgaagaagggccaactgatgacggggacgccgccgcagatggtctccagcgtggagttccagccgctgtgcgtcaggaacgcgccgacggccgggtggttgagcacctcctgctgcgggcaccagctcgccatgagcccgcggtcggccgtcgcggcgaggaactccggtggcagcacggcgctgtcgcccttgacgaggtcgcggcggatgatccacaggaactgccggccgctgttggcaagcccccacgcgaactccaccagctgctcgttggtcatcacggtgatgctgccgaagttaacgtagacgacggcgccggggtccctgccgtcgagccaccggaggcactcctcctgctccttccacaggctgaggctgatggaggagcgcggggtgggcgggtcctcgcgcgccagcagcgggagcgggcccagcgtgtacaccttgcgcgccaggcccagcgactccatcgccgccaccgcctcgccctcgagctcgt

SEQ ID NO: 14855 - DNA, 694 bp, Setaria italica
  Peptide Sequence Number=SeqID_80829
gttccgcgcctccgcccccgccgtccgcctcgcgagccgcgtggagctcacgggtcacggcggcgaccgccattgttcctcgtacaggtcaatgggggaggtcagtgccaatgtcaattatcaacagtatttcaaacttccgtgccctgttttctagcaacgctgttgaaactgagctagttaagaggtatggaaggaagattgatgaaatcctggatcttctgaagatggtcatcgatggagttttaacccaggtcactccagatgataaactactggatgtgcttgaggaactagatgttaccatcaacgaggcactaaagctagttggaagctgggattggatgatgagcaaaatttactttgccacacaggtggagtcccttattaccaagatgcaaaaatatgttcttgaagtgtgccaagctctcaattctctcatgttaccatcagaaacaaattgtatttcagtgtacttggagaaagcaaagcaatttcactgtgacaaaatgacagctgttgttggggaggcttccagggatcttgtagggaaagtatgccaaagtcagagcaattgacaaatatccaagtatcattgagcttatccacaaatcaagaattgctgatggaggctgttgctctgtccaagattagaatgagagttagcgctgatgatagtgcagaactggatggt

SEQ ID NO: 14856 - DNA, 457 bp, Setaria italica
  Peptide Sequence Number=SeqID_80830
tcccatgcactaccctgaatcctgactgggtaattgtgtacctcactagattcatttttattgatagttcagattgattcccacaggatgcgccattattctgccgttcttcaccgaattggccaagaatatgtggcctggaaggaatttgttgctcagccttattcgttttgagccttctctttgttggaacatggtgccttgcctttgcaaatacttctctaggaacatttgggcacttagggtgacgaaacgcaccagctagatgataatggagctgaaactttttaccatacccatccattccacagtatctacacctccaatgccttgcaacttcatcaacaataattatgtgcttccttgtgttaaaatgcacttttccggcgtggtttcaatatcttgctcttttgtgaattatcggtattcttgtccaaaatcttgttcttattgttga

SEQ ID NO: 14857 - DNA, 1172 bp, Setaria italica
  misc_feature (51)..(51): n is a, c, g, or t
  misc_feature (69)..(69): n is a, c, g, or t
  Peptide Sequence Number=SeqID_80831
cccttccgttgtcgtgtctctacgttttttttttgtttttttttttttttntttttttttttttttttnttttttttttttttttgtttgggccgtgcgtacaatacgaagcgcgggcccggatcaaaatctcgttaagctttctccaccaaaagagaaaaatacagaatttcagtgaagaacatgcgtcgaagcgaaacaaagatcatctctcatgcacatccagcgtctgcaccactacaggacatcggcgactagaccgccgcagcgccggccgcctcggccgcgggcggcgggaggccgtcgagccacgggagcagcctgttgtggacgaggtccggccggtcgtcgtgcgggcagtggccgacgccctccagcatgtggagcgtcacgttggggagctcggacggcagcttcgagaagaacttccccacgggcccgtcgatcggggtgaaggggtcccggtcgccccacagcaccagcacgggcacgtcggccagccgcggcatcagcgcgatcgggctcggccccggcgggcccgtcaccgtcgacacgaacgcgtccagggcgccctccgtgtcagccggtccccttatgatctcgactaattcgtcgtccacggcgtctttgttcccgtaaacagagagcaagatatccttcagattgtccctgcctttcacccgctcgaacagtgccgatgctatcggccgttgcttcagcaggaagtcgatcagccagagcagaggcaggagcaacttgatcctccagtcatcgacgatcgccttgttgttcatgccaccagcacagttcagcagcacaaggccccgaacaacgtctctgttagactctgcagcagcaatgacgcatgcgaggctcccgacagaattgcctacgagcaccgtgggcctcttcacgacctcctccaagaagtccaggattaactcagcccatgtctccatcgtgtaagaaaacccaggaggcttgtccgaggcgccgaaacccagcaaatcgatcgcgtagacggtgtaggattcagacaacaccccaatgttcctgcgccagtgcgcgacggaggcgccgaagccgtggacgagcaggattggcgggccctgccccctggcgaggtagttcacgcgcatcccgcgccacgtccaggtggtgcagccccggcg

SEQ ID NO: 14858 - DNA, 618 bp, Setaria italica
  Peptide Sequence Number=SeqID_80832
ttactttcatgcttcggtgtgtttaggtacaatgtggcctaccagaactagaaaaggaagttgatgaaaagatagacttgttcactgcttgggtggagaagcacccaaatcgcaaaagccaagtatgcctatccttcttcgacgagaaacacaaacacccaggaaatgtcttggaggagaccagctcaaggcgtgctgcattggtgtcattgcttaacgaagtgctattccagatcataaactttgccaacgagaaaaaggaccacattccggccatccctgacagaatattcaatcatgagatcatgatcccaagctcctcggattctgtgtttggatggaacaccgacgcctttcgcagagtgctgaatagtgggcacccgtactcactttagctgaagacgaagaccggtgccgccatgctgtgtggaaggtgctctgctaaccacattatatgcttaaggagaactagcgatgtgtacataatcgtgtatgcttaaggagaactagcttgtaaatattatgtgtgaatcttagtttttcattccgaacaagttgcgtgttccggactgtggtgaccagatgttcaatgcagtatcaagtatgttaattcaaaaa

SEQ ID NO: 14859 - DNA, 509 bp, Setaria italica
  Peptide Sequence Number=SeqID_80833
aataacaactgatttataattaccacagacagtaagttaaatgttttgtatgttagaaatatatagttttcactgtaaaacatttgaacaatcatctattttctgtatcaatatccaacatcatgtcgcgagacttgcttccaaatgtatcttgctatgttttgtagcatagcaacctttttttgtagttatgattgcacattatttgcattttgtttgccactgtttactttcatgcttcggtgtgtttaggtacaatgtggcctaccagaactagaaaaggaagttgatgaaaagatagacttgttcactgcttgggtggagaagcacccaaatcgcaaaagccaagtcagaacttctacaattagtcattgtgatattattctgcagtctactttctttgctgctaaactagattatcttccttctgattaaatgagtgtttgatctgaatatctcaggtatgcctatccttcttcgacgagaaacacaaacacccaggttggttt

SEQ ID NO: 14860 - DNA, 449 bp, Setaria italica
  Peptide Sequence Number=SeqID_80834
ggaaaacacctccgacgaacacatctgaaacgctcgactgaagaagcctccttcgacgccgaagcacgccacctcaacttcctctcgcgcagccgccgaccacctccgccgacctcaatttcttgaactgctggaagcgtggatccatccggcctcggatcgactgttcctactgttggcgaggggggcctagtttgcttggatcaatttcttctgccccgaccccgacctgcaaccgcgagcggaggatgaactgcgagacctgtcaactgaaagagctggagctagaacagacggagatcagggacgtgctgcgatgcattttgcacaccatattcttccatagaaccctcagccttgttcgccccaaagatgttgactgtaaaaaccttgagatcacatacgtatgcctatccttcttcgacgagaaacacaaacacccaggttgg

SEQ ID NO: 14861 - DNA, 958 bp, Setaria italica
  misc_feature (889)..(889): n is a, c, g, or t
  misc_feature (915)..(915): n is a, c, g, or t
  misc_feature (921)..(921): n is a, c, g, or t
  Peptide Sequence Number=SeqID_80835
ggaatcagcagaggcaaggataacaactgatttataattaccacagactagtaagtaaatgttttgtatgttagaaatatatagttttcactgtaaaacatttgaacaatcatctattttctgtatcaatatccaacatcatgtcgcgagacttgcttccaaatgtatcttgctatgttttgtagcatagcaaccttttttgtagttatgattgcacattatttgcattttgtttgccactgtttactttcatgcttcggtgtgtttaggtacaatgtggcctaccagaactagaaaaggaagttgatgaaaagatagacttgttcactgcttgggtggagaagcacccaaatcgcaaaagccaagtatgcctatccttcttcgacgagaaacacaaacacccaggttggtttgtcaataaaacagaacgtatttattgggaacaatggttcatcaatttgcatgtcatgagctcaaaaagatacagcaaatcaaacagctccaaacggcttacaaacattggagggaatgacttggaagagaccagctcaaggcgtgctgcattggagtcgtcgcttaacgaagtgctattccagatcataaacttcgccaacgagaaaaaggaccacattcctgccatccctgacagaattttcaatcacgagatcatgatcccaagctcctcggattctgtatttggatggaacaccgacgtcattcgcagagtgctgaatagtggacacccgtgctcactttagctgaagatggctggtgccaaccgtcctgtgtgaaggtgcatttctaaccatcatggtcactgtgtaatatgcttagaaagaactagtgtacatgatccctgtgtgttgccagagtatgttccttgtaaatnttgtgaatgaatgtttcattccgtanatgttncctgttccacagccagatgcttaatctactgagtatc

SEQ ID NO: 14862 - DNA, 575 bp, Setaria italica
  Peptide Sequence Number=SeqID_80836
gcctctgctgattccaaaaatagtatcatacctaaactcttagtttcacagctagtagctacacattaacatcagttagctcctattttgattcaagttaaagtagatcagagtgttttacttgttactagctgtaatactgaacaatggtccaagctctacagctaactgaagcattatgatgacacaatcgattagactggccataagaatactaggaaaaaggagaagcacgcattcttgtgtttcgctttccagttgtagaacatgtgaaataccaataaacactctagtcacagatttgcgttgcagacatgttctgaataatcccaagtcacataatcttgtaacttactaacttcagaccgctatcatcagatctttgtttcaaaagaaaaactatcagaccttcggaataattatgtctttgaagaatatagattgagttcacccttagggggaaaaatggcttacactcatatattctgaaataagtagtagtgaaagtgcatctcggagactttgaaaggcgaaagcattgataaattcgaatggaagttattatattcaattac

SEQ ID NO: 14863 - DNA, 1234 bp, Setaria italica
  Peptide Sequence Number=SeqID_80837
atgttagaaatatatagttttcactgtaaaacatttgaacaatcatctattttctgtatcaatatccaacatcatgtcgcgagacttgcttccgatgaacacatctgaaactctggactgaatccttcttccctgctgaagcacgccacctcaacttcctctcggtcgcagcgtcgacctctcccaagtcccaacccccctcttcgactgctggaagcgcggatttatccggcctcggatcgactgtccctcctgttggtgcgggagacctagcttgcttggatcgacttcttccgccccgatcagcagccgtgagcggagatgaactgcgagacctgtcagctgaaggagctggagctggagccaacggagatcagggatgtgttgcgatgcattttgcataccatattcttccatagaactctcagcctcgttcgccccaaagatgttgactgtgatttccttgagattacatatgtacaatgtggcctaccagagctagaaaaggaagttgatgaaaagatagaccagttcactgcttgggtggagaagcacccaaatcgcagaagccaggtatgcctgtccttcttcgacgagaagagcaaaaacccaggttggtttgtcaacaaaacagagcgcatttattgggaacaatggttcatcaatttgcatgtcatgagctcaaaaagatacagcaaatcaaacagctccaaacggcttacaaacattggagggaatgacttggaagagaccagctcaaggcgtgctgcattggagtcgtcgcttaacgaagtgctattccagatcataaacttcgccaacgagaaaaaggaccacattcctgccatccctgacagaattttcaatcacgagatcatgatcccaaggtgacccttttccttggacgtgttgacagctcctcggattctgtatttggatggaacaccgacgtcattcgcagagtgctgaatagtggacacccgtgctcactttagctgaagatggctggtgccaaccgtcctgtgtgaaggtgcatttctaaccatcatggtcactgtgtaatatgcttagaaagaactagtgtacatgatccctgtgtgttgccagagtatgttccttgtaaatatttgtgaatgaatgttttcattccgtacaatgttgcctgttccacagccagatgcttaatctactgagtatcaagttcactttagttagaacaattcagaccatagtg

SEQ ID NO: 14864 - DNA, 622 bp, Setaria italica
  Peptide Sequence Number=SeqID_80838
gccctcctccaccctgcaagaaagcttcctttcccttttccgtcccaagttccttaatcatttgcttaagatcaccagaaatatttatgttgtaggttggatcatctttcattcgctgcaactcttcatcctcaagtttgagaccctttttaacatggtcaaattcccctaggaccttgctatcaagcacgtttggattctgaattgttatcaagtcatttcgagtgaagggatcatcagttagcaactctttccaattctttggcttgatgttaagttcttggatggcctcataacagaagacatttccagtagtttttacagcaactatgtgagtgaattctgtaaaaactttgttcagaacgggacactggaactctccgtctgagttcttgtggaatgtgagaggaatcaaatcttcctgcttaagcggggctccggttaccggatgtttcccgaactttttaaggtatgggattatgctcatcaaatcgaagacgcttccatcaacagtgcacactggatcctcaaatggaagaaacgtgagtgcgcagcagtagaaggggaggcgcttgaacggcgcggcgacctccttctgcttggcgccgccccattcggtccg

SEQ ID NO: 14865 - DNA, 718 bp, Setaria italica
  Peptide Sequence Number=SeqID_80839
agcagccataattatttgtagtttagacagcttcgaaccaccaaaaccagatatgctaagtaagctcttttcctgattgttaagctctttcgcctctgcatcagcacctttattctttcaatggatgctacatggagactacatgttaagctagatatttaacactagtatgctacttgtcggattgctctcaacagttatacatttctgcaccttctcattttgcaccactatgttcatttcctaattatatattctccttcctagtgccgttctctgcaaagcttattgatggtatcaaccgaagtgactcaagaaggagagcactaatacttttctgttttgagtattttaatgtgtgggcaagagtaagtggttctcttatatatgcacaaattgcaatgttgcatagcatactcttgtagcctctcacttgtgaggcttttttcatcttgtccaaattatgacctttccactggttgaatacaattgaccattgtcctctgcctttgcttgcagaaagcagtcatgctttccattgaccaccatggttttgatgtgctcgccaaagtccctgaaagaatcacgctagctaatgtctctcaacaataccactggaaagagttcaggttcacattcaaggaaccagccaaggatgctgagggcttctgccgcacactggttgagttagaggacgaagttctgcagagcgtgaaga

SEQ ID NO: 14866 - DNA, 597 bp, Setaria italica
  Peptide Sequence Number=SeqID_80840
gattcgtgcttgtccaactgtggtcggtggtggtagacggccggcgacgagtgtgctcgcccatggctgcggcgaagatcaaatccaccacgctatccatcacccacaagtgccggaacatcttggctgctggttgggaagcccacctgaacactatcaaggccgacgccaagggaagcaaggaggagatttacacgtcgagggtgcactacatgatccagaagggcacgccctacttgatcgtccccgagaatgacatgcacaacattaacattgtgatcgatgagcggggttctcttgcggtgtgcagtccaatacggggtcgggttgtgagcttgctgaagtcactccaaaagatgcctcctcgtgttgctatgaccggtgatgttctgcgcctgaaagactcgaaggttccaattattgccgatagcctgaagaaagctattatgaaggaacacgaagcttctagtgcagctagtcatggagtgtcagcaatattgtcttctgcgggtgctacctgcaggtcacgaagcgagggcctccttagtctactcaatgaggagagctcttacagcatcttcaaatttgacattggtt

SEQ ID NO: 14867 - DNA, 1398 bp, Setaria italica
  misc_feature (1356)..(1398): n is a, c, g, or t
  Peptide Sequence Number=SeqID_80841
gagttcatctccacagccagatttgtccgtccgtgctctcgacagctctcttctctcctccgacgattcgtgcttgtccaactgtggtcggtggtggtagacggccggcgacgagtgtgctccgcccatggctgcggcgaagatcaaatccaccacgctatccatcacccacaagtgccggaacatcttggctgctggttgggaagcccacctgaacactatcaaggccgacgccaagggaagcaagggggagatttacacgtcgagggtgcactacatgatccagaagggcacgccctacttgatcgtccccgagaatgacatgcattacattgtggaatcttgtgctggatagaacattgtgatcgatgagcggggttctcttgcggtgtgcagtccaatacggggtcgggttgtgagcttgctgaagtcactccaaaagatgcctcctcgtgttgctatgaccggtgatgttctgcgcctgaaagactcgaaggttccaattattgccgatagcctgaagaaagctattatgaaggaacacgaagcttctagtgcagctagtcatggagtgtcagcaatattgtcttctgcgggtgctacctgcaggtcacgaagcgagggcctccttagtctactcaatgaggagagctcttacagcatcttcaaatttgacattggttcatgtgtctacatagattcctctgggagcagccataatattgagttagacagcttcgaaccaccaaaaccagatatgctaatgccgttctctgcaaagcttattgatggtatcaaccgaagtgactcaagaaggagagcactaatacttttctgttttgagtattttaatgtgtgggcaagaaaagcagtcatgctttccattgaccaccatggttttgatgtgctcgccaaagtccctgaaagaatcacgctagctaatgtctctcaacaataccactggaaagagttcaggttcacattcaaggaaccagccaaggatgctgagggcttctgccgcacactggttgagttagaggacgaagttctgcagagcgtgaagacgtacagcggtttagggtgacaacccacttgccacagtctgaatcagtggggaacaaatatattcagattcctgtactcatcttttgtttaggggtttagggtgactgccaacttgccacaatctgaataagtgaggaacaagataatatatattcagattcctgtagttaccttttatggtttgaggttggtatacttttggactatgatgtttgaacttggagcagcaaacttgcaatatcagattgaattgaaatataaatccttacagtcgagtgtgtaaaaaatttnnnnnnnnnnnnnnnnnnnnnnnnnnnnnnnnnnnnnnnnnnn

SEQ ID NO: 14868 - DNA, 713 bp, Setaria italica
  Peptide Sequence Number=SeqID_80842
tagaccgaccaacaaggggacggtagaaactacccttactacaacccaagctcaccgctctcatgggggagggagtacaaagcacaaaagggcttattccgcgacatcgccttccttagagacgagctgagcagcatgaacgtgctcctggagaagttggcaggggtggagacactcgaccctcaagtaagggagtggaggaaccaggtgagggagatggcctacgacatcgaggactacattgacagccacatgttccagctccactgtgagctgggcaagcccagtggtgcgaaggagttcttccgcaggagggtccgaaaggtggactttggagcttaacgtgagattgcagggcagatccaagagattaaggcccgcatcattgtagcaagccagcgtcatgatagatacaaggttgatgaggtggcagttggttctggtagcgcaaatgttgtgtcaattgaccctcgtttgcctgccctttatgtggaggcagccaaccttgtcggaattgacggtcccagggaggatcttattaagttggtcaccgatgaagagctctctgtcagggtggtctctattgtaggttttggaggatctggcatactgtagctaaccaagtgtaaaaaaaatggtggccaatttaagtgccaagctttgtgtcagtgtcgctaaatcctgatataagaaaaattttgtggtattcttag

SEQ ID NO: 14869 - DNA, 452 bp, Setaria italica
  Peptide Sequence Number=SeqID_80843
cgatttgaagtcctaggtgatgctttcttgaagtatgtagggacgccaattaactttatttcatatgaaggacttgatgaagatcagttgaccaggagacgttctgatatagtgaataattcaaatttatatgagttatcaattagaagaaatttgcaggtatacatacgggatcaacagtttgaacctactcagttctatgcactgggaaggccatgtaaggtggtttgcaatcctgaaacagaagcgagtttacacccgaagaatatcgacccagataagcgagacaactgtaacttgaggtgtacaaagtcacatcattggttgcatagaaagacgattgcagatgttgttgagtcacttcttggagcattttatgtttgagagtggattcaaagctgcatttgcattcctaaattggatgggaataaatgttgattttaaagatgatg

SEQ ID NO: 14870 - DNA, 354 bp, Setaria italica
  Peptide Sequence Number=SeqID_80844
ctccgccgacaagggggcggcccccgctgccgctgccgccggcgcggacgcggacgggctcgcggagggcctgcggacgctgtgcgcgcggatggactccgcggcgttcttgggcttcgtggtggcccgccgcaaggaggcggacgcgctgcgcgccgagatgccaccggccctgaagctctgcgtggatccggccaagttcgtcatggacgccgtcgccggcgtgttccccgtcgaccgccgcgaggtccgcagcccggccgacctggcctgggcgtgcgtgctcatcctcgaggccgccgtgccggcgctggccgacccgggcccggagatcggcgccgcgcgtccgctcgt

SEQ ID NO: 14871 - DNA, 603 bp, Setaria italica
  Peptide Sequence Number=SeqID_80845
agacaataataattagtaacaatcattcaggtagttatcagccaaacctccatttcccaatgcatgaggcacaggaaaggaagctagacaagtccaggagtagaagcaaaactaaccatcctatggcatatcactgcatgtgaataggatacgcccaaaccagtaaagctttagataacatgtctatcacttcataatggtttctttctcagtggcgttccctatcgatacaatttgcaaagctgtgcctccaaccagccacgctgtgagctctggttgttgctcaaagtgtttgaggggaaatgtacttccctcttttgtctcaacactatagacaaacggaagcctcatagtaagaaagctctcaggcgggaggataactcgacaaccaatactgaataatccttctcgctcatgatcagagacatttgatggtaaacatgacccctcaaactgtacaagtgggcagcttgccaacaggacagggaaatcaggtgtcacaataaaaatccgttgaagttgtgacacagcaccagcaaactttacatcttggtgttccttcctttctgacatcttacaatgtggacagtgcatatatattgg

SEQ ID NO: 14872 - DNA, 249 bp, Setaria italica
  Peptide Sequence Number=SeqID_80846
agagaatgaagaggccgctacacaaaaaggaactatgaataacacagactcaacggcatcctgcacagggatataaatgctagtatctgtgagacaagttgtgtcgatcttgaccccaggggcttctcgcggtctcttgagcacgctgggaatcatgtggagctgggctactctgctcttggtaatgctggtgctcgtttggcagccgccagctcctgctcccagcatcgctgcttgaatccaccgcca

SEQ ID NO: 14873 - DNA, 1185 bp, Setaria italica
  Peptide Sequence Number=SeqID_80847
ttgaacaaggttcagggcgacaagttctatccccacccagggctttttttgctccctttaccaagcacatatctcatatctcattgggaaaaatcactttgtggaggctcaagctgttttcgatggcaaggtgaagcctcttcttgatcaagaaaaagatgacatgtacaagccatttgacttagaagcccgtgtgcaaatgttgcggaactgcgtgtacaattgtttgcctttggctgctgctgctgatgaagatatgaatgtagttcttgctgattatctgatgctgtatttcccgactagcttgcagaatgaggcaaagagaacaaattcaatttcagattttttagtgactttcaatgataaaaaaggaaaacgccatcgttgtttggcatgtcagtgggtgatgtcagcttcagccaggtcaatagaatatcacatcaagcactcaaagcaaattaactgctgtcgcagagtaacaaaatggatgcttgaatatctcgcagatgtcatgaatgaaaaagaaattagtatacaggatatgactgctgcttcatcggggattcagttaagaaagaggaaggctccattctcacctcgatctactgtgttagatcttgatcaacaatttcctattcctgggaaacatgcttttgaaatatggaaggatcttaatgcatctaacatgttagctttgtatgctcttatgaaaggcaagtccaagtcaaccgcagcagcaaaagcaaaagaaatattgttttgccaagaaaagcttatcaatgagctgaagagattgtttttgagtcctacggataaacatgttccactgggttctctggcattcatgaagatcaaggctctcctcaatctgtcagatgatctcttgccattgctcaagaacctgccagatgcttctgaactattgttagatcaagataagaaagttactgaactgaggcgttgctttatggttgctgctgctgagcgcctccctccaacaacacctgttgatgttacgtctcccagcactgatagttccgagagtgtctccagcaaactatgtctcctataagttgttttagtagatgcccaaaaaaactactgtagtacttatgagaaaggttcaggtgctcctgcgcgcaggttgggtgctaccatgctaccaaccacctttagatgtgcatc

SEQ ID NO: 14874 - DNA, 770 bp, Setaria italica
  Peptide Sequence Number=SeqID_80848
ttaggtcttgtttgtctattctagggtaaccctattgtctaccttggaagctgagcagcgggaacagacccccgaacgcggctgagaatgtgtagttcccccaccgcgcattggccagcgggatgcctccgcccatgaaccacgggtttgggttggcgttggggaagtggttgttaggatcagcctgcggagctgttgcaggcctctgcccagctggccggttgggaatgtcagcccctgggacgttctttgaccttgggtcaacacggtccttggccacggccatacagggggaacgagcttatcctcctcgacgacagccttgcacactgggcactctggcgagtgcgagtggatgcgcagccacttgtagaggcatggccagcagaagaggtggccacagagcgttacgatcggctcctgtggcagctcgaagcatatgttgcactcgaagctacccccagcatcagcgccactgctgctgccgcttgtcgattccccaacatttgccgccatattgggtgttctcggaatgatattagctcgtcgtggtgaaatcgaatcgggcggagaggaaaatctgatccgatcctaaaagtggctaggaatcaaatctagcttggcgcgagcagtgggagggagaggaggcgcggtggaggggaaggggacgggacgggtggaggaggcgagaagcttcgaggcaggcaggcggaggcagctgcagcagcagagccgcgcggccgacggggacgggacaggaacaacgccga

SEQ ID NO: 14875 - DNA, 1262 bp, Setaria italica
  misc_feature (1)..(56): n is a, c, g, or t
  misc_feature (1214)..(1214): n is a, c, g, or t
  Peptide Sequence Number=SeqID_80849
nnnnnnnnnnnnnnnnnnnnnnnnnnnnnnnnnnnnnnnnnnnnnnnnnnnnnnnnaaagttttttctaaaccaaacaagtcatgaccatttgcctaatgctcaacttacagatatccaaagtacatttggtttacacgcagggtaaaatgtccttgctacattccattcaaacaaacagagttacagaggttccaaattattcattgtataatcaaaaccgcagtatacctgtaggtgctccacaggaccacatccaaacagtatgtacacgaatttctctatcaacacttccatgcaaacgcaccactcaattcagatttagtcgtgtatggaggcaaagctaggtaaatgcacacaacaacatcagaatcggcaattgtctgtatctcccacttattaccagcaaggctgaccagcaatatgacaccaacaagcaagcctagaacgtgatgaggcttgcgatcacgagaaatccaaccaggatgagaagcgccttcaggtacacatccgcctgctgctgctgcccatgcggcccgtgccggggagctgcggcatgagcatgtccagcgtgcccaccgtggaacgcatgcccgtggccgtggccatacccataagggaacccagccggctgaccgtaggctgttgcatcagggaacccatgcacctggaagctgagcagcgggaacagacccccgaacgcggctgagaatgtgtagttcccccaccgcgcattggccagcgggatgcctccgcccatgaaccacgggtttgggttggcgttggggaagtggttgttaggatcagcctgcggagctgttgcaggcctctgcccagctggccggttgggaatgtcagcccctgggacgttctttgaccttgggtcaacacggtccttgccacggccatacaggggaacgagcttatcctcctcgacgacagccttgcacactgggcactctggcgagtgcgagtggatgcgcagccacttgtagaggcatggccagcagaagaggtggccacagagcgttacgatcggctcctgtggcagctcgaagcatatgttgcactcgaagctacccccagcatcagcgccactgctgctgccgcttgtcgattccccaacatttgccgccatattgggtgttctcggaatgatattagctacaagcagttgccaccgttggttaaccacgatgaagataggcataactnattggattcgactcctgtattctgtcttctcaagataacaccaccaga

SEQ ID NO: 14876 - DNA, 822 bp, Setaria italica
  Peptide Sequence Number=SeqID_80850
ttcaaatcggatgaccactcccgtccatggagacgctccaatccacctggcggcgatttgccatccatccccaaggccagtgggcagccgttggcatccatccacccgttgggcatcgtctaaagcactgccgccatgacttgcgctaggcttccccaccaatcccaatccgtgcatagagaagaatggattgtgaggtgagcattcgtgcaaatctgtgtatcccagttcgttatttttgtatgggccttccaaatttctatttaatccatggatgaggaacgggagattttttctacactgtcaatccaatttttagtgctattccgttggtttgaggttagcagccacaaaaatctgccttgttaattcaaaaagataaaactggtatggttgttctattcctggcacggattgttttgttggattatcttacaatcctgtcattgtagtatggtacagaaattcgccttattaattcgaaggactttgcgggccacaagggcaatgtccagtgggcgagatgagtgcatcaagataatgcctcctcctgcagaattcgactgggcgagtagatgcaatcatttatttcagtgctttactacattcccaatcgagctcattcatcatgcaataggaacagtaggccaattcatcatcatctgcacatttctgaaatttatacaagtacgttttgcctaaaaattagttcatgcatcagcttaacgcctatttctgcaagtttacacaactctactgtaagagtagatgcaatgattaattcattgttttactacctttccaataaagctgtgtaatcct

SEQ ID NO: 14877 - DNA, 1907 bp, Setaria italica
  misc_feature (1)..(82): n is a, c, g, or t
  Peptide Sequence Number=SeqID_80851
nnnnnnnnnnnnnnnnnnnnnnnnnnnnnnnnnnnnnnnnnnnnnnnnnnnnnnnnnnnnnnnnnnnnnnnnnnnnnnnnnnacacatcagcacacgtttcgtacttcagttccagcaaaaaatacattccacaattaatccaaagagcaccatcgatagctattcaaagaaagatccacagacaacactaggcaggccaattttccctgcacaaggcgagacacactatagggtacatcaaaactacaagctccgaattatttttaactaattcctcaagaatatcaaacttttcagttggggttgtacgtagacaacaaactggttagcacttagcagccaatattttgtaccaggctgagaatacagttagttactcttcagcaaacaattatacttggatccagcagcttattatcctctctttagtttctgcacccagcagcaggcttgtcttcagcagagtcttgattcatttcacctgcatgctgtagagcggctagatcttttaccttccatagcgtctttctttttccgacagtccaaacaaagatgtggaccgccccatggcgcatacggggaagagcagtaaccatcaccattatctgtcatcaaaccttcaaatggttcttggtccacttggcagattgcacaacggaaaggtggtgaagctgctttcaaggacaaattcctaccgagcctttcctctaacatcgcagacccttcttcaaataactcctccacagaaccaattgaagcagacttgcctccaagctttccaactgaactatgagaccttctacggaaaagtgacttcaacttgttctgatttttctttggagacaattgcggtgatgtcaaatgatcggatggtataatgtccacaactacacaggtggtgtcatccttcagcccacttgttttcagagcttgcttaaccacaagctttgcagccagttctgcaggcaatcctcggcatgcctttgcagctgcttcattggatagtgcatcccagatgccatctgacgctataattagccttcctccggcatttgataacttgacttgtttgacatgtggaatgggcacaatgaactccccaacatccgtgtccccgatggatcttgaaaggcacaagccacctggccagcaccggagaggaccgacctcctggcccccgaagagattgaggcggccgacttccccgccgctggccgtgacgcgctcccgctcctccgcattctcctcgaggcggtggtcgacagtgagcagctgcaattcgccgccctgcgtgtcgaggatgcagcgcgagtccccgacggacgcgaccgtgacggtgaagccgtcgatgacgaccagcgttgccgtggttcccgacacctcgcctttgcgctggaaatcgatgtcggccttgacaaatccggcgacgagcgcgcgcggcagcgcctggagccagtcgtcgcggccgatgtccggcggcagcgcgctgatgacgtgctcgagcagatgctccttgctgtagaccgccgcggagacgccgttgtggccgtcgaagacggcgaagacggagaatgccgatgagggatctccggggacgcggaggcagtcgggcttgacgaggaagtagtcctccccgcgcttggcgaagcctgcgtggccgtagcgcagggtcgggcgctcggagccggcggcacggagctcccggccgatgagcgtggcgaggggcagcggtggcggcagcagacgcgtctccctggcggcggtcgccatcggtggccgcacctaccgcctgcctaggtcctcctaataattacagtagtggtagaacacagcattcgtggcgcggaggaagggacgcagagcagagcagagcttggtggtggtgctgcaaaggcctgaaattggg

SEQ ID NO: 14878 - DNA, 1314 bp, Setaria italica
  Peptide Sequence Number=SeqID_80852
ttattaccttccatagtacaagaccggacaatcaccacatatgaacaaaagccacacgccgaaatggcgtcagggggtgaccaatgccttggcagtctagactacaaccttcttctaaaatgaccacttcccggtcggcctacaacaacaacgccgaccaacttccctgtcaaactaacccatcagtcacctgctgtcgccggagcctttcaagtgaccgctccgccttttaggaggcttctcaacagcagcgttgccgttggccttcacatctttgctcttcagctcacctcttcggcgaccgccctgccctttgggcttcttatcaacagctttgtcatgggacctgccttcgctcttcaccttgcgcctttggtgaccacccctccttttaggcttcttctcatcttcagcttcagcttcagctccagcttcatctttattcttgggctggccagccccactcttcaacccgtcagaggaaacatccaagaaatttacaacttggttcagagcatgaagagcaatcttcttaatctccagtttatcttctttagccctgtggccagatggaagccgcctaaactcttcagtcagtttgatacactcgtcgacgttttcaggggaaacaaagtccatcgcaaccttgatgcaggacttcaaattcctgacttggtgagcacatccagcaggaatgaacaccgcctcaccaagcttttgctcaaatgtccagggttcaacaccatattcctccttgagctttctcttatgctcctcagttaagtagaaagtctgatcatgaattgggtgaataacctgctttacaggattgcaatggatgtgccggaattctgaggcgtgtttcttaagataaccttgtagcttgtcagaatcctctcttcggaaaatatcccacaaggcaccaccagttctctcatgctttccactctccttagattcatgggatggaggtttatcctcaacgtcaccttcagtatcaataggtggtagagcattggtgtccaagccatcatgacatgaggtcttggttgtttcatcaacagttatattctgggaatcagtagaagttggtggtaggttatgttcagtgctggattctaatccaccgtaaagttcctgaagatcttgttctttcattttctttctgattttctctatcttcttaggtggataggtctcatcaggcacttctgctgtgtgtgttaaaatatttaccgcgtcagacatgtcacagtgaagcttggtcacagaatcacccctgcctaactcttggttaaatccataagcgatgta

SEQ ID NO: 14879 - DNA, 921 bp, Setaria italica
  Peptide Sequence Number=SeqID_80853
gtgatagtagggaagacaatgatgccaataaatgcagttttacttggtttggatatcaatgctttaccacctgatgattctgaaggcgatacaagggatgaagtgttatatcctgaatctgtttcacgaagtaaactagagcagtgcccagatcgcagtaatgaggtcaacacatctcataagacgcataacggatgccatttcagttcagatgacattggcatgggacagcatggaaagagatttagaggtggaactctcaatgaagttggcaccgaatctcaagaagagaaacctgaaaaggttgattgcaatggcactgataaaaaacaatttctaaaggcattcaagaaaaagctgtcgtgggggaaggctcagagcaacagaacactggtggtgctttatgggacatttttcgtagagaggattcggagaaattacaagattatcttaggaagcattcgtcagagttccggcatattcttccttgagctttctcttatgctctgcagttaagtagaaagtctggtcgtgaatcgggtgaataacctgcttcactggattgcagtgaatatgccggaactctgacgaatgcttcctaagataatcttgtaatttctccgaatcctctctacgaaaaatgtcccataaagcaccaccagtgttctgttgctctgagccttcccccacgacagctttttcttgaatgcctttagaaattgttttttatcagtgccattgcaatcaaccttttcaggtttctcttcttgagattcggtgccaacttcattgagagttccacctctaaatctctttccatgctgtcccatgccaatgtcatctgaactgaaatggcatccgttatgcgtcttatgagatgtgttgacctcattactgcgatctgggcactgctctagttta

SEQ ID NO: 14880 - DNA, 526 bp, Setaria italica
  Peptide Sequence Number=SeqID_80854
aaaataacaaagaaaaaatcagaaagaaaatgaaagaacaagatcatcaggaactttacggtggattagaatatttaccgcgtcagacatgtcacagtgaagcttggtcaaagaatcacccctgcctaactcttggttaaatccataagcgatgtaagtttttggtccaagatctggcttcaaggcaccatcgaggaagcttgactgcaagatttagtgggccatatcgaggatcagtgtattcaggaaatggcaatgcgctgataaactctgcaccatggcgaggcaatctctgatcaaatgaactagatggcggccagtcctttagcttaagcatctcaggccagtgtgtcgtagggtgagttctgcctcgcgtatatcccacaaaaaacatgtgtatattaatttccacctcattccaatcaaggcaatctattgccctgacagcaaagttctcatcttcgatgttgccattagtcttttttctctcgcaatgcccgccacattaacttaatggtttcccaac

SEQ ID NO: 14881 - DNA, 1333 bp, Setaria italica
  Peptide Sequence Number=SeqID_80855
agttagacaagaccaggctagcagcggctgcagcccagccagcgcccgcactcgccgatctctcccagcgcgcgcgcgtgctgctcctctgctctcttcttgcgccgtgctctgcttgctttgttgtcgatgagcatggggcgcttcgccaattcgacggatccgaggtcggggctggaggtggtcagggactggaacggggtcgcccaggtcgtgctccgctcgccaaagggagcctccgcgcgggtgagcctgcacggcggccaggtcgtctcctggaggaacgaccacggcgaggagctcctcttcaccagcagcaaggcaatcttcaagccaccaaacgccatgcgaggtggaattcagatgtgtttcccacagtttggatactctgggacattggagcgacatggatttgcaagaaacaggatatgggccctggatgatgagcatccaccaataaatcataatgataacgccagcaaagtttctgttgacctaatactaaagccatccgaagatgacctcaagtgctggccacattgttttgaattccgcctgagggtctctctttcaaaggttggggacctgtcgttaatatcgcgcatcaggaatgtcaatggcaagccattcagtttctcatttgcttaccacacatacctttccgtttctgacatcagtgaggtgaggatagaaggtttggagacccttgattatcttgacaatcttagccacaaagaacggtttacagaacaaggagacgccataacatttgagtcagaggtcgatcgagtctacgttagctccccaaatgtagtagcagttcttgaccatgagaagaaacagtcatttgtcataaaaaaggaaggacttcctgacgttgttgtgtggaatccgtgggaaaagaaatcaaagactatggtggactttggtgatgaggagtacaagcagatgctttgcgttgatgcagccgcagtggagagagcaatcacgctgaaaccaggggaggagtggacggggaaactggagctttctgcagtttcatccaccaactgcagcgatcatcttgatcacccagtcagcatctagcttgtagtgtggtagttcacatttcacaatgctatatattagcctcataagataagtatgaaccccttttgtacatgaatcagtaggttcatctatgatcagtcagcagctcgacttgattccaaaatcggcattctgtaatgacctggtctctggaatctcaataatgatagcactgccttgcttcgtgcataatgcacacaaatggcaagatttagttacaaaaaaaaaaaaaaaaaaaaactag

SEQ ID NO: 14882 - DNA, 1039 bp, Setaria italica
  Peptide Sequence Number=SeqID_80856
tgctgttgaagttggagattccacagctgaagaagatcacatctttgtgcctcacgtctcagagaccgtttctgaagatgacagaacggcagaggtggacacgaactgcgaagtatcaatcggaagcgatatatgcgaacgggaacaagatgaccatgtcgttccattccaagacttggcaacgcatgaggagcaggttgctccactggctggtgcagatgatcagccatcgccattggagatcctagcctcaactgagcaagaagcaggtgaagccgaacaggaggagatgacaacgaacacgggatcagattaccaaccaaacgaacagaacgaggtggaagaagacaaagcacctgagacaccgacgaatggcgtcgccgcacagctctcggacaggatgtttctgctcgagaggaaacggtcactgtcgctctccctggacgggagcgtcgcaagcgagatggaaggcggcgagccctccaccgtggaccagctgaagtcggcgctgcaggcggagcggaaggcgctgggcgcgctgtacgcggagctggaggaagagcggagcgccgcggcgatcgcggcgagccagacgatggcgatgatcaacaggctgcaggaggagaaggcggcgatgcagatggaggcgctgcagtaccagcggatgatggaggagcagtcggagtacgatcaggaggcgctgcagcttctgaacgagctggtcaccaagcgggagcgggagaagcaggagctggagagggagctcgagctgttcaggcagaaggtgcagcgctacgaggacaaggagaggcggaggatggcgagcttcaaggccaatggcggcagccccagtggcagtggcagtggcacctccgtgtcgtccagcggcgaggacagcgacgggcactccgacgactactgcgagctaggcgagtctccggacggcggcaacattcagatgagctcgtcagatgctgctcttagctccatgagggatccggacagcacgaagcacctaggtggctctggatgattcctt

SEQ ID NO: 14883 - DNA, 375 bp, Setaria italica
  Peptide Sequence Number=SeqID_80857
gctatatatcaactatacaactgtatgcgacccacaagttcgtgctcaggttcccggaatattgaccaccagcgtagcttgtcagtcggatcctcagccattgtagcaacttgagcacgaacttgtgggtcgcatacagctatatatcaactatacaactgctgctgatgagaacaacatgaagtatggttctgttgcagaaactgtggcatatgatatcgttttggaagttgcaatgaaagcacagcacattcaacaacggaaccttgttgtgcaaggctcttggaagtggttgttgacagaatttgcattgtattatggggtttcagatgcctacacgaagttgaggtatctttcttatatcatggatgttgc

SEQ ID NO: 14884 - DNA, 1215 bp, Setaria italica
  Peptide Sequence Number=SeqID_80858
agctagttagtgaaggagctgcatcaaaacccaagaaaacaataggcaaaatgaaggttcaagttcgcaaagttcggatgtctgttgatatgccttctggttgcaacttttcgtcattgccagtggtgaaattggattctgtccggtaccgtttatccaatgtacaatccacactttcatcaggatgggagtctgtacggagagttcgagttttaccacagcttcctgctaacagttcgttctcaaagcatagcttagcatacatgcaagcaagtgctcagtatatcaagcaggtgtccggtctgttaaaggtcggtgtaactactctgcggagcaattcatcctatgaagcaccacaagagacatattcctgccaactgaggcttaaaagtttacctgaagatgatgtggtacctatgcagcctggctctggtgaaacccatgtcttctttcctgatagcctaggagatgatttgatcattgatgtggctgattcaaaggggaagccctgtggtcgtgttgttgctcaagttgctacaatggctgaggatccgactgacaagctacgctggtggtcaatattccgggaacctgagcacgaacttgtgggtcgcatacagctatatatcaactatacaactgctgctgatgagaacaacatgaagtatggttctgttgcagaaactgtggcatatgatatcgttttggaagttgcaatgaaagcacagcacattcaacaacggaaccttgttgtgcaaggctcttggaagtggttgttgacagaatttgcattgtattatggggtttcagatgcctacacgaagttgaggtatctttcttatatcatggatgttgcaacccctactgctgattggctcaatctagttcatgagcttttgttacctatactgatgaagaaccatggtactgccgcattgagccaccaagagaaccgaatactgggggaagttgaggagcaaattgaacaaactcttgctatggtttttgagaattacaaatcactagatgaatctataccatcgggtttggcggaagagtttaggcctccaactggattggctgccaccgctctggaaccagctattaagctgtacagtcttctacatgatgttctatctccagaggctcaactaagattgtgcggttacttccaggcagctgccaggaagcgatcgaggcggcacatgcttgaga

SEQ ID NO: 14885 - DNA, 1086 bp, Setaria italica
  Peptide Sequence Number=SeqID_80859
tttaaaacttaaaaagtttaaaagtttaaagtttaaaagttttaaagtttttttttttaagttacttaaaccttaagttactttgggttttttttttcctttctcctttcagacaaagcaagcgtacatgttacagaatggtgaaagtacacttcatctgttcgtcagaatcagagaatcaaataaactgaaaatctcatgcaccattgaagtcgccaagtcggtatatttacgtgctatagcagcggtcgcgaagagtccacctttctcaggctcgacccaacaaacctctttatcgcattcttccaagatcccttgcggtcatcccgatatttgactgagggatcaacgatgtagttctttataagtctgcaaagttctgctggcttttcacggttaatggcatggccggcatccttgactacgattagttctgatgtatcacccagatgcctcttcagccgtaggccaagttccaatgggaagacccggtcttgctctccccaaattatcaaggtttgctggctaattttaggaaggtctgaaagcttcctaccattgatcaacacatataacagctcagtcttctctttcacgttttcagtgcacattaccctgatgtagtccctgatgaagcaggacggcatgaaccgcggcgggcggcagaaggtgagccccacgagcctcctgagatcctccggccgctgcggcagcagcaggctggctgcctcggcgatgtcctcgacggcgaagagccccgcggccaggtcggcctcctcgaggcacactcccgccgcgatgagcacgagccgctccaccgcctctgggaacgcgtgggcgaggtggtacgcgacgaacccgccgtagctaacgccgacgacggcgtaccgctgcggtgcggaggggagcgccgtcatggcggcggcgatgcaggcggcctggtaggccggggagcggtcggctgcgggggaggcggaggcgccgaagaagatgaggttcgggacgtagggggccaggccggcggcgaggagcgggcggaggaagggggcccactgccaggtggcagtcgcgccgaatccgtgtaag

SEQ ID NO: 14886 - DNA, 683 bp, Setaria italica
  Peptide Sequence Number=SeqID_80860
atctaattgtaaatccaacactggaattgttgcaaacagtgatgccaagtgtatggacgtgaaaccaatcagcggaagtgttaagagcaactatgccatcaaagctactgtaaaatccaacactggaattgttgcaaacagtgatgccaagaacaccgatgtacaaactaacactggaagtgttgtcagcgaggataacagtgttgacacaaaaccaaatattggtcgggttgctgcaagtatacagaggttggagagcagcatgagtaaagtgcaaatcgggagataccggtgatacattgtggctgagtgctgactaaatacctattttctggcttggacatatgtcattgtggagaggcacattcttttgcgctagatttctactattaatttggttgctgaggataataaatacttatccagagccaaccttcctcaagattgaggacctggcaggtaccagctggcgctctagtatatctctattcctgctaactgtaaaaagttttgtatttgcccacagaatttacatggaggtacatatttcccatacataccctggaacagattgtattagtgctcacagattgacacactcaaagttacatagcattcttttcaacttttttgtgggtaattatgaatgcctgttcgggaatatacgtgagtgtgaagtaggt

SEQ ID NO: 14887 - DNA, 1180 bp, Setaria italica
  Peptide Sequence Number=SeqID_80861
cacattactgctcttttcatccctgcttgagatgctgccagtgttgggcttcgtatcaatagttttggattttttgttggtggtgttacctgtgtccagttttaaactagagcttttggcatcgctgttggctatgcttccaatgtggggctttatcagaattctcggcatctctgttggtgattgatccaatgttcaggtttacatcagcatttttggcaagtctgttggcaatgcttccaatattgggctgcacatcagtgctcatggaagcattgttggtaatgttactattgttgtgtttcgcatcagcagtcttgttgcaacttccagtgaggctcccttttttgtccgtcacatcaatatttgtacaggcaccactggtggtattccctgtgctttgggcatcattattgttatgaggctcacaagttttgtcctcatcatattgaagccatggatgctttaggcattctgcagctgtcggcctcttctctggtgcaaagtcaagtaaagggcagagaaaattggcaaattcccgcgcatcagattcagaaatcttgtatttgtcaacaaggatgcgttcaacagatgacaacttcagccttcttatccgctttagatctccatggcggtcaaaatactcctttgatcgtgttcccatggtggcgatctttttggcatcttgccaagtaattccatcattaaagccaagtgatcctcatcttcgctgtatccatggccttccttgggtgtaaatagcatttctcctgttgcaagctcaaaagcaatacacgcaaatgaccacatgtcaacagaaaacgagtatcctgcacctagaatgatctctggcgcccgatattgccttgtctgaataaaatcagtaaattgcttgtcagcccaacaagcattcccgaagtccacaattttgcatgtcagatcaatcccatccaagctcctttctgaacgcgaagattccacaactgattttcttttctcagcaagctttgcaagcaccctccttgctctcatctttagtttcttctcgattgggttaagaccaacttctccgttaggattcccctcaggcttctcaaggttaggtttaagcccagaccgaatggggtccttcgagggatcaatcgttgagacaaggagaacattctcaagcttcaaatcc

SEQ ID NO: 14888 - DNA, 809 bp, Setaria italica
  Peptide Sequence Number=SeqID_80862
aagcctagttccgagtgaaattgaagttactgcacgacgtaaaaatgggcaccctggcaaacccgagccgcctcttctccaggtcgaactgcagcacgtggttctccatctggaaccctccgattaccaccgccggcgccccgccgtatccgcccttcttcatctcgacgaacccgaggcacgccgccgtgaagtcgttgacgtccaccatcgagctgaggccgccgaacgtccagttcgtcttcccaccctcgagcacgaggtcgatgtccgggacaagccagccgatcctggtcgggccagggagcgtcttcgaatcgtagcagaactcgaacggcgccaccgccggaaccttcttggtggtgttccactgccgcgtcagggccttgtcgaacgcgtccacgaactggcggtacacgtcgggacggagcgcggtgtacggcgccgtcgtgccgagcaccacgccgccggtggcgagcgcgtccttggggagttgcaccggcgccttgtcgacggcgatggccttcacggggaggtagtaacttgggttgtccctcctgctgcggagcggggtgaacgccagcgtcgtcgtgaggtccccggccgccgactccggaaggaggaacagcggacccccgccgaagatagccacgccctcgccttgcctcgggaggcagagcgtgaacttgccggcgacgcgctgcgccggcaacgccaggccggaggccgcgagccccgcgacgccggatgcgtccctgggcagccgcgccaggagcttcttcggggccacgccgccatggcccggacgg

SEQ ID NO: 14889 - DNA, 296 bp, Setaria italica
  Peptide Sequence Number=SeqID_80863
ccgacgtgatcccggtcgccggctaccgccgccgcccgtacttcgttctcgcaggcgtggtcggcgtatcgtctatgctgatgctttccatgcaccgcggattggggatcatgtcggcactgctggccctgacggcgcagagcgcgggcgccgcaatagccgacgtgacggtggacgccgtggtcgctcagaacagcatcacgcacgaggcccttgcttccgacatgcaaagcctgtgtgggtttagctcctctcttggggcattgcttggattctccattagcggcctgcttgtt

SEQ ID NO: 14890 - DNA, 1691 bp, Setaria italica
  Peptide Sequence Number=SeqID_80864
taattaattggtagtaaactaaactattaagttgtactctggtttctcatccttgccatggttgatcaagcccctcctatggctttatcagtgattccattccactctttggatatcgaagaaggtcatacctttttctgtcagggttacttggagcactttcatggagtttgatggccacagtagtgagcagtaaatacagtgctgcatcctctattcttcttgggtcactttctgttgccttttcggatgttgtagtggactctatggttgttgaaagagcccgtggagaatctcaaagtacatctggatctctccagtctctctgttggggatcttctgcctttggaggaattgtgagtgcctacttcagcgttcacttgtggatacttacggaatttgtctttggtgttacagcatttttacccctgatgacatctgctgttgcagttctgtaaatgaacatcgcatgcctttcggagaacgtactatcttactctctggttcaggatttgttgagagctctaagcagcacgtcagacagctttggacttcagtaaagcaacctagcattttcttgccaaccttgtttatattcctttggcaagcaacaccgcagtcagattctgctatgtttttcttcatcacaaataagcttggattcactccagagtttctaggtcgtgtgaagcttgttacctctattgcatccctgcttggtgttgggatatacaactattttctgaaggaaattcctctaagaaaaatctttcttgtgacaaccatcataggttcagctcttgggatgacacaggtgcttctcgtaactgggcttaatcggcagtttgggatcagtgatgagtggttctctattggtgattcattaatcatcacagtccttagtcaggcttcatttatgccggtcttggtgttagctgcaaaattgtgccctccagggatggaagccactttatttgcaactttgatgtccatttccaatgctggaagtgttactggtggtctggttggtgctggtctaacaaaggtttttggggtcaccagggacacctttgggaatttacctctcttgattgtggtctgcaatcttagttcgctgttgcccttacctcttttaggcctcctgccagaggaatcaggtgacacaaataatggagaaacaaaacataactgacttgctaagggttttatctccatgtgttctggatctcaagtatgacatgccaccgtgcccagcaccgagtgagatccatcccatccacttggagttcagaaaaccagtagggaaatatgaaagtcaaactggatataatttcgtctgtcaccgctttcatcagtcagattaatctactgtgactatttacctatgtgattgaagtgattcatgatcgtctgaaaatggtctctgatgcaacggcacacaggtattcgcccctttttatattttctagttaccttgtatgctaagacaaggtaggtttcggttttctctacaatctttgttacttaatgcacccccatgaaaattataccgggggttgaacattagtagttggatttccttacaaagttgaatgtattgtgccgaaaagggggaatatttatactttatggaaacctgaagtatgggcatgtaaagaataaatacttgcacacagttcaacttatatcag

SEQ ID NO: 14891 - DNA, 334 bp, Setaria italica
  Peptide Sequence Number=SeqID_80865
caggggaggggggatagcgcgcgctggtggttgggcgagcgctcgggccatctggtcttgtcgccggcaatgataggcggcggcgctgcatgaacgccaaggcactgcgtggcgtggcgcgacgcgggccgcacggtgaccgcgcgccggcgagcatgtgcgctgcagtggcgtgcaagggcagggtgtttgagccgagtttgcgcaagattttgaaatcaaacttgaaatttttcaaatataaaacttgttcaaactttaggctacaaactctacaaaagcttcaggttcaaaacttggctagatttggagataaacatgtgcaaacattgga

SEQ ID NO: 14892 - DNA, 440 bp, Setaria italica
  Peptide Sequence Number=SeqID_80866
gttggacggcaacgccacgatctaccgctgtggcccctggaacggccggtcgttcagcggcgtcacggaggctttggggaacacgtacactgacctgctcacgttgggtgtgacgattagtccgggagagatctcgtacagttacacttctaaacccggcgccgccttgactcgtttggtggtgacggacgacggcaaggtcaatcgcgtcgtgtgggatacgagcagccggggatggacgcatcagcccatctttcaaggcccaagggatccctgcgacgactacggcaagtgcggatcgtttggtctgtgcgacgtcagttcggtgttgtccttctgcggctgcctcaggggctttagccctgcatcgccttcggcgtggagtagggatacctcgggctgccggcggaacgtgaagctgcagtgtagtagcaatgggg

SEQ ID NO: 14893 - DNA, 353 bp, Setaria italica
  Peptide Sequence Number=SeqID_80867
cgctacagagaacttttcggacggaaaaaagattggaagtggtgtcttttgtgctgtttacaagggtgtcctgcaggacggaaaagtcgttgccataaaaaaattggataattctgttgtcattgacgacaacaaccggctatacgatgaaattaatgtttttgtagatctgaagcacaaaaacataactagacctctgggatattgccacgaagtgataatggtcttgacaagccttgatgcaaaatatgttagagctgaacacagagaattttgttttgtcgaagaatacatggaaaacggaagtatggataagattatgaacgggtctcgatttgtggttggtcctgccg

SEQ ID NO: 14894 - DNA, 303 bp, Setaria italica
  Peptide Sequence Number=SeqID_80868
cgcacgagatccaccgccaggcggccgcggcggggcgcgggtgatcgtcaccgaggcctgcgccgtcgagaaggtgcgcgccttcgccgccgagcgcggcgtgcccgtggtcgccgtcgacggcgagttcgagggctgcctccggctccgggacctcatggacgccgccgagccgctcgccgccgacgaggaggtggagcccgacgacgtcgtcgcgctcccctactcctccggcaccaccgggatgcccaagggcgtcatgctcacgctggtgacgaggctgcggtgcgtgaggcagcaggt

SEQ ID NO: 14895 - DNA, 695 bp, Setaria italica
  misc_feature (469)..(469): n is a, c, g, or t
  misc_feature (660)..(695): n is a, c, g, or t
  Peptide Sequence Number=SeqID_80869
taggtattggtattggtcttgtctactacttggttgtattatttggtttattgtttgtattgacaacgatgagatcttcattgttgacaggctaaaggagataatcaaatacaagggcttccaagtacctcctgcggaacttgaggcccttctcatcactcatcctgaaattaaggatgctgctgttgtctcaatgaaagatgagcttgccggtgaagtccctgttgcattcattatacggactgaagattctgagattagtgaggacgagatcaagcagtttgttgcaaaaggaggttgtgttctacaagaggatcaacaaagttttcttcacggattctattccgaagaatccttctggcaaaatcctgaggaaggacctgagagcacgacttgctgcgggcattcctggtggtgacagtagacaacagtaccaaaaagctaaagcccgatattgattcttttcccncactttgtacacccttgccaaaaatcatgtagtattcatgagatatacatatagaaaggccaggcgatcaatattgattcttttagatgggtaaggtatactttgtttatttgtccagcatatgtattgtgtcatgtatagataccgttttttgacaaagaaaaaaaaggctgattataatttgtaaaccnnnnnnnnnnnnnnnnnnnnnnnnnnnnnnnnnnnn

SEQ ID NO: 14896 - DNA, 707 bp, Setaria italica
  Peptide Sequence Number=SeqID_80870
gggagcagcagagccgagcagagcctcctcaaaatcccgaccaggcggcgaccattttccctaccggtcacccggagtccaccatttcaccggcaacgagcccgatggggtccgtcccggaggactcggccgcggcaccaacagccgtgttccgctccaagctcccggacatcgagatcccggggcacctctcgctgcaggcctactgcttcgagcggctcccggaggtgtcctcccgcccgtgcctcatcgacgggcagacgggtgccgtccacacctacgccgacgtggagctcctgtcccgtcgcgcggcggcggcgctccgcgggctcgggggtggggaagggcgacgtggtgatgaacctcctccgcaactgcccccagttcgccttctcgttcctcggcgcggcgcggctgggcgccgccaccacgacggcgaacccgttctacaccccgcacgagatccaccgccaggcggaggcggcgggcgccaggctcatcgtcaccgaggcctgcgccgtggagaaggttcgcgggttcgcggcggagcggggcatccccgtcgtcaccgtcgacgggaagttcgagggatgcgtggagttcgacgaggtgatcggcgccgaggagctggaggccgacgccgacgtccaaccccgaacgaacgtacgtacgacgactagaccctaactacctaccggacaaccaaa

SEQ ID NO: 14897 - DNA, 1720 bp, Setaria italica
  misc_feature (1720)..(1720): n is a, c, g, or t
  Peptide Sequence Number=SeqID_80871
atcgagtcgagcccggcgagctagcagagcagtagagcaccaccagcagccatcgtctccttcctatcgttcgaccagtcgcccgtagcacagcgtcactacccgattgaaaggctagttcatcggagagagagctcggtcgccggagagatgggttccatggacgagtcggcggcggcggtgtcggtgccggtgtcggaggagaagccggtggtgttccggtcgaagctgccggacatcgagatcaacaacagccagtcgctgcaggcctactgcttcggcaagatgggggaggtggcggcgcgcccctgcctgatcgacgggcagaccggcgagtcctacacctacgcggaggtggagtccctgacacggcgcgccgcgtcggggctcaggcggatgggcgtgggcaagggcgacgtggtcatgaacctgctccgcaactgcccccagttcgccttctcgttcctcggcgcggcgcggctgggcgccgccaccacgacggcgaacccgttctacaccccgcacgagatccaccgccaggcggaggcggcgggcgccaggctcatcgtcaccgaggcctgcgccgtggagaaggttcgcgggttcgcggcggagcggggcatccccgtcgtcaccgtcgacgggaagttcgagggatgcgtggagttcgacgaggtgatcggcgccgaggagctggaggccgacgccgacgtccaccccgacgacgtcgtcgcgctgccctactcctccggcaccaccgggctccccaagggcgtcatgctcacccaccgcagcctcatcaccagcgtcgcgcagcaggttgacggcgagaacccgaacctgtacttcagcaaggacgacgtgctgctgtgcctgctgccgctgttccacatctactcgctcaactcggtgctcctggcgggctccgggcgggctccgccatcgtgatcatgcgcaagttcgacctgggcgcgctcgtcgacctggtgcgccgccacaggatcaccatcgcggccctcggccggaaccagcccggcgagatcttaatccgcggggtgcagatcatgaaaggttacctgaacgacccggagtcgacgaagaacaccatcgacaaggacggctggctgcacaccggggacatcggctacgtcgacgacgacgacgagatcttcatcgtcgacaggctgaaggagatcatcaagtacaaggggttccaggtaaaagaacacttaagaaggacacttctcatcacgcacccggagatcaaggacgccgccgtcgtatcgtaagttgacgatcgatgtgttcaggtggaaccagcactatgtgctgccaaattcatgggctgaattctgaaaattttcctgatatgttctatcagaatgaaggatgatctcgccggtgaaatcccggtcgccttcatcgtgcggacagaagggtctgaactcaccgaggatgagatcaagcaatttgttgccaaggaggtggtgttctacaagaagatccacaaggtcttcttcaccgactccatccccaagaacccttccggcaagatcctacggaaggacttgagagccaggctcgccgctggcgtccactgaggccatacacaccttttcagttgctaaaaaaaaagccatgcagtaggtgggtaccattcttcgtcgcgaaatggaagcaggagggcacgcaatcctgtggaaacatgttgccaaaaggn

SEQ ID NO: 14898 - DNA, 655 bp, Setaria italica
  Peptide Sequence Number=SeqID_80872
aaggatggatggctgcacactggtgatattggttatgttgatgacaacgatgagatcttcattgttgacaggctaaaggagataatcaaatacaagggcttccaagtacctcctgcggaacttgaggcccttctcatcactcatcctgaaattaaggatgctgctgttgtctcaatgaaagatgagcttgccggtgaagtccctgttgcattcattatacggactgaagattctgagattagtgaggacgagatcaagcagtttgttgcaaaggaggttgtgttctacaagaggatcaacaaagttttcttcacggattctattccgaagaatccttctggcaaaatcctgaggaaggacctgagagcacgacttgctgcgggcattcctggtggtgacagtgcacagtccaaaagctaagcccgatattgattcttttttcccctccactttgtacacccttgccaaaaatcatgtagtattcatgagatatacatatagaaaggccaggcgatcaatattgattcttttagatgggtaaggtatactttgtttatttgtccagcatatgtattgtgtcatgtatagataccgtttttgacaaagaaaaaaaagggctgattataatttgtaccatgtctgagttaaaccttca

SEQ ID NO: 14899 - DNA, 786 bp, Setaria italica
  Peptide Sequence Number=SeqID_80873
ccgcccaacccgagtctccaccgcctgtacctcacttgtttcagcgagtacaagagcgcggtggtggtggttggagatgaggagcttcacctagttgcaatgccgaccaagttggataaggggccgtgcttctggtgctgctcagcacgctctgggctctatgcatcctcagtcgggatgctcaacctgcgctgccttgccattgtgtttgatcttgatgagacccttattgttgctaatacaatgaagtcctttgaggatcggatcgagatgctttcccgcaggatggatgttgaagatgatccagtgagaatagcagggatgtctgcagaaatcaagcggtacattgaggacaaggagcttcttaaagaatttattgacacagatacagttacggacaatggcaaaatagttggaacccgaaaggaggaggttcaaccagtgtctggtggtcaggagcgtgtttttcgtcctgttatcagactgcccgacaggaatgctattctgactcgcatcaatccggagattcgtgataccagtgttttcgtaaagctaaggcctgcttgggaggatttgagaagttacctaactgcaaagggacgaaaaagatttgaggtttatgtatgtacaatggctgagagagattatgctcttgagatgtggaggcttcttgatccagaaggcaacttgataagtccacagcagctttcagaacgcgtaaattgtgtaaagtcaggttccaaaaagtctctgcagaatgtttttcgagaccgaggatgccatccc

SEQ ID NO: 14900 - DNA, 439 bp, Setaria italica
  Peptide Sequence Number=SeqID_80874
gcctggatttaccgcgtttagaaggtctgcagtagcgaacctggatctgttccccgtgttgcaaccctaagtaaatatgaagttattttttttttgactcatgacaaatgatgggtgatgctattatgcaggcacaatttaatttggagcaaggcactgttatatcactagcctaagttgaccaaaccatacttgtgtgatgctaattactaatatgagtatatatgattgatgaaggtagtaacctaccacaatgaagacatcgtccttcccaaagagtgaagccacttcctcttcgaactgtggattcttctccttcccttgaggcgttactgacaggtagtagggaacattgcgagaaccaggtgcgtggcccttgtcaaagtcctctcgcatcctgaagattcatttcatttcatacccaccagttaatttgcag

SEQ ID NO: 14901 - DNA, 743 bp, Setaria italica
  misc_feature (1)..(1): n is a, c, g, or t
  Peptide Sequence Number=SeqID_80875
ntttttttttatttgtagcaagcatcacctctcaacattcatttcagagtactacatcatgaatgttcattacatcacaattcacaaatgtgtcgtccaacatcctgccaaagcaggaatatcgccatgatttcactgggctgttcaactaggcccaaatagtccctagtttattccaaacaatggacacaacgagcgcacacaaactggcatccccaagcaagctgaattaactggtggtggctactgctgttgagccggctgctgatttgcactctggagaaaggagcggtagccaccttgcaggttccttgcattcttgaaccccgcgtttagaaggtctgcagtagcgaacctggatctgttccccgtgttgcaacccacaatgaagacatcgtccttcccaaagagtgaagccacttcctcttcgaactgtggattcttctccttcccttgaggcgttactgacaggtagtagggaacattgcgagaaccaggtgcgtggcccttgtcaaagtcctctcgcatcctgacatcaatatagccatgaccagagctcaagagagcatgtgcttggtcagcgtcgatggcagggatgacctgctccttgtcactgctgctggtgtctgcagacgccattgatacagggatgatatgttgctgtgaagcctatctagattcttgtctagtagtgttccatcccttcatttatattgccagggcaggatcaccaggatgcatga

SEQ ID NO: 14902 - DNA, 363 bp, Setaria italica
  Peptide Sequence Number=SeqID_80876
gaaaaagaagagaaaaagaagcaatttccgcaggcggaaaggaaaggaaaggagtcgcggcgagccagccaagtggtggccggtgcgtcgcgggccgccgggtggggtcacggacgggctccgcggtcacgcctgacgcgcgaagccggccggaaccatccaacacgcgcagcggccgccgcgtcgtcgactcgtcgtcgccgtcgtcgccgccgcctcgcctcgcgtccagaaacagacacgagctgcctaatattccacgcccggtgtccgcaccctttccctccctccctatctcccctccacccttccttccctgcatccaccacctgagactcctcgtcgcccttttccctttccagg

SEQ ID NO: 14903 - DNA, 567 bp, Setaria italica
  Peptide Sequence Number=SeqID_80877
tcgtctcaaagaagagcctaattgatccaggttttggctcatactccatcgaactaagcattgatggggcgctgcgccttgcaagtcgcagctccccctctgtagtgtactggtcttggacatctggaggactagcacaacttgtaaaagcactcgatgggttgatggactcggatccacggaccaagggtttgcttaaacccacatatcaagataacgatgaagaggtgtacttctcatacaccataacgaatgaatcagcttccgtattcgtcccaatagacatctccggtcagcttaagttaaatgtttggtcgcaagccaaagaaacttgggaaactgtatacgcccagccttctgatttctgcatagcaccggctgtctgcggacctttcgcggtctgcaacagcaattcacgcccattattctgtgactgtatggagaccttactctcagaaatcgccactggattgggagcttggtgatcgaagaggagggtgtgctagaaatactcccttacattgcataactagcaacaaagccagacaagttcaacagatgtgttcc

SEQ ID NO: 14904 - DNA, 410 bp, Setaria italica
  Peptide Sequence Number=SeqID_80878
ccaattagaaagaatggaagaccacatgagctctaaaatcagtggaaatcaaccccttcatccagggccgtggagcccagcatgacacgagaatcaatctgcttatcgaatttcttccttctgcgtgcctcaaactcgttgaatccttccatttgttggaactggtccctcatgattgggttgtcatgcagcgataggttctgaagagccgtgcagtctttcagtatgttttccggaagctgaaatgcaaagttggggttgggtgacaggattttgttgattttgtaatggagcaacaaatatcaagtgcatatacctgacgaattttgttgccattcagtgataaggatttaaggcaaacaaggttgcagatcgatgacgacataagaaagggaacaaacaaataacaa

SEQ ID NO: 14905 - DNA, 574 bp, Setaria italica
  Peptide Sequence Number=SeqID_80879
ggttgtcatgcagcgataggttctgaagagccgtgcagtctttcagtatgttttccggaagctgacgaattttgttgccattcagtgataaggatttaaggcaaacaaggttgcagatcgatgagggcacatcttcaatcgaatttccatttgcctgcaattcttccagggaattgcaacctccaattgattccggaagttcttttagtttgttatcagatacattgagtattaacatatttcgcaaatctcccacactcttaggcaggcacattaaagaattatgagaaatagaaagttgctgaaggtttgacagagaacccaattcttcaggtaagatagagatcctatttctgtcaagtgtgaggattttaagattccgcaggtatccaatgttagccgggatgttttcaatcaaattaccagccaaaacaagtctttgcatattcacgagtccaccaacttcctggggaatctcaactagtttgttgtttgtcaaatccagagttctcaaggaattgcccacttgtagaacttcatttggtagttccttcaatctggcgtcgcggagggc

SEQ ID NO: 14906 - DNA, 460 bp, Setaria italica
  Peptide Sequence Number=SeqID_80880
agaaattcaatgtttttgttgtatatccaaagtcaatacgcactgtatccattaatattttttgagtgaccagacttgactattgtgctcaaacacttccaaaatgaagaaaaagattttggcatctttgagcaaaagaggaaacttacatttcgcaaatctcccacactcttaggcaggcacattaaagaattatgagaaatagaaagttgctgaaggtttgacagagaacccactggatgaaacaaaaagaaaggttagaaatacaatactagttagagtatcacggaagttataactttctaattgctaagagatgaagcttgcacctaggcgaatgtcaataactgtagttatgtaaatatagtaacattttgcatgtttcacttccgttgttagagaaagataggttcataggaactaacattcttcaggtaagatagagatcctatttctgtca

SEQ ID NO: 14907 - DNA, 638 bp, Setaria italica
  Peptide Sequence Number=SeqID_80881
caaaaacctagacatgaagaagatactgaggagtatactctgccagcacagttgccgagagtttggcagcagcgaagcatgggatgagcagcaactcatcaacacaataagacagttcctgaaggataagaggtactttattgtaatcaatgatatatggagcacatcagcatggagaactatcagatgtgcttttcctgaaaacaattgttccagtagaatattgacaactactcgcatcatcgcagttgccaaatattgttgctctcctcaccatggtcatgtgtatgagctaaagcgtcttggtgcaactcactctaagagtttatctttaaaagagtttttggatctgaagatatgtcctcttcatctgaaagaagtttccagtgcgagatctccatctacttcttgcttgcccttggcaatcattacaatagctagtttattggctactaaagctagaacaaaagaagaatgggagaagatatggaagtcaatcggttagtacttgaaaaagatacagacatggaagacatgaaaaagatattgtcccttagttacaatgatcgcccctaccatttgaagacatgcttgttatatctaagtgtgtttcctgaagattatgagatcaagaggga

SEQ ID NO: 14908 - DNA, 476 bp, Setaria italica
  Peptide Sequence Number=SeqID_80882
tggatgatgaccttgaggttgtcggtgttgtgaccctgcgcgatgtgatctcgtgcttcatccacgagccacccggttactgcgacagctatctggcttcagcaatggagaatcttgagggcaaaggagccggatcagtggagaaaagttgagctttctgtagtgtgaatgtgtggaataacaggccgatctcgtgtggtcttctttagctggaataatgggttcagattgtgttaatcgggtaaattctgtgtagattaagaaggcttctctgtctcccctcaaatgcagtttgctgtgtcttttcttgtatagttggtaatcaagaatctgactaaaaacttaccgttacggtccgttaaaccgtaaacgttaccgtaacggtaacgggtaccgtaaacgttacccgttaaccgttaccgtaacgtttttaacccggttaacggtaacggttacggtaccgtaacgggtacccc

SEQ ID NO: 14909 - DNA, 993 bp, Setaria italica
  Peptide Sequence Number=SeqID_80883
cttaggagaagatttctacaaagttttgcttgaacaagaacctttcaaatcaacaacagttcaatcaattgtagagtcataccactggtctcctttcatccccattacattggacagttccatgcttactgtactactgttgctctccaagtacagattgagaaatgtcccagtgattgagcctgacaaacctgttatcaggaactttattactcagactggtgttgtcaaaggacttcaggagtgtaaaggaagggattggtttgactacatttctgcacttcctctttcagacttgggacttccttttatgtcgattgatgaggttatcaccgtgaagagtgatgatctaatattagaagctttcaagtgcatgaaggataacaaaattggtggtgtaccagtagtggaaggtcccaaaaggaaacttgttggcagtgtgagcataagggatattcgctttctattgcttagacctgacttattttcgaatttcaggcaacttaccatcatcgaattcatgaagactttaggctccactcttcctaattcagggaacaactgcctggtgaagccaccacccacctgtgcccctgacacttcccttggtagcgttatcgacagcattgcatcaagaataacccaccgtatatatgtagtggatgatgaccttgaggttgtcggtgttgtgaccctgcgcgatgtgatctcgtgcttcatccacgagccacccggttactgcgacagctatctggcttcagcaatggagaatcttgagggcaaaggagccggatcagtggagaaaagttgagctttctgtagtgtgaatgtgtggaataacaggccgatctcgtgtggtcttctttagctggaataatgggttcagattgtgttaatcgggtaaattctgtgttagatttaagtaaggctttcttcttgttcttccccttctaaattgttcttagtttttgttctttgttttgtttctttttt

SEQ ID NO: 14910 - DNA, 796 bp, Setaria italica
  Peptide Sequence Number=SeqID_80884
cctgcatccaggcccaaggcatggatcaatccaggaaaatgcagagttcccaagctgcgatgcctactttgaggctatccaatccaaaaagaagctcccactgtctttgcaagaatcactgaccgctgcctttgctcagattccagtctcatccttccctgaggttcctgctggccgagtgattgaaattcatggtgacacctctgttcttgaggctttgaggattctctcagaaaacaacataagggcagctcctgtgctgaatccggaacctgtggccccagccgattggcaagggcggtatcttggtgttattgattattcggcaatcatccgttgggtactagaaaatgctgagcttgcttctgttgctctgtctgctggatcggcaactgccgcaggagttggaatgggtgctgttggtgcaatgggggtcgcagcattgggtgcaactggcccagcggcagtggctggcttgactgcagctgcagtaggggctgctgttgctggtgggttaactgctgaaaagggtgtcgcaaaggacggtttagctgctgcagatcacttaggagaagatttctacaaagttttgcttgaacaagaacctttcaaatcaacaacagttcaatcaattgtagagtcataccactggtctcctttcatccccattacattggacagttccatgcttactgtactactgttgctcttcaagtacggagaaatgccagtgagcctgatctcagactggtgagaactagacaagactagacaagtaaggggactagactagtta

SEQ ID NO: 14911 - DNA, 679 bp, Setaria italica
  Peptide Sequence Number=SeqID_80885
ggagctcgcagtacaggggcgtcaccttctacaggaggacgggccgctgggagtcgcacatctgggattgtgggaagcaagtctacctaggtggctttgacactgcgcacgcagctgcgagggcatacgatcgagcagcgatcaaattccgggggctcgaggccgacatcaacttcagtctgggcgactacgaggatgatctgaagcagatgaggaattggaccaaggaggagttcgtgcacatactccgccgacagagcacggggttcgccagagggagttccaagtaccgtggcgtgacgctgcacaagtgcggccgctgggaggcgaggatgggccaacttcttggcaagaagtacatctatcttgggctctttgacagcgaagttgaagctgcaagggcatatgacagggcagcccttcgcttcaacgggagggaggctgttactaacttcgagcctagctcctacaatgcaggagattccctgcccgacactgaaagtgaagcaattgttgacgctgacgccgttgatttggatctgcgaatttcacaacctaatgtgcaagatactaaaagggacaatatcatagttggcctccagccaacatatgactcccctgaatcttcaaatacgatgacctctcagccaatgagctcatcgtccctgtggcctatgta

SEQ ID NO: 14912 - DNA, 551 bp, Setaria italica
  Peptide Sequence Number=SeqID_80886
acttagtgatatccttggatggtggtgcatcttggtttatcaagggtttataaatgcttttgaagatcatattaaagctgcagttgagaaggcaatacctgaaaatattgttgaaggtgctgggaaactggactcatttctgcaaggtcttcctaggactgttagtctggatgacgttgctgccttgaatatgactttcattaatgatccgcactatggcaattcttcgattgagtttgatatcaatggattgattacttcagcagttgctaagacaaccaatctgcagaagcatccgcacctttctttatcttgtggtgttgcatccaaaatgcttttgctttcacttgatgaagatgtattcaattcggcattagaagtttattttaaggcagattcaatgcactgggttgtcgacaaagtccctgatcaatctctactgaacacagctagttggaaatttatcattcctcgcttatactggaattatccaaatgatgatatgcggctaaatatttcgatgacctcatccccagtgataaggattacat

SEQ ID NO: 14913 - DNA, 1174 bp, Setaria italica
  Peptide Sequence Number=SeqID_80887
tttattaaatgcttttgtaagatcatattaaagctgcagttgagaaggcaatacctgaaatattgttgaaggtgctgggaaactggactcatttctgcaaggtcttcctaggactgttagtctggatgacgttgctgccttgaatatgactttcattaatgatccgcactatggcaattcttcgattgagtttgatatcaatggattgattacttcagcagttgctaagacaaccaatctgcacaagcatccctttgttggttgtttgtctattcctgcatattgtctgcttgtcctttcacttgatgaagatgtattcaattcggcattagaagtttattttaaggcagattcaatgcactgggttgtcgacaaagtccctgatcaatctctactgaacacagctagttggaaatttatcattcctcgcttatactggaattatccaaatgatgatatgcggctaaatatttcgatgacctcatccccagtgataaggattacatctgaaaaagttggtgctaccattaacgcagacatgataattgatgttgtagatgacaaggagacagttccggttgcatgcatctcagtggttgtaagtgcttcaggcgttgtggagacatctggcaataaagtttatggtagagttgacttagatgatttctcccttgcgctgaagtggagtaaaattggaaacttccatatgtctttgattcagggagttattcgtgttttcctgaacaccgtatgcatgccttacttgaactcccggctagggaatggatttatcctgcccgtggtccatggtttcacacttcaagacgtctacgttctaacttctgctaagcagctgacactttgttctgatgtcaccttcaccaacacaagcagcttggcgagtttagcacttctgagatacagggaagcgcgtgtaccctctgtcttggccgcaaagcaggccttggcattttagagttggaagtagaacacttgcacatacgtgtacattactgtacataagatctctttatcaaaattattcgtgcataagatctctttatcaaaattattcacattcatttgtattaattcaagaatgatgtacatatgaactcagaaacatttctgcagattatcgtacataatcgactcttcttctaaaatttaccct

SEQ ID NO: 14914 - DNA, 524 bp, Setaria italica
  Peptide Sequence Number=SeqID_80888
cgggcggcggagggtacagccctacggcgtgttcggccgcggcggccacggcgtgggcggcggcggcgatcaccgcaccctcgagctgcagttcccgcgccagcaccgggacctcatccacgaccactacatcccccacctcatcgccgaggccgctcggatgcggctcaagtcgcgggagcgacggctgtacaccaaccgcgccaccggccccggcgatgaccaccaccgcctctggacctcgcacgccttctcccacccgtccaacttcgacacgctcgccgtcgacccggcgctccgcgaggagatccgcgccgacctgctccgcttcgcggcgcgccgggaccactacgcccgcgtcggccgcgcgtggaagcgcgggtacctgctccacggcccgccgggcacgggcaagaccagcctcgtcgccgccatcgccaacctcctcgagttcgacgtctacgacctcgagctcaccacggtgcccaccaactcccacctccgccgcctgctcgtctccacca

SEQ ID NO: 14915 - DNA, 312 bp, Setaria italica
  Peptide Sequence Number=SeqID_80889
aaaagaatagagataaaaggttggtcatcagcggttgctgtccattccaattaactacacggttcagaattggacgtggtgccatggaggtggagtttgctccaggagccatgctaaagctcaaaacccttcgtttggactttcatgtacggaataccatggatcagtctggcgatttcgacttccatctagagaacctctcttcacttgagcatgtcattgtccatatgaactgttactacgcgggacttagggaggtggaggacgcggcagcttcaatacggaaggcactcgacttgaactcccaacaaa

SEQ ID NO: 14916 - DNA, 345 bp, Setaria italica
  Peptide Sequence Number=SeqID_80890
gtgtgcacggtggcggcgtcagcctcgcagcccacggtggggagcaggcggacgaggcggtagtggagcgcgcacggcgcggcggggtccgcgagcgtggggcactgcgtctgccagtcgaacacctgcacgccccactcgcggtacgcctccgggaccacgttctccggcagctccacggggtcgccggccgccgtgaactccgcgccgaagccgtcccactcgccggacacgcgcgccgcgaactctgcccacttgctgttatctgccaaacctgctgcacgatggactactgatgagtccgtggcgacggcgttggaggtctcaggagagacgactcgcagt

SEQ ID NO: 14917 - DNA, 900 bp, Setaria italica
  Peptide Sequence Number=SeqID_80891
tgggttttggcagcaggatgtttcttcgaggcatactaatttgatgcaagatttttagattgtattggctgcactgtcctagagcaaaggttcttaccagtgagatattttgttccaaaaaggaagcaacaagacaaaaagaataggccgcatctagatatcttcttcaaagcttgtagcttcagctgttgcctggtacacacatctgcagcctctgctgaattgaatcaatgggtagggggagaggcagagggaggaagcagctcagcaatggcaggaaccatgaggacaaggggagcagcggtgaggaggtcgtcgtgcctgcaaggaagaggagggggcggccccagaagcgtgtcgccgctgagaagatcattgaagcggaggtgaaaaagttggaggccgatgatggcgatgaggactatgtggtgggagcaggggatggtgccaaacttaagggttcaagaacagagcatgcttctgcaggagttggtagcaacaagaggaacagggtgcccaaggaagaagaagatggttcaaatcttgacatggaggagaacagctcgagcactcgatctagcaatgatgagtccaccaggtccaatgggttccggcagtcagggagccgtcggaagagcacgccacggcgggcagctgaggcggggctatagttgaattggaatggaattcttgggtatcaattaggcagctgctcttcaattttgccaccttcatatttttttagttagtaatcttcaattttgtgtcatcttggtgtttgctaggtcctacatgagtgtaaacatatactgattgcaaagtcatcagaagttttgcttatgtcgaagaaaatgtatgaactactggagctccacatctagttgctattattgtcttact

SEQ ID NO: 14918 - DNA, 672 bp, Setaria italica
  Peptide Sequence Number=SeqID_80892
agcaaaggaaggatggtcgaggctaagagagtcttgcagaggctgcggggaagggaagatgtctcaggagaaatggctattctggtcgaaggtctgggtgttgggaaagatacacgtgttgaagaatacataattggccctgatgaagggctggctccacatccagagaagatcaaactatatggacctgaagaaggccaaacctgggttgcccgacctgttagtggtcaaagtgcacttggaagtgcgtatggtctcctctctcaacatgggagcatggctagtcaagcatgtttagtgtcatggagcagcagcaggctaaagctgactgggatgccgagagtcaaagggaaggcgatgagtatgcttcagatcatggtggagatgacattgaggataacctccaaagcccacttatttctcgtcaagcaacaagtgtggaaggaaaggagattgctgcacctcatggtagcataatgggtgctgtgggaagaagtagtggccttatgcagggaggggaggcagtaagcagcatgggcattggtggaggatggcaattggcatggaaatggactgagagagaaggtgcagatgggcaaatggaaggtggcttccaacgtatttacttgcatgaggagggcgtacaaggcaacaggggttctatattgtcat

SEQ ID NO: 14919 - DNA, 627 bp, Setaria italica
  misc_feature (601)..(601): n is a, c, g, or t
  Peptide Sequence Number=SeqID_80893
ggcctctgcatagccatctgcgccttaaccttctggatcggtgacatcatcgtgacatacacactcccagtgatgctgaacgccattgggcttgccggtgtctttcgggatatatgccgtcgttttgcatcctggctcttgtatttgtatacatgaacgttccggagacaaaaggcatgcctctcgaggttatcaccgagttcttctctgttggagcaaagcaagccaaggaggattaatcgcccagaccggcgatcagcaacgctggctgtaattttgtggtttccaaacctcaccgtggttagttaatcctctgatgctgtgtgaaagatactttgaccgacaaagaaggggatcgggggacagtgttcctaaagagatggtttggctgtacatcaagaggcttgatactgtcataggccggcttttggaactagggtgtgtagatcatcatctgttatttcttcttttgcttgggggactgtgtgtttgtgttcgttgtaatttcttttgccctatgtaactagtggtgtacaacggttatgttattggtttctttgtcttgtcatctcctctccatctcgagtcttgaatacccggnaatcatgtttatcgtcagtgcagttt

SEQ ID NO: 14920 - DNA, 2573 bp, Setaria italica
  Peptide Sequence Number=SeqID_80894
aggggggggatcccaaatctcggccgccggagcgggggcgtagattttggcggccatggggggcgccgtgctggtggccatcgcggcctccatcggcaacttgctgcagggctgggataatgcgaccattgcaggggctgtcttgtacataaagaaggaattcaatttgcagagcgagcccctaattgagggtcttatcgtggccatgtccctctttggggcaacagtcgtcacgacattctccggggcattggctgactccattggtaggcggcccatgctgattgcctcggctgtcctctactttgtcagtgggttgtttatgctctgggcaccaagcgtgtatgttctgctcctagcaaggctcattgatggactcggtattggtttggctgtcacattggttcctttgtacatctccgagactgcgccaacggatattcgagggttgttgaacacgctgccgcagttcagtgggtcaggagggatgttcctttcttattgcatggtgtttgggatgtctctcttaccaaaacctgattggaggatcatgcttggggttctgtcgatcccctcgcttatatactttgcattgactgtcttctacttgcctgaatcaccgaggtggcttgtgagcaaaggaaggatggccgaggctaagagagtcttgcaaaggctgcggggaagggaagatgtctcaggagaaatggctcttctagtcgaaggcttgggtgttgggaaagatacacgtattgaagaatacataattggccctgatgatgaacttgctgatgaagggctggctccagatccagagaagattaaattatatggacctgaagaaggcctatcttgggttgccagacctgttcggggtcaaagtgcccttggaagtgcgtatggtctcatctctcagcatgggagtatggttagtcaaggcaagccccttgtggatcctgttgtcactcttttcggtagcgtccacgagaagatgcctgagataatggggagcatgcggagcacattgtttcccaactttggcagcatgtttagtgtcatggagcagcagcagcgggctaaagctgactcggatgccgagagtcaaatggaaggcgatgagtatgcttcagatcatggtggagatgacattgaggataacctccaaagcccacttatttctcgtcaagcaacaagtgtggaaggaaaggagattgctgcacctcatggtagcataattggtggaggatggcaattggcatggaaatggactgagagagaaggtgcagatgggcaaatggaaggtggcttccaacgtatttacttgcatgaggagggcgtacaaggcaacaggggttctatattgtcattgccagggggggatgtcccacctggtggtgagttcgtccaggctgcagctcttgtgagtcaaccagctctttactccaaggaacttctggagcagcgtgctgctggtcctgcgatggtgcatccatctgaggcagtttctaaaggtccaaaatgggccgacctgtttgaacctggagtgaagcatgcactgtttgttggcataggaatacagatcctgcaacagtttgctggcatcaatggtgttctctactacactcctcaaattcttgagcaagcaggtgttagtgttcttctttccaacattggccttagttcatcttcagcctctattcttatcagtgccttgacaacgttactgatgcttccgagcattggtattgcaatgaggctcatggatatgtctggaaggaggtttcttctccttgcgacgatccctatcctgatagttgcactgcttgtcttggtcgtggtcaacattgtggatgtgggaaccatggtgcatgctgcactctccacgatcagtgtcatagtctatttctgcttcttcgtcatggggtttgggcctgttcccaacattctttgtgcagagatcttccccaccactgttcgcggcctctgcatagccatctgcgccttaaccttctggatcggtgacatcatcgtgacatacacactcccagtgatgctgaacgccattgggcttgccggtgtcttcgggatatatgccgtcgtttgcatcctggctcttgtatttgtatacatgaaggttccggagacaaaaggcatgcctctcgaggttatcaccgagttcttctctgttggagcaaagcaagccaaggaggattaatcgcccagaccggcgatcagcaacgctggctgtaattttgtggtttccaaacctcaccgtggttagttaatcctctgatgctgtgtgaaagttacatttaccgacgaaggaagggaccagcgacggtgttcctaaagagttggtttggcagtacatggtgtcatggctgggcttgggtttctttttgtgatcttgcttctactttgatgtcccatgagatccaaatagtaccttatatatctagggatcacctgaaactgcttcccttgtatcaatagattgtcataatatcttctgtcataaatcataatatcattggtagttgtcacccttctaactaaaaaaaaaaaaaaaaaaa

SEQ ID NO: 14921 - DNA, 490 bp, Setaria italica
  misc_feature (450)..(490): n is a, c, g, or t
  Peptide Sequence Number=SeqID_80895
gcagcagcagcaacgtcgtcgccgaccgcggcgccggcgagacgagcgggcggttccgtcggctgctctcgtcgttcgggctcggccggagctcgcggagcacggtgctgccgatccacctcgacccgtgacggcggcggcgacgggttcgtgtcctcgcagctcgattaaccccgtttctttgatgattaattgagtcgtgccgtgtgcatgcaatgtacagcaatagcagagactttggttcgaatttttgtgatcagtagctagtgttcgtggatggcattccgtattcccgttccgttgattggttcttgcaatctccgcatgtccccgcttctagtgtcctcgtgttcgtacttgactccgtgcttgctggtgcaccagatgtcgtaggatgacatgtcaacgggtgcaggtgtgcaacattgccattaccatttacgtaaaacnnnnnnnnnnnnnnnnnnnnnnnnnnnnnnnnnnnnnnnnn

SEQ ID NO: 14922 - DNA, 906 bp, Setaria italica
  Peptide Sequence Number=SeqID_80896
ttttttaaagttagtaaaattgtaattctagtactttacttattaagtaatctctgcactgccaagtgaaaggacctttaggattgatggaatttcctcgaaaacaaactttaggaatatatcaaacaataaacagtacaaactatgacaagaaaatgacgtagataacctgagctgcctctccattatttaatttagtaacaactgaaggcccagcacatgtgaaagcatccatatcatttttagggtaccaattcttgaccttcaccttgggcatgatgcttctagtcttgatcagccagtccatgaaaaaatggaacatatggaagatatggaagaaatgtgttataaataggctctgtgagcaacatataacacgaactttaccccgatccatgtcatatgacattaaaagatcctcagaattcgaaacaaagaaaaccacattggcttctggatgaattgtgatcaaagaataatcccgctccatcatgagatctacctctccgaaaagctgggaagtgctgatgttgtacttaaaaatccattgaccagcactgtagtcttcaagaatccagactgatatcttattagtgatatgtttcctagtattcatatagcacaagcgcccttgtgattgaccaagaagcgatgggaccatggcaaaatttttcaaaacccatactttccagcaaaggaatgatactccatgtcttcccttccgtgtccactgccagtattgtggattcgtgggagagcaaatgcagcattccattcataaagacacctcctgattcgaccggcacaacctcatcgccccaaccattttccttgtgactccatgcaccagtttccgacgagtaaatatccaggccagtgatatatccgtattgatcttcctctagg

SEQ ID NO: 14923 - DNA, 745 bp, Setaria italica
  Peptide Sequence Number=SeqID_80897
agtagttctctaagaacaaaatgtggttactgatatggagtggctagcgcacagtatatcagtaaccactgcagtagttctctaagaacaaaatgtggttactgatatactgtgcgctagccactccataatttaaatttctggcacaggaccaacttctcttgttgcatggagtgcaacaaagatgaagctgcgagagcaaaagctctggcagaaagaaaaatgctggaaaaggattttgttgccgcaaaaaggtttattagcaaggcgcagaaactttgcaaagaagttgatgacattgacatttcaaaaatgttaagtgtctgtgatgttcactgtgctgctgcagcaaaggtaaatgctgagattgactggtatggaatactgcaagtacctgtagatgctgatgatgccctgataaagaaacaatatcgtaaacttgcccttttgctacatcctgacaagaacaagtttggaggtgcagaggcagctttcaaattagttggagaagcaaacataactctaacagacaagtcaaagcgtatggtgtatgacatgaaaagaagcaccttcagaggcggtccagcaagaccccctcatataagaactgcagctgctagacctagttctactcctgtgaatctctataatatgcatcagcagcagcagcagcaggcctcaaatcctgcagggacacaaacaacattttggactctctgtccatcttgtgcatgagatatcagtt

SEQ ID NO: 14924 - DNA, 1011 bp, Setaria italica
  Peptide Sequence Number=SeqID_80898
acgccaacttcgtgttcgggggtggcggggccggggcgccggagctgaggaggaccttctcgtccggatccggtgaggcctcgttgactgagctccggtctgcagttgacaagctcgtattggatggtggttccggcaggcgaagcgacgttgatgctcccggaggagatgatccggttccagtgatgaacgccagtgatccctctgggatccatggaagcaattccagtttgcatgagggtttgtttccggactctcttcacgatcagaccgagaaacttgatgaagggagaggagccccatctcaatctatacaatgtgagaatgcggagacaagatcattagcttcgcaaacctccaccaaccataatgctcctatggaacttgctaggagtggggacggcttgcccatccgaaattctgtggatgaaggtagtttgccaaaggatggaagtaacatttctgcacatggtggtaatgttcaacagaatgtctttgtttttggtggacatgctgggtaccgggatttcactgctaatgcaactcaaactagtatcagtaaggaagattcaagtgataaagacggtgcaatatataactctgaacaacttaatgcttcagttgctaaagatagaacttgcacaaagttcattttgcaggatgcaaaggatgcatttggttctactaataagaatcctctacactcagaaccttgtgaaatttctcctacagtaaagtttggttctagctttggatctgaagatggcagtgcgaaggtttcttttgtaaaggtgccttacgatatcaaagcagtagaagcctcagaacttactgaatgcaggccattcgatgagaaatctttcactgttcaagaccacaatgtagcatctaggaacaaaggagttaagggtatgatcacaaatagaagaactgtaatgccaaagaaattctcctcagctcaccaggtttcttccttacgaaatacaagtaatactaagaaagaaaatagaa

SEQ ID NO: 14925 - DNA, 671 bp, Setaria italica
  Peptide Sequence Number=SeqID_80899
tggccgaccatctgtagagctctgtcaattcggtgatggttgagttctcgtgctccttcgttgctgcgatcagtggccgaatgtccacctcggcctcccccatccggtcatcggagctgaatgtgtccttgtcaaatacttgcagtttaagaggtggaattgggtcagggatcgaaagcattagtctttcgttccagataggattcagtgtgttctttatcacttttgttttcatggactggtgccctagaataatcatcacatatggatcactttgacatcacatcacgaacagctaaatctgtgcctttttacgatattgaccttaactaatccaacaaattctatcattcccacatccgacattttctttagtcctttgttatctgaatccttttttctccagctattcctgaaagcatggccaaaaccatgtctgttgctattgtgctgctggtttttatctggcacattcttcttatgaagtggtaaaggacatgaaaattgtggatcacatacaaactgttgaaactggtatttttcctaatgaaatcgttacgctcctcagttgaacactcttgttttatcttcttattttcaggtaaaaaggcctcatatcttgcattaacaacagaatttcctcctgattcagctaaacaattgacttcttc

SEQ ID NO: 14926 - DNA, 440 bp, Setaria italica
  Peptide Sequence Number=SeqID_80900
gaattatcatggacattttaacaagtgatttaggcatttagcttaggaagggaggaaaactaagcgcaaaagtggtgggaacagtactgagtgattaccatccgcgggttgtggaagccaacttggccgacatccatggatggggacttcttgagattagaccagggcgtgtagaccacctcaacgttgttcatcttgttcccctgaatggaatgagcctttacgagctgcgcgcagtcctccaacaggccctcgctgatggtatctatcgtctcgcctttcttgagcctcaaatagacgtgcgccgaggataccttgtccacatggaacctgcaggaggccacacggcatcaacacatacattacacacctcgttaaccccatcatatgctatcctgtttggttatgcgaggaagatgaataactagtaattcttttca

SEQ ID NO: 14927 - DNA, 844 bp, Setaria italica
  Peptide Sequence Number=SeqID_80901
tctcctgcatggacctgccggcggaggcgatctggcggttggacgtcatcttctcggcgaccatgaggcccttgtagctccgtatctccgcccacttctccttctccagcctctccaactcctctttccgcttcttctctttcaattgcatcttcctctcggccttctccgccgcatttgatgcctctttctcagctttcaagtctggtcggcgttctacccgggtcttattcaacctgttgatgatctcgttgacacgcttctcgactgtcagcacacggaccatccgcgggttgtggaagccaacttggccgacatccatggatggggacttcttgagattagaccagggcgtgtagaccacctcaacgttgttcatcttgttcccctgaatggaatgagcctttacgagctgcgcgcagtcctccaacaggccctcgctgatggtatctatcgtctcgcctttcttgagcctcaaatagacgtgcgccgaggataccttgtccacatggaaccagacgtcctcggggaggccgtacttgatgagctcctcgttctcgttcttgtcggcgcccatgtagatggtgtagtcgccggcgtccggccgcgccttgaagtagagcaccatcgctccgatcctaaactctcctcctccttcaggcctcttcttcagacctcttctttctctcttctacctacctcccgtctctgagctcaacggctactactatgtaaatcttcaggtgtcgcgctgtcggcggcaaagcagctcaagcaggaggaaactacaggaagggaaggagatgcaagtatgcgacagacaagcaaggggggcggaaggcca

SEQ ID NO: 14928 - DNA, 619 bp, Setaria italica
  Peptide Sequence Number=SeqID_80902
acggtggcacgccggcggttctcgccaacgcgctctacttcaaggtgcctggaacgcaagttcgacgcttcgctcacgctggacggcgccttctacctgcccaccggcggccacgtccgcgttccgttcatgtcgagcaccagcaagcagcacatcgccagccgccccggctacaagggtcctgcgggctcccctacgcgcgtggccgcgaccaccgggcgttctccatgtacgtctacctccccgacgcgcacgacggcctgccgggcctgctgcagaagctgagctccgacccggcggcgtcgctcgagagctccgcgtctctgatggccgaggtccccgtgcgcgcgctcagggtgcccaggttcaccgtgtcgtacaagactagggccgcggcgatgctgcgggacctcgggctggccctaccgtttgaccccgtccgcgccgacttcggcgacatggtggagtcggcgccggagccgctcgtcgtgtcggaagtctaccacgagtgcttcgtcgaggtgaacgaggagggcaccgaggccgccgcggcgaccgccgccgttgtggcctttggttgcgcgcgcctgcctctgccggaggacttcgtcgccgacca

SEQ ID NO: 14929 - DNA, 443 bp, Setaria italica
  Peptide Sequence Number=SeqID_80903
gcttatcatcttattttcttggaattgttcagccaagcaaatgacccgtcttcaagctcatcaagcattcacgccagatgatatccgaacaacacgcgtacatgtaccccacctcccatccccccatgtatctgtgtatgtatatacttgcattggctccttgccaatttctagtgcgcagtgcacacacgccacacctcgattcagctcgctcacatctcgtcgccgtagctcccggctcccaggtgcccgtggccgtgcccgtgatcgccggcgccgccggctgcgttccgcagggtgtgccacacgtaggcggtgatcccgaggagcaccaccaccgcgaccgccacgttcaccagcagcccgcggctcgcggaggccggcctgggctggcgcgccatcgccatctctccactcgccacgccaatttcccctactccgac

SEQ ID NO: 14930 - DNA, 2289 bp, Setaria italica
  misc_feature (1)..(22): n is a, c, g, or t
  Peptide Sequence Number=SeqID_80904
nnnnnnnnnnnnnnnnnnnnnnacctagtatgatagcacggtcggtctctcagcggccgagcaaccatcaagagtaaacaatccaataaataaaaatcaccacattttgtgtaacagggggcacaaattaaaaaaaaacaaggaactttacagacagaccctgaactgaataatgcccattatctgcgaagacaagcagccacctttaatcctggccttacttatccaaaggccacggacagacagacagagagacccgttcgtccatggcatacggcagcttgcttcacatctgctgtttgctacagttaaaactccggcacttgtcacaacaaaccatctatgccatgctcttctcacaagctcagcaagaacttgaaaatatcactcagcgatattatgccttccacacgcttgctcccagcttccacaatgaacacccgccgcaccccaggattagacagtcgctccatcactttcagcaaaggatcagaccggaggcacatctggcacctctgcccgttgaaataaccaaaaggtgtattggcatcttgtccaagttgcaaagcctgctgaatggccatctcctccaggcgaacatgtgtgtagaccttgtcttttgctagagctgtgatgtcacttctggaataagtgtcaaccagcgaatcattatcatccacaattggtattgagctgactccagcttgaatcaacatgttaagggcagagctaagtgatgcagtacgccgcaacatagccaatggacgactgtttggatcaccaatttttggaacccaggaacccagtggaatcgtgcacaccggttggtttagaataggcaaattgccagttgagtttttgaaatatctacagatacatttcaaaattccggaaagggatgcaagatgcaacagctgtgggaatgacccatctgacgatgatgaataaataattggcactgtagaaatgccattttgcaatatcttcagagcaatgtccctcaaggactcataaggggtggcatgcactagaggctgatgcggtcgcccctcgtatcttccgtaagtttgccgcttagcctctttccatgcagatatagtgtgtgtttcaagctgttcctctgtcaagttcgagccatgagtttctagctctttcaatatgagtatgaaatccaatgggctcagaaggccaacaaactgacttctgaacgaatcccacagaggagctacaggaattccctgttcatgcaggatatggaaagattgtttcacaggtaaattaatgtccagagcaataaccttgcccgaatctggaagcaaatcatagcctgtatgcaaactcagatattcaataacacggcacctagagatttgtatagcagcctctgaaactctaagaggaccttcttgattattaccatccgacaccgtaaccgtacgttgaaaagtttcattatccacatccatgttcatcctggttccaggtgtgcttgggctcaatactgagtttatttgattaatttcccttgtcaagtatagagtgttaactatgccatactctcctgatacagtaggttggcgctcgtcgtgccgccactccccgtccacaaagaacttgtactggtacattcccggagacaggctgcaagtagcctgaaatacggaggggcagccttcaacaggagacatttgcaaatgctctgaccacctggtaaaggagcctgatacgaagaccctcttgccaccgtagggccaaacaaagcgggcggggacggtggctccggcggtgctgacgccgacgcccccggcgtcgtgtgcggaatcagcgccgtgcgagaacatggcgggcgggcgggcgggggagagacagagcagcgggaggggaggagatcgaatccgctatccgctagctcagaaggaggaaaccctaagtcgcgagcgcgcgcgcagacacagagagatggagaggaacaaggcggaggagaggggcaccagccgggacgggatcctccgcgtggtgcgagagagggctccccgcgcgaggagagatcacccgcgccggcccgagcagcccccgccccaagccatctcctcctacccaagcgagacttagacgaatcggggcgcggggaatcgaggcgagatcgaggcggggggtgggtcgcgagggcggaatggggcggcgcgaatggcgagtggaaggcggcggcgaggcgggcggcggggatccggagatgcgaatgcggcgtggcgtggcgggagagggaagaaggcggaggaggagatggag

SEQ ID NO: 14931 - DNA, 759 bp, Setaria italica
  Peptide Sequence Number=SeqID_80905
atgggaagggtggagtgcttgttagaggtcttgaggaagaaatagtcacgaatgcgaatgaaatattctctttgttggaaagaggatctgcaaaacgtcgcacagcagagacacttttgaataaacaatctagtcggtcgcactcccttttctcaatcactattcatataaaagagtcaacccctgaaggagaagaactgataaagtgcgggaagttaaatctagttgacttggctggttctgagaacatctctcgttctggagccagagagggccgtgcaagggaggctggtgaaattaataaaagcttgcttactttaggccgtgtgatcacggcgttggtagagcacctaggacatgttccttacagggacagtaaactcacaaggttgctacgcgattcattaggaggaagaacaaagacttgcattattgcaactgtttcaccctctgtgcattgccttgaagaaactttgagtacattagactatgcacaccgggcgaagagtatcaagaacaggcctgaggtcaatcagaaaatgatgaaatcaacattaatcaaagatctttatggcgaaattgaccgacttaaagcagaggtatatgctgctagagaaaaagtcggagtgtacattcccaaagatagatatcaacaggaggaaaatgagcgaaaggcaatggctgatcagattgaacaaatgaatgcttctttggaagcaaatcagaagctaattagcgatctgcaacagaagtatgatt

SEQ ID NO: 14932 - DNA, 268 bp, Setaria italica
  Peptide Sequence Number=SeqID_80906
ctctccgccgtggtcgatcgccgccccgccgccgtcttccatcgccgccccgccgtcgtcctcagtcgccatcgcctccaaggtgcggtctttttcctcggtcgcctttaaaaagaaaaatgctcgactgctagcatgtgacggccggaagatccacagcgcatatcagcaggggagccccattctccgatgtccccgcttgcgctaggccgctaccgcagcattgtgctccccatcgatcgtcactgccctggatcgtggggattcg

SEQ ID NO: 14933 - DNA, 290 bp, Setaria italica
  Peptide Sequence Number=SeqID_80907
cttttagggttttacccttaattcattacttgattccaaacggttaaatcttccctcatatttatgggaacgaccttacttggctcccaaatcatcctaatgaattgacttacaagcaaacctatctctagactcttcctattccataacctgggaacagtaccacagcccccctctttgggacgactctgggcccttgtggcccatctgacctagctaggccctctatacccacaacatctccccccgtttcgacttgcaacgcatcctcacggtgtgttctccatgtg

SEQ ID NO: 14934 - DNA, 346 bp, Setaria italica
  Peptide Sequence Number=SeqID_80908
ccctgtgcagtctcgggtcgcatataccccacgctaagaccagtggggccaatagatgtttggaacataagattgaatgggtacggatcagaaagcggattctttgtatcaggggcaacaatgccatattctttaatctttgcaccaagttcctctgctgagaggtcatccaagatggcaagaatacgcttaaattcgtcagccttctcttgaggcaaggcaagatctttctcaagcttctccttgcaaaaatctttcaacaagtgatcagcacggtagcatgtgcctgtcttctcatctttaaccatgaggtcagtaaacttctcaacatggcctgatgccttca

SEQ ID NO: 14935 - DNA, 513 bp, Setaria italica
  Peptide Sequence Number=SeqID_80909
atagttcacacttttctcaataaaaggataagatatatgcaaagaatatcttgatgttgacctcagtggctatatgcctactgatatggactggaataaattgcacttatgttctagtcaaataactcctactttttctggcacactcttcatgatcaattccatattgcacttaccattggcgcgaatttcatagtctttatttcggcactcgcgtagatcctacttttcttattttaaggagataaggaaagcaggaccattatgtcagcttctatatataggcttacggcaagttagttgcttttttacaatctgtattactgaccttgtagatccttttgttaaaaaaagcacgatagatcctattattctcattatatctggataatggaagaggacaagtatgttgctgctttgcactaggctaacgaaaataattattttgagaaatgataaaggtaattttattcattccgtagttcgtcttgaccattactacttaccttgctt

SEQ ID NO: 14936 - DNA, 354 bp, Setaria italica
  Peptide Sequence Number=SeqID_80910
gttcaaccggaggagccttgacgccatcgttatgacaagtggcgccgtcgcgtactactacagattgatgcaagcttgccaggtcagcgccctctcgccaagaacgcatcggcaattcaggctgaatacttccgccagcttctgaagcccgtgacataaattcggccatcagtccccatacctccctccttcccaaaaacctcaaacccaaaacaaactaactgatacaattttgaatctaaccacaagaacagccagctcccaagtccagttaacagaatttcctcgaattcttgttcaatttcgttccagtcagagcctaaaattttcctagacttcccacacaaacacgac

SEQ ID NO: 14937 - DNA, 406 bp, Setaria italica
  misc_feature (37)..(37): n is a, c, g, or t
  Peptide Sequence Number=SeqID_80911
aggatgccgtaggtgcccggccgctgccgccggtggngtttttccgcgtcatcctgcttggagctccggcgataccataccaccggccgctgcagaggacatgtgctttggtgcaagcttgccaggccgaatacttccgccagcttctgaagcccgtgacataaattcggccatcagtccccacaccaccctccttccaaagaacctcaaacccaaaacaaactaactgaaacaattttgaatctaaccacaagaacagccagctcccaagtccagttaacagaatttcctcgaattcttgttcaatttcgttccagtcagagcctaaaattttcctagacttcccacacaaacacgaccagaaatcaagcggcccgatgcagggagaccccgggtacgggtacgg

SEQ ID NO: 14938 - DNA, 1295 bp, Setaria italica
  Peptide Sequence Number=SeqID_80912
ttggtcagtggcaatggttggccaatgttgcaagcattgatatcatttatgatattttgcatatgatgggacgggatgatattcctgttgggcgtggtaataccactgcattaggcactccaagttttggttgcgactatgtcagtattattccacaaggcagtggaggactaattgactcggacactctctatggactagctcgatcattgccaagaagccctagaaggtatactgctgaaaattcagtaaaacacggtgctcctagaaacactgaccatccagaacttcgacagccattggcttttgaagtttggcattctattaaagagcagcttgatccaagtgagaagatcactattctcaccaatggacctcttacaaatttggccaatatcgtgctgtctgacagggatgcaagttctttaatagagaaggtttatgttgttggaggccatatcagagatgaaaatgattccaagggaaatgtgtttactgttccatcaaacagatatgcagagtttaatatgtttcttgatccgctggctgcgaaaacaatcctggagtcctctctggatatcgcactgattcctcttagttctcaaagaagagctgcttcctttccatctatccttgaagctttaatgcatgctgatcacactcctgaatcaagttttgtgcaccacttgttgctcttgctgcatgatcttcaactgaagcataggctttaccgccacatggatatgtttctgggagaagttcttggtgctgtttacttggtggaaggattaaatataaaaccatctttgcaactgaagccaataagcattgttaccaacagcacagcaagcacggatgggcagattgttctcgacaaggggactgcaggttcagtggaagtattagctgatttcagcactgaacaatattacagtcggctcgccaattctttaggcaacaaagagcaatctgctgttattggtagttttgaagaacagattgctgtctggagcaggccacctcagaaattggggacctgaacatacagcatagcttttgtgcagcagtgctggtgaagcacgaaccattaagtttgattccagagtacatacctagcttgcattctttctttctttctttcttcttcttgtcgtatcacgatacctgagcacactagtataacagatataatagatttgtcctgtttatttgggcacctgtaaacatatttgtttctctttagatgtaacggccatcattgttcaacaattattattattcttattttattctta

SEQ ID NO: 14939 - DNA, 302 bp, Setaria italica
  Peptide Sequence Number=SeqID_80913
attaaagtttttacttagttgtttttcttcatttattctgatcatggccaggtactgataacttaagaaaccaaccggcggaattatttgatcatgtctggcatgcaagtacctgcaggagccagtgattcgtcggtagttctggcgccgccccagcagcagcaggagcaagaagtcaccgtcacccagttttctcctgaagcagtcgatggaatcataactagtgaagttgttctggcgccgcctagatcagcagcagaagcagggcaagaggggtcaccgtcacccagttttctcctgaa

SEQ ID NO: 14940 - DNA, 961 bp, Setaria italica
  Peptide Sequence Number=SeqID_80914
atgagcactgctcagacagatgggcagctttcacttgcctgcagcgcaggcacaccagatcctgcaggtggtacagcctctcccgctgccggaccacctgtagcagcgcgttctccatctgctcacggtgatatggctgcccgcactggggcaccgcgcatctccactcctgaccttgaagcgttgagtcacggcagagatcaaggtcccgacaatcattgcaatagctgcaaatcacatttggcagagtgaatgaggcgcatggttcttggaattgtgcttctggagcaaactcctttacgcgaaccaactttaacaagttcttcctcattctcagaatatcatgctgaacattttgatcaagagcaagaacagcacaaatatgcttaatgaactccaatgcagcatcgcctttatgtgtgtgaggatcagattctctacttgcaggttcatctgattcagacttgcttttccctttgaaatggtgaagtatatcacttacagttcttaaaagcttgtcggcaaagtaagtgctaatcttgtcacggaggtgtcctatgacctgaccctcaaggttctcagcagccatgaccgttatagatggagtgcatgaggtatcatcccttatagttgcttgagtagctacttgttctttcataaatttccatggaatatataggaattccgatacaattaagacaaagtgatcttgtgtatcttttggcaagtattctgctatgttccagctcgagacaatgtcaatatcattatcatcatctgaggagtccacattttgtgtttttgcttgaatgccgccatagttatactgatccatgaacaataaggaatgccaaaagtgcaatggttctagttctatccactcgaaaagatccctaaaaaaatagactcttagtttcactttagagaatcacccagtcaaatttgcaacaagaggtcaaac

SEQ ID NO: 14941 - DNA, 1162 bp, Setaria italica
  Peptide Sequence Number=SeqID_80915
gaagtcggccaccttggcgatgaagccgtcgccgaggaggatgttggtggacttgacgtcgcggtggatgatgttctcggagtagcccgtgtgcaggtagtgcagcccccgcgccgcgccgatgcagacctccagccgctgcttccacgacagcggcggcgcgtcgccggagccgggaccgtacaggtggctccgcagcgtgccctgctccatgtactcgtacaccaggatcatctccgcctgctcgttgcagtagccgatcagggacaccaggtgccggtgccggatgcgggacagcaccacgatctccgtctggaactcggggagaccctgcttggaagcccgcgtcgcgcgcttcaccgccacgcgggtgccgtcccggagcacgccccggtacacgttgccgaacccgcccacgccgatcaggttgcgctcgtggaagttgtccgtggccgccttgagctcctccagcgggatgtgcagctgcgtgcccatcctctgcatcgcgccggtcgtgccctcgccgccggaccggctcgacggctccacgggccacccggagctgtcctgtgtgtagggcgaccaaggcagggtgctgccatccttctccacctccggcgcgggccgcggcacatggcggcgtctcctcctccgcagcaggacgatcaggcagagcgcggcgcacgcgaggacggaggcgccgagcacggccgagagcgtgacgatcaagacggtcctcttggtggtgctcgagctcaaattatccgaaggtcgcagctgcatgatctccagcccgttcaggaagccgccttcggtggagctgctcttgaccgacttgccgatgctgacggtgaggttcccggtgttcggcgccgtggccgcgtagtccaggtaaaaggcctgctggttcgcctgcgtcgcgattgtcttcgtcggcatcaggtcttgggtaccaatgtctgggccgatgaagacgttgaacatgatgccttcgccgacgacgctgttcaacggctcgtagtcgcagaagtggagacggacgaggtagttggaccttgcttccgccgggaaggtccacgtgatgttgaaaagcggcggttgcagcgatgccctgcccgccgacgggttcgtcgcgcgctgcgacttgtagacaatgtccggc

SEQ ID NO: 14942 - DNA, 837 bp, Setaria italica
  Peptide Sequence Number=SeqID_80916
ctaagctcaaccatgccttctttccttgcctctgcttcaacctgatctttttgttcctcataagcaaccactgaatcatcttcaagtataacatcagtcttcagttcacatgataccattggtgttttgtctttcacagaaactgtaaatgaggtaggacttgaactatctggcttagagattcttgaatatggagttgccaagaaagattccagtgtcccaaaccacttaacgagaccatttgccatgactacaatcatatctgcagcagaaatggcctgaagattgtgcgtgcttagtaatcttgttttctgcatcaactgcggccccataatggccttttccaggatccatgaagcaacttgggagtcaaccgcgctaaggatgtcatcaaacaagtatacatcagaattctgatacaaagcccttgccaatgctagacgagctctctgtccaccagataagttggtacctttctctccaatatatgacatatctcctctggccattgctgatatgtcaacatccagtgcacatgcctgtattacttcttcgtatcttcttggatcaaattctttcccaagcaaaatattatctcgtacagagccagataggatccatggtacctgtggaacataagcaattgaaccacatgagctaacggaaccactgatgacatgagtctctccaatgacggaattcagcaaagatgatttaccagaaccaacctcgcctacaattgcaataaatagccctttctgtagctgcaatgatatatttctgagaattatgtgcggatcagcaacagagctgctagaccaacaacagcatacattc

SEQ ID NO: 14943 - DNA, 434 bp, Setaria italica
  Peptide Sequence Number=SeqID_80917
taaacgaaagaaaagtaagtaacaaattaacctaaagaaatagaagtagactactactaagttaccttagacagtgacaacgcactattgttcatctcatctagtgactttgttgcctcatccaggtctgcttcaagagcttttcgtgcttcagaatctacctgcaattgttttgccaacgcttcaagctccctatttaaggttgacacaattttcctttcctcaacaagctcatgtgtcgtagactccaaattcttgtaacaacaataccaagacaaattacctttttacaaagttagtacaacgaagacttacaaacaagacaagaatagaccaagactacaattaagaaggtaggtttacaaagtaacttaacttaagtaaccctttttaagaaaaccaaatttaacctttaaactaagaaaggaaccaaa

SEQ ID NO: 14944 - DNA, 1505 bp, Setaria italica
  Peptide Sequence Number=SeqID_80918
tttttatgtaatagtattgtgattcaaatcaatgacaacaaacagttcgtatccaatgtggacaaaagaaaattgaaatcaaaaatagtatagaaatgagcaataatatggtgtatgaagcactcagcataactacagatactggaattctcctccatgatggctcttcaggaactcatctatacacatacaggccctcggtttcccaaaagcttgaacaaaatacatcaagtaactgaaatactgcaaaaggcaaatgtaaaaacactggaataactattgatgctattttgcaaaggatgatgatctaaaaaatgatgtaataacagactactaaataggacggcatggaaaaaagaagggccttgcttgggcttccgacacacactcatgtcgatgcaccagcaccaccttttcttccccttacagtccttttcacagactgcggagttccagcaaccactccactggtcttctgattatgatcgttcacggcttgctccttcagagtctcattagcctctggtggtgctcttggtctggcagttgttcttggcttctgagacctgtttggactaatctgcctccttaggcgcagtatttcaccctttgctaatgccaattcctcttcaagatgtctagacctcaattcgaagctatccttctctgcctgaagtcttgtgatcagattctgagcatcctcagtgttttcctgagcttcgcttgtgattttcttttgttcagctagagccttggatagcatttctttctcagcttcgagagtgtcattcctagaatgagtgctctctagttccttagacagtgacaacgcactattgttcatctcatctagtgactttgttgcctcatccaggtctgcttcaagagcttttcgtgcttcagaatctacctgcaattgttttgccaacgcttcaagctccctatttaaggttgacacaattttcctttcctcaacaagctcatgtgtcgtagactccaaattcttgtacacatccagcaattcctttttcaagttgtcacgagcttcaacagcagatgccagctcattagaggtggtttcaagtacttcttgtcccttttgaaccatttcctttactgaggccagttcctctgagagagctttggatactgattctgcctcgcctagtttaatagtcatacctgcttgcatttcattgaactcatcttggagttcagaaatctgcgacaccaggtcctgattcaatttatttgccgcctcaagttcattggaaagtttggaaacctcatttctggaatcctttagagcctcttcagatgattgaattgattcttttaaagtttccatggccacaagctcgttctctagcatcactttggtggcatctaactccttgttcaactcaagaattgtttcatgatctttgctagagtcagttaacgcaacagacagtttttcttcaagctgttttatctgatcatctctctctgatagaagcttgggg

SEQ ID NO: 14945 - DNA, 1389 bp, Setaria italica
  Peptide Sequence Number=SeqID_80919
tagaaccgaacctacaaagttacaattaggaaaagtttaggaaacctaaacaaaatttaactaaggaaatacctttaagaagacctactttcttcagatgattgaattgattcttttaaagtttccatggccacaagctcgttctctagcatcactttggtggcatctaactccttgttcaactcaagaattgtttcatgatctttgctagagtcagttaacgcaacagacagtttttcttcaagctgttttatctgatcatctctctctgatagaagcttggaatcatgacttgctcttgtctctgaagcggccttcaggtctgcatactcctgtattaactcgcttaatttttttgtcagcttcttccttttcagagttcaatgtttcaagtttagcattgagtgaatcaatcaaagatatcttagaagcaagagcattcttagttccatcgagttcttcctcaagttgttgtattttagaatttgcaagctcaaggctacttttagtttgattagtgaaagcagacagcttttggtagtctacttccttcgaggaaagtgatgcactgagttccctgatgtgtttctccttatcatggatgtcttggctgagcaaacttattttttcctgcaaagcattaatgtctcccaccttttcttccaatttagtttcaagcgcatctttatcatccccaacttgagtgatactactctctaatctctgtatttcatccctaagttcctcggctagtttcttctcctttctgaattcttcactcagcgatgtcaaagccttttttgctgaagccaattgatctgaaagagaagcttcctgctcctggaacttcaaagattgcttcttttgtgctgcttgctgctccagtaaccttttctcatagttttccttcatcaaagaaagtgctgcctcattttcagccaatttgctctccgtagaggagatgatcgattgcagggcctttttttcttgtagagaagtgccatacagcccaccaagaacaccagaggcagcaactgcaactgtattcaaaaagccaagcagcggattccctggaggttgttcttcaacagattgtaaggatgattgaggctgacgagcttcagtggtagtggtttcaacctgagttccttcaagttgagggttgtcaggctttagaataccctttgtcacttcagattgagggtcaccaagctttgagacatcctttgtctcagtcgtggtcgcggtcgcggtcgcggccgcggcttcacggaggcggaggagtggtacggcggaggcgccgaggagcaccacccgccgcgccagcacgtacgcgtccgccggccgaaagtaaagaaacgggaaaccgaaaccaaaataaacgggaaa

SEQ ID NO: 14946 - DNA, 468 bp, Setaria italica
  Peptide Sequence Number=SeqID_80920
gggtcggggttgttcgcggcgggacaccgggagcgtgtggtggtcgaagtagtcgcgccagtcgagcacggagtcgtcgttggcgagcatccggctgccgtacccttcggcggcggcgcccctggccgggtcgcacgcgaaccggagcttgtcttccatgggcgcgcggaagaaggcgagcccggccccgcgcaccgcgtcgaggagctttccaggaacgccgtgccctaccacgtggaaggcgccccagtccgcgcacgcggcgcggacggcgtcgaccgcggtgggggacgagaggtcgacgaccggcacgaagggcgtggcgggggcgggggaggacggtggggccggccggtgctcgggcggctggatgtactgcgatgggaggcgggacacgccggtctcggcgagggcctggacgcgcgccgccgcggtggtttccatcggagcagcggcggtggcacacag

SEQ ID NO: 14947 - DNA, 611 bp, Setaria italica
  Peptide Sequence Number=SeqID_80921
aaataatacctgttttgtagatgtttcagaaatccactatgattgacaactgatgttgttgcctgtgagaataggagttgggtagggcaagtactatagcagcttaaactaaggttcagataggaaacccaatcattgtgttgcttttgtcagggactgctttgtggcatttacagttgtctacttaaacacaatgcattatgctaattgcaacaaatataggttgacttcctgtagtgcgcaaaggccggatatatcacttgcaagtagttggacagtgaaaggtaattgctagttaccctgtgttctttccttcagcaggaacacctggaataggtgttggagtgggaaaactgaggcctggtgcggcaaatcctgatgacagaagaagcgaaagtacgaagataagaatggaaactttgctcggtaaatcctgatgatagaaagtgacgaagtgcaaggttcataccaccaccgttggcaagttccagacctgtgcttttctttccctgttttccgagtctatatttctatgcacatcagtatcaatgtcacaatctgttagtacaatggagcacaagtgtctagcaatgctaaagcggtgaagaaat

SEQ ID NO: 14948 - DNA, 654 bp, Setaria italica
  Peptide Sequence Number=SeqID_80922
ggaaggaggagtctgcgaagcgggaagaggtgctgtcggagattggtcagatagtcaaggaatgggtgaagcagttgaccagtaagaagggatatgctgagcaattggttgaacgagcaaatgcagtccttttcacttttgggtcttacagattgggggttcatggacctggagctgatattgataccctttgtgttggaccttcatatgtgaaccgagaggaggatttctttgtcacactgcatggcatattagcagaaaggaagaagtgactgagttgcaacctgtacctgatgctcatgtacctgttttgaaatttaagtttcgtgggatatcaattgaccttctctatgctagcctctctccttcagaaataccagcagattttgatatttctcaaggatctgttctttgtgatgttgatgaagcaactgttcgaagccttaatggatgcagagtggcagatcagattcttcgacttgttccaaatgctgagaacttccggacaacactcagatgcttgaagtactgggcaaagagaaggggtgtttattctaatattactggtttccttgggggtgtcaactgggctcttctggttgctcgtgtctgccaactctatcctaatgctgtgccaagtatgctggtttctag

SEQ ID NO: 14949 - DNA, 417 bp, Setaria italica
  Peptide Sequence Number=SeqID_80923
gtcggggcgccattcgggctgtagcggcgcggggacgggggagccggtggcgggcaatccggcgatgacggcgacgtcgtggagggtgagggtggcctcgccccaggggaaggcgaaggtggatgtggtgggggaccagaaggaggcgaggtggaggacgtgggaggcgtcgggcttgatcctgtaggtggaggcgaggacggcgtcgtggatgccgaggcggcgccagagcggggcgtggagcgggcggagcttggcgacccagacctcccaatggcgcggggcgccgagccagccgcggaagtagaggcggtgctcggcggaggcgacggcttggggtgggggaggggcgcggaaggggggaggcggccctcgtcgggaccgtccatgtcgacggggagctggtggacgaggagg

SEQ ID NO: 14950 - DNA, 1310 bp, Setaria italica
  Peptide Sequence Number=SeqID_80924
tttttcttttttcctttagttaagacaaccaagttagtagattcaaagaaatatcctaaaacggccggtgtcagattgtcgcaaaactgagctccgatgaggtcatgcatctgaacgcactttactcatcctcttcttcgatcagtatcttcttgcaagcctcgtagcacataaacgaaatgccagcagcaggcaccaacttcatgcaactcggccccaaccctctgtaaaggccgccaaccccttcatcctcgagaatgctcagcagagcatgaagcatattcttataaaccttcctgccaccaacggctccaacttgcatgtgcttgcgtgcaacctcgagagggaatgtagcagagcttgagatagctcctgctgcggagccgataagcagggttgggacgttgccgatctcgttcgtcttgaacaccttcttgtacaccttcttcagggtatcataggcgaagtagttggtagcagcatatggcacaacaccaattaggcttggagtcaagcctctgtacagctcggtaggcccttcttcacggacaattttgacaaacgcatcaaggaagttgtcatacacacctctctgtatagttaatcttgtcttaatcaactccagagggtatgtacacagtgttgagctgacaccagcaaatgccccagccaccagtgaaggaggaattggtatcttccgttcctccccaggttttggggtcaagaatttattagctgtatcaaaggcaaaaagctcgattgctttactcggggccacccggataacattcacaaagttaccacggaacaacccagtccatccttcatgtttcatgatagactggaacacctccgtcgtcgaattcccattgctcccaaccatcaaatgcgtcctaatcgtctccaaaggcgcgaccgcagtcctcgacaccgcccccgcgatcgccccactaatcagcctcttgaggtggtgattcccaaccttaatcttgagcttcacgactttcttcttccccttatccctcaaccccacaccttcccccggcagaggcgtctcaacaacctccggcgagacgtacttcatgtacgggtcccttggagtctccggcgacggtgcggtagaggaagccccggggaatccaacccccacctgctggcccacgctggcgaagaggccggccggcgggtggaaggactggtggagggtccatgagaggttgaacccgccatcgccatccacaccggcagcggcaggtgctgcaggcgggagggctaggaagcagcagccccaatccttggtatccgcgcta

SEQ ID NO: 14951 - DNA, 443 bp, Setaria italica
  Peptide Sequence Number=SeqID_80925
ttggcacacacacaaaaccatattctttgagagtttgcatggtccttcttttgtttctcaagttttatgaaaattgttcaaatggctagtacagttttcaaccccaggagtaggaaatgcttatgtgctaatatacagtctatttagtttcagtaattgtttcttcgcaaaaaaaatccagtaattgttagactgattctttttctttcagtagtgtagtagttagtctgaaactctgaattgagcagttaactgaatagcaagcagaacaagcaatgcgaccccattggagacacgagcgtattagtccaactgaagaacgctgatcgctgaatgattaaatgctttcagctgaaactgaaacttgtaaaaatgtttgaacactgacgttaccttcatagcgaacatcccgaacaacgatgatcccctgagggggtccgatt

SEQ ID NO: 14952 - DNA, 258 bp, Setaria italica
  Peptide Sequence Number=SeqID_80926
caacataggccgggaaattcctgaagctcgccatgctgtaccactatgcttgttgattcccaaaagttctgtagttagtgttgagccttgaggtttgagagttgttagtgttcgaaaagggtgcaagcatgtaacacacaatttttgtatgtggtgcagaaatgccgtgttgtgatcgggtcccttgatcaaactcaatcagacgtagtgatgaaaatgaaggaattcgtttgaagattatgtaaaaagatcaaagga

SEQ ID NO: 14953 - DNA, 1587 bp, Setaria italica
  misc_feature (1)..(42): n is a, c, g, or t
  Peptide Sequence Number=SeqID_80927
nnnnnnnnnnnnnnnnnnnnnnnnnnnnnnnnnnnnnnnnnnaatatgcaaagggtcagtaaggttgtatttgactgtgacaactgacaacagtgtgtatggaattcacatttactcattcccgtacacttgaacaaaacaacagctaacacattagggttattagtaaccgggacacatttagagaactccgaataacagcgccttagtttacaagagggcgggagaactagctagacatctttgcacctaggaaaatacacaagtacatgcttgagcacttgggatcaaagtttgaatgatcaagcatcagtttccaacttcttagaatgcaaattgaagcacatgcacttatcgatgagggcctcagattcgttaccgtattctttgaacctgtactcctccaacttgaatgctgatggaaccttcccttcgctgtagcaccggttacacaggctgaacgagtgttttgtttccttgaatcgtgatccaatgatagggtaccggcagatggagcatgtgtggtggccgtgacgtatgtgatcactctcttcaagcttcaccaaagtgctgaggatcccaaatccccaatctgggtcattgaacatctctaggaactctgtgtatgataccatggtagggtcagactccccgtgcatttcgagcatgtcactagccccatgggtgggtatataaacagcacgaagaagcttaatgtaagtaagcgcatcgctcctcctaatctggccattgctgccttcgctagcagggcgccaaagaagtgcatcaaagacgacacgcttgcgcctttccacagggccagaacagattggagcaatgatggcgaaaaacattccaagatcaacccgaccagagccaggggcatcaaggactgagagaattctttcattgattgccttgatagcaccctgaaaggtatctggcttgagaaaagagaggagcctgcggagaataacctcaagagctgctttccgtattgacttctcagggatgccggtgcctgagtaagaaacagggacatcggtctcattcatctcttttctaagaagctccacatcacaatggcctagctttgccatcctttcgaaggcccttatatctaaggcattggctaagtcctgccgcaaggtagtcttcctgccaaccctcttgaacttggatgcctccacaacaacataagcctgctccccttgcccatcatcctttcctttggacagctttggcttcttcttttgcagtgtcttcagatgagagatggcatcatacacttccaccctttgcgtcatcttaaatgcctccttgagtgccttcttagcctcctcagactccccttgcccaagcaaagccactgccttatttagctgtgccctccaatggtttggccggatgctcagcacacgagtatacatctccgcagcccttacaaaacgacctgcatccatgttcaatccaccaagattgtatagggcatcaacatgcccaggtttgagatcgattgccttctggaactcctgaatagcacggtcatcatccccaaccgcatgcagggctgacccaaggtcacag

SEQ ID NO: 14954 - DNA, 1886 bp, Setaria italica
  Peptide Sequence Number=SeqID_80928
tttcctttattttgtttcctttagtttttttgttatttggttctttcggttattgtatttcttcgacaagaaaaaggagtagacatgggggattctcttagtgatggtaaaatgctcaagcgttcaaaggatgctaatgttaatataaattccatgaatttatccaaaacttccggtggaaacgctgggcctgatgagatcactacttttcctgaacccaatgaaagtaatggtgagctaccaagttcacaaagagataattttgagagatcacctcatggtaagaaaaagctccagagagagctttcagatctcgaattgggtgaacttcgtgagtcttctctggacaatgacaatgggaggacaaggaagcaatttgagagaaatagttcttccaagtcacttgatggtaaattaactgacataaataactcctaccccagtatgaatagcaggaaggttcatttaactgggtttcatgataaggggaaaccatcacctcaagaatatggtattggaggtcatataaaccaggaagcctttcccagaaaggcaacaggatatgattttgatgataataggcctcagcaaagaggtaatgttccagagaatcagcattttccaaggactgacaattcagattctgagaacatatcatataggccaggtgataaaacaagcaaaaaggagtcaaggatggcacaaggtggaatgctagagtatccagatatgaagaagaaaacaacctcaaggcttccacagaatggtagtaataatgccatagtgcctcgaacacagaaatcactttccccatcagataatgaggaaagaagtaggaacaactctctgattgagtccgagactggtaggaagagagacagttcttctgatgacgataacttatttttctccaagtatgataaagatgagccagaactgaaagctccaataaaagatttctcacaatacaaagattatgtgcaggagtacaatgagaagtatgaagcctattcttacttgaacagtcagattgagaaaactaagtctgaattcttaaaggtacaagaggatctcaatgttgctaaagaaagagacaaggaacaatattataacactgtagaaaggctcagagacatgtaccgtgaatcaggagcaaggcataaattgatgaagaaggtctttgtattgcttcatgaggagctgcggattatgaagcaaagaattagagactttacagaggcctattcaaatgagtaactgatcaacactcataacacatggcatttgcaactgcttctcagaggctgtcactcattgtcaagtctgaaaatgtcgggacacgacattaggcttgccattgtagaatatttgcttggcttggacattcagccaaatgcacttacctgtgacaaccttagtttgtccgtgattctcaggatcaccatgctgagttccatagttatcacagcggaagtggaggccaaggcagtttgaagaccaatgaccgctgatgggcgcctccacatgatgctgagaccataagtaaatgatccattacttacagaacggaggtttgatgtctgacccggcgttacaacagcagttttgcagctagtttggcactgtgaccggtcgtttctctttgtagatgttttgtaactttttaaccccctgtgagaaagggcgagatctctcctctcctggcgttgtacatttgctttgtattattgtgatccatgtcaaactgaagtaaatcactaactctgtacatatcagtagaccaatagagaagttttgaaggaagcagagtaaaatatgggaatatgttgttagtacaaatattaattctttaatatcacctgtggatgcagttcaaaatttctagt

SEQ ID NO: 14955 - DNA, 461 bp, Setaria italica
  Peptide Sequence Number=SeqID_80929
ccggcgggggacggcggtccattgcgctccagaagaggcggcgccgaggagtaggtcgccttgcagccgccgaccaggccggacagctcgtcgccgcggtcaccgttccgcgggtgcaagtgcgcgaggcccaggaagtccatcgggtcctgcagcctcgtggcgggcgacggcggcgacacgccgcggtggtcgaacaaggggtgcttgttcgcgtcgctgccgtcgagctgcgcgccgccgagggtgctctggaaggagaggtagctgctgttgccgctgctgccgtgatcttgcatcccgagaagagcggacggcgcggctgtcgtgagctgctgctggtagccgtccccgggcgccacggccgatgagtttgtggaagccccaatggcggcgttggccggcgccggcggggacgtggagggcgaggtgaagggcggcgggtacgcgtggagctgctt

SEQ ID NO: 14956 - DNA, 274 bp, Setaria italica
  Peptide Sequence Number=SeqID_80930
tttcaggtcttgatggctgatcatttctaagtagatgtgtctgttcctgttgttgactctcctggtttgcagtttcattctttactcgatcttgccactgtccatgaccatggtttaacaatgacttgttttcctgaggtagaagtgcggcgccgtgatccgtaggctgggacgaggaggaggaggcggcgggcggggcactgatggtgctgctggtgctggcactggcctccacctcgcggttgagcgccgccgtgaaggcctcgacgtccgg

SEQ ID NO: 14957 - DNA, 380 bp, Setaria italica
  Peptide Sequence Number=SeqID_80931
cacctcataccgtgacgcaccatatcggagggacagccgccggggttcgagcaggtttgagcttacctaagtcaaacaggacgagtgtttgacattgttcatccaaacattactgcttcctctcgttgtcaattatatattggctaaacgctattttaacaggtttcacacaacgtttaagtctgtgcttgtgatagaataaccataattgttttttatttagatagatgtaaatggtttgagttatccgttataatcactttgtgcagcataaataaagggcacttggtattaggtcatggtagcaatctagtttgtctgcaggtctggtaagaaagtatgacgcaatgtggtaacaggggttttagattgaattcatg

SEQ ID NO: 14958 - DNA, 1295 bp, Setaria italica
  misc_feature (1158)..(1158): n is a, c, g, or t
  Peptide Sequence Number=SeqID_80932
gcacgctccgttcggaccaatcccccaatccggactcgcctccgacgccgccgccgtgctcctccggcgacctgctccggagcaccctctgcgttgaatctttcctcctactcctgcgtcgcgctgctggagatccgtcctcctctcggaaggtagaagagcagaggttgtggtgttttttggagtgtcgaaggtggtgattggcgtggaggttcagtttggttggagcttggagtttagagggaagatttggtgatgagcagccgcagcccgccgctgaaggaccgcaggatgcgtactgaacgcacctcataccgtgacgcaccatatcggagggacagccgccggggttcgagcaggtttcataatgatttgtgcaacaactgtaagcgtcctgggcattttgctagagagtgtcctagtgtggctgtctgccatacctgtgggcttcctgggcacattgcagctgagtgttcttccaaaggtacctgctggaactgcaaagaacctggccacatggctaacagctgcccaaatgaagggatatgccgtaactgcggcaagtctggccacattgcaagagattgcactgctccaccagtgccgcccggagaagtgatcctttgcagcaactgctacaaaccaggacatttccgtgaggaatgcaccaatgagaaggcctgcaacaactgtcgacagagtggccatattgctcgcaactgcaccaatgatcctgtttgcaacctgtgcaatgttgctggccatttggcccgtcagtgccccaagtctgatacattgggtgagcggggtgggccacctcccttccgtggagccggagcacccttccgtgggggtggtgctcccttccgcggcggcttcagtgacattatctgtcgggcctgcaaccaggttggccatatgagccgtgactgcatggctggtgccttcatgatctgccacaactgtggtggccgtggccatatggcttatgagtgcccctctgtgagtctcatggaccgcttcccccctcgccgtttctgaaggacgtccaagggctgtccagatgactattactttctgtcctctgcgtcaagaacaattatttttcatttgctttatgtttctgagctataacggattctagctatttcagattcntaacttgctatatttagttgtaattctgggatgtgctacttgactgtgatgctctgctgaggataatgtttgtagatgggagtacttgtgaattctgaattcaattcttctaattgtagtttttaattcttaaaaaa

SEQ ID NO: 14959 - DNA, 217 bp, Setaria italica
  Peptide Sequence Number=SeqID_80933
gcaagaagagatcgaagcacaagtacagcaaagctgatctctctttgatcttcacttggcactgccatggcggcttccaagcgtggttgcctcgtcctgctatgcctcgccgtcgtcgctcccctcctcctcgccggcggcgtccatggccacccgtggggcgcctgttcccgcagttctacgaccactcgtgccccaaggcgaaggagatcgtgaa

SEQ ID NO: 14960 - DNA, 1546 bp, Setaria italica
  Peptide Sequence Number=SeqID_80934
agtagaaggggtgagggaattgcagagatagaagcgtcatcagtaagatactctttgatgggctttcataggtggtacttgctggttagcaacagatcagacacgtaaccactttgtcatgattttgcctgtctgtaggttttcagcatgtgccagaaaatgaaagcccttgctgttcttttccgccgtgggaggactcctccgttgcctcaaagcctcgagcgtgatttaagggcgagaaagcggtcaatggaagattaagattgattaagatcgttggttacactgtatagaactgttacttgtattcatctagctgttgaaaccatagaggccctagaccttgtatactgggtcgtacatagatctccctatctgaaatgaagaggctactctgacagtaaatacagacgatagctcaacaccagatctctctttgaaattgaatgttcttgtaattatgtacattccaaagctccattttacaataaacaaatgcgatccatcaagtcattcttagtctggtgtcatcaaacttgtgaatggtacaaggggttggcaaccctgttgatgacacggccaatccaaagaatccgtagtcataggctcatgcctgctgctttgcctagagttaccggagctgtgaaatgtgactgtgagtgcctcaaaattcagggcgaagtgcgcctctcagtcagcttctccctcctgtacttcttgaaatctgccgccagccctgtatcgaagtcttgcttcatctgctccgccatctgcctcagcaccgtctcgccgacgcctcggatgatgctctccgggaccatggcgagcaccggcgggaggttgaagccgacggtcatctcgacgtggcccctgaggctcttcctcccctcccgctgcgggtacatcaagccccggacggtgagggcgaggtgcgacggcatggcgttgctgtccagaccgttcagcttgtaatcagtcacttccatgaggaggaggctggtggcgtggacggggacgttgggcgggtactccttcccgccggattttctggcgaagcgcatcacgatcaccggcgacgccgagaggaagaggaactggatgggcagaagctggacgctccattcttcatcattgagctttcttctcttgcgctgatccggaaacacagctccaacgatcctgggactgttctgcaggtactcatcgatggaagccccttgtgtttcactcatagggatgtcggtgttgaacctgtaggagaaggtgaacaggtctctgggattgatcttctccctcgacctgccgccatacgaaggcgtcttcagagcgcatgtcgtgaacgaccgcggcgatggacagttctgaaaagggccctttcttgatcttgagcttgatctctgatctcccaccgatctgagtgttgtgctcgctcctgatccagcacccctatacactggatgagctgcaagatggcatgaagggaggtgtagcattgtcatctctagcttgtaatggcaatctttctcgctcttctcctcctaatagc

SEQ ID NO: 14961 - DNA, 403 bp, Setaria italica
  Peptide Sequence Number=SeqID_80935
catttgtgttcatttacatgggctttgatattgccatggaagagcacagctggtcacatgttggcttcatcttcttctcaattatattcatagttgttgcaaggtactgctacgatcttcctttaccactctagttgtattgcataaccatatgtctgtatttgtttctccatagttagtagtgaaagtcattgtgacctatatgatactttatcattgtgcaatgcccatgctgagatttgtatgtgatgctcatgctttatcattgtgcatctatgacactaaagtactctcgaaaaatgatctatactaaatatttgtcccatcatatccaagttaagcctcagtgatgtaataacactctgctgcagtcataccaattttatattcaatatgtggtaag

SEQ ID NO: 14962 - DNA, 1606 bp, Setaria italica
  Peptide Sequence Number=SeqID_80936
tactagaatagtcagtacttgtacatgtgactaacctactgtctcgttgtttggaaaggacagatggcaatttccctttacagtcagaagtcatgcagcagctggcgagaacttttttatgatgattctccagtttcttgagacctttgttggttcaatgtcatcaggtgtgggagttggatttatctctgctcttctgttcaagtatgctggattggacgttgacaatctgcagaatttggaatgctgcctttttgttctctttccatatttctcgtatatgttagctgaaggacttggcttgtcagggattgtttctatattattcacggggatggttatgaagcattacacattctccaatctttcagacaattcgcagcgctttgtttctgccttcttccacttactgtcatctttggctgagacatttgtgttcatttacatgggctttgatattgccatggaagagcacagctggtcacatgttggcttcatcttcttctcaattatattcatagttgttgcaagggctgtaaatgtcttttcttgtgcatacttggttaacatgtctcggccagaacatcgccgtatacctctaaagcatcagaaagcactttggtttagcgggcttagaggggccatggcttttgcccttgctctccaatctgtgcatgaacttcctgaaggacatggaaaaacgatattcactactactacagccattgttgtgttgacggtacttcttattggagggtcgacgggaactatgctagaagctttggatgttgttggagatgaaaacacatcaatagaaaattatgaggacaacaatggttacatgcctccgacttatgaagaaggtacatcgtctggtggaggattgagaatgaaactgaaacagtttcacaaaagcacgacatcattcactgcccttgacaagaactacctgactccatttttcaccagtcaaactgatgatgatgacgacgacttcagtgagcaaccccaaaaccgaagagtacgattttatgatcaatagcagaatttgagattctacttatcaagctaaatacacggagcagaactggcatgaatgattgcatgtgccattcggttgaaccaaatataggatcatacttagttgggtagcatctgtataccgtaggacagaaatcaaaaggctcaaatcaactcttcctctggggatgaggattgccaggccacatgtatatatatatctgtattctgtaggcctctttgagatgatggtggagctccagatgagaagcagagtattgttggaactttggttatagcccttaccattaggttaattgtaataagcccccagacattctcactatttactatgtccgctgggagcctgggaagcgtttgttgtaacttgtaagtggcagattggagcagcagtctcactctggtgttgaagttctaaactggacaatgtgggagtacgaaaatatctttcagaaataagtaaaaaagaaagtctataaacactgacttactacaaattaataattacaattaggtagttagtttagtcaattaggtaagtaattagtaaaaactaactaattaa

SEQ ID NO: 14963 - DNA, 1139 bp, Setaria italica
  Peptide Sequence Number=SeqID_80937
ccgaccttgaccggaccgcgcccgcgcgagtctagtggggggcttccggcgccgccggcgggggtgaagatggcgctggagctgagcctggcctcggcctcggcctcgccgccggcgggctggctagcgccgccgccgcccctggccccgcccgggaaggagcagcaggtggccggcgtggggattctgctgcagatctccatgctcgtgctctccttcgtgctgggccacgtcctccgacgccaccgcttctactacctccccgaggccagcgcctcgctcctcatcggtctagttgttggtggccttgctaatatttcaaatacagagaccaacactaggacgtggttcaacttccatgaagaattcttcttcttgttcttattacctccgataatatttcaatcaggattcagcttatctccgaaaccattctttgcgaactttggggctattgtaactttcgccattcttgggacgttcattgcttctgttgtaacaggggttcttgtctatcttggtgggctgacatttctaatgtataaacttccactggttgaatgccttatgttcggtgcccttatatctgcaaccgatcctgtcacagtgctatcaatattccaggaactgggctctgatgttaacttgtatgctttggtgtttggagaatctgttttgaatgacgcgatggcaatttccctttacaggacaatgtcatcagtcagaagtcatgcagcagctggcgagaacttttttatgatgattctccagtttcttgagacctttgttggttcaatgtcatcaggtgtgggagttggatttatctctgctcttctgttcaagtatgctggattggacgttgacaatctgcagaatttggaatgctgcctttttgttctctttccatatttctcgtatatgttagctgaaggacttggcttgtcagggattgtttctatattattcacggggatggttatgaagcattacacattctccaatctttcagacaattcgcagcgctttgtttctgccttcttccacttactgtcatctttggctgagacatttgtgttctatttacaacaattaggggacttttgaattaatttagaccaattaggtaaagtaagtactaa

SEQ ID NO: 14964 - DNA, 417 bp, Setaria italica
  Peptide Sequence Number=SeqID_80938
ggcttgagagcctgcaggtcaaggtgtcggcgcccagggtctcaggggcgccgctccgccggatgcaggcgctcaaggagctagagctctcaatggtgccgcccaggccgtcctcgtgctccatactggccgaggttgccgggctcaggtgccttaccaagctgaccatatgccacttctcgattaggtacctccctcctgagattggcaacctcaggaagctccaagaacttgacctttctttcaacaaactgaagaacttgcctaattgtataattgagttgagtgcgctgaagttcctcaaagtgaccaacaataagttggtggatgtaccatcaggaatctcgtctttgagatgtcttgaaagccttgacttatcaaataacagattgacttctcttggatcggttaaactag

SEQ ID NO: 14965 - DNA, 484 bp, Setaria italica
  Peptide Sequence Number=SeqID_80939
cgcgccctccgcggccgcctcccgccgccagcgcgtcgtgcgcgccgccgccgtcgaggcgctcgagggcaaggctgccaccggcgagctgctcgagaagtcggtcaacacgatccggttcctggccatcgacgccgtcgagaaggccaactccggccacccggggctccccatgggatgcgcgcccatgggacacatcctctacgacgaggtcatgcgctacaaccccaagaacccctactggttcaaccgcgaccgcttcgtcctctccgccggccacggctgcatgctccagtacgccctgctccacctcgccggatacgacagcgtcaaggaggaggacttgaagcaattcaggcaatggggaagcaggacacccggccaccctgagaactttgagactccaggagttgaagttaccactggacctcttggtcagggtattggccaatgctggttgggttggcacttgccgagaagcacc

SEQ ID NO: 14966 - DNA, 274 bp, Setaria italica
  Peptide Sequence Number=SeqID_80940
tttttagcgttccattctcattcaccagaaatttgattaatgtcaacaaagcgaacaactttgttattcctctgcacaaatgcccattgggcagcgataaatgttaccagcatccatattatcaataaactcgctgctagcctatgtgcatttacacaagaacgttctgtacacaattgtagtacattacaggcaagggcacccattggctatgagcttgcatcactcgctgttctgccagcaaactccttgaagaagcttcagcccagtattg

SEQ ID NO: 14967 - DNA, 1497 bp, Setaria italica
  Peptide Sequence Number=SeqID_80941
tttgttcgttaacttaactttttgttttattttccttcttgtctactaaaattgtcccctatttgggcagcgattaaattgttaccagcatccatattatcaataaactcgctgctagcctatgtgcatttacacaagaacgttctgtacacaattgtagtacattacaggcaagggcacccattggctatgagcttgcatcactcgctgttctgccagcaaactccttgaagaagcttcagcccagtattgcagttcatgtcctttggttgaccaactggtttcaaaagaagcagctcaccgtggtgataccatgccagtttttgcatcatacattcatatattactgtcaatggcggaaagttctgacagcttggtctattcttctccggcaaagtgggcagtttgttaaatgtgaagagcaggccatacaacaacacatgtggccgcacggcacaaaaacagcattgtactcttgctcaaggcatataacacatatatccagcaccaattgatcttttttactgttaggctctgtgtttgatgtacctttgcccccttcagcttctctagcttgcctttgtgctgctgcattaagaacccttttctgcagttcgtgccggcgcttcctttccagaaaatgctgaattgcacgctttgcaaggagaaaaacactaaatgttgcaaagcccatggaagcaagccggtataacttggcccattttccaagattcaagataagttgatcaatgctttttggtgatacataaaatggtcctttgtgcggtctctgaattcgaatagttccaacatcatctttaatggcctcaccaacaaccgtcaacgaggttccagttggaagaaccctttcagttcgctttactccaagcatcttcaatccttgtaaataatctagagttccacgtacaagtgtccgccctgactcctcaaaaacctcactggcaacagttaaaattaaaccagctgcagcacgagcaccgaccacatagacacgtccagttccatcatccagataccatggaacctctttgctaacagaaagcatcactgcagaatcttgaatccaggatccagcatcgttgtgcttcaggaagtgttgctctgccgtttcctcaacgattacacctctcatgccactttgttggcatataagtggcgtgtctgaaccaactcttccagaaacggccactacaagtggtaggactttacttgcagtgtccaagatagcagctaaatccttcatgctgccagccctcgcgaccgaccgcagcacctccgcatctcttccgctgctcctcccaaggagatacagcgccgcggcgctgaggcagcaccccactccgccccacggaatcatcatcgccgcgaatcgagcacgagaattgcagcgcgcgaatggaggcggagatttgcgcgccgaaatatttcttcttccccttcacatacggcagcgctatggacgggggcaaagcaaag

SEQ ID NO: 14968 - DNA, 396 bp, Setaria italica
  Peptide Sequence Number=SeqID_80942
aaaccaaacgaaaaacaaataaataaggaaacaaaacggaacgaccaaccgaaggttagacggactactacgtctcgtcgccatgatcatcggctaccgggtgctggcgtacctgtcgctgagaagggtgaatgccccaagcagctagcacatcgcatcactaagtgtgtggactgactgaagcctcagctcctggaggctgccactgcaagtgtagcactcgctgtttgggtgtgtagggaagtttgtttttatattgcaccgtgaaaagatggaattcttttacttctctgtctttttcaactaagttcagagggcccaaaggccaaacacgagtactgaacaagaagaatctgtagcgagtatcagagaaaagctgtgttgtaatcttttctt

SEQ ID NO: 14969 - DNA, 572 bp, Setaria italica
  Peptide Sequence Number=SeqID_80943
ggctgcagtgcctccgccggagtgggagcggggaggcggcgcggaggagcggggcgagctggcgcggcggctcggagaggaagcccgggggtggttcctggcgttcgtggaacggttcctggacgctgacgtcgcggcggccgcgccgtgggaccgcgaccgcgcggccaggatgctcccgcagctgaagcgcgtgaacgactggctcagcgagatcgggaagcccgcggagatgccgccgccgccgcagcacccgccgtcggacgcggatggcgaggccgcagcgcccgccgcgaacggcggtgtggcatgcggcgtgccggaggagacgatagagcggctgaggaagaagatctacgagtacctcctgaccaacgtcgactccgccgccgccgtgctgggcggaggcgaggcggcgccggcaccggtggcgaacgggaagaaggggtgacgacgtgacgtgcacgtgcctcgtgggtcctagttcaaagcaggcagggccacgagcccacgaagggttgatcgccccgttaacttggctgggccaaaacatgggccggactagattcaaa

SEQ ID NO: 14970 - DNA, 491 bp, Setaria italica
  Peptide Sequence Number=SeqID_80944
actgaagcacgtagtaaatgaatgcacaaatcttcggacattgactgataatcaactgctttgttgctcgtgaagatgatgaacatggtatttcctctgggggaacatacccctgcaactgcaagtgccagagtcgacacaggtgttaagtttggtaactttttcctcatcagcttctgatttaagagatagatacttggcagcagtaatatgccaacaccgatcacagcgataattgtcaagatgctccaccacagtgaagtactttaggcaatccaccaaactacacccatttcaacgaatgaataaaaaaaaacttgaatcatgtaacgaagctttaggaaggttctcgcagacatacaacatctccatctgtattaagcactggtgagagaggcaggcattggaaattctggaagtccaacgatagctgtgtatgtaacaagggcagaacattaaaagttacaaaaaaatgagcttatgttgaagtt

SEQ ID NO: 14971 - DNA, 1649 bp, Setaria italica
  Peptide Sequence Number=SeqID_80945
tgctcgtgaagatgatgaacatggtatttcctctggggggaacatacccctgcaactgcaagtgccagagtcgacacaggtgttaagtttggtaactttttcctgtaacaattaccaataaaattgttatgcccaacatagcaaagtgaaatttcataacaaaaacatgggtgccatagaattttcagtgcactgataaatagaagacatcaagtagaacataattacctcatcagcttctgatttaagagatagatacttggcagcagtaatatgccaacaccgatcacagcgataattgtcaagatgctccaccacagtgaagtactttaggcaatccaccaaactacacccattggtctagtgtcatgccataggatttggaagggacaaaagtactattaatgagcatgaaacacacaacgaatgaataaaaaacttgaatcatgtaacgaagctttaggaaggttctcgcagacatacaacatctccatctgtattaagcactggtgagagaggcaggcattggaaattctggaagtccaacgatagctgtgtatgtaacaagggcagaacattaaaagttacaaaaaatgagcttatgttgaagttaaccgctaaaatgtacacacttattgatattggtagtacaaaaaagaacatcagcagcttgtttatcaaaattgcttcaataatgatatttttcaataaaatttactgcacatagctagaaaaagggtattgcattagagatcgtgtcaatgtctatatatatagtggttgtcacggacgtgcagcagtgaacggattgggtagctgtgggaggttgccggccgctgggctgccggtttcctgcctgtgatgcacgcagggggtcaccaagacggcaacagcagcaggtagatgagaaacggagaacagggagatgaggaagtagataaattctgcctgcctctttctgatttgcggccgcatataaatagcccagagtacagacgcaacaactttgctagagtcccttaactaatcaacaccctgataacaaccaaatctaatccaatgctaatctgaaacaaactaagacttgccgctgaagccaactaactgaactcttcggtgctttatccctagcacctcctcctctggtaggtgatgccgacaataacagtggtagagggaataaacgtattcaactacaaaaaaacaacagtaggtggtttttaagccacactttaatagcaactaaataagaagcataagagtctaccacagatgaacagtttctgcatgacaatatgctgccaattgtcccatcaaaggggccaaatagattttgtttccagcgcttgcattcaggctcgttaccttccctttgcctatatactttagagtgagacagagtgatgtctgccagagaactcctatgtggtacataacaatgggaaaattcgtcccgcagtgagatcaaaagatgaagaaaagcttccgaagcatcctgctgtctggtcaaattgaagtgactaacatagaaactcaaagcatgcattactccttgtggattcaacacaattctttcatctcgaactatgctcaagtctgcaacatgcaaataataccaatttatgtgcaagtagcaaaaaatcgtttat

SEQ ID NO: 14972 - DNA, 871 bp, Setaria italica
  Peptide Sequence Number=SeqID_80946
aggacctagactaagacgcaccgccgaagaaaacagaccccccccacgccaagctgcctccccaacaacagaaaagaaacaagacaacagaaaccaagctaccggaacaacactacggttacagttttttttcccttctcacttctcctttttgggccacttttgacgagggttatatatgatggtcctgattggtcccgattcacccattgctcaacctccccctgctcccgacattgaaaggtaccctggagcaggcgtgaagcgttgctgattgatttcgctcggtctctctattagtcttctgatctgagtgtgtggtatgttgttaccttacctgctccccgcccacagcaagtgtatgttgaggtcaggggtgcgcaatgtgtgtgtgtgtttgtgttatacttggttgtgcaaaacagtcagattgttagtagcagtagtagtactacatctacatgatgtgcctggactggggatggatttgccctgtaaaagacatggaagagaataggcatcttattcttcttcttcagtgaaagtgaagaaaacataacaggcagaatattttgaacttgaaagtagagcatgagctgttgttttgaactgttgtgccccaatggtgagctggttgtttgtccttgggtgatagtatgtgtccaatttgtggtgcatcagaatggacccttcggtatgagcatctcatgtcctgaggttggggctgaaaggacactgctgaacattgtgagatctcatgtcaggaacttgcatctgactttattacctgatcgtgaggaactagagtgcagtgttccccatgccgatgtgcctgcctggttcgttgtttgttagacgaacgaagacttgt

SEQ ID NO: 14973 - DNA, 475 bp, Setaria italica
  Peptide Sequence Number=SeqID_80947
cgtgacagtcagatactacagcaatatcctcagcatatgcaaccgaaccgacaacttctggttagatttggggataatttggaattaaggaatttgtgctaaattatgcttgtacggcataaacaaactagttcttggcatatctgcgccaaccatgcagattccgccagatttcagaaaacaaaaggacattgcacagacgcacttaagtcttgcaggatgaggaaaatcaagcgcataggatctagcaggaggacgtactacctcgttgtggtgggtgaagtagttgttggacacagtaatggccgtggatcccatgattgcatcgatcaggccatcagcacagtttgagagcgagcagtggtccacccaaatgtggctggcgccaaagattgacacagcatcgccgtcggcaatggtgcgccacccgtagtggctgggcgagcttcgcaccatggcgttccctgtgggcttg

SEQ ID NO: 14974 - DNA, 1436 bp, Setaria italica
  Peptide Sequence Number=SeqID_80948
ctcagtcgcgaccgttcaggaccatcatatataaccctcgtcaaaagtggcccaaaaaggagaagtgagaaggggaaaaaaaactgtaaccgtagtgttgttccggtagcttggtttctgttgtcttgtttcttttctgttgttggggaggcagcttggcgtgggggggtctgttttcttcggcggtgcgctagcaggccacgcccttgcggcaggacagggccccggcatcggaggtgatggagccaaccatggatgatgacttggcgccaaggctggaggcgcgagagtagctggctgaggcgcctgcgccggatggggtgaagtaggcgccgttcagcaggaggtcaccctctgatctccagttccagctctgccagacagtctgagcggtttcaactctcttagtcacctccttggcgaaggggtttgtcggagcaaggtaacggttgccctggctgttgatggttggctcagcgctcccaccaatggcgtacatttcccagtgggtgtagtcattgttcaccacatggaagtagccatgccggcaccttggcattctctggatgagaccttcgccgaaatggttgaaggctattgtcacctgcattgccttgtccttcacataggagtcactgtggcccagaagcatcacctcgttgtggtgggtgaagtagttgttggacacagtaatggccgtggatcccatgattgcatcgatcaggccatcagcacagtttgagagcgagcagtggtccacccaaatgtggctggcgccaaagattgacacagcatcgccgtcggcaatggtgcgccacccgtagtggctgggcgagcttcgcaccatggcgttccctgtgggcttgcagtcgtggatgtggagcccgtggatgatgacgttggagacgtactggatggtgatgcaggcgccgccagagatgtgcacgttggcgccgcggccgtcgatggtcttgaagctgttcatgatgagctcctgcttgagcgtgatgaccatatcccgcttgaagatgatccagagtggctcgtcctggatgaccccatagcggagggtgcccttgcgcgggttgaccgcatcgtcgtcgctggggtcggtgacgacgtatatcttgccgtcacggccaccgatggcgttgcggccgaagccgatgccgcagtcagccaggcgctggcggttcttgtgccagtcctggtcacagcgccagcagtcgtcgattgggttgcctgtcccgcacgacaggtacgccagattccgccgggccgtgctgttcctgatggacacgtgcacgtcgtcgaccaccgcttccgggtcctccaccgcgacgaccacacaaacgggacccgcaccgccggcctcggcgtcgccgcgaggaactaaattaagtaacaaaacctaaagaaacaaaattaagaactaa

SEQ ID NO: 14975 - DNA, 572 bp, Setaria italica
  Peptide Sequence Number=SeqID_80949
actaggggaataggtacgacaatacaaagacaatagtgtcgaattgcgctgagtaaaagaacagtgcctcccggaaccgtgtcaaaaagaatggagcaccaaatgtgccatttaccacagaatggatgaacacgttgggccgcatctcccggatgttgttgaggaccatatctctagggcttgggctgtccaccaaaacactctcatccatcaagttgccccaaaagcactcgctgttgacaacaagcacctcttccgggtcaatattgaggtccttagcacggacggtctcccattgtgctaaaatagcgttgaacttgaatggcacacctaactcacgggcacagttactgaggcggtgacctgtttcctctatctggtgggctgggcggaacccaggctgtgggacagcaattgcggtgaccctcacctctggtggtccacctttcctctttgccagtgtatagagcaaacctggatattggaatccatgttgcacaccatactccacgatgtgcaacttgctcctccctgccacagcattacagattgtcgcggtggagaacgtgaaa

SEQ ID NO: 14976 - DNA, 1020 bp, Setaria italica
  misc_feature (1)..(54): n is a, c, g, or t
  Peptide Sequence Number=SeqID_80950
nnnnnnnnnnnnnnnnnnnnnnnnnnnnnnnnnnnnnnnnnnnnnnnnnnnnnnaatttcagtgcaactttaatgcttagtcatcccagaattgagggaaatgacaacagtctgatgctacaacagaaacagaagttcataaggcagataattttcaggcattaagccttcaaaccatgaaaggtcaaacatgtaatccataaaactgcctgtcagctacagggttttaaattttggtgtacattattacaactctgcaaatatccagaactatatatctacaaactatgtagctcctctaatcatctacttataccttacaagtttcagtactcgaaccccctagaaatggacgtccaccaaaccacaggtgctggatcgtggtttaaacatagaccatatatcaactaccaataccacctagtcagattctggaatttggtggagcgacacactaaaagaggggcttattatcctcagccgtccatgatgacatggcatagagtacccgtcccttccatcccagcagcaaccaacggttatcctcatcgatgagaaagtctctgtgataatagttcttgaccttgtccctggaaaccttggcggcctctgaatccaatggtagctgcctcagcccagcccggtggttccgcactagccattgcttataagtttcagggcgttccacccggtctgcaccctcacaagcaatcacattcagggcagacctcccaatgacatcccgctcaatcagcagccgttcatcattgtccctggggatggtcgcatcaagcatgtcgaattgcgctgagtaaaagaacagtgcctcccggaaccgtgtcaaaaagaatggagcaccaaatgtgccatttaccacagaatggatgaacacgttgggccgcatctcccggatgttgttgaggaccatatctctagggcttgggcttgttcctacctaaaactacttcttcttattccttatttcttaagttttgttccccttaaaagttcttactttta

SEQ ID NO: 14977 - DNA, 271 bp, Setaria italica
  Peptide Sequence Number=SeqID_80951
atttctgttcctgatgatgctaccatggcaaaagagactcctgctcagtatcgattcatccctcacaagtgaagaaagggagcagaacggaagcaagccagcgtcagagcaacttttgtgcaagacctgctgctctctactctattcggggactaaataaatcaggatcagcctaagttatcactggaagggtgctttcctggtgcagatctacaaagactagcgcgctccacccaagttgcttgaacgttagttatcattgacagaacat

SEQ ID NO: 14978 - DNA, 250 bp, Setaria italica
  Peptide Sequence Number=SeqID_80952
acccaccaaccttggtggagcactaccagactatggggaccaggcaggagtaagcgcccatctagcaagaacctatggctgtttgaacagtcagtccccaaatagagttgagagcaccaggccttgcacaaaggttgctctgtcagtggcctgtttccccatttgctcccaaaggattacaagagatatgcttaaccatatcaccatgcaacatggttacttgttcaagaacggtcacaggtgtcgcaga

SEQ ID NO: 14979 - DNA, 219 bp, Setaria italica
  misc_feature (74)..(74): n is a, c, g, or t
  Peptide Sequence Number=SeqID_80953
ctccggcctcacctcctcgtccatgtccagctcctccatccccgcccgatctgcacccaccaaaccaaaccaancccgggggtcaagcgatcagagacccgccacgaagcaacaaaccccaaaacacaaagcagaaatcccagtgatggagcgcggtcgccgcaccgctgtggccgagctgcgccgcgtagaaccgcttcgcggcggccaggcgcgaga

SEQ ID NO: 14980 - DNA, 245 bp, Setaria italica
  Peptide Sequence Number=SeqID_80954
agtaccacgcagatctcggctcaataaagaaattgcatggctctcgggaataatatatctgcgacacctgtgaccgttcttgaacaagtaaccatgttgcatggtgatatggttaagcatatctcttgtaatcctttgggagcaaatggggcatggctgaaatgaaagtaaaaatgaaaatgagaacaaatcaatcattgctaacagtctaacagtacagcgaaaacaaaagctgtataaggtga

SEQ ID NO: 14981 - DNA, 901 bp, Setaria italica
  Peptide Sequence Number=SeqID_80955
cctgaatctttgattgcgtatttatctgattctgaagagtttgttaagaaatatagtacttcaaataagaataagggactattgacaaattggcctctaatgtcatctatttttctcttttgtatcacaagctttgatgatatggcttattcagagatattttctttatggtctgagagtgacaaaaagtatggtggactaagtttctcatctgaagatgttggtaatgtacttttggtgacaggtgctagcatccttctataccaaacatttatttatccctatattgtcaaagttctcggactaatcaattcttctcgtattgcaattattctatccatggtgcttcttttcacctatccacctatggcgaacttgtcaagaccatggatatccattgttgtaaatattgcatcggtgcttaaaagttgttcggttgctaccgttgtaacatgctccttcattcttcagaacaattctgtgcctcaagatcaaagagcaactgcaaatggcatagcaactacattgatgtccctttttaaggcatttgctccagctggagctggtgttgtattttcatgggcacaaaagcaccaacatgctttgatatttccaggtgatcaaatggtgttcttccttctggacattgtcatactttttgaacttatttggacattcaagccatttctagatgtgccaaagcaatcttcttcgagctaacccttctggctaatggcgtagacaagttgtgtgttatttttaccatgatacgccattgctaaaattttctaaaggtgtcatttttacaccatctaaaggtgccatttccatatactatcaacagttttgctagaacaacttcgttttggggttctatcagctttgaatgttcttttgtaca

SEQ ID NO: 14982 - DNA, 1312 bp, Setaria italica
  Peptide Sequence Number=SeqID_80956
gtgccatctttgcatcgtatagaagatgttacagctattatgtatgttggtacaaagtacaaacacaatgtaccaatgagttacagttatgggattgctggctggtaaattgataaaataaaggtacaacagctagcttaaattaaaagctgtatcatcacggaaactccgcgctctactgaaacaacaaagaagaacgcggctacagcttccaggcgaattctcctgccatcagagttagacccaccaaccttggtggagcactaccagactatggggaccaggcaggagtaagcgcccatctagcaagaacctatggctgtttgaacagtcagtccccaaatagagttgagagcaccaggccttgcacaaaggttgctctgtcagtggcctgtttcctcttttgttccctttcttcgcttgtgagagacgagtcaatactgaccatcgaaaaggaaataaaagttcgaatcacatattccatacgcaaggaatttaattagcccttgaaaacttatatggaccaaagcaaatcacttgacagcatacatgtaaacaagaaaatataaaacattatcaagtgaaatccttttgtctcaaatggcccaaatgtgcatcctttttaacagtaaagagagttctctgtcagtatagtatacccatgtgtttctcgttaattagtcttagtacagaggtgctgagggactgcttgctcaataataccatttaaggataggagtattttcattgaagggaaaagtttgtcaatcgtgaacgtgtgaaactatcatgctattcctaacctcagttaggcaacatcttataagaatcgctacaaaattttggcctagaagctttttgctaggataataaatgcaaaagtagttcacaaagaatttgaggagtaatatataccttgattcccaaggctgagctggtgtttccttacgtactgaggcaccatctggcatagaaggtgttgattttgatggctctggtgcatctgatgttgggaaactcaggccaaatgatgaaagaagaggatcactggaaatgtttgtggtggctgtgttacttgatctgtggctatgaccacctcctagaagagcctgtaaatgagtaccacgcagatctcggctcaataaagaaattgcatggctctcgggaataatatatctgcgacacctgtgaccgttctgtaaacagaaataaaaagaaggtgtcagaaacttccaagtcttaacaagaattttattccagagagggtgggagggagagggatgaaccttgaacaagtaaccatgttgcatgg

SEQ ID NO: 14983 - DNA, 1286 bp, Setaria italica
  misc_feature (968)..(968): n is a, c, g, or t
  Peptide Sequence Number=SeqID_80957
agaagatattggattttatgctggttttgtaggtgcttcatatatgcttggtagagctttgacttccataatttgggggaatattagcagatcgtattgggaggaaaccaatcattattatcacaattttctccatccttgtattcaacaccttgtttggactgagcgtgcactactggatggcgatagctacacggtttcttcttggttttttaactggttcagttggcacaataagagcttatgctgttgaagtttgccgacctgagcatcacgctattggcctatcacttgtgaacacatcatgggcaatagctcttattattggaccagccataggtggttatcttgcacagccaacagataaatttccaaacttattttctgctgactcattatttggaaggttcccgtacttcttaccgtgtttatttatatcgatcttcagctttgttgttctcataagctgcatatggctcccggagacattgcatacacacaagctacacaaaaaggaacatcctgaatctttgattgcgtatttatctgattctgaagagtttgttaagaaatatagtacttcaaataagaataagggactattgacaaattggcctctaatgtcatctatttttctcttttgtatcacaagctttgatgatatggcttattcagagatattttctttatggtctgagagtgacaaaaagtatggtggactaagtttctcatctgaagatgttggtaatgtacttttggtgacaggtaccaactttcgagtccaagaaatgaacctatcaactttgttcctattccaatcatttatgactaaaaaaagggctaaaattggcttcatattcatgtttcgtgctctagcatatagcatctcgctagagattttctttgatagagagaggtagtggacgcctagtaagctccttttatatatgcattatgttggctaaacncattgaattcatgatcttcccaagtgtattgtttaggatggaataattcatgaacttgctatggaaactgtacattgcctctagttattagcaaccacctttattggaaaccttgctttaacctcattttttcttattcctattataaaatgaacttacttctttatgtgttgtaggtgctagcatccttctataccaaacatttatttatccctatattgtcaaagttctcggactaatcaattcttctcgtattgcaattgtgagtatacaagttattgtcacattttattgctagtttaaatactttaatcttta

SEQ ID NO: 14984 - DNA, 1224 bp, Setaria italica
  Peptide Sequence Number=SeqID_80958
ttcagcaacttgggtggagcgcgctagcttgtagatctgcaccaggaaagcacccttccagtgataacttaggctgatcctgatttatttagtccccgaatagagtagagagcagcaggtcttgcacaaaagttgctctgacgctggcttgcttccgtttctgctccctttcttcacttgtgagggatgaatcgatacttaacttccgtgcctgagcaggagtctcttttgccatggtagcatcatcaggaacagaaatagtggactttgatgtttgctctgcatctgatgttgggaagctaaggccaaacgatgatagaagaggatctgctgagatatttgtggtgttgttattgttgcttgacctatgcccacctcctaaaagcacctgcaaatgggcttcccgtagatctcggctcagcaaagaagggcttggctgcctggaataatgaatctgcgcaaccggcgacgattcttgaataagtacccgtgttgcatagtaatatggttaaccatatcccttgtaaccatctcagagcaaacagggcaagccagcgtcagagcaacttttgtgcaagacctgctgctctctactctattcggggactaaataaatcaggatcagcctaagttatcactggaagggtgctttcctggtgcagatctacaaagactagcgagcagcaggtcttgcacaaaagttgctctgacgctggcttgcttccgtttctgctccctttcttcacttgtgagggatgaatcgatacttaacttccgtgcctgagcaggagtctcttttgccatggtagcatcatcaggaacagaaatagtggactttgatgtttgctctgcatctgatgttgggaagctaaggccaaacgatgatagaagaggatctgctgagatatttgtggtgttgttattgttgcttgacctatgcccacctcctaaaagcacctgcaaatgggcttcccgtagatctcggctcagcaaagaaagggcttggctgcctggaataatgaatctgcgcaaccggcgacgattcttgaataagtacccgtgttgcatagtaatatggttaaccatatccctctgcgcgcatctcgaggaggagcacccgttcgagccccacgccgcggcttgccctgtttgctctgagatggttacaagggatatggttaaccatattactatgcaacacgattcttgaattaagttacccgt

SEQ ID NO: 14985 - DNA, 1333 bp, Setaria italica
  misc_feature (1292)..(1292): n is a, c, g, or t
  Peptide Sequence Number=SeqID_80959
gtaactgatacctctgcactgacggctataatatgcaaaatggcaacgcaatgcaaaaatgaaaatggttctcaagaattttcaagaaggtgaatacacataagagagaggtacagttatacaaggcttcatccagtttcttaagtacaacagagcttcctttcctccatcatcctatcagctcctacaccacaaagccagctgcttccaccacgcagtgctgcccagcaccagccatgcaggcgcgcttagtagtagccgatgtccttgtcgtcgacgacgaggtctccgttgatgagctcgcggtaggctgcaacgggccagatgaaccccctggggaggagccgcgacgcgagctcgacgtcgatgatgatctccctcatggcgggcttcttctcgccgctgatggcgatgaggtagctcctgccgacccacccgatccacccggcgatgtagaggaagagcagggcccggggtgatgaactcgccccagtgccgctggtcgccactgacgatgaggtgcggcaggccgtcggcgccgcagagcaggccgaacttgccgtagttctcgaagcggcgcttggtcttctcgatggtggcgttgatggcgagggcgggggcgctgtcgggggcgtacttattgagcgaggtggtgagcttcttgatcgagttcttctcgcgcttggcgaacgcctccgacagcgcccccgccctcgccatcaacgccaccatcgagaagaccaagcgccgcttcgagaactacggcaagttcggcctgctctgacggacgaccgaacggcctgccgcacctcatcgtcagtggcgaccagcggcactggggcgagttcatcaccccgggcctgctcttcctctacatcgccgggtggatcgggtgggtcggcaggagctacctcatcgccatcagcggcgagaagaagcccgccatgagggagatcatcatcgacgtcgagctcgcgtcgcggctcctccccagggggttcatctggcccgttgcagcctaccgcgagctcatcaacggagacctcgtcgtcgacgacaaggacatcggctactactaagcgcgcctgcatggctggtggtgagctgggcagcactgcgtggtggaagcagctggctttgtggtgtaggagctgataggatgatggaggaaaggaagctctgttgtacttaagaaactggatgaagccttgtataactgtacctctctcttatgtgtattcaccttcttgaaaattcttgagaaccattttacaaaaaaaaaaaaaaaaaanaaaaaaaaaaaaactaagagacacgcaacagggagtagacg

SEQ ID NO: 14986 - DNA, 565 bp, Setaria italica
  Peptide Sequence Number=SeqID_80960
atatatcattcctctatgcaattttcacattattcgtcttagcattattgcagccggaaaagaaatatcttagaagggcatcttactatcttaggtgtgacactttcaccacgatggctgtcatattcataccgaaattcttatcttagatgggctccagacgataacacatctcctcataagtcacacatactcataagatcatatcgcctcccaattccaatgggggtctgagttgacaccccaaagctgttgtagagtaatggcagccgtacaggaagaatcaagacccaagtccagatggctggtggagcattgttcttcaagggcagaagggcgtgccctccttctccctgtgggacgggatgacgaagtgcctgatccggccgacctgctcggcgaggtatccctcgcagaggaaggccttggagaaggcgtcctcgacggggcggtcgacgtcgtgcacgaacacgtcggtggcgccttcgccgggccgccgcgcgcgcgccgccatgccggcggtgtagatggcgcccatccgccccggggcctccggcgtccaccc

SEQ ID NO: 14987 - DNA, 1208 bp, Setaria italica
  Peptide Sequence Number=SeqID_80961
gttgcaaaggccgctctttcctgctctcccagtccgtccaatcctgtgtacatagtcgtcaatatcattgggcagatcgaagttcacaacatgagcaacatgaggaatgtcgaggccccgagctgccacatctgtagcaaccaaaataggagtttgcccactcttgaatgatctcaaagcatattctctttcctgctgatttctatctccatggatagaagtagctggaaacccattcatacacaaccagctttccaatgaatcagcaccccttttggtttccacaaagacaagtgtgagattttgctttccagtatctctttgtgcatgaagaaggtccatcaggtgacttcttttatctgcctcctgcacaaattcaattctctggacaatcaattcagtacttgacccaactcttccaacagccaggaagatgtagttctccaggaagtctgatgccattctctggatttcttttgggaatgtcgcactaaacagcaatgtctgcctgacacctggtggaggcatgtccatttgctcaacaattctcctaacttgtggttcaaaacccatatcaagcattctatccgcctcatcaagggcaaggtatctaattgactgcaaagatactcttgccctttccaacaagtcaaccaaacggccaggggtagccacaagaatgtcaacacccctctcaagatctcttaactgctgagtaatcggcgctcctccataagcaacaaccactctaacacccgtctggtacgaaaatttcctagcctcctcatgaatctgcatggagagctctctggtgggggagaggatgagcgcggacgggtacgccgtgcgcatccccatacccccaccccgctgcggcctccccgctggcggccccctcatgatgccgctgatgatggggaagcagaaggcggccgtcttcccggaccccgtctgcgcgcaggccatgaggtcccgcccggcgagcgagatcgggatggcatagcgctgcacgggtgtcgggcgcacgtaccggcaccggcggatgttctcgttgagcgcgtcgccgagatcgatctccgcgaacgtggcgacggggggcgggacctcgcgcccagacgtctcgacggggatgtcctcgtacggaccgaagaaagtgcccgtgttctggtgttcctcgaacggggcggtgccgtcggcggcggctaggt

SEQ ID NO: 14988 - DNA, 1394 bp, Setaria italica
  misc_feature (1)..(1): n is a, c, g, or t
  Peptide Sequence Number=SeqID_80962
nttttgtttttttttttttttaacaatgaaagcatcgcacaagaggcaatacatttggatgataatgataatattagttgaactccatccaaaacaaattctcaatacacaataacaggaatcttcccggacaagaccatcacacacaaacttcccccttcttcctctaaacctacataatttattctatccagcctcacctcacagcacatacattacaacaggatctgaaggactattaccgtcctaccgcttcttcaacctccgggtgtcaaaactcgaatccaggacaaaaatcaagccgcaaaagccccctcaacacaagctttacaaccgaccatcgaaatgagacacggacaaaggaaaacagcaaagacagacttagcttcaagcactacattgtcagcctagcaacaacaccagctactgtccctaactaggaatttcagaagtggaaatcctattcctaactaggaacctcttgtgtgcttcaaagtcctcaagacgctctcaataatggacatctgcaagataagactgcagcgggtagtaaccagaagaaaaaaggggatgacgccattcaccttgtactgtcgctgtataacagctcctaccaaaaatgtatacctaaagacaaaactagagtaaaagttggccaagatttggcaaaccctactagggagcgactaccactttaatcccaggcgcttggagccccagctccaccatagccaccaccaccgtatgaagaggaaccaccaccactgctgcctccaccgtagtagtcaccaccacctccacgagaaccccctttgctgaatgaggaagagtcattgcggaagtcacggccaccgaagcggttcccacccccagaccgtctgttcctccccccaccaccaccgtaagaagggcgagctgcatagcgtgagagccatgcaggtacctcctggttggattcttgcattagttcagcaagagattttgctaacgatgagttattatcattgaagaaggctgttgcaaggccgctctttcctgctctcccagtccgtccaatcctgtgtacatagtcgtcaatatcattgggcagatcgaagttcacaacatgagcaacatgaggaatgtcgaggccccgagctgccacatctgtagcaaccaaaataggagtttgcccactcttgaatgatctcaaagcatattctctttcctgtcagaaacagtatatcaatgcattaggaatagaaaaaccactgctagcactcactgtttgaaacaagcatataaaaaatacagcagtgttggaacttggatatggatatatgagcaaacaaagagtaggcaactataagtgtgtggctgtgtgcaacctaatagactagtgcgactgagtcgga

SEQ ID NO: 14989 - DNA, 899 bp, Setaria italica
  Peptide Sequence Number=SeqID_80963
gtaccaaagatgatgtttctgtggtgtgtgcaaggctgcagcgtttgatgggaatggatgccaacgggtcccaacatcgctcaggacgtatttacccctccaggtgacagcagttcaagaacttcaacttgtagtggaatctccaaagatatttgcatcaatgctgaaagattactacctaatggtgctaacaggaatacttgtttaccaccagccaccacttcacgggactcaagcatttcttctgggagtccatcatctactgcaagtgcggttattcatcaaagcaattaccatgagagcatacacaataatcagcaaaatttgtctgaccccaaatctcaaaaatatataccacctggagggcgtagccgttcaagtacgacatcagtacagcatatgcagcatccatgtaggcctattgagggcacttcattggagagctcatcgaatatgagtttagtttcacaaggatcaaaaggccaccttaatgagcagttggactccaataatgataaatctgaagcatcttcacagttaggaaatgacacttcaaattccaagcaaacgacctcagcagaaaatggaacatctgacacttcgcagcaaaagccacagtattccaatgtagtttcacaaggacaagttgtaccaagtcggcgttttactgtacttggcaggcctaaagcaacaggacaaatcagtaatggcacttcaagttccacaaaacttgctttggtaaaaactgagcacagcgatcgcgttacacttcctagaagtcatttagtttcccagagcctagagcaactctcacagcaaggcttcagctactgtcaaatctcatgctggagcagagaaaagaatggatgtccagatatcattgaaaagctagtcccagg

SEQ ID NO: 14990 - DNA, 2466 bp, Setaria italica
  misc_feature (12)..(12): n is a, c, g, or t
  Peptide Sequence Number=SeqID_80964
tttttttttttntttttttttttttttttttttctttaaaaagaaaatgcacaaggtcttgcagatgggatcgagtagcatcataatatttgcactaccactacattcaaccaatcttacatctggcctcagtttccaaagggcattttgggttggtactctaccagctactcacagaaccgattctcttccttcgcaactctacatgactacatctatctacgttcctgattatacacacgtattttcatatacactccaatgcgttgtttcatgtccgatgtacaacgccagatgacgcaatcaggctgatatctacagacatttcacatattttgctgatcagacgcaccgaatggatgctgcttacacttggaagacctgtgttagaggttcattggcaggttagatattttcatcgcctctgcattatggtgtctcctggaagtaaggatgatttagcgcttcatcgacgcttagacggtcctcaggatgccacaccagtagctggcgtgcaagtcgcagtgcccataaattaggaaagcccattttaagaggatctctgatcttcacttgatgtgcaaatgactcttcagagcatttccatgaagctaacccaaattgaccctgttctgagcttccactgccatgttgtgttgaaatccctgggatcaaaatacacaactccatgtatgacctcaacttgtatgcaagctcctttgtttgttcactccacccttcaagacgctgatccattaaaacacgtgtacggtcgcttatctgaaaaatgtggggagaacccattatcaattctagcatgacaactccaacactccagatatcatacttcagtcttgcactttttgatccttgaaaccagtttgaattaaggagtgcctctggaggagtgtactcaaaagtctgttcagatcgagtaggccctgaaccataaagatgcttcaatgtgtagtcatcaatggcactgccgaagtcaatcagacgcatgttcagcttatttttctttgcttcagatggaacctctcttagacactttccggtctccacatcctcaaagcaaatgatcatgttctcaggtttgatatccctgtgagtgatattgcgatcatggcaagctttcagtcccatcagcagctgccataagaggttttgcatttgattttgcccagcttttgttgtccttaaccaataccaccacttcgatgggtgtagaacttgaatatgtctgacctcctcattattgttgccagtgactaactttgtttcttcagccgtatatatcaattttgatagtgagcggccttcattatggtacacaagccatatttcccttgattctgattcgaaagattctataaacctagccacatgcttgagtggttcttcggtaacagacatgttcctttctagtaggatatcagtatcggattgcatgtccattgaaaagatagtcgatgatgactctgtcctcgacataccttcaagagttctggaagcatttgaaaataattccccaaagtatttctcccgcaatccactcaagtaagcagcatttcccctctccaccattatgcgcttcagtatgaataaatcaccatctactgtttctgagacatgatcttcatcagatgacattgtgtttgaatttgtgcaattatacgagtctgatttaggtatagttgtaaaatgttgaggttctttatgcgcatctctatcttcagagcaattccagtgaaatgccaaccagacttcaccatacgaaccacgatcgaatcttctcttccgcttgtacctgaaatctatcttgttgccaaaggagtgtgaaccatttgatttgcttccattatgaggaagggagtcaagtaaaccaaaaaaatttgcaacagcttcaggaccattgcaccgccccatttcaccatcttgatgaccaaggtataagcaaaattgtctgtccttgtatttttcaagattaccatcagaatataatgccgcatcaggtggtatgtgattgaattcatggacttcttcacgctggtatgcttccggtaccctaaaaatatagtccatatcttcatccagactctcagataagtagaaacaaccaagtctcttaagttttgcttcaaccaagaacctctggaacttcgttgatgaacgcctgaaatactccatgtcaataacagctgaactagtgatgtcatcaggcttcagttggtatggaatattctgtactggtaaaatagacgtcttgagattttcttcaaactgggaccaatcttctaacgtagtaccagcactactaggtgatcccaatggaaccaccacagcagccacattgtctgtcgtgcctttctgcaaagctacacgaactacataatctgccaaattatgttgtgtgatagctgatgatccaaaatcctgattaacgtgtaaatttgcatgtagcat

SEQ ID NO: 14991 - DNA, 950 bp, Setaria italica
  misc_feature (838)..(838): n is a, c, g, or t
  Peptide Sequence Number=SeqID_80965
tctacattgtgtcaagttagctggagcaaatcagaagaaggtccgttttgtcataatgggaaatctattctgctcagaatatcctattcataggcgttttgatctgaaaggctcatctcttggccgcacaactgataagccacagacagagatagatcagtatacaactctgaaagacctggatctgaacttcatctttagattgaagaagcaatggtttcaagagttccaaaggcaagtagacagagattgtgaattccttgaacaggagaaaattatggactacagtcttctggttggcgtacatttcagagataacagagagaaacttctgtctgaaggttccattgactatgatatcaacaacatactgacaccttgtctttcaagaggaaatacgggtcagcttcttgctgatccaaacaggtgtcctaaaatcaaactgggggcaaacatgccttcaagagctgaactcacagctcggaagagtgattgtgaactgcagctaattggagagccaactggagagtactacgatgttatattgtattttggaatcatagacatacttcaagattacgatatcagcaagaagctcgagcatgcatataagtctttccagtatgacgcaacttcgatatcagcagtggacccgaggcagtattcaagacgttttagagatttcatatataaagcatttcaagaagatggatagacagctgaaaacatgttgaaactttagggctgctgcagcctccaggtgcagatgaacttacaaatgtcaaaagcaaagctcaagccaggcacgatggagcaggttatccacactcaaaaaggntgactggagcgtcagtggaagccatctgggtcgtagagttgtccgaagccgttatcattgtcttccagaaatcgcctgatgctgcgtatatacatttagacatacatacata

SEQ ID NO: 14992 - DNA, 388 bp, Setaria italica
  Peptide Sequence Number=SeqID_80966
acaataccatccgcatccagggcacggggagccgtcgcggcggcggtggtgggagagcgccgagggcgtgcggcggcgagacgagggagcaggcggtgtggaaggcggaggcgatgctgctgcagaggagcgtggagtcggtgctgttccagggccggaagctggccggcgagaccaacgccgagaagctggagcgcttcgcgcgggagctcgccaaggagcacgcccggccggaagcagcagcagcaggccgctcaacaggcgagccccggcgacggtacgccggccgtcgtttcttcagccacacccaagcagacgccgcacaaggcaaccacgtcgtcgtcgtcagccagcagcaccgccggttcaacggaggccgcgaaacccg

SEQ ID NO: 14993 - DNA, 459 bp, Setaria italica
  Peptide Sequence Number=SeqID_80967
tttacaagaagacaagaataagtacttagtacccgaagcaaaaaagggtagtgcttttctttgatgtgatcttctgattgaggcagcgaaattccagttgaaatgttttgctctaaccttcgacatatttatatattttgactgacaacagtttatttttatggccaatttgttacatgataggctgaagatcttgcggcagcacttaaagcaagcaggatgaaccctgtaaagaccgatgccgacgatacggatgttgggagttcccagggtattagtggtggggcaggatttcagggccagtatgcgcctgctgctgttcctggtgggatgggtcagcctcgtcccacaggtatgccccctcaaccaattggcggtcggtcagatcctcttcaaggagatgacgaggagaccaggagactgcgtgcagagagagcagcacgagcaggcggatggact

SEQ ID NO: 14994 - DNA, 941 bp, Setaria italica
  misc_feature (856)..(941): n is a, c, g, or t
  Peptide Sequence Number=SeqID_80968
aatgacgatccgccgcaagatggccagcatattcaacaagacgcgggaacatttccctactctgaaggactacaacgattatctggaagaagttgaggatatgactttcaacctgatcgaaggaatagatgtcgatgcgatcgaagctaaaattgcaagataccagaaagaaaattcagagcagatagtcttgtcccgagcaaaaagggctgaagatcttgcggcagcacttaaagcaagcaggatgaaccctgtaaagaccgatgccgacgatacggatgttgggagttcccagggtattagtggtggggcaggatttcagggccagtatgcgcctgctgctgttcctggtgggatgggtcagcctcgtcccacaggtatgccccctcaaccaattggcggtcggtcagatcctcttcaaggagatgacgaggagaccaggagactgcgtgcagagagagcagcacgagcaggcggatggactattgaattgagtaagaggagagcgatggaggaggcgtttagcgccatattcatctagatcagatcaaaggcagcacctggcctggaggaaagccagtactatacttaagatggcctttgaacaattacacgacattggatgctctgtattttatcttctgtgtatggagttcttgctgagggtattttatcaagcggccttgtggttgcaaaagcttgctttctttgcaagctgggaatttgcacattgttgtaccttgtcagtatcaggtcatcgtgacagtcagacttgtaactgtgccttactgtcaattgtaactgtgccttcgtaaggtcaagataagctttaagagcctcgctgcctctcgaacannnnnnnnnnnnnnnnnnnnnnnnnnnnnnnnnnnnnnnnnnnnnnnnnnnnnnnnnnnnnnnnnnnnnnnnnnnnnnnnnnnnnn

SEQ ID NO: 14995 - DNA, 399 bp, Setaria italica
  Peptide Sequence Number=SeqID_80969
agcccatcgggccttcccgccgcggcgccgcggggatgtccaccttctacttcttctccggcggcatcgcggcgctcgcgggcgtcgccgcgctcttcccgcgctcctggcgcgcgctctacgtcgtcacctcgctcccgtccctcgccttcgtcgccgccgtcgtgcccttcgtctccgagtccccgcggtggtacctcgtgcgccgccgggctgacgacgccatgcgcgttctccgcgccatcgccgtcgccaacgggaggaccgtccccgacgacgtcacgctcaagctcgacgacgaggacgaggaagggacgaagggcgtcgatgatgagtcggcgaactcttcgtcgtcttcgggatccatcgtcgacgtgttccggtcgcgtaccacgcggg

SEQ ID NO: 14996 - DNA, 364 bp, Setaria italica
  Peptide Sequence Number=SeqID_80970
aactaagtagatgatgagcggcagccggagcactgcgtccacatgaggttgctgccggtgtcgatgatggcctcggcctgctgcggcgggtcgccgatgggatactcggcgatgtactgcgacctcacccagtgaacgggtgcggacaccgcgtccgtccacgccagctgatggcgggtccgcgccatggcacggcgcatgcgctcctcgacggtgcagttggcatcgaggtgggtgagctcgaggcggaggccggcacaggtggtgaaggtcagggaggaggagaagagcacgagccagagcaatggcgatccccattttaatcttaccatgtatgatgaattccattataagaatacttaac

SEQ ID NO: 14997 - DNA, 656 bp, Setaria italica
  Peptide Sequence Number=SeqID_80971
atcatcgacaccggcagcaacctcatgtggacgcagtgctccggctgccgctcatcatctactagttgcttcagccaaggcctctccatctacgacccctcccagtcgcgcacggcccatcagcccgtggcctgcggcgacgcggcgtgctccctcggctccgagacgcggtgcgcgggtgatggccaggcgtgcggtgtcttcacctcctacggcgccggcaccatcaccgggctcctccgcaccgaggagttcacgttcgggtcggagaaggtgaccctcgacttcgggtgcatcaccgcgacgaggatcacgccgggctccctggacggcgcgtccgggatcatcgggctcggcaggggcgggctgtcgctcgtctcccagctccgcgacaccacgttctcctgacgccctactcaaccgacaccgtcgaccagagccacctcttcgtcggctcgtcggccggcccgagccccgggaacaacgcgccggtgacgtccgtgccgttcgtcgagagccccaacggggaccccttcagcacgagcacgttctactacctgcccctcaccggcatcaccgtcggcgggacctcgctcgacgtccccgcggcggcgttcggcctccggcaggtctcgtcgggggactgggaggtgacg

SEQ ID NO: 14998 - DNA, 795 bp, Setaria italica
  Peptide Sequence Number=SeqID_80972
ctacttcaatgcaacagctttcatgtcgtccttggttgtgattatgttgcttgttagtaaaaggctatatagcaagggtcttgagggctatgcactacatgcatgtgttttgattgatctgatcagcctcatgggtgcttttgctgctggaagctgcaggaaagtttcgacatccgtgtacgtcatccttgtcgttgttgcagtggctgtttatgtcatgattcaagttgtggttctgacgtttgctaaagacaaggtgaacaatttattggaaaagatgtacacatttgggctttctgagcgccaatatccatccatgaatcatgagagaagcatccgaagtaaaaagagaactgagcacaaatggcgcaaagatttgatgctgatcgggactcttgcagtcactgtcacataccaagccgggctgctcccaccaggtggattttggcctgatgaccaggtaggccaacattttgctggcgacccaatcctccatgatacccatccaacacggtttaaagtattcttctattgtaacgccacggcattcatggcatcgatggtcatggtcatcctactgctgaacaacacaataagcaagtacaggagatctcttctagctatgaagacagcaatggtattggacctgcttggtcttcttggagcatatgctgcaggcagctgcagaaagttaaagacatctgcatacatttttgcactcttcattgccgtgttcatctacattgtaatccatgtgttgctgtcattcgataggtgtctttactaggttaaaaa

SEQ ID NO: 14999 - DNA, 229 bp, Setaria italica
  Peptide Sequence Number=SeqID_80973
cgacggaaggaggacgaggaggaggaagaagaagtggagtagcagcagatctaatgcatgcgcaactgccggagagagatgcgtgctacgctttagatcgagcggttggcggcacggggagcagtgcacgcggaatgcatgcgcaactacaggcagaggcaacaggggagatcgagcagtgcacgcgcagcaacggcaggcggggacggtggtgaggcgcgcgcgtccg

SEQ ID NO: 15000 - DNA, 199 bp, Setaria italica
  Peptide Sequence Number=SeqID_80974
ccggcgaagagtaggtagtcgaagttgagggtgacggcgatgacggcgaccatgcggcgcgcgtcggggaggcggcccgtgaggagcacgaggatctcgtaggaccaccactcgaggcatgtgttgaggcagcaggggagatcgagcagtgcacgcgcagcaacggcaggcggggacggtggtgaggcgcgcgcgtccg

SEQ ID NO: 15001 - DNA, 453 bp, Setaria italica
  Peptide Sequence Number=SeqID_80975
gggctgcgggtggtacatgcgcgcccagggacgccgcgccgccagcatgacaagcccgcccgccacgccggcgatcgcgccgccggcaatggagaccctggcggcgcggcgcgcgagggtcgcgtccccggcgcccagctcgttggagacgcgcacggaggcgctgacggagagcgagagcatgccggcgaagagtaggtagtcgaagttgagggtgacggcgatgacggcgaccatgcggcgcgcgtcggggaggcggcccgtgaggagcacgaggatctcgtaggaccaccactcgaggcatgtgttgaggcagcaggggagcgccagccggagcagcccaagccaggtcagcgtgctgctgcaggtggtggtggtggtgctcctacggcggcctgcttggagctcgtgggcagaacgtaggcggcgatcatggcggcgacggcgaggtcg

SEQ ID NO: 15002 - DNA, 238 bp, Setaria italica
  Peptide Sequence Number=SeqID_80976
ttcatccatccatgtgcctttaacaattccatccacatactgtacacaattacagttactgcacagcacaataatgttacatactatttttaactcttgttattacttgttggagtagtaaaaatagatccaaccaccgcctgcatctgtctcttttcacgaacgtgtggactgactagcaggagcagattattggtgggagatatatagataagtgatgctatcaagcattaaagat

SEQ ID NO: 15003 - DNA, 1266 bp, Setaria italica
  Peptide Sequence Number=SeqID_80977
tggccgtccaccatcctcacctcctcgacttctcgccgcctcccaacacggtggccatggagccgcccccaccctccttcgaccacggccacctcctcgcgctccatgtcgacggcaccgacatgaccgtaggaggtggaggaggcgtcgtccctactcatcaccgtgtcctcgccgccgacgacacggcagcgtggccgcaggccgcggtctccctctccctgtacaactacaacgcggcgggagggccgtcgtcgctgttcggccatcatcagcaccagttcgccgtgcctccggcggcggcggtgtcgtcgctggcgccgacgtcgagcatgcagcggccgttccagctgaggagctccaagtacctggtccctgtgcaggagttgctcagcgagttctgcagcctcgaaggggacttattgcacgccatgaacggcggcgtcaacaagagagctctgaatggaggcaataagtgggacgacgtggagacgtcgtcgtcctcgggcctttgggggcatccgtctctgagctccatggatctcttggagcttgagaggatgaaagcaaggctattgtccatggttgaagaggtggacaggcggtaccggcggtaccgggagcagatgagggcggtggaggtgtcgttcgaggcggtggccggagccggggcgtcgcaggtgtacacgaggctggccctgcgcgccatgtcgcgccacttccggtgcctgcgtgacgcgctggtggcgcaggtgcgcgcgctcaggaaggccatgggggagagggacggcagcgcgtcgtcgccggccggcgccaccaaaggcgacacgccgcggctcaaggtgctggaccagtgcctccggcagcagcgggcgttccagcagccgggcaccatcgagaactacccatggcggccgcagcgcggcctgccggagcgcgccgtcgccgtcctccgcgcctggctcttcgagcacttcctccacccgtatccaaatgacgtggacaagcacatccttgcgcggcagacagggttatcgagaagccaggtttccaattggttcatcaacgcaagggtgcggctgtggaagccaatgatcgaggacatgtacacggaagaagtgaagcagcaatcggaggcggctcaaaaccctagcggtggcggcgccggagccggagccggagccgtcaaacccgagcagcaaagcacaacaacgataggcgaaagtgccttccgaataaccagcgccgggaacaaccctacgaccg

SEQ ID NO: 15004 - DNA, 1050 bp, Setaria italica
  Peptide Sequence Number=SeqID_80978
cgcggcctgccggagcgcgccgtcgccgtcctccgcgcctggctcttcgagcacttcctccacccgtatccaaatgacgtggacaagcacatccttgcgcggcagacagggttatcgagaagccaggtgattcattcattcgttgctttatttgctacataacacaagttcatccatccatgtgcctttaacaattccatccacatactgtacacaattacagttactgcacagcacaataatgttacatactatttttaactcttgttattacttgttggagtagtaaaaatagatccaaccaccgcctgcatctgtctcttttcacgaacgtgtggactgactacgaggatcgatcaatgtcactccacatcatctttaatgcttgatagcatcccttatctatatatctcccaccaataatctgctcctgctagctatagcatactccttttctttaattttcacaaaaatggagacgaataatgcaagtaaataatttttcttaccttttgtcactaggtttccaattggttcatcaacgcaagggtgcggctgtggaagccaatgatcgaggacatgtacacggaagaagtgaagcagcaatcggaggcggctcaaaaccctagcggtggcggcgccggagccggagccggagccgtcaaacccgagcagcaaagcacaacaacgataggcgaaagtgccttccgaataaccagcgccgggaacaaccctacgacgacctccatcaacgttaccgacggcggcgatcaccatcatctgttgggcagctatccaagcttgcatgggagtgtgtcgcttaccctagggctccagcagcagccgttcgcgtcgccgatgatgatgatgctgcatggtgaagagacggaagagccggtgctgccatacatagacctcacagcaggttctcagttcctgcatgatttggcagggtagctgctccagctagccagtagtcaagtgaagaactgaatgcacagagtagtcatgaaaaagactctgctgtatatcgatcgatcattcaattat

SEQ ID NO: 15005 - DNA, 699 bp, Setaria italica
  misc_feature (7)..(7): n is a, c, g, or t
  Peptide Sequence Number=SeqID_80979
aaaaaanaaaaaaagaaaaacttaaaaagaaaacaaaataaagggaaagtaagtaagtacgacttaaccctaagggactaccaagatgtctcttttcacgaacgtgtggactgactacgaggatcgatcaatgtcactccacatcatctttaatgcttgatagcatcacttatctatatatctcccaccaataatctgctcctgctagcttttgtcactaggtttccaattggttcatcaacgcaagggtgcggctgtggaagccaatgatcgaggacatgtacacggaagaagtgaagcagcaatcggaggcggctcaaaaccctagcggtggcggcgccggagccggagccggagccgtcaaacccgagcagcaaagcacaacaacgataggcgaaagtgccttccgaataaccagcgccgggaacaacccctagggctccagcagcagccgttcgcgtcgccgatgatgatgatgctgcatggtgaagagacggaagagccggtgctgccatacatagacctcacagcaggttctcagttcctgcatgatttggcagggtagctgctccagctagccagtagtcaagtgaagaactgaatgcacagagtagtcatgaaaaagaactctgctgtatatcgatcgatcattcaattattcacgggtccgtaagagattttaattggcaaacccaatta

SEQ ID NO: 15006 - DNA, 501 bp, Setaria italica
  Peptide Sequence Number=SeqID_80980
atggccgtcctcgtgccctcgctctcggaagagtcggaactgcacgcggcatgatgtcaccggcatcacaaagggcatttctttctcgggaaccctgaatgcctcatgtgaccataaaccttttactcacgcagtcagattagtagcaaatcaaagcagatgattctcggtccgagttgtgactgtgggagacttttgagttgaatgaataaaaagaagggcatggagggcggccaaagtgaaagtgttaaaggtcccggtcccggcatggtgttctggagcaggtcatgctccaggccctacacatccatgagccccggatttctcgctacaaatctcatcattcgagggcatttcagtcaagcagttcacgtgcacgcctccgcattggagtaatgctgctagtgtactatactgtgtgaacatagttgctgaagtacctgtttaattaatttcagacactgcaactctgcggggttagtataattgaattaacaagca

SEQ ID NO: 15007 - DNA, 601 bp, Setaria italica
  Peptide Sequence Number=SeqID_80981
ggaagtggtgcagtagtcccgggtcctgatgtagcttttgaaggcatctgaaagttggccatgagcatagaagaaatcaccaatgtcattataacccattctgatgctttctttgatcaggttagttctgtagccgttgagctcgttctcgagcttctccttgcgctgctcggcgcggcgggcgacggtgtcgacccaggcctggtcgagcccgtaccgagggccgaggcggccgttgattttgacggcgacgtcgcggtggagctgcacgtcctcccccctcttgatctcgtcgtacgccatccgcagcgcctcgagctgcatcgcctccaccccgcaccggtccgcgatgaagatgaggcgcgccaggcgggtccgcccggagtactgcgcggcgtacgcctccacgtccagctgctccgcggagaagggcgccggggacgcctcctccccgccgcccaggccgttcgcaatcgcggccgccgccgcggcggggacctcgccctcgacgtccatgaagcgggtggggatcggcgctggggctagggtttggagcaaaaccctagacgagggggagtgggagcagatggagaagaagcgg

SEQ ID NO: 15008 - DNA, 570 bp, Setaria italica
  Peptide Sequence Number=SeqID_80982
aattcctgtctcaacaaacttacgagcagcaatttgtatttcttgtttccaagttggctaatcctgcagctgcacgcagcttcgcgacaatgataggatccaaagagtctggggtctgctctgctttactgacatagtttgtaacatgtgcaaactgccccagctcaatgctaaccagaatcacattcatgcacatctgaactatatgcttggaagtggtgcagtagtcccgggtcctgatgtagcttttgaaggcatctgaaagttggccatgagcatagaagaaatcaccaatgtcattataacccattctgatgctttctttgatcaggttagttctgtagccgttgagctcgttctcgagcttctccttgcgctgctcggcgcggcgggcgacggtgtcgacccaggcctggtcgagcccgtaccgagggccgaggcggccgttgattttgacggcgacgtcgcggtggagctgcacgtcctcccccctcttgatctcgtttcgttacgtcctaatccccttactatgcatcgttcgttagttcttttgtttctttattttcttta

SEQ ID NO: 15009 - DNA, 1720 bp, Setaria italica
  Peptide Sequence Number=SeqID_80983
gctcaatctcagctccccttccaagcatcccccatctctccccaatctctccaatcgcgcgagagcgcacgcaagcccgggcccctctcctccccgccaaaccctaaccctagcccaaaccgaccgaggggtaccgggccgcgggtggcgggaggcatggcggacacggcgcgcgacggcgtggacgccttcgcggacgaggtggagcccacgctcaccatcggcgagtacatcgagggcatcgaggccgaggagctggaggtggatttggtgctgggcggggacgacggcaaggagtgcacctacgccggcgggtacctcaagcgacaagccgtcttctcctgcctcacctgcgtgcccgatggagtcgccggggtttgcaccgcctgcagcctcgcatgccacgacggacatgagattgttgaactttggacaaagagaaggtttcgttgtgactgtgggaactcaaagtttggcggtcacctctgcaaactctgccctgagaaagattctgagaatccagaaaattgttataaccataacttcaaaggttcatattgcacatgtggaaggccgtatcctgatccagaagctaaagagcaagttgaaatgatacaatgctgtatttgtgaggactggtttcatgaggatcatattggtcttaactctattgaagagataccgcgagatgaggaaggggagccactctatgaggatttcatatgccataaatgctcacctgtttgtcatttcttgaaactgtatcctcaaacaatctgggcttctggtaagcagaaattggcatcacaaactgatacaagtaattcaactgtgatggaaggaggaccttcagatcaggctaacattgagaaacatgaaaatggtgatcttgttgatcatatgtgtggtgagaagacctccatggagaatggtactgcaaaagatattgctgttcctgagaaggccaatttagggagcagttctggagacatctgcaagctaggaatggatgtaaatacgatgccagctgttacagagagaaatatgccctttttcatgtctaaaggctggagggatacactatgcaggtgcgaaacatgcactaacttctatgcacaacagggtattgcatatcttgttgacaaggaggactctattgaggagtatgagaagattgccaagcagaagagggagaagaagttggagcagcaggaaggagctgagacaaacttcctgaattcgcttaaccatgttcagaagatagagatcttgagtggcattaatgacatgaagaatgagtttcagtcctttttggaatcttttgactcgtcaaaaccagtcacgtctgaagatatccgctctgttttcgagaatctggcgaaaaagaagaaacagaggttatcttagagcttgtgccacctcagcccccccgctaaggcaagcagtctgctgctgggtagcgtattgctggttgggtaccttcagataccctgagtaatgtcatcttaggtgctactggacttaacagtaatgtgttctagcaggaacatggtgatgtttaatgtaccgaagccactcgcagtagatttggatggcccagctggcaagcaacctgttgctcagctgggccatccaaatctactgcgagtggcttcggtacactatgcaggtgcgaaacatgcactaacttctatgcaataccctgttgtgcatagaagtt

SEQ ID NO: 15010 - DNA, 1338 bp, Setaria italica
  Peptide Sequence Number=SeqID_80984
accaagacttactacacatgagactgcagtcgcacaacatcttagctgcatgtttctatcttctggtgattgggcgggaacatagaagcagcagacatcctcatccctattacttctgcaaagaaattatctgattccttcctcacaatagtgaatgggtcatattccctgtgggagcgagaattccttccctcggagtgatatgattcttttacgaccttactaccctccagacgcgacggcgagggcggcggtggcggcgccgcgtgggacgccacagcgtcgcggctgtacgcgtgggacccttcggcgtgcggcgcccaccggataggcgtgcggattagggacccggaggtggagaatgatgggggggaggtcgccgtggaagccgccgtcccttccgagattttgatgccagagactgatcttggttacgtggtcactcatgtatcacttaacactgatggttcatcactgctacttgttggatcacaccatcttagtgtcctgtacgtacatgagagggtgtctgaagacggtgatacaatcatatgcaggactgcaccagttgcttctcagatcctacccagtaacagtgacggcataaaagttctgcaggcatcttggcatccttttagcaacaaccattttgcagttttgacatcagatgccgttttcaggttatttgatctgtcatccgatttagagcagccagagcaggaattttatttgcagccaatactacctgggaaatgtcagaatgcttcggcgatttgtccagtggcattctcttatgggagtgatcatctatgggatagattttcgcttttcatcttattcagtgatggttcaatttttgtgctctgtcctgttgttccatttggaagtgattatagcaagaaacatatccaagaaatatatgaagatgttaatgcatttggattgaaatcttcaaatccaaatgttgtcactaactcacatttggccatagcttggttggaggcaacatttcctgacttgttacatcaatcaacagaaaccagtttgctgatgtcaaaagctcatccatatgcgcctgtagatgattctctaactttacaggggcctctttgtagggtttgtgaggaaaacaatgaatctgaagccaagactagcacttgtgaaggcaaagctgtaggttttatgtacagttctgctggcaaagattcagttctcgtgactgcctggggtagtggacagctccaggttgatgcacttgctgatgaaattcaaccacagtggaacattgggattcctactcgccttaatgtcgattcacatggaaaataaagagtgttg

SEQ ID NO: 15011 - DNA, 564 bp, Setaria italica
  Peptide Sequence Number=SeqID_80985
tttttagaagcaaccatatgttcttgtgatttataactttataaccactcaccgggctaacaaataatccaatagcacagtaaattctaaggcagatacaaatgcaggaacaagtatatttcccaaacagtagcaatctttgcacgaataatcaaaaccaaaaccggccactaatctccaatcagaaaccaccaagagaagggagctggaccgacgactccaatcatcagtacttgacccagcagcggtcgtcggtgccaagaaagctgaagccgcccggcgtcgtcgggaccgggatgctcaccgcgcaccaaaccctcggcttctgccgtatcttgatggtcccgaacacgtacctcacccgcacgttgacgctcagctccaggctcagcatcgccgcacccttgacctcgttctcgagctccgtcgacacgtcgccggggacggcgacgctcttgccgtcgaactcgaggcgcacggcctgggcggtcttcctgcgctggtagaactcggagggggacgccgcggcggcggccgggctgaggacggcgccgcggaagcgga

SEQ ID NO: 15012 - DNA, 212 bp, Setaria italica
  Peptide Sequence Number=SeqID_80986
gtgatacagagttatccagataaaccaccaactgttcgatttcagactcgaatcaatatgacatgtgtgaaccaagaaactggattggtactaatgcatttattttcatacatgccaacttcttaggctgtttataaatgatgttaggcctagtacttaactagcaacctttctaggttgacccgaggctgtttccaagcattggaaaaatt

SEQ ID NO: 15013 - DNA, 1745 bp, Setaria italica
  misc_feature (1731)..(1745): n is a, c, g, or t
  Peptide Sequence Number=SeqID_80987
tttgtcctcatccatccaaaattccaaatcgcaaaaaatccccttcaccatgaagctccgattgcggtctatggaggcgcgcggcggcgccgccgccgtcgagacccaccgcgtggatctgccgcccacggccacgctgggcgacgtgaagaccctcctcgccgcgaagctctccgcgttgcccgtccccgccgagtccgtgcgcctctccctcaaccgcagcgaggagcttgtctcgcccgaccccgccgccacgctccccgccctcggcctcgcgtccggcgacctcgtcttcttcgccctgtctcctctcacagccctcgcgccgccggctcaggccctgccccggaaccctagcccgggttctggctccgttccgaccgcgatggctgtcgacggcggcaaaggatcagagaagcccagcaccggaggctcctcgctgcaggcgcgagctgtggtcgtgaaccctagcgttccagccgcatccagtcctgcggatgtggtgatggcggagaccgtcgatgccacgaagggctggtcgagttttgtgcttagggatctcaagcgggagatggggaacgtcgttggcgcagagggaaccgctggaggtcgtctggttgcagccctacatgcagctttgcttgagttcggcttccacatcactaatccgatggggtcacgcctctctctgccaccggactggccgccagttgcttcgaagccactggccatcaagtataccataccggagctttcaccgatgttacatgtggccgaggaggggaaggtggcagtgcttaacttctccttgatgccaaatttcgtgatagtatacggttatgtgcctggggcgcagtctgaggtgcgccgattgtgcttggagctgccaaggcttgagcctttgctgtatctggatagtgatcagctgagtgcagtgcaggagagggggattcttgatctgtggacagtgctgaaggatgagatgtgcctgccactgatgatatctttatgccagctgaatggtttgcgcttgcccccatgcttgatggctctgcctgctgatctgaagagtaaggtcttggatcttttacctggggacgatcttgcaagggttgagtgcacttgcaaggaaatgagaaaccttgcagcagatgatagtctttggaagaagtttgtacagttcagaaattctggtgagggtcctagagggtccatgagcgcgaaggccatatttgcagaagcatggcaggccaataagaagcggcagaagaggccccatccaaccttttggaactatggctggggaaacaatccttacagccacccacttaggctgccattgatcggtggggactcagacaggctaccgtttattgggaatcagggttctgttgggcgtaactttggaaatcaacgaaggaacatcgtgccaaactgcattcttgatggccaccgccataacttcctttgaagccatttcgggttttacttgtatgctaaaagtattttgtaagaagcggtgcgtagacggatagaccgtcttgttcatatctccaagttgcacgcttatgcttttgcaaagcactctcaccctcatcctatgcatttgcagagcactcttatccttatattgccttagtatcttagatcctgtcttttctgttttttatgataccaatgtaatccctgccctagtaataaagtacccttgttctattctcaaaaaaaaannnnnnnnnnnnnnn

SEQ ID NO: 15014 - DNA, 786 bp, Setaria italica
  Peptide Sequence Number=SeqID_80988
cgtcaatgatcggccgtcccgcgcccatgccgtactgggcatttgggttccaccaatgcaggtggggggtacaagaatacggtgggggttgagggtgttgtggagggctaccggaatgcccagataccccttgacgtgatctggaatgatgacgatcacatggatgctgccaaggacttcacactcgaccctgtcaactatccacggccgaagctgctagcattcctcgacaagatccatgcacgggggatgaagtatattgtcctcatcgaccctggcatcgctgtgaacaactcctatggtgtctaccagcgtggcatggcccgtgacatcttcatcaagctggatgggcagccataccttgcccaggtctggcctggccctgtctacttcccggacttcctcaacccaaacggtgtgtcatggtggatcgacgaggtgcggaggtttcatgaccttgtcccggtggatggcctctggatcgacatgaatgaagcatccaacttctgcactggcaagtgcacaatcccaaagaagcaccagtgcccgattcctgactcgaagacaccatgggtgtgctgcctggattgcaagaacctcacaaacaccagatgggatgagccgccttacaagatcaatgcctcgggacagaccgctcggctcggcttcaacaccattgcaacaagtgccagtcactacaatggcatcctggagtacaatgcacacagcctgtatgggttctcgcaggccattgccacgcacaaggccctgcagggctccagggtt

SEQ ID NO: 15015 - DNA, 897 bp, Setaria italica
  Peptide Sequence Number=SeqID_80989
aagggaaggtggtcatcgacgtgtcgtcctcggctgactacgacgcgctggcctcggggaagcagaccaccaacacgacgacgtcctcgtcctcgtcggcggcgaggtcgctggtggccagcgacgtgcgcggggccgtggaggcgctgacggtgtacaagtactcggagctggagaaggccaccgcggggttcgccgaggagcgccaggtgccgggcacgtccgtgtaccgggccgtcatcaacggcgacgcggcggcggtgaagcgggtggtcggcgacgtcagcggccaggtgggcatcctgatgcgcgtcaaccactcctgcctcgtccgcctctcgggcctctgcgtccaccgcggcgacacctacctcgtcttcgagttcgccgagaacggcgcgctcagcgactggctccacggacgcggcggcggcggcggcagcggcagcaccctccggtggaggcagcgcgtgcaggtggcgttcgacgtcgccgacgggctcaactacctccaccactacacgaacccgccgtgcgtgcacaagaacctcaagagcagcaacgtcctcctcgacggcgacctccgcgccaaggtgtccagcttcgggctcgcgcgcgcggtcgccgcggccgacggcggcgcgcagctcacgcgccacgtcgttggcacgcaggggtacctccgcccccgagtacctcgagcacggcctcatcactcccaagctcgacgtgttcgccttcggggtcatcctcctcgagctgctgtccgggaaggaggccgcgttcgcggacgccgagacgggcgaggagacgctgctgtgggaggccgcggaggaggcgttggtggcggacggcggcgaggacgtggaccgggccaaggtgcgcgcgttcgtagga

SEQ ID NO: 15016 - DNA, 365 bp, Setaria italica
  Peptide Sequence Number=SeqID_80990
ctgggcaccggcaccgaccgcgcgcgccgcaaggccgcgtcgctcggcagggcgtgcaggcggtgggcggccgccggcgcggagcagagcaccaccgtgtgccccacctccggcgccgcgccggcgctcacgatggcgtcgtgaattacactacacgattcgtagcagaaactacatttttttttccaccacgattcttgtacaaaatttgttcctggtcattgaggccttccacgattctttggcccgtactgcgggcagtgagtaattgatcaactgtaaatacaagacactcttgttctcttttttcatcaaacattgtctcgagaaataaagagaaagaaacaaataacactgttcaaaaa

SEQ ID NO: 15017 - DNA, 1640 bp, Setaria italica
  Peptide Sequence Number=SeqID_80991
tttttttttttttttttttttttagttttgtagatacctaacctcaccttcccgtctcatctccctctagaggggtgcaacacgatgataagtcgaaaacggcaagataaagtacagcgatcacccgatccaatcatgaaataccagtccccctcttacaagatttggggcaaagttaacagttcacatgaccatttcaatggtcgaggattattatcacgctaggtagatggtacacctgctgcccaactcgacaggctttgctggcaagctgctgagcttaaagattgccaggtaggataatcaacagcattgtcaccttccatatcgtgcagctaacaactcttgttccaattcttccttgtttggttatggaactagaatgccttcttctcatatgagaccagcccatggattcctccttcaacctgggcagcgccggtcctcacctctaatctgagagtctctgatcgcaaaagatcatgagctgactgcagagaggatgcaccaagatcttggaatccttgcttaactgcttgcattgtgtaaggaatgaacctcagaacggaacctttgtcggctactgctccaacaactccctgcgcaactttgagcttgagagtatcaccaaggtaccttgcatcactcccctttgtcatcgcttccagagatcccatgcctctgtactttttgactcggcggccgtccttgtactcataagtaccaggagcttcatgactgccggccaaaaagcttcccatcataacagtggatgcccccagcgacagagctttcacaatatgtccagagtttgaaattcccccatcagcaataaccggtacattgtgatcattggcataagatgaaaccttatacactgctgtagcctgtccccttccaacagcacaaacttcctgggtagtgcaaattgagccggaccccattccaacacgcaatccatccacaccagcctgaatcaaattctgcgcctgcgcaattgtcaccacattgcctccgatcaaatccacctcaggatacatcttcttcgcatacttgatcatatcaagctggtaaatggagttcccctgcgaactatcaatgacgatagcatttgcccccgccttaactagctgctccagccttcgcttgtcatcctcacgggtcccaatggaggccgcgactataaacttcccatccgctcccagagacggcttgcctagcttgggatagctccggatgcgctcgacatccttggcggtgatcaggtcaataacctcgccgtcatcggatatgagaggggcgcaatccaaaccttcgtcagcaaggaaggcagcggcttgttcgaagtcaaaggaggcggaggctgagcggggagcgggcagcatgtattccgacacaggggcaggaacctcgcgagaagccgcatcggccgcaactgcgacgccgacgagcctggtagagcgaatccccgagctcggtgacgagggcgtattcatagccagcgaaatcgttgagcgtcggggcggatgacggggcgaagaagggaacggatgacacgaaggggaggcggcgggacttggcggcgcggacgatggcggcctgggcgtcgggctcggtgttgcagtgaacgacggcggcgg

SEQ ID NO: 15018 - DNA, 989 bp, Setaria italica
  Peptide Sequence Number=SeqID_80992
tttgttttttttttttttttgtcaaagaaagcaagaaagcctcatcagtaaaaagtagaagccacatcgtagatcgatggagtagagtgtgggggcaaaggaaagaaatgaaaagcggaaacccatgatgcaaccacatgcagtagaacgaatctgcacccccactacgtgcgtacaccgacatctcaccaaacttttccactctgtcagtgtccgccggcctgctctgtgctctccaccaccacacatcacctatcagctttctcaccaaacccaggatccaaccaccgcaaccacgacggcggcgacgacccacccgccgccggtcgtcctcgcaccacccgagctcgccttcgtccccgacgacccggacggggagccgccgccgccgccgacgggcgaggcgggcgcgtcggcgtcgatggtgccgttgccgccgcccgtggtgaggtacacgtcgagcttgacggtggcgtcggcgccgctcatgctggacgtcttccagagcacgtacccgctggccatcctgaactttcccgtgcctcccacgacggcgagctccctgacgtcggcgtccgtgtcgtcccgccccagcacggcgatggtgctgccgttgtggtcccccgaggtgagcagcaggttggcgcacaccatcagcgccgcgcccgactgcgacgacagcatgtagatgccctgcatccgccccaccgcggccgacgacggcgacgaggcctcggtcagcgcgtcgtccaccacggtggtgtcgccgaaggccatgcccagcgcaggggccgtcgtcgacccggggcccttgatcaccttcaccgccgtcgggttgctgcccgacacgatgtcgtgcatgaagaagctcaggtgcgtcgtcgtgccgtcgtcggccgcctctgccgccaacaacacggagaggaggaggaggaggaggacggccttggcagccatggtggatggatgggtgggtgttcctttttttg

SEQ ID NO: 15019 - DNA, 208 bp, Setaria italica
  Peptide Sequence Number=SeqID_80993
aaaggatgttgctaaatgatatcaagtccacagcagcattgaaaagtgtgagagaaatgcaagcgctgttccagtgaatgcgctgagatcatcgtttatcctttggtctggattgtcaattattgattgagactgaatcttatagaaagttctgttattgaaataacgcttcatgtaataacttgtcatccaagatcgccatctcaat

SEQ ID NO: 15020 - DNA, 253 bp, Setaria italica
  misc_feature (245)..(245): n is a, c, g, or t
  Peptide Sequence Number=SeqID_80994
gcggtaggagaggaagtgggcggcggcaggggacgccggcgccttggcggccggcgaggaggagagggagacggccacggccgtgacggcggccatggctcgcgaaaatcagctgttgaatgcgcggggaggagaagggaagggagggaagagcaggaagctgctttaaaacaactaaggaagtcattggtcattagagcaaaacccatgccaagcttctatcaagaacggcccccacaaggttnaacttaag

SEQ ID NO: 15021 - DNA, 1424 bp, Setaria italica
  Peptide Sequence Number=SeqID_80995
atgacggtggcgcgagccagctgcatcagttatattacgtactgtataattattcttctcatctatttgaattcacatgtgactccagctgccaacctatgtctatttattctatattaatatcttttctgcagtccaatcgtgaaagaggctctggaaatttctacagacgaagaatcagatgttgttatatgccatccaaatggtgacagcaacactgatggatgcgacgaagccactagtggcaatcatgatgatgatagcccggaagaccaagtgactagttctgtgaaggacccgaatgtggaaggggacacacaggaagacaagtgtgtaaatcaagaatcattgaagttgattgatcaagagcagtctgctccccccaagtccccagcgaagtctgcaagttctggatcagagaggcctaaacgtgttgttccccaaccattctccctttctactcaaagaaggtcttctggaggaaatggtggtgtgtctagtccatccatcaataaggaaaaatccggtgataaaagtagcatctctccagcaagcatgacaaagaagagtacaccagtggcacctaggaagactctgcagcctgagcagacatttcaccctcaggaagaggactcgtgttctgtgacttcctcaactacaacatccacaagagctggcaggactaagacaactgtccctgttcccccttcatttgtgtgtgctaaccgtgctgacaagaggagggagttctacacaaaactagaagagaaacataaggctttggaagcagagaaggatgaggctgaggcaaggaaaaaggaagagcaagaagctgctttaaaacaactaaggaagtcattggtcattagagcaaaacccatgccaagcttctatcaagaaggccccccaccaaaggttgaacttaagaaggtgcctcctactcgtgccaaatcaccaaagtttacaagttcaaggagaaagagttgcagtgatacagcacagacaccagaggggaaaaacactagtgcatcatctgcccggacgcatcgtcacagcattggaagttctaaagatgctaatagagtacaatgctcgctgaagaatggtgtggcgactaaaaccagagctgttaagcctgagctgaaggccctttgaagaacatttagcagccaagctctgcgattgtcgcagtacaaacctaattatctaactcttagccattttcatttccatggcattttgctcttaatttacacccgacatctccaccaaaagaaggctgtagggccaaggccggtgcgcgctgctggaccttatccattttctttcattcaccctgtacttgtaagaactctgttgctgggaccatgtgatgctcgacgttgtaaattacttgagggtctttgtaaggagtctgtcagtcg

SEQ ID NO: 15022 - DNA, 240 bp, Setaria italica
  Peptide Sequence Number=SeqID_80996
gggccccgcgtcgggaagcctgcgcggcggcgatcccgcgcgtcgcggcgcgcaccggtgacgctgctgaacacggacacggccaacttccgcgccatggtgcagcagttcacgggcataccggcgcccccccgccggcgcgttcggtggccccgtcatcaacttcgccggcgactacggcttcccgccgtcctccggcgtcatgtccttcgctgagacacgcaacaacctccaccggag

SEQ ID NO: 15023 - DNA, 249 bp, Setaria italica
  Peptide Sequence Number=SeqID_80997
aggagccaagcagccgaacgcatcgagccacatcgatccaacacacagctgtgaacactgaacacacgcatggcgagcgggggcggcaaggcgaaggcgtcgtcgtgggcggcggcgatgagcgtgggcacggtggaggcgctcaaggaccaggcggggctctgccgctggaactacgcgttccgctcggcccagcagcgcgccaggggcgccgttgctgggactggctccggcagcaacgcgcacgcg

SEQ ID NO: 15024 - DNA, 825 bp, Setaria italica
  Peptide Sequence Number=SeqID_80998
ccccgctccagaaggcgcaacagccggcgccgtccgcggccggcatgcgcgccgtgttcctcacccctcccggcgccaagcgcgagtgcaccggcaccggcgtgttcatcccccgccaggccggcgcccccaccgagcccaggaagaagccagcctgctccaccgtccttctcccggcgcgcgtcgtgcaggcgctcaatctcaacgtcgaggacctcggggcccgtcccatctaccctggcggcttcgctcttgatcacgatgcactggtgagccggagcaacgcactgctggcgagccgttcgtcccagctccccggcggcgccgcacgcgaggtgaatctcccgcaggaatggacgtattgaagcgccggttcgccgtcggtgcaaagatgattaacgggtcatatttaaggcaaaattactattggtattgctagcgctaggtaggtgttagggtagaattaggaggcagcggtggcagcattatgcatgaagcatcagcgttaggtgttcttttgtgtgggtgatatatattggttattttggatgatggatgggttggtgatggatgggagccgatgaacaagagcgagatccatggctttcgcaggtcgttgaggggggaggaggaacaataagtgggtgcttttggagggtttggcagtatgttagctgcttgtggtacgatgatgattcccaagagaaatcatcagcagtccagtcagtttgcgaagaaagatgtgtcactgtaagcaagaaagtaataagagctccatatttccttaaatttttaaaaaaaaaaaaaaacaaaaaaaaactgaaa

SEQ ID NO: 15025 - DNA, 243 bp, Setaria italica
  Peptide Sequence Number=SeqID_80999
atgacatgtttggccacgaggttgtggagaaaataaaggaacaatattgtgatgcatttctgacagcacactttgaggtccctggagaaatgttctctttggcaatggaagcaaaaccgaggggaatgggagttgttggatccactcagaacatcttggatttcatcaaggatcatctgaagggtgctctggacagaaatgtagatgaacatcttcagtttgtgttaaggaacagaatcaggc

SEQ ID NO: 15026 - DNA, 262 bp, Setaria italica
  Peptide Sequence Number=SeqID_81000
cttcacagaaccgatgcggccaatcctctggttccacaggcttggtccctaatcctggtgccctgtccctggatccaacattttcctcatcctgccaatctgcaacataggttgcgacacgcccagaaaacttgtccttgaacacctcccaaacttggtacttgtagtggttgatcagcatcactccctgaccaatattcacatacctcaccccttctttcaggtggaaatggtgcaccacattgataagtgatgggtttaa

SEQ ID NO: 15027 - DNA, 721 bp, Setaria italica
  Peptide Sequence Number=SeqID_81001
ctctctcctcgcgaagggaggcgaaggcgataaccaccgacatgctcccccacatgccctagcgatccgttcccatttgtagacccaatccaaggcccgagcaatcaccaaacctagccgtgtagatttccaccctcacatggaggaaaaatccaaccttggcatgtgacctctccttaaatcccccgcaggaaccaatccatcaatcccagaggggagagaagaacagagcaatcccgttgctcctcatcttcgccttcctgttggcgtttctcctctgttcttcggcctgcgcggccgcataaacctccgctaaagctcctctgtcgcgcccaattcgtcggccatttccccaggaatccccaaaggcgagagccccccacgccaagatccaatccttcgagttattcggttccaatccgtgtagatttccccggaaagctcccagaatagtagccggaattggaaaaggtttccatttctgattggtcgacggtgcgaattcgtcgagcctcgccgcggttttttccaggaagggcaggccgtccgtacggttacggttcttgatccggggaggaatcaccgccggcgaaaggcaatgcagccggacccgcaaggcccgggcaggggaaaggcgggcggcgccaatgcgcacgcccggctgccgccgccggtgacgacggggtcggcggggcggccggcgtcggtgctgccgcacaag

SEQ ID NO: 15028 - DNA, 1668 bp, Setaria italica
  Peptide Sequence Number=SeqID_81002
ctgcagaagctgcggtggtactgccagatgtgccagaagcagtgccgcgacgagaacgggttcaagtgccactgcatgtcggagtcgcaccagcggcagatgcaggtgttcggcatggcgcccgagcgcgtcgtggagggcttctccgaggagttcctcgagaccttcctcgccctgatccgccgcgcgcaccgccactcccgcgtcgccgccaccgtcgtctacaacgagtacatcgccgaccggcaccacgtccacatgaactccaccaggtgggccacgctcaccgagttcgtcaagttcctggggcgcgagggctactgcaaggtcgaggacacgcccaaggggtggttcatgacctacatcgaccgtgactcggagcaggccgtcaaggcgcgcctcaagcgcaagaggatcaagtcagacatggctgaggacgagcgccaggagcgcatgatcgctcgccagatcgagcgtgctcagaagtccctagccaaagccaatgatggtgatgaaggtaatgttgccgagggtgagtccgaatctgagtccggcagtgaagaagattattcaggttcggatgatgatggagaggaacgggaggatgactcaaaagaggccaacaaggcaacagggaagattgcgattgctcttcagaagtctgtgccagggccgaaggttaatcctttcgaggataagccaaaggtgaattttggtttcgatgaagaggactctggtgtccgagagaagaaggatgaggtggacaagaagaaggggaaggatgtgaaagcagcagaagcaaggaggtcagcattggatgagcttatgaaggaggaggagaaggccaaggagaggagcaacagaaaggactactggctgtgccctgggattgtggtcaaggtgatgagtaagtcattggctgagaaggggtactacaagcagaaaggggtggtgaagaaagtgattgataaatatgttggggagattgagatgttggagagcaagcatgttctcagggtcgaccaagatgagcttgagactgtgatccctcagattggtgggctggtgcggattgtgaatggggcttatcgggggtcgaaggctaggttgctctcagtggatacagagaaattctgtgcaaaagtgcaggttgagaaaggcctctatgatgggaagattctcagggctgtcgaatatgaggacatttgcaagatttcctcatgatatgattcatttcatttcctggatcatcgctgaagcaaacaagagccatatgatctagggtactagctctgtcacttagatgcctgacagcgtctgtgcttgttattactcgtgatggaatatcttctgttgaaggggttcaatgtgttgatgtttctagttccatgtaactgctgaagggctatgtgtgagacaatggtggtatcatgtgtgtttccttgttactaaaccagaatacctgttattggcaattttgtaatatctggttaacttctatattgctgtatctagtgaatctttcagcagatattttcttggtattttgagcattacctgccaatcagttcttttgataaggttgtcatattattttaacacaaaaaggaaaatggaatacacatactgctggaattgttgtagacttggagtcacgacacgcaaatt

SEQ ID NO: 15029 - DNA, 659 bp, Setaria italica
  Peptide Sequence Number=SeqID_81003
tgcttttttggtttcaattgctgggtggagcattgcaacttctgctgagactgggcctgcatttcagcttgcgatgtcactcgtatcatgcatatacttcctcaatgacaagatgaagaaccttgtcagggcatctgccacagggcttggagtctttgtgggaggctggatcttaggttctttacttgtcccagtcctaccagctttcatcatcccacctacatggtccattgagctccttacttcgctgatggcttatgttttcatgttcttgggttgcactttcctcaagtgaaactttgcaacagtcacccagttggaaatttgttcttgctgacatctccactgcagtccaaacttccgatgggtgagccgacctcacagtgttggtcagagagtatatgatctatgtggaactgtaccttgcgtccttgccccaggatggttcagacttcagatacatcagaaccccaggatagttcagacttcagatacatcagacacatacgtattttaggtgtgtacgtttttgttgtcccctttagccttaaccaagtgtattgattagtgttgtactacccatagctagttgattaactcatatagtacgttggcaaagcaggcaattgttgttttttctacctttacatgtgcgtccc

SEQ ID NO: 15030 - DNA, 820 bp, Setaria italica
  Peptide Sequence Number=SeqID_81004
aaaacctagttccgtaagatgctccaattcatcgcagacatgtactataggaagaaattccattggtttacatatgtaggcacagtgaaaacaatggtaacacaggaaaacctcattgagcccgtaatatggtccaaaattacaacggaaatgcggaagaacaagtttcatagaaccgagaatctgaaaggttcctgcaacccatccagatgcctagtcctctactgagctccgagcagggatgtcctatgggtttagttcgcatttccactactgccagcgaagcatccaaaccatcttgcaagaaagtcttgttctcggctctgttgaaccgcagtgtcagcagggttgttgggctctgcagcaggttctcgcctcccttgcacatgcccagcgtagtaacctgggacttgtgtgttcacagcgttctgctcgacctgggacttgtgtgttcacagcgttctgctcgtcgactgccggacccaagcaggaaggccagcagcagcacgccggtggagtggagcacgcggtggaggttggtgcggaagagcagcagcgggatggcgagcggcaggaagtagtcgagcaccacgcggtacgccagggcgtccgccgccaccacgccggcactgctggccgtcagacccagcagcacgctcaccagcgccccgctcagcgccttccccaccggggtccgcttctccgaccagatgcccagcgcagcggtggtcaggaggcaggtccagttgccccagtggttggacgcggggacgaagggggccacgtcggcaggcggtgggccagtgacgtgggggcggcg

SEQ ID NO: 15031 - DNA, 2701 bp, Setaria italica
  Peptide Sequence Number=SeqID_81005
ggaaagccgggctttcccctcccctttgctgccgcctgccggccgggagaaagggaggaggcgctcgtgggtgcggggggacggactccaggagcccggagggggagggggctctccgaggggaaggcggggagccatggcccggaagcacggctggcagctgccggcccacaccctgcagattgttgcgataacggttttcttccttctggtggtcgcattttatgccttctttgcaccatttctgggaacacaagtcctcgagtatgttgcaatcggtgtttatactcctgtggcacttgcggttttcatcctttacatccgatgcacaagtataaaccctgcagatcctgggattatgtcaaaatttgaggatggctttatcaatgtaccagccaacagtgctggagtcgaaggaatgaattttccccagaaagaaaacaatgctactggaacaaactccccaacgtctacttgtagaagctctctggatgggcattccaatcagagaggttcatctttaggggagacgaacataaatctaggatcacaacagccaaagaaaagatcaagctgttggttgataggtgggcttctgtgtgctatatttgtcaaggaggactgccggaaacctgatgactcagagcaacaagcaaatggtgaagaggctctgttttgcacattatgtaatgctgaggttcgcaagttcagcaaacactgcagaagctgtgacaagtgtgtggatggatttgatcatcattgtcggtggctgaataactgtgttggccggaagaactatttcacgtttctttctctgatggcaatcagtcttatttggcttgcaattgaatttggagcgggcattgctgttattgtactctgctttgtcgataagaatgcatcaagaaatatccaagacaagctggggaatggcttgactcctgctccatttgctgttattgtgggaatatttaccttactttcattggtggcctgcatacctttaggggaacttttcttcttccacataatattgataagaaaggggatcacaacttatgattatgttgttgcaatgagagctatgagtgaggcagctccagaggatgaggaaggagcaaacattatttactccccatcaaattcagcgacaactggcttcagtgtaggaagttcacttggtcttcaccacaagggttcttggtgtacacctccaaggatatttattgatcatgatgaagtgatcccacatttggatcctggaatggtgccttcaactgtggaccctgatgctgctggatatgctgagagagcaaacaaagccaaaaaggcagttaaaatcagtgctcggagccttgcaaagctggataaaaatgaggtaatgaaagctgctgcaaaagctcgggcatcatcctcagttctgcgaccaattgatacccgacgtggtcatgaagctgatgttgtctccagcggcaatgcaagcatcaggagtagcatgagtgtcgactacagtggcacaaaggaatcaaacagtgaaatgagactttctccacttcagaattcatacccccaaagtcttgcaagccaggacgactacgagaccggcacaccaactgcgagcagtttaagtagcccggtccacatccacaagcttgcctctcattctcagttcagtgcagcgcctcaccctccaccacctgagaggcctgcaccggggatgatgcggccacctgttcccaccacacaagggatacctcggccacctgttcccaccacacaaataaccaacccgatgttccagtcagctacatcttatgttcgagagaaccgaagagcttctgttgtctgggatcaagaggctggtcggtacgtgtcggttcctgcccaaacaagaattggacctggcgtcgagcaggcagcaagaaacccacgtttcttggcgaacccaagtggtgagccaagcagccacgggagaagccttgcgcctgggaacacctcatcctcagcgatgccatcagggcaaccatcagagaggctgacatattctgggcaatcgatattcttcggtggccccatactgagcacccctggcatcaacgcccagaggaacgaggcggtcgcaagagcacgccccgagggaagcagagatcccaatgcccagcagcgtgacatccggggcgagaaagcgcggacaggctctttgcctgtgtttgctcccgggacgttccagaggaacccagcgtatgacaagtgacatgctcctgcccttgatgttcgtctgaagtgccatgccattgcgcgggaacgcatacaacctgaagagttgacacttgacaagagttgaaaggctgctcttctggggttgctagacggacggctgtacaagcaggcgttggaatgcggctgcttgcaggagataacgaaagcacaaatatcgctccgtctctgctgacctttttcagtgttgggagagcgatggagcgactgatgtaaaatgccttcgtgttaggaattcttcagatgtttgatgcatgacagataggaagagctaattgtttcctgatgtcaaatgccaatttgcagctgactttgtgtagtgtgctagtgttcatttcagtcaccgttttgtgtgcgccatcgcatcttattcgacatgtaaaaaggttcttccaggtgactccttaggtttgttcttaaaaaa

SEQ ID NO: 15032 - DNA, 286 bp, Setaria italica
  Peptide Sequence Number=SeqID_81006
ctgaacgagtatctttgtgcaaacaaattcagtttctaggtagcatggcagatagctccaactgacagatgtattagatacccaacagcagtgatgaccacaaatccatcttctattcttctgccagatcctcccttaccacttgcgctcgggttagtacttatggtacagaaaaagctggcaagaagctgaaaaccgtactaagcaagatgtggatatgtcaatagcaaccactacaaagggaaccacatgacataacagagctattaatttcagactgcaatta

SEQ ID NO: 15033 - DNA, 475 bp, Setaria italica
  Peptide Sequence Number=SeqID_81007
tgagaagagaaatgttctgagcagcaggatccatggagggaagttccttgtccttgaggctatttcttttgccagcgctataaccaaacaattcctctatcatgtcttcattcacatgaaaagaaccgaatttgatatcatgccatgccattgattgatcaggattagcaagaactttgtcccaatagaaaggtcgaagtttgggtcttgggggattaacttcggcttcagatgattcgctggtctgctcgcctgcagatgatccttcagaacgacttgactcaacaggtgacagctgagcaagccttgcttttgaacctttggggggtccaggtgggggaggaggagccttcttgataggaggtggcaaaggtggaggtggcggaggcggtggcattggtttaggagcatcacttgtggcgttgttctctagtgttcctccaatcacttgtgaagttggtgtggttgttcttgt

SEQ ID NO: 15034 - DNA, 686 bp, Setaria italica
  Peptide Sequence Number=SeqID_81008
aatcgtttttgtagttctgtacatagatgttagtgatgagaacagtttggagatgcagttttttcaagaccaagagcaatagatatattaacgagcggaattacaatttggaggtgcctgtttgtcaatttcccccttcgcgtgcatattgttctcctgtaaactcagtaacatgccaggctacattcttagcttttgctttcctccctctcataccggaacaccccaaaatcacctcattcttgcttcgccactgatggaatatgcgcccagctgagctgcttcctgcagtatgaacaccatttgccttccagttcagttcatgactcttgacttcaccaaagtccaggtgttgaactcatccatccttagcgcaaacgaacttgaacttggttttccacctccaccatatgcctttgcaatctctgctgtattagttgtattgtcagtagtcctcaagcaaacctttaggatacctcgttgcatgaagaccactgctccaataggccttaatccagcagcagcactcctccgactcagctccaaaccgatttcatgactcaattttgagtgtccatctgctctgattgccaggcattcaccatacagccctcttccaagttgaatcttgaaaggcttctgtatgaactcccctgcagcctgcaggcgatcaagagccagcgatt

SEQ ID NO: 15035 - DNA, 361 bp, Setaria italica
  Peptide Sequence Number=SeqID_81009
ttttttggaccgtagagaagactgatctcatcgattcaaagttagagttttccttacattattgatcatacaaactaaggagcaaggaggaaacgaaatcaaaaggagcgcgctaggcgatgaatttctctattactgtttgatcggtgcacatgataattccgggcaggggcttgctggtctcgcgcggcggcgcggccctgccttggctaccggccggccttcccagaacgcgtcactaacccttcatcaacgtcttcacctccgacgcgaacctgtccatggccgggagcggcagcgtgatcatcgcggcaactgcgcccaccccgccgccgttcccgacgtggacgaataagctcaa

SEQ ID NO: 15036 - DNA, 429 bp, Setaria italica
  Peptide Sequence Number=SeqID_81010
gtttttttttttagtattattttcagaagcattttggattatcactcataccatacacaacatgttcacgagtttcatgagcagacattatcatcgaaagatggcagaaaatacatcttattttcagatacttagattatttagctgcactgcatcaccggccaacatccaccaggttaccgggatacgctgtctgtatgacatggcatacgagtatacgtacgtgcgtgcaggtaggcgaagggcaacggggtcggagcgtatgcctacgcgccgtagccgaggaggtggctgttgttgagcggggggcacgtgccgtagccgtagccgccgccgccgccgccggtgtactcctgggtggtgctctggtacgactggtagcggcggccgccggcgagctcctcgtgtttctcgtaggactcgtagcgg

SEQ ID NO: 15037 - DNA, 376 bp, Setaria italica
  Peptide Sequence Number=SeqID_81011
cgccgccccacctccacgctcctgttgcctcttcgccgccgtgaggtgcccccaatcaggcaaccagcagcgccgcccggtcccgtcctctcgcccctgcccccgccctcatcgcgccccgctccatggccgccaagtgggcccagaagaccgtcgtcatccccgcgcagcgccgcggctgccacctcatcacccccaagattctgagggagatcgagggcgacctgtccgggttcaagtgcgggctcgctcatttcttccgtacgtgacgcgcatatctacttgctcaattcctaggcattaccttgttcaccttttctcgccctgatgccgtaatttgatggtcagctcagctgtacctgtaccgttgatctag

SEQ ID NO: 15038 - DNA, 319 bp, Setaria italica
  Peptide Sequence Number=SeqID_81012
ctcgcttgcactccaagctcagagctcctctccccagttcagcacgcgagacctccctccagtcctcgccgcccactccccacgacctccccgagggcgaggcagcagccgcgccgttctgagcgccaagaaaggccctcgcgatggggtgggcgtcgcggttcctgacggcggtgacgttcctcgccgcgggggtcctcttcgcgcccgacgcgctgcgcctcggcggctccggctccggctccggcgcagcggcggcggcgaggctggtccacctcctcgccttcgccactgcctggggcgccggcctctgggtccg

SEQ ID NO: 15039 - DNA, 322 bp, Setaria italica
  Peptide Sequence Number=SeqID_81013
ggggggtgggggtgaagaggggcttggagggggggagggagtgggagagggagatgggcttggaggagcggcggcggagggagaaggagagggaggggaggcgggagcggggagcgcctccgcgaacacgagcgagtagcctaggccgagggaggagctcccgaacgcggcgacgaaggcgtaggcgacgcgggagccgagcccggtcttgatgaacccgcgcgcgaagaagaaggcgagcgcgatgagccaggggatggggtcgccgaaggcggagaaggccgcggcgaaggtgagggtgcgggtgagcacggcggcgccg

SEQ ID NO: 15040 - DNA, 1832 bp, Setaria italica
  Peptide Sequence Number=SeqID_81014
tttttgtttttttttttttttttcagcaatttttttttaaatcaactttgccagtagaactgcaccctggcatcgcaattagccgcaggaaggttcgaaacagatgtaccgataccaactaaaagaatgtgttgcaatcatgtcgacgacaaatcttgtggacagcgaattcgggaacagttttccttctccccatctaccaaaacaacagaaaacgaacgaacctcgaagttttacagcgccactcaccacagaccgatcatcttccaccagaagcctcccactcccagccagatgatgatgttcacaacggagataacaaacccgtagccccaccactgagccaacggaacgtacccggcgccgtagaatacaggagcagaaccaatcccgtagtgggtgatgccgcccatgaggttcgagaggaatgagagaaccatggcggcaaagagcgagggggtgcccagggccttcgccactgacaggaatgcagcaaacattgctccaatgtgtgcagcaccactggcgaagaaatagtgggagtagaagtacagcagcaccaagacgctgaacgaaagttgccaggacaaaccaaggcctccaacaaacttcacaacagtctcactgaaccaagcaatcagcccatatttgttgaggtagccagccattgcgataagtgcggcaaaccatgtaagggtatcccatgccacagactccgccaaacactctttccatgtgacaacacctgtgattaggagcacacctaggccaagaattgctgcagacactgcatccacacttatcattcccccaaagatccaaagaccgaccgtgagcagcagcgtgcctgccatgatcttctcctccttgctcatgggccccatcttggcgaggcgctccttggccaggcgcggtgcatccgggctggacttcacctccggtgggtagatcacgtacagaatgagcggcacgagcacgagcgacagcatcccaggcacaatggcggccttggcccacagcgtccacccgatcccctccccgattgtggccgccgtcaggttggccgacagcgggttggccgccatcgcggtgaggaacatggcggaggagacgacggatgtctggaagcaggtgagcatgagccatgcccccaggcggcgctcggtgccgtcgccggcgcgcgagccgcaggcctcgcagagcgccttgacaagcgggaggaagatgccgccggcgcgggcggagacggaggggatggcgggggcgaggagcgcctccgcgaacacgagcgagtagcctaggccgagggaggagctcccgaacgcggcgacgaaggcgtaggcgacgcgggagccgagcccggtcttgatgaacccgcgcgcgaagaagaaggcgagcgcgatgagccaggggatggggtcgccgaaggcggagaaggccgcggcgaaggtgagggtgcgggtgagcacggcggcgccgaggccgagcagggcgacggcaccgaggggcagcggctgggtgatgatgccgacgatggtggagaggaagatggcgaggagctgccacgcgttgcggggcacaccggagggggccgggacgagccagatgaggacccccgtcgcgacggtggcgaggagcggcgtgatggccgcgccctgcagcgcgggcttcggcggcggggcggcgggggccgccctcgcggaggcggaggcggagaccggggggaggatgccgcagctcactccactcgtcgtcggggcggcggcggcgacaaacaagtactaacaaactaagaaaaaccaaaaagaaacaaaaataaacaaaagaaaccc

SEQ ID NO: 15041 - DNA, 1357 bp, Setaria italica
  misc_feature (1)..(91): n is a, c, g, or t
  Peptide Sequence Number=SeqID_81015
nnnnnnnnnnnnnnnnnnnnnnnnnnnnnnnnnnnnnnnnnnnnnnnnnnnnnnnnnnnnnnnnnnnnnnnnnnnnnnnnnnnnnnnnnnntttgttaattccaatgaaattctagtagcattcaattaagaatgcttctcaatttaacttcaaccagaggagtcttcaagatatgcagcatatatacacgactacatcactgcatcttaccgacccttaacaatgtttaaatagccacaatacctgaccctccctcagcacctacgagctctcagtatgatttcacaaaaagtggattctcttcaggatacactacactatataagcatagttataactgaaggctattataatgagatcacagcactgcatgctggtgacttcatggcccaaaatattgttttagtggaacaatcgcttcataagttttgttcccacttgccagtacaccagatcactggttaagcttcgactacagctgctagatcctcttctgacgacgtttctggtgtgacaatctcttcaggcaaatcacttggggaaccgccttcagcctcctgctctttaggtgcttcagtttccatcaatttcttaagttgcatctctagatcttttgcaacactctcattttcagtaaggtaagatttaaggttatctttaccatggaaagtaatatcattgaaactataatatgctccactaatcttcttgataagtttgcgcttcaatccgagttcaacaagctcagaactgcggcatatcccctttccaaattcaatctcaaactgtgcagtcttgaatggtggggcatgcttgtttttcacaatcttcacagcaacttgactacctattgtctcttctcctttctttaccaaaccaatacgcttgatgttcaagcgaacagaagcataaaacttcaaggcgttgccaccggaagttacctcagtcggtcccccaaatccaaatgtggctaccttggccctggtctgattaataaataacagaattgtctgggaaagtgaaagggagtggctcagcttgcgaagagcttggctcatcaatctagcctgaagagcaacatgtgcgtcacccatctccccatcaagctcagtctttgggacaagagctgctacactgtctactacaacaacatcaacagatccacttcgaattagtgtgtccacaagactgagtgcctgctcagcacagtctggctgagaaaggagtaaattgttggtgtcaacaccaattgactccgcaagagctggatccaaagcgtgctccgcatctacaaaggcacagtaacccccattcttttgtgcttctgcaatgacatgtagagcaagagttgtcttg

SEQ ID NO: 15042 - DNA, 278 bp, Setaria italica
  Peptide Sequence Number=SeqID_81016
ctcgatcaatcccgggttgcagcgatgtgctcctgcgcctgcgcgcgcctcccgcacccgctcttcaggcccaccccgagcccaaatccccagcccgccttcccgcaaggcccgaccccagcccggagtcgtgccctcgtcgcgcgcgcgggcgccgccgcacgggacgacgcgcattcgccgccgtccagcttcgacttcctcgcgctgaagcgggagcttgagctggaggaggaggagggggcggtggtggctgtcgaggcggatgaggaacgggg

SEQ ID NO: 15043 - DNA, 751 bp, Setaria italica
  Peptide Sequence Number=SeqID_81017
catgattgaagttccattaaatggatattgttacatttccgaagcaaagggaaatacaaagtggttgagatgctaaaaaattaaaatacaactgtagagctgagctgctgcttctattgttctgatttactaacaattgtcaatttcatatgatatcaataccaattcttgcttggaaacttttaggaactcctgcgttctatgtaaactatttgttggtagaatacaacttctccatactggtcatgtgggagcccttcattcctcacaccaaagttaaatcttatcatggtaatagtgcacgctttctagcattagttggtgttacacctgaactgtttgtattctgaacccctacaacgatgccctattttgttagttgtcttccacctcatgaaaaggaagtggaacgaccttcacagctctgaacttcccagcattgtttaggtgctcattctccaacctgtagaagttccagtgacctcgtcgaatcacctcaagtgctgctaaaaagaacagggttactctagaatccaggcttccaatgttagggtggatgacagtctgaagccaagcaagcctcaagacaaggttcaaacccatggataagaaataaatgtatttttgttttaagttaaaatcattacgaagccaagtgttcttggaattgaactgcagaagaccccaatccttgacaaagtcccagtacagttggtagatagttgcaatacttgatacaatgataacaagt

SEQ ID NO: 15044 - DNA, 757 bp, Setaria italica
  misc_feature (658)..(658): n is a, c, g, or t
  Peptide Sequence Number=SeqID_81018
ccatgtagatggcaatagagagataagcatctcttatgcagtcttttgtcaactctctgcttcttccagcaggatttgacccgacgtctagctcacaggatacctgattaaccagggttgtattctgtatctcatgccactggaatatttggctcattaagggttcacaaacgactcagcacgcatcatgcgcagagtgacagtgtcccaagagatgagatggtccataaagtttgtaacatatgttagcatatcatcctgcaaagttgaaaagtaagcatcgcaaatgttttcttctaagaactaatttgtgaaatttcaaaagtgttaagcacaaaaaaggaagagagctagagcataccttgtagtctaagtagtaagcatgctgaacagaaaaggagaaatgtcaatatttagcacaaagtaggatcttaaaactcaagaagtcaatatccttacctcccataaatctaggctgataattggctacaagaagagaatgtgttgtcattgcaaagtttttactgaaaaatttactctaaacttttcaacttataacgcatcaaggggaaaaaaacggagtccagtaaacatacaatatcgccaaaagcaagtggggagatagcatttcgtgtatgaactactgaaagctttctcncatttctcttcaagacaagcccaaaaccccaaccacgaacccccaaaaagttgtaaggctgagcgaataaattccttccctgaaaattggtaaacgacg

SEQ ID NO: 15045 - DNA, 1331 bp, Setaria italica
  Peptide Sequence Number=SeqID_81019
ggtattgctagagcattgcattccaatccgcaaactctaatttctttctggctaaaactcacacttgcagtgtttgacacgcacatgatttccctacaatctacaatccaaaattattaggattcctcaaccagtaaaacaagaatacggttccattccactacaacaagacgctggcatgattaagtcatgaaaacttgagatcttaatctattctaacaacactatgggcgctcgtaatgaagcatggctgcctagagaaagtgccatggcttcaaagcccaagttggacatcataatctacgtgctcccaggtgtctaaagctgctttgttgcatatcttgaaactagatgctaacttgtagcaatagccaatggaaatggtgcaaactcagcagcttatctttaagttcaccatgtagatggcaatagagagataagcatctcttatgcagtcttttgcaactctctgcttcttccagcaggatttgacccgacgtctagctcacaggatacctgataaccagggtgatctgtatctcatgccactggaatatttggctcattaaggttcacaaacgactcagcacgcatcatgcgcagagtgacagtgtcccaagagatgagatggtccataaagtttgtaacatatgttagcatatcatccttgtagtctaagtagtaagcatgctcccataaatctaggctgataattggaatatcgccaaaagcaagtggggagatagcatttcgtgtatgaactactgaaagctttctctcatttctcttcaagacaagccaaacccaaccagaccccaaaagttgtaaggctgagcgaataaattcttccctgaaattggtaaacgagccaaaatccttttcaatctgctgcaacacacctccctcaggtaagccaccgccttctggttgcattgattcccagaagaagtgatggttccagacctgtgctgcattgttatactctggtaatggattgccattgttgtacgcttcttttatcagctcctccagagtgtatccatacagtgggctggtagcaagctgcttatttaatccctccacataatcatgatggtgcttaccccagtgaagttcaactgtcctcctgctcatataaggttccaaagcatccagtttatatggtggagttgtgagcccgtaatagcacactacttttgaatatctacgagacagaccaccctgcctcagtattctcgagcggaggcgccgctgctggagcttcacaccggctggcggcgaggggaggaggcggagatggagagcggaagccgccatctttctgtcccgcg

SEQ ID NO: 15046 - DNA, 2447 bp, Setaria italica
  Peptide Sequence Number=SeqID_81020
gatattgtgacgcaattcaagatgcaaggagttaatactgctttgtactacaagaagaagaagaagaggaagatgaggagtgggatgcaaagagctgggatgatattgatgtgaacttgcctaagacaagtgcttttgaggaggaagaggcgaagcctgttcagaagcaggaaaattctaaagcacaacctgtgacaacttctgtcaaaaaggttattcctcctgttgcaaactctaaaaagagtgaagctgatgatgggggtgccagtaatggaaatattaagcggaacaaaaagaaaggacctgtcaaagaggatagctctaagaatggtaatgacctcagatcaccaatttgctgcatccttggtcatgtcgatactggtaagacaaagctgctagattgtattagacgcaccaatgtgcaagaaggcgaagctgggggtattacccaacagatcggggcgacatacttccctactgaaaacattagggagaggaccagggagctaaaagctgatgctacacttaaggttccaggccttcttgttattgatacccctgggcatgagtccttcagtaatctgcgttctagaggttcaagtctgtgtgatattgccattttggttgtcgacatcatgcatgggcttgaacctcagacaattgaatccctgaatcttttgaagagtcgagatgcagtgtttattgttgctttgaataaggttgatcgtctttatggttggaagagatgtcaaaatgctcctattgtaaaggctttaaagcaacaaaatgaagatgttaagagggaattcaatatgcgagttacagatattgtgacgcaattcaagatgcaaggagttaatactgctttgtactacaagaacaaggagatggaagatacctttaacatagtgcctacaagtgctgtaagtggtgaaggcattcctgatttgctcctactgttggttcaatgggcacaaaagacgatggaagaaaagcttacgtttgttgatgaagtccagtgtactgtactggaagtcaaggtcgtggaaggtcatggtactacagttgatgttgttttggtcaatggtatactgcacgaaggagatcaaatagttgtttgtggcatgcagggacccattgtgacaactgtcagagctttgttaacaccacaccctatgagggagcttcgagttaagggcacctacatacatcataaggagatcagagctgcacaaggagttaaaatctctgctcagggtctcgaacatgcaattgcagggacagctctctacgtgttaggacctgatgatgatctagacaaactgaaggacgctgttatggaagagatgacacgggttaggaaccggattgataagagtggcgagggtgtctatgtacaggcatctacccttgggtctttggaagctctcactgagttcttgaagagccctgccgtcaatattcccttctgtgatttcagtatagggccagtccacaagaaggatgttatgaaggctagtgttatgcttgagagaaagaaagaatatgcaactatcttggcctttgatgtcaaagtgatgcctgatgcccgcgatcttgcagaagagtctggtgtgaagatctttgtggcagatataatataccacctctttgaccaatttacagcatacattaagaatctcaaggaagaaaagaagaaggaaagtgctgaagaagctgtgttcccttgtgttcttaagattatgccaaactgtgtcttcaacaagaaggatccaatcgttttgggtgtcgatgtccttgaaggaatagctaaggtgggaactcctctctgcatacccactaaagaatttattgatattgggaagattgcctcaattgaaattaatcacaagcaagttgatatggccacaaaagggcaaaaggtggctataaagattattgcgaacaattctgatgagcagcagaggagtttcggcaggcacttcgatatggaagatgagcttgtcagccggatctcaaggcgatctattgatattttgaaacaaaattacagggaggatctgtctttcgaagactggaaacttgttgtaaagttgaaaacaatattgaagatacaatgagctcacaagggttcctgtttactgtttagtcggcaactgagccccctgaagcgtggaatgcgccccattctccactgggtagtctgaatatctgtcgtgtaatgggagttgccaaagacactagagttcaccagggagggtttccaaattttgatacggtttgaattttgtagtttgcttggaatgcgcctcattttacagctacattctgcaataacatcagattttgagccgtttacttgtttgtgtttttcatcgcttgaactgtacctcactggtggattgcgtaatacatgcctggaaggtacgttttttacaaaaaaaaaa

SEQ ID NO: 15047 - DNA, 1724 bp, Setaria italica
  Peptide Sequence Number=SeqID_81021
gacttcagcaaggccaagaagagaaaaagaaggacaaggtaggtcgctctgcgcctggcaaagacgaagacgacgaggctgctccgccgcccccacccgtggctgaggaggaagatgaggatcccttggtcgctggtgcggcagctgcaaagaagtcgcagaaaaagaagaaaaagaagggcacgtttgtcacggacgatgaggacgtcgtcaaggccctggctgatgttgaggattctcagcctgcggatgagcctgagccggaggaggtgaaaactcaggattctgtgcctgcccctgacgcggatgatgccactggaaagaaatcaaagaagaagaaaaagaagggagggtttatggtggatggtgaggatgcagaccagatccttgggaagatggaggaccacccacctcctgttgaggagcctgagcccaaggacatgaaggatgaggcccctgtcgctgctgctacccctgtcgatgatgctgaagggaagaaatcaaagaagaaaaagaagaagagcggaaggacagcacaggaagaagaagacttggacaagcttttcgctgagcttggtgtggccccgtctgcggaggacaagccagtgcaggcaccggattctacctcagtggccaaggaggatgtaggagctgctggggatggtaatgtggatgacaaggctggggaaggagaggtggaatctgctgctgccaagaagaagaagaagaagaaggaaaaggagaaggagaaaaaggcagcagcaaagggagcggaggctaagaaagaggaggagaaagagcaagaggcgcctaaagggaaggttgacatgaagaagctccctaagcatgttcgggagatgcaggaggccctggctaggaggaaggaagctgaggagagacagaagagagaggaggaagagcgtctgaggaaggaggaggaagagcggctgcggcgcgaggaggaggagaggaaagcagaggaagcaaagaggaggaagaaggagagggaaaaggagaagttgctcaagaagaagcaggagggtaagctcttgactggcaagcagaaggaggaagcgaagaggttagaagccatgaggagacagttccttgagcagagtgaactccaaaaagctgagggcactgctcctgagacaaagaagaggccaatatacgattctaagaaaaagaaagctcaaccaaagaccgcggagactgcaaagatagttgaagaacaacaggaagaggttaatgaagctaacaatgatgaagaagaatatgtgctcgtggatcaggaatcccaatctcaggtagaggaatctgaggagagaaccgaacctgatcaggaggctgaagagccaaaaccagaacaagaagaagaagaagaggaagatgaggagtgggatgcaaagagctgggatgatattgatgtgaacttgcctaagacaagtgcttttgaggaggaagaggcgaagcctgttcagaagcaggaaaattctaaagcacaacctgtgacaacttctgtcaaaaaggttattcctcctgttgcaaactctaaaaagagtgaagctgatgatgggggtgccagtaatggaaatattaagcggaacctaagaaagaggaggagaaagagcaagaggcgcctaaagggaaggttgacatgaagaagctccctaagcatgttcgggagatgcaggaggccctggctaggaggaaggaagctgagg

SEQ ID NO: 15048 - DNA, 1141 bp, Setaria italica
  Peptide Sequence Number=SeqID_81022
ggcataaagcttggccataaacatcaagcaattcaagctcctgttgagtttattgtgatactctgtgaagcgcccacaaagtaatagacgattcgctagataaagcacctggagtcgtgtcttgtatgctagaaccatataggcatggaaatatgcatatctactgaacaacataggcctttcatgttgcatggtcctcttgtcgtccctcacacgaggattgatcaagcagtacccatatactgattcctctagaagattgcatgacagtggattttggagtgctgaggtcacatggtagactacttgagttcccgaacagtcgtagtgagtggccatggctaccattgtagcattaaccaccatgtctcccggtatcgaatcaagtacgtgaccgcctatgaaacacggaagtttttgctcgtaggaagcagcaatcataacatccattgtcctgattccttctatccatccaggaaatggatcctgaaaagtgcttattacgatgcttggccgcattatgacaacagggaggtctcccctcatggtgccaagcagcatctctcccatagccttggtgaacgcatagacgttgggccacccaaagtacttagccctcttcaagccgagttccttcatggctaccttttgtagcttctgatgagaggtgtcgttaccagaacgagtcttcacaagctttgctttgacatcattagctaaatctagctctgcttcgacgtcgatgcagcgacccttctttagtgtttggcccatctggagcggtttctctagtatccggcctttttgcttacagctagctacgtaggctgtggaaacatgaaggagcagcttgaggtgagaacactgctttgcgaacttgcatatatttacggttcccaaggtgttggatgccaaggcaacatcatacctctcgtagaaattagtggttgcagctccgttgacgataatatcaatctcctcgaacagctgcttggcttgggtgctctcaaggccaagattctcatgtatcatgtccccagctaaaggggatatcttctctttgatgaaggactggaaatcagctccatgttcttctcgcagaacgctaaagagttctttccctataatctcatggagcata

SEQ ID NO: 15049 - DNA, 417 bp, Setaria italica
  Peptide Sequence Number=SeqID_81023
aagacaagcaaacgtcgcgcgcctgggagcgcccaagcccgggccgaggccgcggcagctgctctcgctgccgccgttccccgcgggggcggaccctctcccggggaggaaggtggtgccgcggcgtgtgacggcggtcagctgggtgaagcactatttcgccgacgtgccgcaggaggctgtgcaggcgcacttcaacaggagaatggttttttcagagtgttctgagcatgaatttttagctgaaagcattcgaactcagaagcatcatctgaaaaagattaaacacaatgatgttatggagcctggaatgagaattcaccttcctgtttcagtggctgagggtgagataaaaagcgttatgagactattccgactgccacattgcaccccaataaagatgagatcgagtacctg

SEQ ID NO: 15050 - DNA, 272 bp, Setaria italica
  Peptide Sequence Number=SeqID_81024
tattccttcgggggtcattttccgcaagaatggggccaaaatggtcaggtgcaatggtcacaaagatctggccactagaagcgtttgctttcccagccttcttagccctctcagttgtaaatgccttgtcaggcctatcatcattccgtatatactgatatggagctgatgagcctcccgagttagcattttttgaaatcttagccatccggataacttcgactagtgcagagttgattcttggttgctcagcctattttggctgggatttg

SEQ ID NO: 15051 - DNA, 749 bp, Setaria italica
  Peptide Sequence Number=SeqID_81025
acctttagaatgacttttttggggtcagaagcttcctcgaatcaatcaatgcaatcctaccatcactcgaggctgagacaagccatggatactcaaaagcaagagaatgaactgggcctgaatgtggcacccaagtagcaagtggtttactatcctcatcatcagagacatcagaaatattaaacaagcgaatagctccatcctctccaccagtaaatagcacatccatcaagtgtgtccgagccaaagaatacgcgtttccaacatgtgcattggaaattaagcttgtcaactcactgttcctgatatcccatacatatacatctctaccagctgtactagcaatggtatttccatgtggagcaagatcccagacccagtctgcatgcatgagcttttgcagacactccatgcgagtcctgtcccaaacacgaacagtcatgtcccaagaaccactgtaaatcctcaatgaatctaaggcaagacaagtcagaggaccttcatgtccccagaggcgaaactctgaattctggtcagtaccatttccagagatgtgaaaaaggtgatcattcccttcaacagccctccaacactgaatgtaggcattggttcctccagtcactaaaagcctagtgtcagctgcaatcgccctgatggtgccaccaagtgggcgggatgtatcaatcaagagcccttcctccatgttccacatcctaaccacagaatcacgaccgccactgaaaatcaga

SEQ ID NO: 15052 - DNA, 451 bp, Setaria italica
  Peptide Sequence Number=SeqID_81026
gatgctccccatggtcaagcggtgatgcaagtgagaagcgacagccgacacggctttttaatggaagcgaaggcatgcgagaaacggcaacagcacagggatttcactggtctggtctgcactgttctccgttacacatgcttgcaactaatctgatacgatacaacagataatggcggagagatgtacagtgtgtcacacatctgtcctggtttgcgtttgtagcggcggatctgcagatgcccagcgaaggcctgtccgccattggtgaagctataccttgtcaaccccgtttgcagcttcagcaaccggctctttgaaaaactcaatgatgttcttgcacacctccttgggcttctcaagattgactgcatgcccagcgttttttatgacaaccaatcgagaattcccctctagatgacgattctaatacttggttaggtcgtaccta

SEQ ID NO: 15053 - DNA, 919 bp, Setaria italica
  misc_feature (1)..(68): n is a, c, g, or t
  Peptide Sequence Number=SeqID_81027
nnnnnnnnnnnnnnnnnnnnnnnnnnnnnnnnnnnnnnnnnnnnnnnnnnnnnnnnnnnnnnnnnnnnctaagacagcgcaaaggttccttaatatttttaaagctatccaaaagttcaagagactaatatttatctttataaacagcaaggaatacagaggaatgaagagcggagtcatgtacactccttgccttgcaacaatggcatgagatcttagcccatgaaaaaggaagcactagaacactagcactaagcctgagctccatgagagggaacacagaaattcgggttgcaaaactctcccgggctcccggcaacgaagacagacgatgttgaaatgaaccatgtgatcattcatgtgacatcacttatattcagtatcaactttgtttggcttcatcttagtctaattgccttgcagccgagactcaaatccacaagtgccaaggtgtttagcaagtttctctccacatagcttatgccaatcatctgatgccctagcttcagctgttgtccacacgactgcacttgcttccttaaaatcaacagtagcagatgtaacttctggttggctctccagaatccgcttcacgctcgcggcgcacccgtcgcacatcatcccctggacactgagcaggatggtctcggagccgccatccgctgcctccccagtcgctgcggcggcggagaccgaggagccaacgccggcatactcgcggccgcggcgggaaaacagggcgacgcggcggctgccggaggagaaggaaatggaggtgaggctgcgagctctggtgacggaggcaggggagatgggtttggaacgggagcgagagattagaagaggtaattgtgcgattagcgcggtagactccatcgctgactctcgtgctgtgatctctcgtcgtacgtacgacgaa

SEQ ID NO: 15054 - DNA, 987 bp, Setaria italica
  misc_feature (1)..(28): n is a, c, g, or t
  Peptide Sequence Number=SeqID_81028
nnnnnnnnnnnnnnnnnnnnnnnnnnnntttttttttttgtctacctgtaggctgagacatttcccccctacccacattcattataccaccgtgagattttgtagttgctacttcaaggaggcagcatcatctgtgggagattccaagcccgcatctacttctgcttgcaccagcgagtccccatggttggagccgtcggctgactccacagccttgttggtaatatcatgttgaacctctgatctcaagtcactggagacacttgatggtgatttcaaatcccaggccaaactttcttgaccttgcttttcccatggcttgggtttcggtgccatacggggttccgagattggttgatcagggtttggagggtcatcattaatatcctggatatcatctggccgctcacccctttgtatcatttccatgatctccatatatgattttggatgacaaggcaccacaggggccacaggttctgtctcaggttcaaccctctctgaaccatccatacacttcgtgccaacttcagtttcctgctgagtaatcctacatgaatgattagataccccttgagacgtgcacgtatttgcgctcaaagaattagaagatgggctttgtaactgtcgaaatgcttcatctatttcatccacagtgagtcctttattttcaaggaaagatcgcctctgcccatccgaagaggttactacttttggatgtttcagaaaactaacagcactctgaaccagatcctccctcatcagttcggtggattcaagagctgcctttccttttcttatgtcccgctccattgtgtcttgcaaagtagtaccatgactaccttcagagcttccttggtctgcctcctgccccttcgcttcttcggtcacatctccatccgcaatcgtagacaaatctgccatcgatgccgtcggcgaccttcccccagcagcccagaaagccagcagcaagcggcaggtggggat

SEQ ID NO: 15055 - DNA, 506 bp, Setaria italica
  Peptide Sequence Number=SeqID_81029
gaaatggctccagtttcttcctaaagttgagagcgaggtaaaattttctatgtgtacatgtttctttcttttttgttttggtatatgaacatgagttgcctagcctttgataaaagcatgtcgaaaccttttgtccgttgtattatatttctctacacacgcttgtaggaaaaaagacaaaaggatgaggaatcaaagggtgttgtatccacaagtacttctcgagaagcagcaattgcaaaattagcaaaagatactgatgatgagctatgatgctccgaccaagcagctggaggaactccggaaaatggtggtcaacagatgcaggttcatcttatattgcccaatttccttttgattgctttgatttttatgttatgatgccatcatacctgcatatctgaatctaaatcttaattacatggttgctaaaatattgatatcgtaggaaaatgaccacagatgagaagaggaaactgggtgctggtctctgccacttgtctcca

SEQ ID NO: 15056 - DNA, 1300 bp, Setaria italica
  Peptide Sequence Number=SeqID_81030
aaaatctcgtcggagcggcgcagtcggctgtagtcgcaggcggccgccggccacgcgcccggccgtgaaccctagatgacgccggcgaacggtgcagcggcgccagaagcggtggcggaggcagggctggcccccgaggtggagtccgaggccgacgcgttccagcgccaggtcgacgacctcgtctccaagaccgacgtgctggagaggcgggtgaacgaggtggtggacttctacgatggcaagaagcacggcagcggcgggcgtaagggcggcaggcatgggccacacccgagggggatgcccgaccttatgcgccagttcggcgtggttttacgagagatcacctccgataaaaaggcatggccatttcgtgagccagtggatgtcgtaggcatgaaccttcatgattattacaagattattactaaacctatggacttctctactattcaaaataaaatggaagggaaggatgttacaacatacaaaaatgttcgagaaatatatgctgatgttagattgatttttgccaatgcaatgaagtacaatgatgaagaaaatgttgtccatttgatggctaaatcgttgctcgagaaatttgaagagaaatggctccagtttcttcctaaagttgagagcgaggaaaaaagacaaaaggatgaggaatcaaagggtgttgtatccacaagtacttctcgagaagcagcaattgcaaaattagcaaaagatactgatgatgagctaaatcaaatcaataagcagctggaggaactccggaaaatggtggtcaacagatgcaggaaaatgaccacagatgagaagaggaaactgggtgctggtctctgccacttgtctccagacgatcttaacaaggcactagaaattgttgcgcaagacaaccctagctttcaaactaaagcagaagaagtggatcttgatatggatgctcagagcgagacaaccctatggaggctgaaattctttgtgcgggaagcgctggaacgacaggccaacgttgcctctgggaagatggatgagaacgccaagagaaagagggagatatgcaatgcgctggccaagactgcttcaaaacgaatcaagaagcagccgtagggatccagatcttctttgactcgtgtgctgcctctgattgttcagaatgtttttgaagtaggaatagccgctagccttgataaacaatttctgcttttttgtgtgtgtagtcgtcgtgaacaaagcatgctttgttcagtaaatcgtgagtgttttaaattgcaaaaggcctgctgattgctta

SEQ ID NO: 15057 - DNA, 604 bp, Setaria italica
  Peptide Sequence Number=SeqID_81031
gccgacggcggccgcgccgactgcaccgccatccagcagggtggcgcctgctacgacccgcccgacctccagcgccacgcttcctacgccttcaacgactacttcctccgcgccggcggcgctgccagccccgccgcctgcgacttctccggcgccgccgcgctcaccgcgctgaaccccagtcatgggagctgcgtgtttccttccagcacttccccaaaaaatggcagctttacaggaacaacaacctacggtgcgagtggtacagatttaagctacaattcttcttggaaacccaactcctggtcgtggctcttacatatctctttatttgtaatgctttcgtttgtcacacatttgtgacgaattttttcttcttctcaaactcttatttgcgagtatgatgaactctcaagcttctggaatgcaattcattctctatgtggcagccacactgctttgggaggctgcggaaatggatagattaaagaaaaagggatctccgcgcctgccgcctatatagttcatccagtattgctttggcctttgtattaatcctagcaagtgtaaatttaattatacgatgattagtgatttctctgct

SEQ ID NO: 15058 - DNA, 1192 bp, Setaria italica
  Peptide Sequence Number=SeqID_81032
gttctggcggcgcaggtcaccgagctcgccgacggcgtcttcgtggccatgtcgctcaaccacggcgtcgctgacggggcggacgttctggcacttcttcagcacctggtcagagatcagccggagcggcagtagtgatgccggcggtgagctctccacgccgccgccggtgctcgagaggtggttcctcgagactagctcggtgcctatcactctgcccttcggcaagctggaagacatcgtccggcggccggagtaccccccggtgcaggagtgcttcttcaatttctcagcggagagcgtgaggaagctgaaggcgagggcgaacgccgagatggccggcacggcgacggccaccagcaccatctcgtcgctgcagtccctgctcgcgcacacatggcgagcggtgtgccgtgcccgggagctcgcgccggagcgggagacgacgtacaccctcctcgtcggatgccggggacgtatgaaaggtataccgcgggactacgtcggcaacaccgtggcgttcgccgtcgccaggtgtacggccggcgaggtcgtggagaaaggtctcggctgggcggcgtggctcatgaaccgcgccgtggcgtcgttcgacgaggcgacggtgagggacgacctggcgtcgtggccgcaggatccaaggttcctgtacgtgaagccgccgggggaggccgccgccaccatcattaccgggagctcgccgcggttcgacgtgtacggcaacgacttcgggtggggccggccggtggccgtccggagcggcgccgggaacaagacggatgggaaggtgacggtgtacgcggggcgcggcggcgcgggcagcatggcgctcgaggtgtgcctggagcccgaggtgctcgccaggctcgtcgccgacgaggagttcatggaggcggtgagcgccgccgccaccgcgtgaagacggcgccatgcgcgcgagtcaggctcctccgctgcttgtcgccgccgacgacgagggattccgggcttggagtgcgcgcctcgtgagtcgtgagtgcttcttcattttctcgtgagtcgtgtgtgtggtttcagaggaacaagcccatttttgggcaaagattccaacaaataaggaaactttagatcccccacccaagaacacaggcaatgtatgatttacacggtgtcccagtgtctcactggtaaaaaa

SEQ ID NO: 15059 - DNA, 483 bp, Setaria italica
  Peptide Sequence Number=SeqID_81033
gtggcctcgtccccgtccccgcgcgccgccgccagccgctcgccgtcatgggaccggtcccggggcagggtggcgctctcggcaccgggatcccccatggatggggtcgtggagccggcccggaaggaggtgctcgcactgcctccgcctgcgagccctggcaccccacctcttgctaccacagcggaggcgcagtcgtctgtgacccccgcacaggcaccggttaggacggagccggtggcgaacggaggggaggcggaacgggaggagtgggtcacagtattcggattctctattggagataccaaccttgttcttcgggaattcgagaaatgtggagtaatattgagacaccactctggtccaagagatggtaactggattcacatattgtaccagcgctcgtacgacgctcggaaggccctccagaaaaatggtatccaactaagcagtgggctcatagttggagtaaagcctattgat

SEQ ID NO: 15060 - DNA, 416 bp, Setaria italica
  Peptide Sequence Number=SeqID_81034
ctattacttcaacatgtagattagtctgcacatttgcagtatgatacaattgtatccagtaatgctgctacaaaaacaagttcagagtaaggttgctactgcataacagcacaagcacgcaactatagtctcagaataaaattgctagccgtaatgatcgcccgtattttctttcaatcaaacaataccttaacatcgttccaatgagatgaaaagaaagaactggtcaaatatcgcaggaaataagaaagaaagatgaaaagccaagctgcttgcttttctcccagaggaaattcttgcagccccttcaccgagaacacagtcctaatccagcagctatctctcgaggtgacgcccggtcggaccagactccctgatgctccggtcgatctagctggaggggaagaatgaactgc

SEQ ID NO: 15061 - DNA, 587 bp, Setaria italica
  Peptide Sequence Number=SeqID_81035
gcctctggttcttgtacatgtgagcgatctctgggacaaggggatcgtctgggttggggtcagttaggagagagctgatggagaggaggacctttgatatggtcagtgctgggctccactgctccttgaggatatcaaggcaaatgctcccattagagttgatgtttgggtgatacacctttgtttggaagttcacttttggaggcttaaaggggtagtcaggaggaaaatggatattaacaaagaacacccctcctgtataggggctgtcactaggacccatgattgtggcctgccagtggaataaatcctctccagcaggcccagcactgcatgatgtcggtggatccttttgcagatccatgagttccttctgaatccttttgcttgccatatcagaggaaattcttgcagccccttcaccgagaacacagtcctaatccagcagctatctctcgaggtgacgcccggtcggaccagactccctgatgctccggtcgatctagctggaggggaagaatgaactgcggcaatgcttgacgcagaggatgccggccgggaatgggattataggcgtggaaagtcgt

SEQ ID NO: 15062 - DNA, 849 bp, Setaria italica
  Peptide Sequence Number=SeqID_81036
aaatttaccggtttcttggcaaggctacacacgcaaaagccgtgatcacaagtgcttttcagggtataaaccaaagttttggtgcggaactcagattatccagctttggcgctgctgtacacaaataaacattttctgggatggcaatacaattgacacaaccgtccgggcctgggataccatcacaagacatgggaccggtttgacttaatttttacaacattcacgatggccattacagtggcaacattgttcaatgagatggggcatcagcccatcgcgtacttctgggtccaggcccttgcagtttcctcgtagcgttgcctctggttcttgtacatgtgagcgatctctgggacaaggggatcgtctgggttggggtcagttaggagagagctgatggagaggaggacctttgatatggtcagtgctgggctccactgctccttgaggatatcaaggcaaatgctcccattagagttgatgtttgggtgatacacctttgtttggaagttcacttttggaggcttaaaggggtagtcaggaggaaaatggatattaacaaagaacacccctcctgtataggggctgtcactaggacccatgattgtggcctgccagtggaataaatcctctccagcaggcccagcactgcatgatgtcggtggatccttttgcagatccatgagttccttctgaatccttttgcttgccatatctcgaggtgacgcccggtcggaccagactccctgatgctccggtcgatctagctggaggggaagaatgaactgcggcaatgcttgacgcagaggatgccggccgggaatggattataggcgtggaaagtcg

SEQ ID NO: 15063 - DNA, 433 bp, Setaria italica
  Peptide Sequence Number=SeqID_81037
gccagatccaacaggagcaaactacagccatgaactcctaacccggcagggttatctggagccctggtatcgcgagcccagtgtgtctcatgggtcagggcagagccaagatgcgtgatggaagtgaagttcacattccatggggcatgggcagcagagatcgcatcaagaaggaaaccaaagtgattgaatgacgttcctttcggtgtttggggtttcgagataacttggtggcaccacatttccaatgtcagtctgaaacttccctgctgttgattggaagaactcttcaaggtcccgtccttgctctttttcatattccagtgcttgaagtatcatctcaatcttgtcaaaatctttgacaacctttgcttccaaagaggcattgttctcatactccatccaaagttcacgaatttgcttggttggtagt

SEQ ID NO: 15064 - DNA, 550 bp, Setaria italica
  Peptide Sequence Number=SeqID_81038
aggaaaaaaaaagtaaatggtacagtgattcaataagtaaaggattttacatcaccaaaagctggtaccgaaacttcctgttggatctggctacaagctcttgacaggagcaaactacagccatgaactcctaacccggcagggttatctggagccctggtatcgcgagcccagtgtgtctcatgggtcagggcagagccaagatgcgtgatggaagtgaagttcacattccaagggaagcccacgtctcagtgctgcctcagaagtatcatctagcaaaagctaagttcaacagaaatgtggtgccaccaagttatctcgaaaccccaaacaccgaaaggaacgtcattcaatcactttggtttccttcttgatgcgatctctgctgcccatgcttttccaatgtcagtctgaaacttccctgctgttgattggaagaactcttcaaggtcccgtccttgctctttttcatattccagtgcttgaagtatcatctcaatcttgtcaaaatctttgacaacctttgcttccaaagaggcattgttcttct

SEQ ID NO: 15065 - DNA, 498 bp, Setaria italica
  Peptide Sequence Number=SeqID_81039
ggcgattgtacacgacattgcagaagcaattgttggtgacatcacccccttctgataacgttccaaaggaagagaagagccgcatggagaaagaagcattggaccatatgtgcgaattgcttggtggaggttcaagagcacaagaaattcgtgaactttggatggagtatgagaacaatgcctctttggaagcaaaggttgtcaaagattttgacaagattgagatgatacttcaagcactggaatatgaaaaagagcaaggacgggaccttgaagagttcttccaatcaacagcagggaagtttcagactgacattggaaaagcatgggcagcagagatcgcatcaagaaggaaaccaaagtgattgaatgacgttcctttcggtgtttggggtttcgagataacttggtggcaccacatttctgttgaacttagcttttgctagatgatacttctgaggcagcactgagacgtgggcttccttggatgtgaacttc

SEQ ID NO: 15066 - DNA, 342 bp, Setaria italica
  Peptide Sequence Number=SeqID_81040
cgagggtcggggcgtctccggcgggcgcgaaggagcccttgtacacgcggccgaagccaccgccgccgatgagcgcgtctttgtggaagtcgctggcaaccttccggagctcggcgaaggagaaggccaccagcgggttccgcgccgccgccgacgccccgcgccgcagggcctccacctcgccggggttcgacggcagcttccggtcctcgctccggtcccgctccgacgggctctggatcttgggaggagactctggcttcgcattggaggacaccttgttgacgtaggggctcccccccatgcagttccccatgagatcgaaacagccaattctttatt

SEQ ID NO: 15067 - DNA, 416 bp, Setaria italica
  Peptide Sequence Number=SeqID_81041
gaagctcgccgaggcgcagtcgcggctcgcccgatgccgggatcccaggccgccgccgagccacacggaacccaagccaccgccgccgccaattaagagggaacccaagccatcgccgccgccgccaatccagagggaacccaagccgtcgcccccgcagccgccgccagagaagaagtctcccgcgcccgcgccgcagccagcggcgaggccgtcgcttctcatccctgggaccaacaaccggcctgccccgcgcccagagcccatgcctgggttgaagaaaaccgccgccccgtcgtcctcttcatcacctgcggcgccgccgccgccggagcggtcaaggaaagaggagaagaagcccaagagaaagatccaagagaaagagcatcagaacttgatccccagtgtcaagaagt

SEQ ID NO: 15068 - DNA, 462 bp, Setaria italica
  Peptide Sequence Number=SeqID_81042
aatcatggtgcaatacaatgaacaatcttacagatttcttggagcatataggcaaggattaaaaaatttagaataattcaatggaaaccatgaaaagtttgtgtagcttttccaattttaccaaactcacttttctgatttgtcccttgaactaacatcatattcgacagataatttgagataaaagattctagaattagacagttattagcaaaagatgtcaacaagtagcccaaaagaatatacagagaaactgaaccaaatctaaccagcggctttatcaattgtgcaaagttctctgtcttctttcaaagcttgatcctcaaaacattctcgccattcaagtagcgtgctaagatatttgtaaacattaatttgtatcatgagcttcaaatcaagtatttctactgggagaacttgcttccatatagaaactttgcctgcacgaaaaattcacatatg

SEQ ID NO: 15069 - DNA, 1983 bp, Setaria italica
  Peptide Sequence Number=SeqID_81043
gccctatttcttttaaaagtaaataatatgtatatgtacaaaatatttggcattatgtcgtgtatgaaagggcttgtaacaatttatactacaagagaacttcagtggatatagctttgagacagacacatagtacagcaggagctcacgcccaacataaacccatgcctcgttcttgccaaaaacgtaaacttgcagaaagagctttccatgccacttctcgtgagggtgtgtcaaatctgtgtaacataaaatttgacaatggctacgaaatttaattccttctcagtaaatgtagcctatgacgacgagctcatgtccatactacacaacgactcctcaacgctgccaaaggcatcactgttcttaacatcgtcccatcttagcacctcccggatgtacctgaatgcatcatccaccgttttccgctctagggctttggtctggaacacgaagagcttccggtcgccgatacttggagtacaggaccttgaacttcagcgcaatgtagtagtaggcgtggctggctagtgactgatgcgtgtggtgtggcttcacagggctgaagtcagcgaaccagtcacatactgttaggggtacacggtttacttttgcttcgaatgagtcatacttgttcaggagaagcacgcatgtggtgtcctcaaaggaagggtggctgatcacgttctcaaacatgtctctgctggcaatcatcttgttgcagagctctcctgagccccgcacccacatctgatcgtagtctgccagcgagatgcaaaagatgatggcccgcacctcctctagcatttccaaacacctcaagcctccattaagtcctttcgaattgatgcgtattaactgatactttgttagcatggatggatcgtcaagcttgtccacataagattcagtgaatggatatcgatcgtcaagtgagaattcaagcaaagataggccgttccattggttgataccctctgcatacaaaatatctgtctctgttggttcatattcattgcttgatatttcaaccaccttaaccaggaaatagctggcaacatctggaagaaaatggaactcattatttcttttatatgttgcttgaatagcagcgtctttccaaacctcttgaacaattggtgcatattctcgagttgcagcaggaaagaaggcatccagatcacccagtgcaactatctccaacagccagtcagcaaactgcatcagtctttgattcaacgaatacagagatggcctggtctgagctacccctgtttcaccagcggctttatcaattgtgcaaagttctctgtcttctttcaaagcttgatcctcaaaacattctcgccattcaagtagcgtgctaagatatttgtaaacattaatttgtatcatgagcttcaaatcaagtatttctactggggagaacttgcttccatatagaaactttgcctgcttgaagatcgtgcttgatccagagccttctagtccaaccagtaaaagtttctgaacacttttctgctccaggtaatctggaacaaacctaactgagtctccagtagcatctcctttcaactactcacactatccaggaggtattggcagcgaaaaaaggttcgcaataagacgagttgatgccttttgccaaatgtttccttttataatgttctgtccctcctcctcgtaggatccatcatcatataaccagaaatgagtattccgtgggcactgtacactggccagcttaagcatcctgagttcagtttttgtgatctcccgcccgtttacgaaaacttgtgtagtgccattgctagcgtctgctcgcagctttcctcccacacttaactttgaattaacaattctatcaggcctctcaccttcctttccccacagcccggagtccttgtcataccagtaccggcccggagccaggcggtccggtggcagagcgcacccgatcagaagatccagctccccctgttg

SEQ ID NO: 15070 - DNA, 248 bp, Setaria italica
  Peptide Sequence Number=SeqID_81044
ccgggcccatggaggagctagcagaggccgagcacggcctccggaagctcctccagctccagtgcggcggtggcggcaacggaaaaggtctgtcggcgagcaagatctcggtggcggcggagcagcagcagctggtgttctccaagaagcaggaggtgaagcacctgaagcagacgtcgctctggggctgcaccttcgacaccgtcgtggcgtcgctggcgagggcggcgttcagcaccctcgcgcgc

SEQ ID NO: 15071 - DNA, 940 bp, Setaria italica
  Peptide Sequence Number=SeqID_81045
agtcgatgtatccagctctggtttgaatttttgctaatatctcagcctctctttttgagtgaacatgagatttgtgagttccattcaactgcttagcatctttgtcatagtcgttggccagcacagatataaccctgcgtaatgtgtttctcctgaacagaaatattacagagacacccttcttgttcaaataactaactatatcatcatgattttccaaaattccctagaaaaacacaatgttggaagttattgccaagcacatatttaacatccggtaggcatgagtataactccactcatcctgataaaatgggcagaacaagcatcaacatggattatcatttttacaagttagcaagcttgaacggtgaatgcttggtacagactagagttttgagaacagcaggcatgtgagcagttggcagttggtcccttagctttaggaaaagcatccttattgcagtatggcacagttgaattctatctataattctaacagcattcaaacttttttcaaggaaaatagatcatgtaaaaaggttccccatactttacaccacaggaactgtagtttatattacaatgttagttgccactggaataacctcatggtatgctgtttctttctttagaaaaaaagaaagttcagaagcttaaccatcaaatacaaactaaccttctaaatgttcagaaggaccataaaaaacccaatatcaaagtacctgattaagcatcaatttcagtccaaatgcagctgtgcactcattcttcgctgcactggtgagccagtccaaattatacagtttgtcaagtgtttgtaggatagatgagatattttctcttctatccactctgttaaagatttcgccgttggaactaatgttaggatgactatttagcaatgtctcaaaccatccacttccggatctttgcatta

SEQ ID NO: 15072 - DNA, 471 bp, Setaria italica
  Peptide Sequence Number=SeqID_81046
agtagaatcagagtcgatgtatccagctctggtttgaattttgctaatatctcagcctcttcttttgagtgaacatgagatttgtgagttccattcaactgcttagcatctttgtcatagtcgttggccagcacagatataaccctgcgtaatgtgtttctcctgattaagcatccatttcagtccaaatgcagctgtgcactcattcttcgctgcactggtgagccagtccaaattatacagtttgtcaagtgtttgtaggatagatgagatattttctcttctatccactctgttaaagatttcgccgttggaactaatgttaggatgactatttagcaatgtctcaaaccatccacttccggatctttgcatagacacaattacaaagaatcgaacaggagtacatgagcacttccccctgctataactcctaggtttgaagtgcgtgtaacggagctcctcatatgg

SEQ ID NO: 15073 - DNA, 403 bp, Setaria italica
  Peptide Sequence Number=SeqID_81047
ctattgccgattatatcctcgtaatagagcatcatgtgccgtgtactcttgaagtgatccaagcaatctctgatggccttctcaatgtttctgatatttgtgatcagagtcgatgtatccagctctggtttgaattttttctaatatctcagcctgctcaaaatgaatcaggtaagttgatggtacaatgtcggctcagatttaatgttctcttttcccataatcaaaatcacgaatttgttctaaaataaatgatatatggactaagccacatctcatgtaaaatgtgctacggacagcaatatgctcaaaaggatacaagggacccaaaagaacaaagctaagtcagtaaactatttgaaactgtttgtgcatcaaagatacctcttctttttgagtgaac

SEQ ID NO: 15074 - DNA, 1216 bp, Setaria italica
  Peptide Sequence Number=SeqID_81048
aaccatcaaggaagtgagcaaactctgtgccgttcagtttgctgctcacgtctcccagttcttgacgaggtctggcagtggtctcgtgtgaattttcacctgcctgctcatcaggggcctcaccggaactctcagaaactcctgcacctgggaaagtgcattgctattgccgattatatcctcgtaatagagcatcatgtgccgtgtactcttgaagtgatccaagcaatctctgatggccttctcaatgtttctgatatttgtgatcagagtcgatgtatccagctctggtttgaattttgctaatatctcagcctcttcttttgagtgaacatgagatttgtgagttccattcaactgcttagcatctttgtcatagtcgttggccagcacagatataaccctgcgtaatgtgtttctcctgaacagaaatattacagagacacccttcttgttcaaataactaactatatcatcatgattttccaaaattccctgattaagcatccatttcagtccaaatgcagctgtgcactcattcttcgctgcactggtgagccagtccaaattatacagtttgtcaagtgtttgtaggatagatgagatattttctcttctatccactctgttaaagatttcgccgttggaactaatgttaggatgactatttagcaatgtctcaaaccatccacttccggatctttgcatagacacaattacaaagaatcgaacaggagtacatgagcattcccccctgctataactcctaggttttggaaagtgcgtgtaacggagctcctcatatggcacatgaggctttctgcaaatatttgccctttgttcttctccactattcccttcccttttattctccagtgttatctgattgaaggagaggtagcatacatagaatccaaataaggcaacgaagaaaacaaagaccggtcgcggcagaattggtgctcccttcgaactcttaagtgaaaatgggtgcattgtctgcttgcgacagataactactgtcgaagctggcttcttgttctccaacttgagcgcagcagagaaacatgcttaatcctaattgacatcagaagctcaccatgtgcgaaagaatcacagtgcatcctggttggttcgtcagcgccaacgcagatttcctcctcgcgatctctttcgttcgacttttcctagcatcgcttggtctcgcgaacaagaa

SEQ ID NO: 15075 - DNA, 221 bp, Setaria italica
  Peptide Sequence Number=SeqID_81049
gaaccatcttgcatctgctccaggccacattgcaatttgcaaccgaaagcagctgctgagaatttgcaatggcgtcttgctatgctctgaggctggccgccacctgcatgctgctcctgtgcgtcggatcatcggacctgctggcgtagccggccctcgcgtcgtcgccgccgccgccgtcgcgggatgaccaggagcaggccgccgtagccggcgagctg

SEQ ID NO: 15076 - DNA, 417 bp, Setaria italica
  Peptide Sequence Number=SeqID_81050
tttttaatatcgttagaatttgttatttctatgcgaaataagtgaagagaatagaataaaaaatcgtggttgggaaggttatagtagcaaaagccattggaattaatatttatatatcggaataattcgttttgttattaatgggaaaaagagggttaaaaagaagagaaatcattagttattcattaaggttaatttgattcaatgaccagagttccgcgaggatatatagctcgaagacgacgaacaaaaatgcgttcatttgcctcaaactttagaggggctcatttaagacttaatcgaatgattactcaacaagtaagaagagcttttgtttcttctcatcgagatagaggcaggcaaaagagggattttcgtcgtttgtggatcactcggataaacgcagcaacacgagga

SEQ ID NO: 15077 - DNA, 468 bp, Setaria italica
  Peptide Sequence Number=SeqID_81051
acaagttactgatcttgtggttgctcctccagtctttagatgctccagaacctgcagaatcaaacgaaattaatgcccaaggattcatggcaaattaagctgaaaatggtaatcataatatagaagaaagtgatgtgcaggcatgaagtgctgcacatcatgcaatgatgcaagcatgtggagaattgggtttctttgagtgttttgttagcttgctgccggttaagaaacacatttgcttggctggtgcagcagtcttgaagtgggtttctttgaaaattcggttagtttgctggcactgaagaaaagaattgcttggttggtgtagcgatcttcacgtgctcagtaggtagccatgggaagacatggcccatgtggagctgccaagactccatttttgcgcatgcatgtgggttatgctggtatgtcaatgatgaatatataaagaactttagagtccttgcaatg

SEQ ID NO: 15078 - DNA, 2005 bp, Setaria italica
  Peptide Sequence Number=SeqID_81052
ttttttttttttttttattggtacagttcctttattccatatggagtcagatttttcttatcacagttttttcctgtacataacagtgcatctctccatacagctattttatctttagactgcatggtttaatcaggatacgaggtcgcaaaacctttccaaaactatagtcagatccagccgaacgtacatttgcctagagttttgagataattagtctgaaacaccatcctcgcaaaattgtaaaattcagtagcttgtgcactataggtcaggtcagctacagagccgaattcaagtctcactgcagaagaactcctcggctctgtccaagaaagaagctgggatctttctatgcaacatgaagttagatgaagcttcaccagctctttgcttcagaggcccatcatcaacacctcttcctctaccatccttctgaaccctatttctgttgaatctgatgcctcctgaaacacccttcccaacaactggccgtccaattttgcggcttgaccttattgggatgtcaccttgtgggctcctggtatcaagtaaactctgcgtgttatcactggaattgtttccagaaccatctacagcaatggaatctggagaagtcaatgatgtttgacaggacttgagcaaagaacgaagcatatccgtgcttatttcctgttgtacaacacttcgattctgatcgcaaccgtagcaaacagcgatcagagcagcagccaagatgggcatcaactcggggtcactgaagaaaacaaatggcaagtcgcacagcttgtgaagtatggtgggactctttccccaccgaagaacagcttggttctcagcatggaacaaagaaaagtagccaagaagtagcagagactctagaagcagcaaaccaacctgatcgtttggtactctccatttgttcatgcaatggctcagaaggaagctgattaaatggaagaactccatctttagatctgatctagccagcatgcactgcagaagatttatatccaagcgtgccacattgttcaaaacttttaatacaccagtggctacttcttcaaaatttgatggaagaatagctgaagtctgttctgaagatgatctgttgttcgcctggagcaacacagcagtcaaaagtgatggtagactaacaaggccagtctcagtcatagcagaaagtaaaagcattacaggatgctttaggcttgtctcgttgccttttccaggactactgttataccctgaacctacattgttcacctttcttccttcaagaaaactgtcgattgtgctattttcatctccctggctaggaatttcagaacgcttctctgtagcaatccccaaatcaggtggttgcattgctggattattcaggccacctgagacaggtatcaagtcttttctagcttcatcaaccaattttctgtccccaggaatgctcaagtcatgcagtttacatgatttgttttcttcaggcagttcactacacaaggatgccaatttgttatctccagactgctctagtgtcatcaactggttccccatactgtcttgtgagctaagatattcatattcttgaactatagtgccacctaatgtcctgcatttgcaggactcccaatcaatggtagagaaatttccaggtttagatgttaagacagccaaaaggttgagaccaaagcgtatagatgatgggagtggggacccttccacctggggcctatcataaagggcaaacaaatctcgcagacggtgaattatttgataagctacaatcagttcgatcaaacctccctgcatttgaagttgttcatcatcgaggtgtacatggccaacgatcatggtcacagtccataagaagccatctaacacttcacctgatgactctgtattctcggttgaagttttgttaggcagaagattttatcattttgctagtagtgctgccaccttaatgtaattctccagtgatgctgatagcatgggaataagtacg

SEQ ID NO: 15079 - DNA, 1186 bp, Setaria italica
  Peptide Sequence Number=SeqID_81053
tgccagaaaacaaatttgacaggctcaagtcagccgatgttgttaaaaagagtacagttcatcttgaaaaggagaagcaaattacagcaccttggaagtcaatggatgcctggaaggagaaaaggaactgggaagatatattgaaatctcctgcacggagttctcgggtttctcattctcctggtgttggcagaaaagttacagatcgtggtcgtgttctacatgacaagttgatgtctcctgaaaagaaaaaagaagcgctatggatatgaaaaaagaagcagaagaaaagcatgcacgagcactgcgaattaggattcaactagaaagtgagagggttcagaggctacaacgtacctctgaaaagttaaatcgtgtcaatgagtggcaggctgtgcgcagctcaaaactgcgagaagtaatgaatgcacgccatcaacgtggtgaatctcgtcatgaagcatatcttgctcaggttgcaaaaagagctggtgatgagagtactaaagtaaatgaggtccgttttattacatcgctgaatgaggaaaacaaaaaattcttgctgaggcagaaactttatgattctgaaatgcggagagctgaaaagctacaggtgatcaaaacaaagcaaaaggaggacactgctagggaagaagctgttttggaacgaagaaagttccttgaagctgagaagatgcagcgccttgctgaaatacagcgcaagaaagaagaggctattttcagaagagaagaagagcgcaaagcatctagtgctgcacgggaagcaagggctgcagaacagcagcgtagaaaagaaataagagcaaaagcgcaacaagaggaagctgaacttttagcccaaaagttagctgaaaagctccgtgagagtgagcagcgccgcaagtatcacctagagcagatacgggagcgagcctctatggatcttagggatcagacttcaccttttcagcgccgctttccaagtaaagatggccaaatccgttcaactaatagcggcgaagactctcagattactggcaattccagcaccgcagactctgtggttaaatcatcgaataatgtacagatgaaacgaaggatcaaaaagattcgccagagattaatggctctgaagcatgaatttatcgaaccacccataggtgaaagtactggaatcacactacta

SEQ ID NO: 15080 - DNA, 477 bp, Setaria italica
  Peptide Sequence Number=SeqID_81054
ggttctagtaattaattatttcgtcttagccttcggatgatcagcaggccaagggcatgtgtatgctagaatgcgcatgctatcaccccatctgcaggaacttggtctctatctatattggaggagccacctaaagtgatgatccagtgcatcataccatccttcagtgccatgctccaaacagaaacgatcttcaatgacagtttcagatatctaaggtgtagtcaaaagaaaacacattcatataattacaattcacatgtgaattgtcagaagctgcaacaaaacattggtatggacaattcaaatgtgaattgtcagaagctgcaacagaacactgatatagacaattcaaccataaattataaaatgtggttccgattattgcgttgctgccaggagggtggttgcttggggaggattgaagttgtagccaaacgcagtgtgggggtgagggacgggattgttaacgttcgt

SEQ ID NO: 15081 - DNA, 690 bp, Setaria italica
  Peptide Sequence Number=SeqID_81055
gactcagtgtgagtagtcagtaaaaagtatagcccagaaatcaaagctaaatgtcacctggacacttgtgagcatgccagtatctgattgagcttgggattcttgtttaacagcaccatgaaaatatttctttacaataagatgattgtttcatattttcatgacctgaatctttccagaccttttttaaaagtagctacggactaaggtatataagtaggtaaactcaataggttactcaaggatctgaatttgacatctcaagcaacacattttaagaaaagcttatgttacttacagagtgatccttccaccacattatatccgatatattcatatagaatgtgtttaatgacatctctttactctagcatacatttgaacacttgggtcagtgtcataactaagaactgacaattgtgcggaagcatccctaactaagatatatttgttttggttttttttcctgtaagcctaaaggcaacatttatttctgatataacaagatagaaagcagcaagggaattgcttactctagttctgtcttaaccgcagtaatgaatatttcaccctcgtataaaccaggtggttgtccacacggaacgtttaacgatacccatactgcagctgtctcccctgggtgaagacttatttgaggactgagtggatcaataggcacaagagcatctg

SEQ ID NO: 15082 - DNA, 1520 bp, Setaria italica
  Peptide Sequence Number=SeqID_81056
ctaagacctgcaggtgcggtatacctcaccccgccatcacatctaccggtccatgatcgagcgtataccgatcggggccaagatacatgcccgtcttctcgagaagggccaggccttcctccctcccataccgtgaagaataaagcttcaggtactcgatgtcctgcatgccactgagaatgcgctctagtcgggtggatgcaactggttcatgtgatgaagagaacacttcaccaggatagaacaggaccccgtcgccaggaggaaggccacgtcggaaacagatctcagcacttggaatcattgccttctcataacagttggtaccccaatagaggaatcctgtcccaccttccttccacactctccacatcaccgcccggtgctgggttccgcgcattccaaggtgccagtttggttgaggatcagaagggcccatacaaacatatgtccaccactcctcacccagatcaggtcgtagttcagcaacaatatccttcactaggtcttctcttgtgccaagaacccattcacttgtgcagaagatctgtgtgtgcggacgtaaaacatttggaactttcacaaaagcttcaaatgtagaaggagccagttcagagccacttgggccacaataataagttgttaaaattcgcacgtcaggtgcatacgactttaactcattagagatgttgcatatcatgtcatattggtccacattcaatggctcatcccacaaatagaagtaagcttttgaccaatgaggcttcgattttaagatttcaacttctctcctcaaggaattttttgcagcatcagtacatgataggataggtgcatagggtacagcatatgctgctaatcttgggtcagaataatattcgctagccttcggatgatcagcaggccaagggcatgtgtatgctagaatgcgcatgctatcaccccatctgcagaaaaatggactaattctatattggaggagccacctaaagtgatgatccagtgcatcataccatccttcagtgccatgctccaaacagaaacgatcttcaatgacagtttcagatataccaaaaacagcaggtaacgaaggtgtcactggaagagtgaaatcccaaacagtaaggcttaacttcaaacgaactgaaacattgttcataacatcttcatccatcatgtctccaaatccattattctcttgacagtcctggagtgctggattatccaacatcctcttcagtgtggtagaagctgatgttagcctttgtaccatttcctctgacgacgagtagtctctgggttcagtgatgtcaagacaacttctcaattctctatgcagcctgtacctttcagattttggtagagattctgttctggaatctagttctgtcttaaccgcagtaatgaatatttcaccctcgtataaaccaggtggttgtccacacggaacgtttaacgatacccatactgcagctgtcctcccctgggtgaagacttatttgaggactgagtggatcaat

SEQ ID NO: 15083 - DNA, 1090 bp, Setaria italica
  Peptide Sequence Number=SeqID_81057
cattcgtgtgcattatttggtgcctgaaatctatttggcataaataaatatagcaattatacaatcttgcaggattccgagtcttcatgtgctgcccaaactttagaaaaaaattataaatacgtattccagggtggtctatgtcaaacaaaaaataaagtaggtgtacacaatctggatgtcattcattacattttggaaggccgccctttgcgaaatcaattgccatgggatgatgcttcattgcttgataatcttacactatttttacgaggtgaaaacatccatcctcatctggaggccaacaacaagaagggggaaaaaaccctactgcccaagtttcgtctggttcagcttgctattctacagtttcagtccagagtgaatggcaactacaccacccacgagattctcatattccaccctctcgaatccagcttcctggatcatctgagcaaacttttcctgatttgggaaccgacggatactctcaaccaagtattggtacgactgtcgatcaccagcaaccagctctcccatagttggaaccacagaaaatgaataaacatcatagatctgtttaaaaaccgggacatccacatgactcaactccaagcataggaaccttcctcctcgctttagaactctgtaagcttccgataggactttctcaatgtgtgtcacatttctgatcccaaatgcgatggtatagccatccatagatccatcctcaaaactcagagcttctgcatctccttgtatccagctaagacaatgttcttcactgtaacctctttctacagcacgcttcttcccaacgtttagcatatttggattaatgtcacagacataaatgtgggtgtcttcttcggtagcagtaagagtaccctgcatagctctgtggcccacgctcttgattctttccagtatagttactacgacatcccctgttccaccagccacgtcgagatgcttcatccccggaaaggggttcaacttggaaacaagcctgtccttccacagcctatgcaggccgacgctcatgagatcgttcatgaggtcgtagctggaagccacgctgctgaaaacg

SEQ ID NO: 15084 - DNA, 261 bp, Setaria italica
  Peptide Sequence Number=SeqID_81058
atcctaatccattcttccaagcacacaaatcaagaagaggaaatgaaaaatgacgatataaaatttctaacggcatgtacaggttaagtgctcttggaaaagcctctgaagccttggatcagcaggcagaacccctgccccgatgctcctacgcctccgggcttctgtcgccgaccgctcgacggtgccggcggcttctcctgctcctcgccggcgtcggcatcgtcgtcctccgtccacagcctcgtctccgacgcgccg

SEQ ID NO: 15085 - DNA, 1321 bp, Setaria italica
  Peptide Sequence Number=SeqID_81059
tcaacaactacttccccgaccccatctcgggggaccacttcaacatggccaaccacgatcccaagtggtggggaggggagccgctctgggccaccgctgccgcccagggcgtcctggccgccacattcttctggccgggttcggaggtcaagaagggttcctggaactgcccggacaagtactgccgccactacaatggttcggtgccgtttgaggacagggtcgacaccatccttggttattttgatctcccgtctgacgaaatgccacagttcctgacgctgtacttcgaagatcctgatcatcaggggcaccaggtgggtcctgacgatccggcaatcactgatgcggttatccgcattgatgagatgctcgggaggctcattgctggtttggaggcaaggggagtgtttgaggatgtgaacattatattgctaggggatcatggtatggttgggacatgcgacaagaagcttgtgtttctcgaagagttggctccatggattaagctgaaggaagattgggttctgtcaatgacgccattgctggcaatcaggccaccagatggtgtgtccccagctgaggttgtagccaagatgaacgaggggcttgggtctgggaaggtggagaacggggaatatttgaggatgtacttgaaggaagatttgccttctcgcctgcattactcggagaattacaggatcccgccaatcattgggctgttagcggaaggctataaggtggagatgaagcgttccaagaggaatgagtgtggaggggcacatgggtacgacaatgccttcttctcaatgaggaccattttcgcggcacatggccctcgttttcaggggggtaggactgtgccctcatttgagaatgtggagatatacaatgttatagcttccattctcaatttgaagccagctccgaacaatggttcagcttctttccctggcatgattcttttatcgagcaaatgatcatggatacatgtatgagctgtggtcttataggagtaaggctatgctgctgcctggtgttctcttttggttgttgttgtacctgctaaattagactcctgtcaccactagctgttcactgtatctgaatgaaaatgctgctagtagagagtatcttttctttagggacggcattttgaaacatgattcatgtcaaacctttagctgctctgttgtgctggattttttctccaggagttcatttgagctccgtgattttctgcttgagatgatgatgatgcacgtcctgttgttaacatatccatgtctcatggtacacctttcaaccattgtattgcatt

SEQ ID NO: 15086 - DNA, 596 bp, Setaria italica
  Peptide Sequence Number=SeqID_81060
aattaaggactctgtcattgccttcagtctcgcgtcttgtgcttccataagtttactctagtggctgtcagcattccagcttaggagagcattgcaaagtacagtgatgatgatgacaaccagcgatgcgatcatagcaagaccaactgcattatacagaattacaagagcaatgcaaagttggacacttgttgaccatgtctgatggaaccagtatgggaattccccaatccggtaggcgtctacggtgacatagttcatgatctctccagaagaatgcttcattttcgctgagtttgatagcttctgttgtttcttatagatagcagctgataggaatgatctcacttggagtcctaacctccgagtacggaaataccactgccgttgtgacaaagattcgcaacatttgcaaatgaacattgtagcagccaacacataaccttcatatttaaaggagccttttccaagtgaaacattgatgaatgctttcagaagcactggacctgaggatattgcgagcaccttaagcaatgcaaacaaacctgagactacgatcccacttctgtggcaagaaatgatagtccaaaagactg

SEQ ID NO: 15087 - DNA, 534 bp, Setaria italica
  Peptide Sequence Number=SeqID_81061
atcagcaccagcacgagcctgtgaaacagcctgcttgcacaactgataaactgtttcatcattcatgattactccattatgtcctacacggcgaagtatgccagttcattttatggcccattcagagaagctttagattcaaatccaagatttggagataagaagacttatcagatgaacccagccaactacagagaagctctcatagaaactgcagcagatgaggcagaaggagctgacattctactagtgaaaccaggattaccatacttggatgtcatccgacttcttcgggataattcagcattgccgattgctgcctaccaggtatccggcgagtactcgatgatcaaagccggtggtgccctgggcatgatcgacgagcagaaggtgatgatggagtcgctcatgtgcctgaggcgggccggcgctgacatcatcctgacgtacttcgcccgtcaggccgcaggcgtccttgttgtcggtctattgggtattcctaagttaggttctaaaaccttggtaaaaggtcct

SEQ ID NO: 15088 - DNA, 1754 bp, Setaria italica
  Peptide Sequence Number=SeqID_81062
aagaaacgcaagccgctagtctactaaggcgggcgtcgccatcggctaaccgaggcctcaggattagcagccttctccgaaatccctctcgtgctgctgcgtctcctcccccctcatcttctccttctccagcgtccagcttggccatggcgtccaccgtctccttctccccctccaacgtccagatgctccaggctaggagcggccacggccacggccacgcggcctttgggagctgctccgctgttccaagagccgggccaaggctgcgttccacggccgtcagggtcagcagcgagcaggaggcggcggcggccgtcagggcaccgtccgggaagaccatcgaggagtgcgaggccgacgccgtcgctgggaggttccctgctcccccgcctttggttagaccaaaggctcctgaaggaacaccggagatcaggccccttgacatgacaaagcgccctcgtcgcaaccggaagtcgcctgctcttagggctgcattccaggagacaaccatctcacctgccaattttgtgctcccattgtttatccatgaaggagaagatgatgctcctattggagctatgccagggtgctatagacttgggtggaggcacggacttcttgatgaggtttacaaggcacgcgatgttggtgttaacagtttcgtgctatttccaaaagttcctgatgcattgaagtctccaacaggggatgaagcatacaatgataatggtctggttccacgcacaatccgcttgcttaaagacaagttccctgatattgttgtctacacggacgttgcattggatccttattcgtctgatggtcatgatggtattgtgagggaagatggagtaatcatgaatgatgaaacagtttatcagttgtgcaagcaggctgtttcacaggctcgtgctggtgctgatgttgtcagccctagtgacatgatggatggccgtgttggagcacttcgtgctgctcttgatgctgagggtttccatgatgtctccattatgtcctacacggcgaagtatgccagttcattttatggcccattcagagaagctttagattcaaatccaagatttggagataagaagacttatcagatgaacccagccaactacagagaagctctcatagaaactgcagcagatgaggcagaaggagctgacattctactagtgaaaccaggattaccatacttggatgtcatccgacttcttcgggataattcagcattgccgattgctgcctaccaggtatccggcgagtactcgatgatcaaagccggtggtgccctgggcatgatcgacgagcagaaggtgatgatggagtcgctcatgtgcctgaggcgggccggcgctgacatcatcctgacgtacttcgcccgtcaggccgcaggcgtcctgtgcggcatgggatccaagtaggtcaaaacctggaaaaggccgcggagctgatgaaacgccgccaccattcttgcattgcgtatcacgcgacatgatgagcttgagttgaggcccgttctgcagccgtatcattgtgtagcccaattagttgctgatagtagcttgcaaatatcgtgttgaggatgctttgcttgaacttgggactcgaataagtagtgatacgtattaacacgtgaattggtttgcgtcaggagatggaaatagtcgtgcaaacactgtcaagttccttttcttttccctaccagagtttggaatgcagagctgaagattttacgacaaaaa

SEQ ID NO: 15089 - DNA, 540 bp, Setaria italica
  Peptide Sequence Number=SeqID_81063
ttggttgtgcattgattaatgataacagatttgcctcaggatctgacaggcgatgacttctcgacgaaaatggtgaggagcaggaatgcgccgagtgagatgaagagggccgcggtcatcaagatgagcatggcctgtagcgtgatgtgcgggctcaggaagaagatgacggcaatagcaccacattcccagaccttgaactgtgcaaaggaagcttccttggaatcttcaaacaaaagtccaacgactgcatttaactctgtattcaacatcccatcaccaacaccccataaggcgcctatgagtagcggaaccgctgcgccaagcactccaaccattgggctgtaaaaaagaagcaaccaaaataggactacagcatgggcaatagctccgaatgacactattagtgtagctgaataaagtccagaggtcaaatatccagtaaccaatgcacaaactgtaccagctgcaccaaagattgccatggctccaccaactccagaaatgccaagcgcaggtgttacaatgctctttgtgaat

SEQ ID NO: 15090 - DNA, 572 bp, Setaria italica
  Peptide Sequence Number=SeqID_81064
cctgaccgcaggaacaatcatgttagtcaagcccgcaccgtgaacacccatgattgcatcacaagagtcgaccaggcgcacgaattcatcaagattggagtcaatcctcgggtctgccttgaccacctcgaaaccaaaccaatcaagtccttgtaaaacatcaggggcattcatgaacctccgtgtcttgccccgatcgatgagcattatccggggcttcctctcagggtcatctttgtcagccctgtatggtatatccacttcgggtgcaggcaatccataggattcacggacaaacaagtggaaatccaccatcgtgtagttctgtggcgtagagttcggatcaataccaagatcccggtggctcctaagtccaacaatgacatgtggatagcacctgacctggttgtctgcatcaaaatcaataatgtggtgcttcgtgaggcggtgaaagattgctgcatactttttgatgaaccagggcttattgttggtgataagtagttgaacatctcggtcaaactggtgggcagtaagaaacagagggagaagaacatcactgacatcatgcc

SEQ ID NO: 15091 - DNA, 460 bp, Setaria italica
  Peptide Sequence Number=SeqID_81065
acggcaccatcatatctctcacagtaggcaacagcagatatcgcggcattgtaaacaactgcctcgcggaactccctctcagaaggtaatcttgccacaatctccaagacctcatcagccatccggcaccgcccaagcgcaacaatacctgccaaccatacctgcggtgacaccggcaccggctgcttctcccgcaaccactggaacaggtgtgcacagtccagtccctcttcagacatcctcctcaataattccacgcaaacctcctcgttgaggtccccatggttgtaaccggccaagaactcggtgaaagctgagtgacccgccgccgccaggctccttgcgaaggagaggatttcctccatggctgccgtggtggtggtgcaaacgccgctcaccccttcttggcttggcaagaaggaggtcgggtccaaccactcgcatcctcctccattgtcga

SEQ ID NO: 15092 - DNA, 302 bp, Setaria italica
  Peptide Sequence Number=SeqID_81066
gtagagaggagaggaggagcgggtgattgccgcagcggtggccagcggcagcgcgtgtgcgtgtgcgtgcgctctccccctcgcgtactcggagccgagcggagcggcaaccacgcacccacgcccgcgcccaccaggccaccaccacctccgtctccgtccgcgggtggggcaagcgaaaacccgaggcgagagaggccccaaatcctaaccaccgcaggggcggcctcatcctccccgctcccaccgcccgtccgccgcacgcgcgcacgccagatcgctgcggcggcgcccgcgcgcgg

SEQ ID NO: 15093 - DNA, 436 bp, Setaria italica
  Peptide Sequence Number=SeqID_81067
gttgctggtgtgcgccgcggagggggacttcctcaggtggcgcggccgcgcgtacgcggaggcggtggccgcggcgaggggcggcgggctgggggaggacgcggccggcgtcgagctgctggagaccgtgggcgagggccacgtcttccacctcttcaagcccgactgcgacaaggccaaggagatgctcgacaaggtggtcgccttcatcaacgcgccttgatgatgatgtgcacccccgttgttgcttgcgcttggaacttggcatcgtggcgctgctccattcccgtcgttgagtggctgagaaccatcctggcattttatcatggcgatgattgaaaaataaaagaacgggtcgagttggtgcaatattttgttagttaatttcacctgcatgaataattcgggtgatgcaggattaatgagaggacaaacg

SEQ ID NO: 15094 - DNA, 248 bp, Setaria italica
  Peptide Sequence Number=SeqID_81068
gtggcacccgccccgccaaccaccgggctaagtcaaccagtcatctcgtccagtcccactggttcctggcgcacgcatccgtcgtgtccaagtccaatcaggtgccttgatttctcggagttcttgagcttgagccgggactgggtggtgcggcggtgagggccgagcggtcgagttcttggcgattggcggctgtacatgaggggctgtgccgggggaggaggcaacctggggaaggaggcggggga

SEQ ID NO: 15095 - DNA, 864 bp, Setaria italica
  Peptide Sequence Number=SeqID_81069
aaggcccggtcgttccctgagccaaggtgattgtccgggcaaggagaatcaatcgtgtggcacgaactcttgcagagattttgggcgggcgcctttgagtaatgtgccaaaatgccggataccgccagcggagaaatgcgctggagttcagacaaccagtacggtggaagatcacaaagctatcgacggcagcaatggcattgattcagacatggcctcaaccgcggcgaacaaagtctcggaggagctactgacgtgcctgatggccatcttctcgcagatgagcacctccagaagccatgacgaggagcaagcatcgtcgccgtcggtatccggttcctgcgagagcagctcagacggcgcctgcgctggcaccggagatccctacggtgtcctagaattcgggtgccgagacattggctggtacaagcagttccgatcagtcgacgctgcttcattcgacaccaatgtgtctgccggcgatgccgccgctcttggtcggagattgaaggcgttgctccggaagctctcctcggttgacctagtgggcctctcccaccaacaaaggctggcgttctggatcaacacctacaactcgtgcatgatgaacgcatttcttgagcacggagcacctaccaacccccatatgctggtggccatgatgcccaaggcgaccatcaacgtgagcggccgcgtgctgagcgccatgacgatcgagcacttcgtcctccggctgccctacggcgcaaagcatgtgaacacggaggcggtgaagggcgacggcacggccgtgttggggctggagtggccggagccgctggtgacgttcgcgctctcctgtcggtcttggtcctcgccggcggt

SEQ ID NO: 15096 - DNA, 796 bp, Setaria italica
  Peptide Sequence Number=SeqID_81070
ttttttttttgtaacactgaatagggtatgagctattatcttattttgttctctcacccaacattgacctcacatcttgcacttattggtcactcgcataaagttgagcacattcttattgctacgtacacctgcaactcaacatcatcccaccactcttgtctcatctagtgctggaacttccagcacgtacagtacaacacatacaaacttgggcgctgcttgatcagcagcaacagcaccatacatacactatacagccacctgggcattcagcatctttgctttgtcagttgaggtgctcctttggatagcaccccctgatcatgcccttattcagaacacacccttttctttcaagagcttattcacacacctggtatagccgtataggtaatgtacagtacatgtacatctcactctgtacacgctataggcccgtttggaacacaggcgtttcacacaatccagccgtcttgttccggccagaataccgtcaaatccctgtgctcaactccaaacggtgcactaacctgcgcaacggcgacgcgacgccgatcggaggaggggagacaccaggctggccctcgccggcggggacgcggccggggacagcgacgtggcggcgtaccagctgccatcagggtcgccgaagagcctcgacgacgacgacgcccgcgagccacacggctggtcgccgtacaggaagctcccaatggcgacggcctccctcgccttcctgtactccacgatggccctgtacaccaacggtatcagcccttccattgctccagag

SEQ ID NO: 15097 - DNA, 325 bp, Setaria italica
  misc_feature (236)..(236): n is a, c, g, or t
  misc_feature (284)..(284): n is a, c, g, or t
  misc_feature (296)..(296): n is a, c, g, or t
  Peptide Sequence Number=SeqID_81071
ccctcgcgggtgacttcatgaagcccaggatccaagaggtggatcagctgctcaagctcggcgtcaatgttaccatctacagcggccagatggaggtgttgctggcacagtagtggtcacatttgccggccgtgctctggcctgtgtgtcagcagcaagcaagcgagcatgtgcatgctctcaaatcttgcctttttgttggccggtgtcattcacaccatgtactgcttgctacntgagcagccaaatcgtgtggcacgtgcagtgtgatcccaatgcaaggntccatgggaatntaactccatgatgaacgtacagtagatgc

SEQ ID NO: 15098 - DNA, 691 bp, Setaria italica
  misc_feature (676)..(676): n is a, c, g, or t
  Peptide Sequence Number=SeqID_81072
cggggtacctcgagtccatggcggcggcatcgcaggagggcggcttcgaaggtctcatgaacacggtcatcaagaagaagctcggcatcgtccccaaggacgtctcgtggggagaagagtcaggggatgtctttgacgccctcgcgggtgacttcatgaagcccaggatccaagaggtggatcagctgctcaagctcggcgtcaatgttaccatctacagcggccagctcgacctcatctgcgcgaccaaaggcaccatggactgggttcagaagctcaagtgggacggcctcaagagcttcatggactcacccaggaagcccatctactgcaacaaggaaggccaatccggcacccaagccttcgtcaggtcctacaagaacctcaacttctactggatactcggagctggacacatggtacccattgacaacccttgccctgcgctgaagatgctggctgacattacacgatctcctgccaagtaacaagtaggagcacaggacgtcgaggacgatgaaatcaggctacagactacagtcaactacaggctgacatcaagattctttttttttcccattagttttgtaatactacattcagtcttctttcatagatacagaaaaggattgattgttggcaatttacacgagacatgcaagaatcaaaggaaagntatgatagacacaac

SEQ ID NO: 15099 - DNA, 2368 bp, Setaria italica
  misc_feature (2328)..(2368): n is a, c, g, or t
  Peptide Sequence Number=SeqID_81073
tactgtatatagctaggcaggcttccccgtaaagccgcttcgactccaattcaattcaaccgccttcttccgtgttgataggaccgagcagatgagccctgtagcgtccttgtcgcaggtagcaatggcgccgaggccgttcgtcgcgctgctcctgctcttgtgcgccgcggctgccttcgtcctcgccgccgacgccgccggcacggccgacggctccgaggagtggggctacgtccaagtccgacccaaggcgcacatgttctggtggctgtaccacagcccgcagcgcgtggacaacggcaggacgccatggccgaccgtgctctggctgcagggaggtccgggcgcgtcgggcgtcgggtacggcaacttcatggagatcgggccgctggactcggagctcaagccccgggcaaccacctggctcgccaaggccgacctcctcttcgtggacaaccccgtgggcacgggcttcagctacgtggagggcggcgacaagagcctgatggcgcgcacggacgccgaggcggcgcgcgacctcgtcgcgctgctctgcgcgctctaccgcgacaacccgcgcctccgggccagcccgctctatatcgtcgccgagtcctacggcggcaagttcgccgtcaccacggcgctggcggcgctcagggccgtcgagcagggccgcctccgcgccaacctcgccggggtcgccctcggagatagctggatctcgccactcgacttcgtgatgtcgtgggggccattgctgtaccaggtgtccagggtcgacgagaagggcctgcagcagtgcaacagtgtggcggcgaagatcaaggatcaggtggagaagcagcagttcgcggacgccgaggagtcgtggtcggagctggagagcgtcgtcctcgagaactccaactccgtcgacttctacaacttcctcaaggacgatgcgccgtcggacgccacgaccacgacggcgcagcggaagagatcgaccctgtcctcgttcaggagcaagaaaggctactcggggtacctcgagtccatggcggcggcatcgcaggagggcggcttcgaaggtctcatgaacacggtcatcaagaagaagctcggcatcgtccccaaggacgtctcgtggggagaagagtcaggggatgtctttgacgccctcgcgggtgacttcatgaagcccaggatccaagaggtggatcagctgctcaagctcggcgtcaatgttaccatctacagcggccaggtacgaaattgatcagactgactttactcccttgtgtttgtcgatcctgaaactcacagccaaaggtccccaaacttacacatctgattctgatctattcgagacagatggaggtgttgctggcacagtagtggtcacatttgccggccgtgctctggcctgtgtgtcagcagcaagcaagcgagcatgtgcatgctctcaaatcttgcctttttgtttggccggtgtcattcacaccatgtactgcttgctacatgagcagccaaatcgtgtggcacgtgcagtgtgatcccaatgcaaggatccatgggaatataactccatgatgaacgtacagtagatgcacggcatccggaaagtttgtccgtgagtcccgtcacgggcatccggaaagtttgtctccatttttcttttcaaagttgcaaaccaagcctgcctgagtaggctcattgtacaagagacacaggggtctgtcagaacgaagccagctagctcgaacaaaaccaaatgccagccatttcattagatctgcaaactaacaacttgctcttcattgtctaatgatccagtctgtctcctgcattgtgcagctcgacctcatctgcgcgaccaaaggcaccatggactgggttcagaagctcaagtgggacggcctcaagagcttcatggactcacccaggaagcccatctactgcaacaaggaaggccaatccggcacccaagccttcgtcaggtcctacaagaacctcaacttctactggatactcggagctggacacatggtacccattgacaacccttgccctgcgctgaagatgctggctgacattacacgatctcctgccaagtaacaagtaggagcacaggacgtcgaggacgatgaaatcaggctacagactacagtcaactacaggctgacatcaagattctttttttttcctatagttttgtaatactacattcagtcttctttcatagatacagaaaaggaattgattgttggcaatttactacgagacatgcaagaaatacaaaggaaaaggatatgatagacacaacaaaaaaaaaaaaaaaannnnnnnnnnnnnnnnnnnnnnnnnnnnnnnnnnnnnnnnn

SEQ ID NO: 15100 - DNA, 290 bp, Setaria italica
  Peptide Sequence Number=SeqID_81074
cattcaagcagcagcaacgcagatcaacaccttgaagcgaagcaatcgacaactgataagaagaagatgtgccagatcaagaaggagatgagcgccgagtctggctcgccgtgcagctcgccatcggcctccacctcgccggagcaccaccagacggtgtggacatcgccgccgaagcgaccggcggggcggaccaagttccgggagacgcggcaccccgtgttccgcggcgtccggcggcggggcaacgccgggcggtgggtgtgcgaggtgcgcgtgcccggtcgccg

SEQ ID NO: 15101 - DNA, 837 bp, Setaria italica
  Peptide Sequence Number=SeqID_81075
cggcaagcgcaaacgcgacttggcaccgtgcaagaagacacggctgcagctctgtgctctgctctgtacgtgtgctagctagctgttacaagcaacgccagctcgctccacaccccagcgtccgaccaagacgatgtatccggcgaagcccagcgacgcggcggcggcggcgccggtgaccggcgtccccgtgggcggcccgcctgtcgccgccggcaacgccaccagccagtggtcctcggggctcttcgactgcttcgacgactgcgggctgtgctgcctgacgtgctggtgcccgtgcatcacgttcgggcgcgtcgccgagatcgtggaccggggcgcgacgtcgtgcgggacgagcggggcgctgtacgcgctgctggcctacctcacggggtgccagtggatctactcctgcacctaccgctccaagatgcgcgctcagttcggcctcccggagaacccctgctgcgactgctgcgtccacttctgctgcgaggcctgcgcgctctgccagcagtacaaggagctcaaggcccgcggcttcgaccccgaactcggatgggacctcaacgcccagcgcggcgccggcgccggacaagccatgtacgcgccggcggcacaggggatgggccgctgatcgatcatcaactgtggagtcgtttgcatggtgaattgttacatgtccaaaggctgtgtttgttctattttgtatggtgacgggggttattgtgatgtaatgtattgccaggattggcaagccagagatgtgtgtgtgtgtgtttaatttctttcagcccaaaacaaatgtgcatgtgaacatcatcttcagtacgg

SEQ ID NO: 15102 - DNA, 840 bp, Setaria italica
  Peptide Sequence Number=SeqID_81076
taagtaagcggcaagcgcaaacgccacttggcaccgagcaagaagacacgactgcagctctgtacgtgcgctagctagctgttttacaagcaacgccagcgcgctccacaccccagcgaccgaccgagacgatgtatccggcgaagcccagcgtggcggcggcgtcggcgccggtgaccggcgtccccatgggcggcccgcctgtcgccgccggcaacgccaccagccagtggtcctcggggctcttcgactgcttcgacgactgcgggctgtgctgcctgacgtgctggtgcccgtgcatcacgttcgggcgcgtcgccgagatcgtggaccggggcgcgacgtcgtgcgggatgagcggggcgatgtacacgctgctggccttagtggcctacctcacggggttcaggtgccagtggatctactcctgcacctaccgctccaagatgcgcgcccagttcggcctccccgagaccccatgctgcgactgctgcgtccacttcttctgcgagcgttgcgcactctgccagcagtacaaggagctcaaggcccgcggcttcgaccccgaaatcggatgggacctcaacgcccagcgcggcgccggcgccggacaagccatgtacgcgccggcggcacaggggatgggccgctgatggccgccgcatcccgttcgcaattgtgtttgcagggtaaattacatgtgcaactgcgtttgtttaatttcgtatggtgacggacaagggttattgtgattgtaatgtaataatgtcaggattggtacgacggagagatgtgtactatgtgactgtgtgtgtttaatttctttcggtcaaaaagaaa

SEQ ID NO: 15103 - DNA, 274 bp, Setaria italica
  Peptide Sequence Number=SeqID_81077
tgggacggcctgtgcgcgtgcttgaagcgatcgagcaccgcgagcacaagtgcctcagagagcggcggcgcgagcgcggacagagccgccgacgcgaacctggaggcgccggcggcgatgacgtctgcgatggccgcgcacacgcggcccacgtgctccgggtggcccgacgctgccgccgcctcctgctccgacgaaccgccctcgtcgtcgtcgtcgtcggaggcaaccgaggtggagaggcaccttgcggcggggaagccagagagcgcat

SEQ ID NO: 15104 - DNA, 551 bp, Setaria italica
  Peptide Sequence Number=SeqID_81078
ggctgcaaacggcgacccggataggcactccacgcaagaaaaagaagaattccgcgaggaaaccaggcagccagcaggtggacgagagcggcggcggcggcggcggccgagaggaggtgatggcgaggaccgatagctgcctcgcgcgcgtgggcgctggagccgtaatcggcggcgcggtcggcggagccgttggtgcttgctatggaacttttgaggcattcagatacaagatccctgggttgctaaagatcagatacattggacaaacaactgttggcagcgcagcaatttttgggcttttcttgggggctggcagcttgattcactgtggaaaatcctactagtttgtgtcatcttttttgaaaaatactcggttgatgggcttcactggctgcctcagaggaccgtctgtgaaaacatttgttcaatgcttatgtacaatttaacagctaatagctcagggttggaaacaacatcatgttatttgatatgctggtcctagttttggtgtggaataaatccatgttcatctagtaaaaaaaaaacta

SEQ ID NO: 15105 - DNA, 416 bp, Setaria italica
  Peptide Sequence Number=SeqID_81079
cggatctccttccccacttgcaacgcaaaaccccacctccacattccttcccctcccctcccctccgcccccaaatttcaaattccccacgctcctccgcttcccccacccgcacctcctcgccgaaaccctagccgcccgccgctcgccgccgccgccgccgccatgggggttcgcatagccgcgaggacatggacctctccgactccgactccgacgacggcgagtcccgggcctccgacaagtcctccgactacggcacgccgcccccggcctccgcctcctccaaggcggggggcggcgcgggggcggccaccccgcttccatcgacgccatcgaccgccacctccgcagcctccacctcaagtacaacgagcccatctccccgaaccctagccccgggctcgtcgccaccg

SEQ ID NO: 15106 - DNA, 515 bp, Setaria italica
  Peptide Sequence Number=SeqID_81080
gaaaagaagacaataaagaaaatagaaaagaaaacaattcaagttgaaggtccttgctctaaaacggttcatatcatggtgatacactgggcgctatggaagctcaagctccatcagcttatacatcgtttattcagcagccatggtatgccttaatttgagaatcgtagtttactatgccagaaataagagtggcaggggcctccacacccacaaacactgtttactgtactgaacattttttggagttttttactcttctacagttttcttttcaaattgtacccttttctatctctttacgatgctgaatgtttaggagttcatactctccttcaatggttctctttgccaactgttgccttttctgtactagcctcctcttttttttctcaaactacgcaggagagctgcgtgtcatttcattaagagagaataggaagtacaaagagaggggagagcccccagactaagtaccgaacacatcccaacacacacaaaacactacacacacc

SEQ ID NO: 15107 - DNA, 1231 bp, Setaria italica
  Peptide Sequence Number=SeqID_81081
tgaaggtccttgctctaaacggttcatatcatggtgatacactgggcgctatggaagctcaagctccatcagcttatacatcgtttattcagcagccatggtactctggtcggggactttttctagatcctccaaccgtgtgtattaaaagtgaaacatgcaatgtttctttgccccaatcaatgcagcattatccacggacttctggtgatacatgttttccttcactagctgaagttttttgcaagaccagggacacatcatctgctgcagatttatatttgtcctacataaaacagcaattatcagaattttctcaatccagtaattcagaccatcttgcagcactaattatagaaccagtaatacaaggtgctgggggaatgctcatgatagatccgctttttcagcgagtacttgtccgtgaatgtagaagtcgaaaaatacctgtcatatttgacgaggtatttaccggattctggcgtctaggtgtggagtctgcttcagagctgcttgggtgtctaccagatattgcctgttacgctaaattgatgactgggggaattgtgccattagctgcaaccttagcaacggaggaagtttttgaatccttcaaaagtgactctaagcttacagcgcttttacatggtcattcctatactgctcatgccatgggctgtatggcagcactaaaagccatccaatggtaccgggatccatccaccaattcgaaccttgatttggatcatatgaagctaaaggagctatgggatggtgcacttgtgaagcaattatcatcactaccaaatgtgaaaagagtagtctccttaggaactctatgcgcaattgagctcaaggctgaaggatctgatgctgggtatgcgtcactctatgcaagttccttggtacaacagctccgcagagaggatgatatctatattaggccccttggtaacgtgatatacctcatgtgtggtccatgcacgcctcgagatagctgttctcgacaactacacaaagtacttcgcagactctgcgatctaaattgagcccacggagaataattgcgagcagttgtagtagtcgggacagccttgtggtaacttcagtttcaggacatcagttaacctgtgtctggctctacaagctcatggcttcctgcagggatattttcaaagtgtattgcaatataatactatcccaagatcgaaggttttgtaattcttcttta

SEQ ID NO: 15108 - DNA, 493 bp, Setaria italica
  Peptide Sequence Number=SeqID_81082
ggtcaaatgactcagggaactgaataggaaatgatctagcctcaccaggacgaatcccaatcaacgaaccaagaaatccaggaacaaggttattattttcttcagtgtccaagtggaaacctgtactctcagcagatgaaattttttcacctttagatccatcactgttaatactttctgcaaaaaatatctagtaccaccagatcaccaatctatatatatatatatccaaaaaatggatgctgttagtgttagataaaaccacatagattgacacaaaacatgaaagtacatttaactaaacattccaacaaaaacaaggtgcctgataaatgtgtcattagtttattacatactagagtaactatagaattacctggaggcctctatcagccactattctaagtaagcccagtgctttatgacgacgttgaagctcttttctgttgccttttctgcatcaacagcttcatctatttcaacaacgactttg

SEQ ID NO: 15109 - DNA, 421 bp, Setaria italica
  Peptide Sequence Number=SeqID_81083
tggggtaccagctatagtgattagaactgagggactacaccctctgccgatactaattggtcttgcaatgcaggtgtgatagcatgaactacactaatcttaagtgtgctctttagaagcataacactcacagtaaattgtgcacagacacctcgtaggctttcttggtcaaatgactcagggaactgaataggaaatgatctagcctcaccaggacgaatcccaatcaacgaaccaagaaatccaggaacaaggttattattttcttcagtgtccaagtggaaacctggaaatcatagtaggtcactgtgaatttcaaacaacaagaaattcaaagtactcgtctcagttagcatactaactggtgcataaagaaaatgcagaggacaagtataattaatagtcactcacatcacgacat

SEQ ID NO: 15110 - DNA, 790 bp, Setaria italica
  Peptide Sequence Number=SeqID_81084
ttgaagtagaactcatgatccattttatttataacaatgatctgtgagattacagcctcgtaaagaatgaatatagagagaactcgtattgtacttacaaaatatacttccttcttatgctatatatgaaacaaattccatctcatgagttcccaaaacccatcatttgatggggttggattggtcggcaaggaccaaggtaactagcaaaatttgcccacctgccgcaccagccatcacttccacaataacctggacccctgaactgactcatcttctgacatactcgatcgtgcaattctccttaagccattcaagcaccttcgctgcctctagaacatcctggacctgctgcttgatgttgtcctcattgtaatcttgattgtactgtttgaactctgccacaaggttctcaacttccttgatgagctgttcagttgagtactgcaaattttcggacttgaaaatatcaccaacagccagcatttgtttaataattctagtaatgttctccttctcatcttctaggtatgcctgaactgacctctgagtcgatagggatgctagctggtctttatctagcttcctttctgcctgaagctgcagaagtttggctccataaagttgttggccttgttcttgaaacaaggcacgtggaacatcaacttcaaccaactttccaagctgatcaaggattgcattatctgttgcttgttctatggctgttttctccacttctttacatctttccaatatgcgttctcgaacctcatctattgtattgcatcct

SEQ ID NO: 15111 - DNA, 1383 bp, Setaria italica
  Peptide Sequence Number=SeqID_81085
aacgtaaggaaacaaataacaaaacttaacaaaccaaactttaccaaagactagaatcaaggattgcattatctgttgcttgttctatggctgttttctccacttctttacatctttccaatatgcgttctcgaacctcatctattgtattgcatcctggaaggagctttccggcaagtgaatcatccatttctggcaactctctgtagaagagctctttacacacaacagtaaattgtgcacagacacctcgtaggctttcttggtcaaatgactcagggaactgaataggaaatgatctagcctcaccaggacgaatcccaatcaacgaaccaagaaatccaggaacaaggttattattttcttcagtgtccaagtggaaacctgtactctcagcagatgaaattttttcacctttagatccatcactgttaatactttctgcaaaaatatctagtaccaccagatcaccaatctggaggcctctatcagccactattctaagtaagcccagtgctttatgacgacgttgaagctctttttctgttgccttttctgcatcaacagcttcatctatttcaacaacgactttgaggttcttatatttgtcttctgataaccatcggacttcaggggcaatatccacagcaacatcatatctaaatacatcatcgagtgagaaagaacttctcatatcatcaaattgagtcagaatgcgaacagaatcttctaatgccttgtcctctacagaggacaatgcttgaggaagtgtatgttttaggatagcttcaattgtggcatcctgtacatgttccggtcctacataatttataaggatgttctctggaatgatcttcccgggccgaaatccaggaaccttgaaacgctttgcgtactcctgtagcgttaattggtagcactcctgaatgatcgaagcaggcacctccacactgaacttaacactggacccaggctgaggcgtctcggtgacgcggacggagtctccgcccccagccgcggcctcgcggagctccacggcggccgaggtgacggggagccatcgccctcgtcgtcgcgaggtggaggcgggggacgtggaggcgagcgagggactgttccacgaggcggagaccgcgcggggcgaggagaagctgctgtggttgcgcgaggcggaggcaactgcggccgcggcggtcgcggtggcagtggcgagctccatggccgcggctcggagtggagtgaagccgcgcgggtgtgtcagtgtgtggggaagaagacgaggctagccgattaaacgaaggactaagaccgaattaaatagatactaagacctacaaccaaggaacgaaattaccctaaattactaaacgtaaacctaaagta

SEQ ID NO: 15112 - DNA, 2102 bp, Setaria italica
  Peptide Sequence Number=SeqID_81086
ttttagtgagatcaataagacactatttttgggagataaggtccttccatgcatacatagataatacatataaacattcttcatatattatacctagtgatatcacaagtgatgttagctaataacaactttcttcaatttgtatttactagcaaaatacagatacacaacaaaattcgccattgtgagggctgtcagacaccaatagtagtagtctaggtgacctctgttcagatcatctggtatccatcccgggctttgccatatcttggtcaccccagcaatgaaggtgatgatggctgagctcaagtaattgccgagagcagtggtgagcagcgcaaatgccgtcagcatgctcttcatggagtctggcgcctgaccgtggaagaattccagctgagtgatgatagcgaagcactcagccccagcgataacaaagtactgtggaagctgccatacaatactcagcggttccccctcctgaacactctgtagcctctttgtttctagaagtgcagccattgccatggcaaaaatcatcaggaaacgaccgatcccaatccgctgtaactgtgtgagctctgcgccgtttgcaaagtatgttcgggttgccggtacaaccactttgttcacaaaaagaacccagagcgtaacgcatataacttcaaatgagtacaaggatgctggtggaatggacagggagccaatcttggtgttcatcacagttccctgctgaatgaaagtggtgtgcatttgagagattgcagcaccaaagagtattccagtcacccatattgggagtaagcggattagtattttcagttcctcaacttcagtaactgtgcatagactccatgaacttcgacaacttccactggccaagctcggatcaaaaataactgctgccttgtctaagaacctaaaatcatcagagtgggctagttttgccctttgtgtgtggttgctcctgacctcatacagaagagagctatcagcaggaacttccaagctaatgttcctaaaagaggcaacaataacctggaaaatactcttcaccggagaaccacaaggctcatcttgtcggaatatgggtgttcccaccagaaatcctatcaaagcaagacctatgcatgtagtggcaattccatatcctatagcccagctcacattttcctgaacccaaactataatggtcccagaagtaatcacaccaaagatgacacatatgtagaacaaactgaagaaaatccttctctttttaacatctaaactgtgctcattgctgaattggtttgcaccaaatggaagcaatgcagatcttactcctccacatccaacagcagtgagatacaaaccaacaaagaaaatcagattttgagttccatctgacgataggcatgagctcatgtcacaaatgactgaagtagaaggcataaatgttgcaactgtaattagtaccatgccaagtaggtacatgataagggagatcaagatggtcttgtaatttcccaagtaagtatctgctacagcggctccaagtattggcacaaagaagcttgttccgtaccaaagagatacggttgatgcactggaagcaataccaccatggagaactgagcggatatacacaactaggtttgttgcgatgccattaaaagccatgctctccaagcattccaatcccagaatgagtgccggtgctctccagccagagagtttacttttaggctgtgacccttggtttgcttccaatagattctgtggttcttcgcggtgacatgatgcatcatccttgaccagaagactcgtgtgctcgcctccttcctccatggccggcccgcctccccgctgatccgagtccctcgccgcctcacgcctcccctaaatagtcagaggtgctggctgcggaggtggttgccgacgacgcgacgaggaggcggggatggtgagagcgcggccgataaaatcattgtagcctggcacctggtagtctggttctggctggcggcagctggtagctcagctccgctccctgcgcaggccacgccggcaaggggacagacgcgagggacgaggcccgacggctacgcggtacaggggaa

SEQ ID NO: 15113 - DNA, 224 bp, Setaria italica
  Peptide Sequence Number=SeqID_81087
aggtagacggcgagagcggcagcgccggcggggtagaaggcgtaggtcggcacgccgagctcgccgtcgacgtcgagggcgtcgaaggagaacacgtcgatgacgagggcgtgcacgcgccggagagggagggagcagaggaagctgcggcagaagttgcaggtgcggcctcctgcttcctctcaccctgtgccatcgcgatggacgaaacttcatcctcctcg

SEQ ID NO: 15114 - DNA, 476 bp, Setaria italica
  Peptide Sequence Number=SeqID_81088
catatccgtctccgtggacgaggcctcctcttcctcttccacctcgctggcttcctcttcctcctccccttccgccacggcctgagcgggcggcacccctcctggctccaccatcatcttcccccggcacgaaaccggcggtgcttcaaggggtgccgcacgccgagcctcttgtcgtgcggcagcctcgccgatggcctcgcgctcaccgccgccgcctccgacgctgcgggcgaatcccccgatgcctcggacaccgccgccgatgccgacgctgtgttcgccgcgctctcctggtccttcacggcgccatcgtaaaaccatctaaaatcgccgcagacacccaaaaccctgcgggatccgatcgggaggaggcggaggcgatcggatcggggaggcggcggatctgtgaggctctggatttgagtgcgaggggaggaaggggtggggcggtggggtgtggagctggaggcgga

SEQ ID NO: 15115 - DNA, 2204 bp, Setaria italica
  Peptide Sequence Number=SeqID_81089
taggacccatctccacaagcacaagctgccatgtacgcaacaccataataaaagaggcttcagactttcagagtaggatgctttgctgccctcccactcctttcgggtcttgctctgcagatcaccaagatgggctaggtgatatagggcagtcactagctgcgaaaacctcagtccagtagcaatcagcttaagaagacacccgggaccaggctgggagttcccttcctaacagtcattcattcatacaacagcagctactacagaaatgcagtgtaggctgaaccaatgacaaacatatgtgtaaatagcactgcaacctgtaaggctgtaacccaccggaggaccaaaattagggggggatatatagacaagcaacgaacatgaaccaactctaagtaccagccgcgccgctatatgggggaccaccatggatggggccaggaaaatccagcgcaaggtaaaaggaccgacgacatgtataaccaacaacaaatagaatcaactcttgtcgcctgaaggcgagggagatccgccacccggcttgtcgtgctggaatttcaccactatgcacgtgatgttatcgccgctaccgcgggagaatgcagtttctgtcagcttccgggctgctgcctcaggttcctcctccatcttcacaagtgcaacggcatcctcatttggaaccacatcccacagcccatcactagctataatcagaaactccaattcatcatctatttcttgttcctgaatctcaggttctgcaataacaaattgctttagcagacggttgccaaatgctcgcgacatcgcaagtacaccacctaccctccatgttccagcccacataactatcccaccagcactctcaattcgtttcctctcatcacttctgttcggcttgtgatcttcagataacgcaatagctttgccagcctttgatataacagccctggagtctccaacatttgccacataaagatggtcaccaaccaacactgctgtcgatgcagttgacccgtcatctctatgagagttcctttcagcatccaagaactctgaatcggttcttctatatgtttcacttatagctaattttgtatctgtcatgaactccggatgtttcatgaggttgtcaaacaagtgctccttcaaatattcagcagcacgtgaaccgccatgaccgtcaaaaattccgaagagacttatttgtttatcatcaatttttgatgattttatatcatagaaatcttccatgcttgccctttttcctctaaaacttgaatacccacaattcagacttccatcaacactcttccatcctccactcatgtagccaacctcatccaccctctccctctccttctgcctttccctctccttgtccctcttctccttctcctccctctccttatcctgatccttctccttgggcgcctccacagctagtacggcagaagttgcaggtgcggcctcctgcttcctctcaccctgtgccatcgcgatggacgaaacttcatcctcctcgtctggctgggcctccaactctgtgacccctacagccactgctggctcaggtgacgcctccatttccgcccccctccacctccatcgcttgtacccctgctgccggcgcggatgacacctcaacatcggcagcctgcatatccgtctccgtggacgaggcctcctcttcctcttccacctcgctggcttcctcttcctcctccccttccgccacggcctgagcgggcggcacccctcctggctccaccatcatcttcccccggcacgaaaccggcggtgcttcaaggggtgccgcacgccgagcctaacttaaagtaaaacgtaaaagaaaacggaaaaaacgcctcggcctcttgtcgtgcggcagcctcgccgactggcctcgcgctcaccgccgccgcctccgacgctgcgggcgaatcccccgactgcctcggacaccgccgccgatgccgacgctgtgttcgccgcgctctcctggtccttcacggcgccatcgtaaaccatctaaatcgccgcagacacccaaaccctgcgggatccgatcgggaggaggcggaggcgatcggatcggggaggcggcggatctgtgaggctctggatttgagtgcgagggggaggaaggggtggggcggtgggtgtgagctggaggcggagagggggggagtgatcgggcg

SEQ ID NO: 15116 - DNA, 272 bp, Setaria italica
  Peptide Sequence Number=SeqID_81090
cgggaggcattgcacctcatgatggggatggttgatgaaaacaacataatggacattgcaagtatgctggtcagtcatgctgctaagtcagacccagagtttgcaaatgacattctcggggttgttctagcagcatgtgggcgtaatgtgtatgagttggtggcggactttgattggtatgctttactccttacagatatggcaaggagcttgcattgtgcccagggagatgagattggtcggcagtcttgttgatggtgggactggagggt

SEQ ID NO: 15117 - DNA, 502 bp, Setaria italica
  Peptide Sequence Number=SeqID_81091
gcaacgtggccgcctgcgcggagggccgcgccgcgctgatggacgccggcgccgtggcgacggcgtccgctatcctctccggcgacggatcacgcagctcggagctgcaggaatggtgcgtcgcggcaattgtacgccatgagcaggggcagcccgcggttccgggggctcgccagagcggccggcgcggaccgtcagctgatgctcatcgccgagcaggcgagccccggcgttcacgaggacatggcgcagatggcgctgcgcacaatgctgggcctggccgataacagcgacgacgaccagatcacggagtgcatgagcaacgagggcaaccatggcggcggcagggtgcctcaccgccggcgcgtggcgagctggagcgctccacctcccgcgacgccggcaagctctcatcaatggcgatccgtgtgcattgattaattgaagagttcagctgctagatgatgctgtgagactattgtcttttgttctattggggttt

SEQ ID NO: 15118 - DNA, 337 bp, Setaria italica
  Peptide Sequence Number=SeqID_81092
aaaggtaagaccagcaaggaagaaaaaggcagcaagcccaggtcctagaagccctgtgaaggagctaccatccaagtgtcattaccagcattctcgcaggaacagtaacttgaaattcgattgattcgtgtgcgtgtgctgcctagatgggatgggatattgggattggtgctcgtgattagctatagctagggtccgtcggtgactgatccaataaagtgtgtggagaggagcagatggatcatcagtagtaagaagatgaatggagtgagtctaacctcctgctttcccgaacctaaggagattggtcgccgccgtcgccgtccgcgccgtcgga

SEQ ID NO: 15119 - DNA, 318 bp, Setaria italica
  Peptide Sequence Number=SeqID_81093
gccgggaggtcgtaggcgatggggaggctgcgactcggtggccgcgccctcctcgaacaggtacccggagcacctggtgaaggcgtcctcatcggagctgactgcgatggagccggacgccgcggcgaggggaggcggcaccagccgccggcgaggccgaggccggggtggcggcggcctccctcgcagagcgggcgcagggaccgcgcggggatggaggagaagcatctggaacttctggggacgcgaaggatttggggattcgaatttggatcggagatttgagagaggagttggagcggggaaggaagacgaaac

SEQ ID NO: 15120 - DNA, 1473 bp, Setaria italica
  Peptide Sequence Number=SeqID_81094
cgcgcgcctgcggcaggtcgtcgacgccatggtcgtcgagatgcacgccggcctcgcctccgacggcgggagcaagctcaagatgctgctcaccttcgtcgacgcgctccccaccggaaatgaagaaggcatatattatgccatcgatcttggaggaacaaactttagagcattgagagtagaagttggttcagggtccgtggtcaccagtcggaaagttgaacttcccatccctgaggaattgaccaagggtacaattgaggagctattcaactttgttgccatagcattgaaggattttgtagaaagggaagatggaaaagatgaaaaaagggcgcttggtttcacattttctttcccagttaggcaaacttcagtgtcttcagggtcattaattaggtggactaaagggttttcaattgaaaatgcggttgggaaagatgtggctcaatgcttaaatgaagctcttgctatgagtggactaaatgtgcgagtcactgctctggtgaatgacactgtggggacattagctctaggccattatcatgatgaggatacagtggctgctgtgattatcggggctggcaccaatgcttgctatattgagcgcactgatgcaattattaaatgccagggtcttcttacaaactccggtggcatggtagtaaacatggaatggggcaatttctggtcatcacatttgccaagaactccttatgacatctccctagatgatgagacacaaaatcgcaatgatcagggctttgagaaaatgatctctggaatttatcttggggaaattgcaaggctggtgctccatcgaatggctctagaatcagatgtttttggtgatgctgctgataatctatctacccccttcacattgagcacaccacttctggctgcaattcgcgaggacgattcaccggatctgagcgaagtcagaaggatactgcaagaacatctgaagatacccgacactcctctgaaaacccgaaggcttgttgtcaaagtctgtgacatcgtcacccggagagctgcccgcctagccgccgcagggattgtaggaatactgaaaaagcttggccgggatgggagcggtgtggcttcaagcgggagaacgcgagggcagcctcggcggtcagtggtggcgattgagggcggcctgtaccagggctacccagtgttcagggagtacctagacgaggccctggtggagatcctaggggaggaggtggcgcggacagtggcgctgagggtgacggaggatgggtcgggggtgggcgctgcccttctcgctgcagtatattcgtcgaatagacagcaaggttccatatagggagagatggtgatacaggagctagcccctctgtgcaaatgtaaaaagggcattgtttgatatctatattcataaatataaaatctggtcttgtgcagagaaatcacatttctaaccttaaaaaaaaaaaaaac

SEQ ID NO: 15121 - DNA, 457 bp, Setaria italica
  Peptide Sequence Number=SeqID_81095
aaagtaaacaaaaacaaagtaaaaacgaaaaaggaaacgaaaagaaacaaaaccaaagggaacctaagaaccgaaacgaaccaactagaacgaaggacgaggccagccggaccaatgggcggcggcggcgcgcacggcggcaccacctacaagggctacaccatcccgcacaacaagcgctggcacaccgtcgccggcaagggcctctgcgccgtcatgtggttttgggttttctacagggctaagcaggacggtgctgtgctcttgggtttgcgccatccttgggatgggcatgatgatcactctcatggtcatgggcatgaacatgaggcatcgtcatcttcgtcgtcttctcattaagttgacaaactaccttagtaggctagaataggtagaactacgaatagttaccaacctagaaagtttacaagttaaataaaattactaaccgacccta

SEQ ID NO: 15122 - DNA, 594 bp, Setaria italica
  misc_feature (592)..(594): n is a, c, g, or t
  Peptide Sequence Number=SeqID_81096
aagaacccaaaccaaacaatcaccacacagacaacagacgaggcgagcaccagggcctgccgacgaccactgacgaggcgagcaccggcgatgggcggcggcggcgcgcacggcggcaccacctacaagggctacaccatcccgcacaacaagcgctggcacaccgtcgccggcaagggcctctgcgccgtcatgtggttttgggttttctacagggctaagcaggacggtgctgtgctcttgggtttgcgccatccttgggatgggcatgatgatcactctcatggtcatgggcatgaacatgaggcatcgtcatcttcgtcgtcttctcattaagttgacaactccttgtggctgatggtgactcgatgttccacctgaagtttcagttaataaattctaccgccctgcatgggacaaatgttgtttgcgagttgtttagcacaaaactggttcctgacgattgtgctcatgtatttggtttcaagcttcagttgatatgttgtgggaaagaattcaatgtatgctgctgttccttttgatcagtacttgtcgcgctccttgctctgcttcttgtgaactagccaaggannn

SEQ ID NO: 15123 - DNA, 351 bp, Setaria italica
  misc_feature (329)..(329): n is a, c, g, or t
  Peptide Sequence Number=SeqID_81097
cgcaggcgctcgccgcatcgcagcgccgcgccgccgacctcgccgccgaggccgccaagtacgccttcccgtcccgccgcttcgagccgcgcaccctcgaggaggccctcatgtctgttcccgatctcgagactgtcccgttccgcgtcctgaagcgcgaggccgactatgagattagagaagtggagtcatactttgttgctgaaacaacgatgcctggaagatctgggcttgatttcaacggatcatctcagtcattcaacgtgctggcgtcttatttattcgaacacagcttctgagcaaatggaaatgactacccctgttttacncggaagggggagcccagcagtg

SEQ ID NO: 15124 - DNA, 1000 bp, Setaria italica
  Peptide Sequence Number=SeqID_81098
ctaaaatcccctcaacgctcatcgacaacaccagcccgtgacccaaggtttccacacttcctggatcccgaattccctccttcagcacaacgccccaaagaaaccgcaatcgcgtaacttagcccagcaagctagcatcaaccatgcggcagacgtacttgtcttttttcgaagcacaatgagaaatcaaatatattcaaattgacagtttcacggcccacaaatgacatgataccgaaagttgcattattcattttgagcatcagaggcctatcggaatgttaaatcaaccaataatttatcagtacatttggaacttctctttagtcttctcaaagacttgttccgcaatcagggctccatttccatctgcctgctttatttccatgttggacttctggtagtacccagttcctctgagagcatcagcaatgaaatcatcaaacccaatggcaatagcagcttcagccttggctccatacaccagcctcttaatccgggaaagatgaacagcaccaaaacacattgggcatggttcacaggacgcgtaaatttcacaatccgacagctcaatttttccaagctttttgcaagcctctcttattgctgttacttcagcatgcgcggttggatcggtgtgcttcaaaaccatgttatgacaactaactacaacttcatcattgcggacaacaactgcaccaaacgggcctccgtctccacagtcaactcctcggtatgcttcttcgactgcctttgataaaaacttgtggtctctgtcctgtacagcttcctgatgaccagcaaatgcagaagcaactgagatggttccgtccttcgactccacaaccttggcttcctccatggcgccggggtgcgggagcgggagcgggagcgaagccgaccgagatttcccgcaacttttgcgggggcacagatgcggatgccgctcggctgacggagaaggaagagagggagagatgcgtcgcgggcgggtctgccg

SEQ ID NO: 15125 - DNA, 681 bp, Setaria italica
  Peptide Sequence Number=SeqID_81099
ctgatatttggatttgttcaattaaactcctaaatttattaaagcgccgctcttcttcagcatgctcctgcacaaacgacaattcaccatccactgctgggaatataacttgatcctcggcaatactgtggaaaatgcacacatctgcaataaattgcagcctcgtattaaagtctgctatgtcagaaaagtctccagactgctggatcctttttgcctcttctgctatatcactcaattctctccgaatagcattgtgccaatacagaatttcatcaattggatgtgtggcaagctgactagattctgtcgacttcctctttccaattttagagtgttcaagtgagcatgtatgtttatctgcttgatcagagctacactcacatgtaaaactgctttttaaataaggatcactgaaatcttgtgctattgttctgaatgatttccctccaatccatgagaatacaatctcttggaggagtttttcttcaggaactattttacgtaggcagtcaagaatatcttgattatcatcaggtgaaacagaagcagaaatccatggaaggaagtctgccatcatgttcactgggaaactgcataagaactgccaaactaaattggcttgctcttcgtgcgaaaacttcttgacgagcaatgggaagacctgttcttcttccttgg

SEQ ID NO: 15126 - DNA, 626 bp, Setaria italica
  misc_feature (601)..(626): n is a, c, g, or t
  Peptide Sequence Number=SeqID_81100
cggacaccatcgagctggacgacgccacggcctacgtggaaggatggagcgcctcgtcaacgatctcagggccgatctcggcatccccgacctgctcgtcatacaggttggtcttgcatcaggagaggggaattacactgatattgtaagggaagctcagaaaaatatcaaacttcctaacgtcattcttgtggatgcaattggattgccactccgggacgatcagttgcacctctccacagaagctcatctccggctgggtgacatgctgggccaagcctatttgaaatttaactcatccacagattcaagacaatgatgtcgatattcactgaacctgttgttaggtgtagggtcaaatgacgaataccatcattctttggggatattctgttgtagagtgtagatcattgtacaagaggaatgagtttctactcatgggtgcacatgtaataaaagggtggatacccggtagaaacttagcacaaatagttcaagtgttgtatattacacaagaaaaacagagccctcccctccattcaggaaatacaatttgccagcattttggttgtttctgatggagtcattgcacattttagannnnnnnnnnnnnnnnnnnnnnnnnn

SEQ ID NO: 15127 - DNA, 1987 bp, Setaria italica
  Peptide Sequence Number=SeqID_81101
agccttttccgttgtttgtggctgccactgaggccgcagaatttgctctgtctgtgatcctttcagcacgtagcttacatcattggaaccgtcatcaagctgcggattagagggcaacaattgctgtgaaccatgtgaggcagaagcatgaaaattttgagagccggatagatgaccaaacatctgccctcctttaacattgtcaagagcatttctttgctggtattgaccctggaagcttggaatatcaacaggatcactagcttgtgaagataccaattcagtgtgtggcagagtcccctgttctgacagttgcattgaatggctggaagccatttgagactgtttaaaggaattgctcctcagcatagcctgctgatgctgtggatttggctgctgttgacttatatgatactgattttgaacaaactgggaattaggctgcacctgatgttgcggcattgagtgctggcgtattagttggtcatgagtcaactgtgatgactgaaaattcaccttttctggttgatccaaaacctcagtttttatctgaggctgtggttgaatggactgaatgtttaactgattgttaaccaacattggattcattcttgatctagactgcaaatttgcaacattcatgctctgactatttgctgtggttaaaggtgtagagccagtagcataaaagctgccggaaccagccatatcaactgatgtcggtattctctgctgagagcgctgattgaattgttgctgcagaggtttgggcgaactgccataggggggtatgttcatatatgcttctggtgccgtagtcctgtttgttagctgcatgtttgacccatgcaatccaattccaccattcatgtgcccatctgataaaccatatgcagatgagttgtccagcatgcttgaatgtattccagaattactgtggcccccaatgtgctgaatttgattgctattttggttgctagaaaattgcttctggtgctgcatatgtggtgccacagctgaatcaccattgaaatatccagttccatttgaatactcaggattgacaggtacattctgttgattactgaatcctggagttgggatcatatgaggtagttgtcgctgaacaccaactgaacccattgctgattggatgctatttggggtagaattttgtgtaatggtgttatttgaatgctggtacccgttagacatagagcctggcatcgaggtacccatgttggcattctgaggaaccatgcctgcaccagatgatgaaagagtattgttgtctgagacataaggaaccctacgaaattttccccactggtgccttgtgtcataccaggtgttggaatcatcgttccatagccagaggaagatgctatttgccttgacatttgtgggttttgttgattttgttggttctgagcactcagggtcttaatagcaaattgcaattgtggctcaactggtccattcatcatattgtagtattcattcctatttgggaatttcctaaacagcatctcctcgagccgcttcgccagttccggcaaccgcttccgccactcagctgataattgtttccttcctagacactcgaatatcctatcgcgcatagtggtgcgtagcatgacaaactgctggtctgttcctgtgagggacgccatatcctgcatcggctggtgctgctggagcccgtcggcaccgccaacaccaacgccgacaccgctgttggcgacctgattcatctgcgctgcctgcccggacatctgcccggacaggtgggcagcctgccccacattcatcttcgctgccagccaaacctcaggtcatcccgcacagagccccagcggtgtcatgcgtcagcgcagcacgagcgagcgctggcgcccacgcggggggcagctggcgacgaccatgcagcagcgatcagacgccgcgcgcgccggtccgggccccgggggcgccggggcgtggagcc

SEQ ID NO: 15128 - DNA, 237 bp, Setaria italica
  Peptide Sequence Number=SeqID_81102
ttcagtttgtgtgtgttttctcttggaattctgtgctcctggtatgctccgaccatcgctgctgcgcctggagctcgggtggatgacgccgaagtcgaggttccccgccgagagcggggtgcgcgacacggcgcccgtgcgcaggtcgatgcgcaccttctcgacgcagccgtgcacgagctccatgcgctccagcgcgtgctccacggacaggacgttgggcgccaccagcaccag

SEQ ID NO: 15129 - DNA, 2335 bp, Setaria italica
  Peptide Sequence Number=SeqID_81103
tacggttaagtacggtttactttagtaaagttaggttaggttactttaggtccgtcctaacgtcgtcttttttttttgttttttttactctagtaaaaactcgttaaaatctttgtgtttcaacatatcaactcacgaaacccttttatgggttatgctacatttacaatacaacaattcgtacactcgaatgctatatggcctagagttttgttcatactatgaccaattcagtattcagtttgtgtgtgttttctcttggaattctgtgctcctggtatgctccgaccatcgctgctgcgcctggagctcggcctgcgtgacgaagaggccgtggaagccgtaggggacgcgtgcgggcagctgcacctcggcgacgatgtccagcgtcggcgaccgcgcgtccatcaccacgaacctgttctcccccgtgcgctcgtcgtggacatagcacaccacgtagccgtcgtcctcgttgccgtccccctccacgtcgtcgggcacgaagaagggctccccggcgaagcacccgggcccgaagtcccgcgtcgccacggtgcagtctccagtgccggcgcgctccaggtccagcttcgccaccccgctgatcttgggcatggggtcgccgatcccgaagtagccgtaccggttgcgccggccgaggtagcccgggtggatgacgccgaagtcgaggttccccgccgagagcggggtgcgcgacacggcgcccgtgcgcaggtcgatgcgcaccttctcgacgcagccgtgcacgagctccatgcgctccagcgcgtgctccacggacaggacgttgggcgccaccagcaccagctcgtcgccgccggcctcctcccacgcgttcagcgtgtgcatgatattgaagcccggcacctcgaaccaccgcatctccgactcgtccgtggcgtacttggggagcacgccgatccggggcaccttgccggagtccgatccgacgggcgcgccgccggccaccatgcccatgggctgcatcacgatctggatctccgggaagatggcgtaacgctcggtgacggcgaagtcgtgcaggaacgacggctgcatcacggagaagatgggcacgtcggggcccttgttcccggcggcgtcgaaccggaagtaggtgacgaacggggggacgggcccgtagcggaacgcgaagacctcgccggtgatggggtccttcttggggtgcgcggtcatgcccatgaagaggcggccgccgaagtcgcaccggccgtgcgtggtcacctcgccggtggccgggtcgacgcgcacggcgtaggggaggtctgactcgcccagcgcgtagaggcgcccgccgaagaaggcgaggctggtgttggcgagccccacgccctcggccgggttcatctgccccgtcagcacccttgccgccacgacggcgccgcgcgcgaacccggccaggccgtggaagccggagaagacgttcggcatcaccggcgcgccggcgtcgcgctccacgatgtacttgtacgtctgcacgtaccgcgagcacagaatggggtcggccgacggcggcgagtccgccgccgggaggagcagggagtgcagcatgccgtcgccgtcgaagaggtggtgcggcccgcgcgggaggtgctgcgggttgggcccgttgcggatgtaggccccaccggcgaggcagcgtgggatgacgccgcgcacgacggggcagggcgtcggcggcagctcgtcgacgggagcccagttggcagacagcacgttccgcgggtccaccgacggccgcagcgccggcgggtccacgaacgtgttgatcgcctcctccagcgcgctgcagaacgccatcggcagggacgcggccgccggggcagggcggcggcgaggccgggccagagcctggctcgtcggcgcccttgctcttgcggtagcggttcttgaagtggtggtcttggccgccacgcgctctcccttctcctgctgctcggcctgcttcggagcggcgggctgagcattgtcagtggctggaggaggggaggtgacgacggtggcggttgcggcggccgacggcggtggtcgggacggggtgctcttcttcctgttgtagctggagttctgtgcagcagcagaggctgcaggggagatgtagtgaactctcccagacgaccttgaaggatgcgcagccatggagaggttagaggtgatcagtgttctctccattctgcaacctgcagatcaatgtgttgtcttgatttggatcgaagcctagggcgggaagtaggtggctggttgctgtctaattaaggagtggtgttgcgatctgctggccaaatttgcg

SEQ ID NO: 15130 - DNA, 237 bp, Setaria italica
  Peptide Sequence Number=SeqID_81104
ggcggcggcgagcagggccgccctcgggtactcatgtgcggtggtttgggggctcgtcggagcgatccttgccgtggtggctcttccatgaaaacgttggaaatgtatgttgcctgtttcttcgctggtctgttttgcttgcctgcatctcgaggctggagggaggtacagaatgtgcgtgtgcatcgaaattgtgtttgtcccactagagtgttcgtccttttttggcttttcatg

SEQ ID NO: 15131 - DNA, 1497 bp, Setaria italica
  misc_feature (1470)..(1497): n is a, c, g, or t
  Peptide Sequence Number=SeqID_81105
cccaaaccctagcccttcgccccccgccgcctcctccccgcgtcccatcctccttcctcctcctccgcccgcaccgcccaacctatcccaatcctgccagcgccccgtcgcgcctcctcctccgccccttcgcctccgtcgccccggtccccgggagggaccacctcgactccaaggaccagggacccccgcccgcacccttgcccccgccgccgccggaggagctcgcctccgacgacgaggcctactaccacgagcaccttctcgaggtagcacaggagaaccagacaagggtcgtccccgtcaaggcgttcttcctatgcaccagcatcgacctgcggagcctccagtcccagaattccttcaatgtcatcccacccacatcgcgtgccaccaactacgtcgtccttagatactacgatgtcaagggagaccccgagggttttaagtctggtgtcatagatgagagccattgtcactacatggtcgttttccaatatgggtccatcgtgctgtttaatgtttctgatcatgaagcagatggatacctaaacattgtcgagaagcatgcatcaggtttacttccagagatgagaaaggatgattatgctgttgttgagaagcctaccttggagacatggatgcagggtggtcttgactatattgtgcttagggatctgagtattgatggaatccgcaccattggaagcgttctgggtcagagtattgctcttgactactatatccgtcaagtggatggaatggtagctgagttcacagatatcaatcgtggaatggaaaaaactggcaccttcactatggaaaggaagaagcttttccagctcgtagggaaggccaactctaacttggcagatgttattcttaagcttggactctttgagaggtcagacatagcatggaaaaacgcaaactatgctcagatctgggaataccttcgagatgaatatgagctgacccaaagatttggaaaccttgactttaagttgaaatttgtggagcacaacatcaggtttcttcaggagatcctccagaacaggaagtcggatttcctggaatggcttattatcatcctgatcagtgtggagatattgatatctgtttataacatcgtccaggagcagatgtagcggctgtgttacatcctgaacacggcaaaggtgtttttgcgttgccccaatgccactggcagcctcaatcaatttgtaaagaaagagtactagatagtggatccgattgggaatggtaaactttggccacaaacacacacagagcatagtctcaaggagtcattgcgtttttgaaagtagtagagtgagtagtttgggttgtaagtcgtgttggtttggtgaccgcgcatgctgccactcacagccgaatgccaataccatgagaggcgtatgcaggtggtgaagaaaactaggaagtggctttggggccttctacaaactnnnnnnnnnnnnnnnnnnnnnnnnnnnn

SEQ ID NO: 15132 - DNA, 295 bp, Setaria italica
  misc_feature (275)..(275): n is a, c, g, or t
  Peptide Sequence Number=SeqID_81106
gctcccgtccaccccctcgaggccacgtcttcggcgctgctgggcatcagctacggccgcgtcggcaacaacctcccgccggccacctcggtgccgcacatcctcgcctcccttggcgtcggccgcgtccgcctctacgatgccgaccctgccaccacccgcgccttcgccaacacgggcgtcgagctcgtcgtcggcgtcccggacgagtgcctcgcgacggtctccacccccgccggcgccgcctcctgggtccgctccaacatcgccccggngctcccggccaccaagatcg

SEQ ID NO: 15133 - DNA, 445 bp, Setaria italica
  misc_feature (34)..(34): n is a, c, g, or t
  Peptide Sequence Number=SeqID_81107
aagctgcatctgaaatgttttgaagaaggaatcngttgatgaccacgattcttttctttcatgctgtgagggatatcttagcagtcactcaaattctcaagcaatgacaccaacatacgtttcatcatatggtttggtcgagcagatatcagagctgcaagatgagctccagtaccttcagcatgaggctgaaatcgttcttccccgtgagcgaggaagatgcactgacgaattatgcaggatgatccaaacactcgagcaaactctcggcgtgcccctttcagatgggcaaccaaaactgacaccatggccactggctcagtcgcttgaagaactggaaatggtcagccaacaggtctattcctctgttagtgaagtgacactggctcgggacgaaaaggtcgagaacttaaagcagccttcacgcaacgcgcagcaggaaaga

SEQ ID NO: 15134 - DNA, 814 bp, Setaria italica
  Peptide Sequence Number=SeqID_81108
gcactgcgtcgtcgtcatctggatgctgctgctgctgctgctgctggggcggcaaagatccatggtgatgggaatccaaccaacccggcggctgctgctccggcagggaaccggccaacgagctcgtggcgctggtcaacggcaggagggcggcgagcaagctgccgttgctgcggaacagcgccggcctgggctgcatggcgctgcagtacatctccgagtgcatggccatggccgccgccgcctgcagcagcgacaacacggtggcgtgccagcccccggaggcccacatcacggaggtgtacgccaccaactgcggcgtcgagctccccacggtggacatcatctccggccgcctcgtcggctgctgcaaccaccgggaggacgtgatggtggcctcggccatggccaatggcaatggcagcacccagagccagatgatgctgggaaaggagcactcccaggtgggcgccgccttggaccgccacggccgggacgggcccttcttctggtgcctcctcttcagcagcggcagcgccaactccaccttcctgctcgacgccggcggcaagggcatccaccagacccacggctgcttcagcgctccggacaccaccacctgcaacgccgccgcgcctgtcgccggcgccggcgccctcctactcctattcctcttccatttcctccccatcctcctcctctcctgattcactcccaagtcccaagagtcctaggaggaatggaatggaaaggatggagcatgtattcctagacaagtagacagtgcagaatggctgatgcaaaaacaatcctt

SEQ ID NO: 15135 - DNA, 401 bp, Setaria italica
  Peptide Sequence Number=SeqID_81109
ttgcgtgtctcagcgggtggtggttgacggacgcgggggcgctaccgaaaccggggcccgtcgggacggattcttcaagtgcaggggaagaaactttcagagccaaacagggccttatatcagctggcgtcgttgacaattggcgccacgcggttcgttgcctgaagcagccctgtttagtcgtcaagctagactccgctccctacctttctcgctcgcctagtagagcagtaaagctacagcgcaatgggaattgagaaaggaatggtagctgcggaggatgccaggaattctcatggcggctcatcaggtttgctctgacggaaacagaagaacaaaaacgagtgggaaatagggaattgtgtgcgtacctcgagcatgtaggtgacggtctcgaatcc

SEQ ID NO: 15136 - DNA, 235 bp, Setaria italica
  Peptide Sequence Number=SeqID_81110
ttttttttttttttttggactgaccgcaggtttattatttcatcatacagttggtgttacacatatgctgagaagattacatgttgagggcatagatcagcatcagcaggttcagcctacatatgtgacatatccatgcatccggcgagacatacaaccagctatttggggggaatagcagtggcactcgtgatcacttgacaagccctaggttgatgatgccgaatgaggtgtg

SEQ ID NO: 15137 - DNA, 280 bp, Setaria italica
  Peptide Sequence Number=SeqID_81111
tgttgccacggaactcaaggaggccgttggcgttgtcgaataggcggtcctgccagtcgaagagctggtcactgaaatcggccatggtcatgaggaggaaggaggcggcgatgcgcctggacagtgcaacatcctcccctgtcctgcatcacaaagaagcaaatagtcaggttgaattgaaattggaatatacgccattgacggtacctgatgtgcttgacggtgattccggcgggcgggaggaggcgctggatctttcggcgccagggctcgtcgtcgt

SEQ ID NO: 15138 - DNA, 358 bp, Setaria italica
  Peptide Sequence Number=SeqID_81112
cgggtgccccgacgacagcggcgacgtgggcgcggccggtgttgggctggaagatggcgaggttgacgtaggagttggagtaggcggagtggtagaggccgcagcgcgcgacggcgtcgggggctcgccacaggcggaggatccggtagacgtcgaggaggtgggccaggaaggtgccgtgcttgtgccagcactcgccggcgcccgcggcgcgcaggacggcggcgagctccggcagcgccgggtccacctgagcctcctcgccgcgcaggaaggggcgcgccgccgccagggcctcgtcaagggaccgcggcatcggtggcatggcgatggttggcgggtgtgaagagatcgatcg

SEQ ID NO: 15139 - DNA, 1418 bp, Setaria italica
  Peptide Sequence Number=SeqID_81113
ttctagtctattattgttgttaactacctaacttgttattgtattatggtgagtatttaccatgttgagggcatagatcagcatcagcaggttcagcctacatatgtgacatatccatgcatccggcgagacatacaaccagctatttggggggaatagcagtggcactcgtgatcacttgacaagccctaggttgatgatgccgaatgaggtgtgaggccaatccttctccctggacttggtgagcatcgccctgccccaggacacccagccctcccatgtcattctcttgtcccagctgctgccccactccagcaacagcctgaggccttcctctgcctgtacctgcgcatcaccgtacctctccatgttaaggtatacctgtgcaagcaccaggtgtggttctcctacaaatgggttcttggcaatgctctgctggaggagctgctccactttgcgccagtcatctgaagcctcatcgccactgcatactgcctcccagtagaggtctcgtgccaccttctggtcttcagctctgagcactttggtgcagccatcgaacaccggggggaccaccaggtcgatgtcctcgtcacggtcgttggagccatggcctccgtcttcttggcctgcggcggcatgtgctcggtgagcaatgtatatctcctcctcgcggaggatgagggtgtagagtgcgcccatgcgggagttggaggtgacccagaggccgggcttgccggtgccaggccagagggaggtccaggtgttgccacggaactcaaggaggccgttggcgttgtcgaataggcggtcctgccagtcgaagagctggtcactgaaatcggccatggtcatgaggaggaaggaggcggcgatgcgcctggacagtgcaacatcctcccctgtcctgatgtgcttgacggtgattccggcgggcgggaggaggcgctggatctttcggcgccagggctcgtcgtcgtggaacacccctcggcgcgcgtcatggagcgaggcctccgatcggtcgaggtcggcgacgaggtcgtcgtcggtgtagtggaagaggaggtcgtcgtggatgagctgctggcgcgggacgacgcagaagaggtggacgaggcgctcggcgggtgccccgacgacagcggcgacgtgggcgcggccggtgttgggctggaagatggcgaggttgacgtaggagttggagtaggcggagtggtagaggccgcagcgcgcgacggcgtcgggggctcgccacaggcggaggatccggtagacgtcgaggaggtgggccaggaaggtgccgtgcttgtgccagcactcgccggcgcccgcggcgcgcaggacggtcggtcgtagtcttccggttcttagttcgttccgggttttcctttacctttttgtttagtttcctttta

SEQ ID NO: 15140 - DNA, 251 bp, Setaria italica
  Peptide Sequence Number=SeqID_81114
taattgtgaaagcgcgtccggaattgagccggtcaagttgttatgtgacagatccaaatattggacggccttgagatttgcgaaagaagatgatatatcgccatccaggccgctaaaggatatatttacgccggtgattctcgaatgactggatatgccataactgcaagtcaacccatcccaggcgaaagtcttcggaccacacgggtcacccgcccagttcttcttcacccgatacttggccttgatgg

SEQ ID NO: 15141 - DNA, 500 bp, Setaria italica
  Peptide Sequence Number=SeqID_81115
ttgaattccgtgtcggtaagcagcgggcgtttgaggtttagtcctagcaatccatctgatgtgaagggaagggccttcttggcgcgaaggttgtaggtgaggcgttggcctttgtgaaactggacgccgactccgatgttggctgctatctgggggtagaattgcctgacaaagagagcgaggtagcttggggcagcagctccggcgtcgatctccccatgagcctgacgtggcgtggatgaataaggaatcagatgtatcggatggtatcggaggaagatggaatataatagggtgaaggggatctgcctgcagtagggagttgtggccgagggcaagcttctcctccttggcgtggatgcggaggccgccgccgccgcgcaggcgcagtgaggtctccataagtaaggcggcctgaggagggagtgggagagggagacggctgacggcgaggactgcggaggagaggagacgactggcggcggcgggatgcgatgctg

SEQ ID NO: 15142 - DNA, 826 bp, Setaria italica
  misc_feature (1)..(29): n is a, c, g, or t
  Peptide Sequence Number=SeqID_81116
nnnnnnnnnnnnnnnnnnnnnnnnnnnnngtttcttaccaatccagatgaatagcttctacttctgtatatgaaaagcaaataaccctaggtagcttctggttctcataaaaaaaaataggtgaatgcattttctggtgcagtacaaacaagtagaaccgatagcctaggaaacgataccactaagaacaatcaccagagagaagtggcttcggatcacatatcaaatctaacatcccatttcccatccatgtaagcattcagtgtccagttgttttctctaagctggagataaggcaccttgccatacaattcatagccaagtttgagcctgacatcttggcctttcctgaagtcaagtatggtccaggccagttcgacggctccagttctcttcctcgggttgaattccgtgtcggtaagcaggcgggctttgaggtttagtcctagcaatccatctgatgtgaagggaagggccttcttggcgcgaaggttgtaggtgaggcgttggcctttgtgaaactggacgccgactccgatgttggctgctatctgggggtagaattgcctgacaaagagagcgaggtagcttggggcagcagctccggcgtcgatctccccatgagcctgcagtagggagttgtggccgagggcaagcttctccttggcgtggatgcggaggccgccgccgccgcgcaggcgcagtgaggtctccataagtaaggcggcctgaggagggagtgggagagggagacggctgacggcgaggactgcggaggagaggagacgactggcggcggcgggatgcgatgctggctggtggctgc

SEQ ID NO: 15143 - DNA, 1709 bp, Setaria italica
  Peptide Sequence Number=SeqID_81117
atgaaatattactttagtccattcaactgaagggcattccagtgctacatgacaattaataattaactttagcaaaatttctttcaatctcttcgttatctatacaagtatccccctgaatgataaagtagtttaggtagactataatttcaatatgtgggctacttagttacatattgcacatcaagatagaaaggactattggaagctattccactttcattttcttattctctgtacattaaatttgtgacaagaagtaaaacaaaaggtcactccaaatagcttttcatcgagaaatctttggcattccagatgtcctgtgctcaagggctttgaacaaacaaaatgaaacctatactgcttttataatactagattgcattttgagagtttcttttcttcattacttcactaaactttctgagaatagttttctttttctgctttccaggattcttgatgtcctccagacgagtagatctttcgacatgagaatacacatcatctgctgccactgaactttctttcatctcaccccccttggcatcccgaggagatgcttctgctgaggttttggtcgattctgaactgaacatagcatcaaccatatccttcaactctttaatactactctgtgctgctgcctcactgatcttgagggattcatattcttgcttgatactctgtaaggcactctctttctcaaatatcttttcattaaggcgagagttctccaccctggcaatttccaatgattcccttgctacattagcttcacccacagcatgcttcagcatttccctcagcctagagttctcatctctgaccaccctctgtgattcaatcaacttctcattctcttcctttccattacttagctcaccctcaaacatcttgatgcaatcaacgagtcccctctctttctcttttgacgccgctgccaattcatctgactcaacctttagtcgccctgacctacttaccaagtgccaactggagcttgtcctctgcattttctaacgaggctttcaagttctccacttcagtccttgcattattcaactcagcttgtgccaacaaaagcttcccttttgcctctctggcctctgtggtttgctctttcaaggctatggccaggtcatccatggccttcttgcacttctcctcagattccactgccagcttgagctcacgctgtagtgaccatgtctccacttcgcccggatcagcaaatgagaaggacatcacgccccttctcctcaaattcttcactggctgcctaccggtattaaaggcttctaaattcttgctgctgtctctgagtgaagctatctcaagcttggcctcctccagagatactttggtctgctcaagctgctttgtttggacctccaacgacagcagcatcttcttctctgaatcttttgcagcctccagttcaccttccaactgctgtaatctgtctgtaaggtccaactgcccttcggccccattgcttttcagcttcttgttcctattcgtgttcgtcttcctgagctcttcgatttcatctagggctcgcgccttctcctctttctccttcctcagctcctcccgcagtctgttcaattgctcctgcatgtctgattcgtccaagaagcctgagttggggacgttgttgcgataggaggatgacctgatgccgtcaacaaaaacaaaactcatat

SEQ ID NO: 15144 - DNA, 237 bp, Setaria italica
  Peptide Sequence Number=SeqID_81118
tgcaacacaagtaaataccgtggcggcatccaatgtgtgtcccattattgcgaaaatggaaaaggtgaaaagggagaacaatgttggtgtggttgcccagaaatagacgcaccaagcatccagatattttctagtcgcgagatgcttcacttctgattctcttctttccaccaaacgctcagtgaatagtttctcccagctatacattttcactgttctaatatgtgccaagagctt

SEQ ID NO: 15145 - DNA, 714 bp, Setaria italica
  Peptide Sequence Number=SeqID_81119
ttaggaacgccagaggttaagctgtctggagaagcagatgaggagataggcgaaggtgctacagtttctggaaatattgctgtagaagaggcagtggctggggatggctatctaacactagaacttgagtcgagcaaacttggtggactatggcaaggtagtgatgcagttttcatgcgttcaaatgagcatgggaataaggatagtgaaaggaagtgggacacgactgggcttggcgcagtaccactacaattagtggagggtgataaagtgtcaaggaattggtggcggaagttggagcttattcgtgggctcttgtccaaatctgttgatgatcagagccgtttggaggctcttacatactctgctatttacctaaagtggatttatacaggtcagataccatgctttgaagatggtggccaccatcgacccaataaacatgccgaaatatccagggaaatttttcgtgaaattgaaaggatatactacgggaaaaacacatcagctcaggatttgcttgtgatacgcaagattcatccttgtttaccttcatttaagtcagaatttactgcctctgtccctctaacacgaattcgcgatattgctcatcgaaatgacatcccacatgatctcaagcaagaaatcaagcatactatacaaaacagcttcaccgtaacgctggccctgaggatcttattgctaccgaagcca

SEQ ID NO: 15146 - DNA, 348 bp, Setaria italica
  Peptide Sequence Number=SeqID_81120
ggcgaactccatcccggggcatatccctcggcccgccgccgaacgccacgaaggaacatggcggagccgtcgccggcgacccgtccttgaacctggacgggtcgaacttggccggctcgtggaagatggcggcgtccatgtgcgtgacgcttgccgtccagaacacctgccatcctttggggatgacgtagccgtcgtactcgatgtcctgggttgctcgcctgaagttgccgaagatgggaggcaccatgcggaggatctcgagcgcgacgcgccacgtgaacttcatcttcgccaggtcctcccatgccagggcctcgccgtcgcccttgctctcagcgatctcgt

SEQ ID NO: 15147 - DNA, 367 bp, Setaria italica
  Peptide Sequence Number=SeqID_81121
ctatacctgcacctcatttcatgcttcctaaatggatctccaaaatccagcatgctaacatgcaagaggggcacttgatcatccaaacttggaggtccatacaaaaccatagcttccgaagcatttgtgacatcgtagacattcaccacaatatcttgattgccagctagtttgctcagcaaattctccacaagtgactccacatcaaaggctccaccaagatatccgatagttgcttcgacacgttgctcaactgatgcatcaccaggaagatcaggacggtacacagcaaaagtgagaactactcccaagtggtttgatccaagcaaaaatgggtttgttaacactgctttgccagtagtcctgg

SEQ ID NO: 15148 - DNA, 705 bp, Setaria italica
  misc_feature (682)..(705): n is a, c, g, or t
  Peptide Sequence Number=SeqID_81122
cttcccctgctcttctctcccactaaccctagatctccatgccgtcgccttcggctctcggcaagcgcgacggcggggacggcatcctggccgccctctcccggtcgcagttggcggcgcacgggcgcgaggctgccaccatggcgaagaagctgctgcggagcacgggcaaggcggcctggatcgcgggcaccaccttcctggtgctggtggtgccgctcatcatcgagatggatcgggagcagcagctcaacgacctcgagctgcagcagcagacgctcctcggaggcccgccggcgcccatcaagtagattagattagcatcctcctcctctcctctcctccccctgtggtgcctgcggctttattacttgtttactactagtactctataacattactgctgccatgctcaagtggttctagttgagagggagggatgcagtcgtcgtctgagattgtgtatgtttggttccaatcaatcaaccaatctgttggtccttgatgcgtttgtcttcctccaaacaagaggatggatcaattgtgcctgctttgcttgtgtttgttatatacaccataataataggctgctacttgttacttaaaaaacagtatgcctgcgattgaatttgataatctaatagtatccatgatccgtcatcatgtctgcgttgctactgcnnnnnnnnnnnnnnnnnnnnnnnn

SEQ ID NO: 15149 - DNA, 365 bp, Setaria italica
  Peptide Sequence Number=SeqID_81123
tgtacgtgtcctcggaagcctccgtcggcatcaacctctccccgatgtgcgatccgtccgaggtatcctacaccatcatgcccaccatggcctacttcgagttcctgcccgtcgacgccgccgccggagacgcaccggcggcgagccacctgctagtggagctcgccggcgtggaggctgggcgggagtacgagctggtggtcaccacctacgccgggctgtaccggtaccgcgtcggcgacgtcctccgtgtgacgggcttccacaacgcggacgccgcgggtccggttcgtgcgccgcagaaacgtggtgctgtccatcgagtccgacaagaccgacgaggccgagctgcagcgcgccgggga

SEQ ID NO: 15150 - DNA, 514 bp, Setaria italica
  Peptide Sequence Number=SeqID_81124
gttaaggccgggattcaggcccagcaatgtagattgggcctaaggtgatgaaattaatttgcttatgtccactcgttcagctgagaacgcggcaaagtgccagaaactgaataggatgaacaattacaacagtatgtacaatataagtcagttctcggaattgcacgcagctatgagccgtgtccaagagtgccgaatgcagaacaggtgggtagtttgagcgcttgtgctgccttcctctttagccaacataacggatatctgaattcaaacgtctattaccctctcatccttcttcgacgacttctttcgcttcctctcgctgcttgcaggctcctttcccttcagttcttgagcgaaggtccgcagaaggcccataagatgctcattcctgtgagctgcagttatacaccaaagattgcattgaaaaagtttactgagagggccagaatgagggccaattttctacagataccattaataagcagctagttagatggactactaggaaaag

SEQ ID NO: 15151 - DNA, 1709 bp, Setaria italica
  Peptide Sequence Number=SeqID_81125
caaggatcaaatgaatactaactgactctacagagcacatcggaaaaacaagctattggttatgtcagtcggggattgaaggtgcaatcttttccttcatggattgatgttgcattcccgcaggaaatgttggtcatagtccagatacctcgaccagtagcttcggaactttggcaggccaatctctagccagggcttcatgttgccattgtaatgtatgactgcagctcgctcaatgtctctgctgtttacatggggattgtaacctagaccaagaacatgccatgaccggctcagggggaatgtcttgttccagaatgtgatcaaacctggagggagtgtgccaagtttccaaagtgatctgtcttgattaagcttctgccatgagtgatagatttgggttatattctgccgcttccattcagccagatcaaacacattcattccaaaagcccaaccacaagcatgggggtcaaagttcttggcaataacaggatttgagaaattcaggtaatgatcgaagcgatggaagctctctccacaagtctcaacagcaccatttaccttccccttcatattgattgaccagaggccagtcagatccttcttaactactatatcatcatcaagaaagaccatcttgtcgagctttggataaatctcaggtaggtaaaatcgcaaatgattaagaattgacagatattttggattccggtatttcaagttcgaatctgggtttgcgcgattggttccgaagtagtaatcaatcatggattgagacccaagttgttggagcactggactgtagctgtcatttagccatgtaaactccccaatatgctgtacttcaattgttgctttcccaggaggattagtgaggaaccacattctcattggcgcataattcagtctgtcagttactatgtggaagacatgatcagaaggatgcttggcatttaacactgttgaattaacaacaactgctgttgctagtatactatccgagaacaaggcataatgatacagttttgggttactgagtttatgttggtttgggaactgctgctgaccaggatccaaggaaaagtattcgttagccagcctcaaggggaggcagtgaagacctttaggaagggttttagctgcaagttgtgtcagaaaaacagtctgcttcttgtgagcatgcagctgctcctctgctgagtgaagcatagctcgaagctttttgacaacaatagaacaatcatcctgcatctgtttgcccttaatcagcaactgctccagcgctttaaccttctcattcgcattctttggtagatcagtgtccttggatgcatcaccaagcaccttttgaacttctcgtatcctctgccgcaagtcttttaggtactgcgaatttgctctaatggatccaaggccaaggtagacctttgccttgattaactgatccttgatatttcggatccacgtatcaggcaaaacagtgttcttagttttaccatctgttatagctgcttgggagttctccacaagaaccttagcagatgtctgtttaggcatagtctcccgtaaactttccttagaagacgattgctgctgtgatccggtggttttctcctgctcatctgagatggcactcgccgagccaccatcctgtgcctcccgcctcgtcacttgctcgatcacttcggtgccatcagcagccacca

SEQ ID NO: 15152 - DNA, 288 bp, Setaria italica
  Peptide Sequence Number=SeqID_81126
tgccttttaactgctggaagctccaatgctcgcttgaaacgatcagagtctatcccaataggaaacgctgcaacccttgttagtcttccttggtcttccacaccctcaggggtaccctcaagtccaagtattctagtgcaagcactcacaaaatgcctcgcataatcataagtatgaaatccgactaaatcggcacacagcacagagcgaagcagctctaagcgggatggcagtgtccggtaaatctctgatgacgggaatggcgtgtgcaggaaccacccgaccttc

SEQ ID NO: 15153 - DNA, 640 bp, Setaria italica
  Peptide Sequence Number=SeqID_81127
tatcaagagatcgatccagatgatgaatagggacagcagttaaggttccaaaacgaccatttatgcgcccaacaatttcatgcacttgactcgtaagcttttgatctgcgggggcaagacagcccccgggttttttgcttaggaaaagacctcacacgggccgagataaccccaagcctctgccccacccttacacaggccccgtaaccttggaagactatcactgggctggtgaccacttcaactaccccaggtaggagggtccaaaccaaccacagctatgacctgggccgggccttgacctgtgctttggttatgataacaaacgagcagagttttttaaccccaacatgaaattcgctcccacgaggagtcgaacccagaacctgaggagtgctactgaggccatctaaccaattcagctagagaccctttcgcaaaaccagcaaaaacaaatgtaaagcaatttctttaatctatttttccagaagtatgatcctcataagagcagtaacccattttcaaaagaacagatgttttaaataaaagtaataataataagtttttgcaagcagcatacaaactgctccctccgatcacataaaggtgctgttttggataaccacaaggtcttctatag

SEQ ID NO: 15154 - DNA, 672 bp, Setaria italica
  Peptide Sequence Number=SeqID_81128
acatttaattctccaaatttcatcgagaacactcctatcactgccgctgagaacaataactgtagtatgctcatcttcacagagggctttcagaggaccctttaagtcaggatgcaacttgagttccatttccttgatttggtcaccaccccttctcccagaggattcgactggctcagtcaatgttgaattgaagccctacatccagtcatatatacaaacaccgataatagaagttgttactgttaaggtgaaattaaagtacttcaaagtgcaagggtcctgaaagccttcttacggaaagccaaaagtgaaaactgcactggcattcctaaatcactaaacaaaatcattggagacatgaatatgccacaaatttgtcatgatctactctagcagaaaatgtgaggcaacaaccagagtgaagacaatagccacataagagaaaactatgcgattgttcataactctacagagagtacttgctacaagatacaagtgagccatttctgaattataatgctcagttaacatgattaaaaattgctccacaactggtcaagtatgattgtatgaaagaagaaatatggttaccaatatgagcagacgatttttagatcgcagatattgctggattgccgtttgacttgggagcccaggaggaacttgttc

SEQ ID NO: 15155 - DNA, 2539 bp, Setaria italica
  misc_feature (1)..(38): n is a, c, g, or t
  Peptide Sequence Number=SeqID_81129
nnnnnnnnnnnnnnnnnnnnnnnnnnnnnnnnnnnnnnttttttttagacagagcgaagtagaagaacgagccgattaaacaccgcaacgattgcatatcataccaaaagccatacctccctaaactcctttatcctttccatttgctccactctcgcagtttaatgacgagcacaaattttgtacaggattgtacagcaccctgaccggctacgggtgtaactctgtcacgcatatgagaaatgaatattttttttccaagggttaccagaggcttggtgctatttactgcctatccaagaacatgtaatcggcattgctggactggaagccagccgttgccgttgccaactctttgaggaaggagacaacgtcctccgatgagctgagcaggaaacgggcgttggaccgcttccttccaacggcgcaggagaagtagttctcgcccttcagatcgaggacggaggatccctcgcgccagctgtggtcgctgctcgtgctgctgtgacttgatgaggacgacctctctgatacagcctgctgcaccttctgtgtcctggactgtgagttcctggagttgctcctgccgtttgatgaccttccgtttggcctccggtcaagggccgttgagctaccctctggttttactttggattcagatgggtactcaggatcgaaaaagacatagatgtcctcatcctttccaaggaagtgccctatgcataggacatagtcaattggagtaaccatgttttcgctgtgaacaatctcccctaaaatacgatcaattgcagcaccctttgtaactccaacagaccgaacttcaactgaccggctcccttgaacaacatcaacagcagcatttgagattggaccagtccacaagtgctgcaacatatctcttgcttgtagccttccaaattcaacatcagcatatttgtaattccacacaaatgatgtttcacggtgttcgaagtgggaccttggggttctttccgtaaagtattcaaaaacatgctttacactgtcaacccagtccatgttcagatgctcgggcattgttgtcatccattctccataagttgggcgtaaaaacatcccatgctctgcagccaaccacattttaaattctccaaaattttcatcgagaacactcctatcactgccgctgagaacaataactgtagtatgctcatcttcacagagggctttcagaggaccctttaagtcaggatgcaacttgagttccatttccttgatttggtcaccaccccttctcccagaggattcgactggctcagtcaatgttgaattgaaacccaatatgagcagacgatttttagatcgcagatattgctggattgccgtttgacttgggagcccaggaggaacttgtcttgttctcagttgtgcttcagcaaccgtgtcatttagctcacacacaaaagtttcagcccaatcttgagccgtgtgagttgtcacatgagcatagttatgcctgtgtcgtttctccctctcatcggatgacatcgtcaaagcatgacgtattgaatctgcaacttctgtaatattccaagggtttactagaatggcaccagctccaagtgactgggctgccccagcaaactcactaagtatcagaactcctttcttagatccttggcatgcaacatactcatagctcacaaggttcatcccatctctcagtgatgtgacaagagccacatctgtgacggcataaagagcgcacaaggcatggaaatcaagagatcgatccagatgatgaatagggacagcagttaaggttccaaaacgaccatttatgcgcccaacaatttcatgcacttgactcgtaagcttttgatactcaggaacgtcagttcttgttggcacagcaatctgcagtagaacaactttgtcgttccaggctgggttttcctcaagaaacttttcaaaggccaaaatcttttgtggaattcccttaatcatgtcaagtcgatcaacgccaagcattacctttcgaccagcaaaacgttgtgttaattcactgatgtgccttttaactgctggaagctccaatgctcgcttgaaacgatcagagtctatcccaataggaaactgaagatttcagcccaagtgagtgaaaagaatcattcatcttccacaccctcaggggtaccctcaagtccaagtattctagtgcaagcactcacaaaatgcctcgcataatcataagtatgaaatccgactaaatcggcacacagcacagagcgaagcagctctaagcgggatggcagtgtccggtaaatctctgatgacgggaatggcgtgtgcaggaaccacccgaccttcatattgttgtcatggtccttgaggcacttggggaggaacatgaggtggtagtcatggcaccagattacatccccctcctggtagtgctggtagacaacatccgcgaacatctggttagcacgcttgtacgcgtcgaactgtgactcgaagttcctcgttgttgccagcctgtcctcttgtggtagtc

SEQ ID NO: 15156 - DNA, 1420 bp, Setaria italica
  Peptide Sequence Number=SeqID_81130
aagacaatacaaattaaagttactaaaccctactgaaaaaactgcagacagtgagctgtcttggttaaatgtcttgagccaggaaactggtgagaatgttcaggaacgaataaatctgcagaaggctctgtttgaacttgaagaaaccaataagcgcaaccgaatggagctccagcatcttgatgatgctattgcaaggcatcaggtgaaagaaatggactctacagttctgcaagccttaacgtcaaggagacaagttattcttgataacatccgtgataatgatgaagctggttctggatatagaaaggacattgaaatgaatgagagtcgcaggcgtcaactccaggatatgatcgaggaagccgtcagtaacaatggcaatagaacctacctacacattctcagccagtacagacttcttggaatgactaatgctgagctccaaattgagatggcaatgcgggatcaagtgatacataatcagcgggagtctctaaggagcctgtggaacattctttatggaacagggctaaatcagaaacagattcttaaattggctgctaagcaaggcttaaccgtagaaggctgcccattgcctagctcaagcccagatgttaccaccccaccttcctttccgcctcatggaaggctgccacagttcatgtcattttctagtccgcaatcagagccatattctccatctgcttgctttttccaacatggtttcagcactatgtctttgctcaaaaatcaacatgagacacctaccatatgtaggcaggagcacctcagttcttactacatgacgtctggctgctcgccttattctggtgatggaaaacagtggtcaagtggaaggtcaatgccattcttttctactccagaaaaacttagggagatgagcggattttacccaggaacagaaaatgcacagtcccagcgcaggaaggaggatccgtggtccatggagaggaaatgaagggcctcgggtcgctcctcgtgcctaaaacagctgttgatggctacaatgtggcctgcctggtgttcctaacctcggttgctgtgtgcatcgtcttctgcctgctgccgccgacaccaacgttaatgggcttcctgagatctgaagagatgctagtggatttcagccaagttgttgttggctttgggcacggccacaagaacaagattgatgatgcgtctagaccctgctgacattgctcactccaccctgtacagtagaatgctaggtctctcatggtttcctttcctccttttctttctttctttgtagaattgtagagcggttgctgagggtgaatctgattttcggacccaagattctgtaaatctgccgcgggtttaagcccttcttcagtaaatccagtgaaaggctttcacaaaaaaaaaaaaaaaaaac

SEQ ID NO: 15157 - DNA, 373 bp, Setaria italica
  Peptide Sequence Number=SeqID_81131
gtgtttcggggatttgatgggctgctagagcaaggcggcggcgggtctcctcggacgcaacgcctagtctgcaaggatgtcgtctactccagtttcgctctctcagatcctcccgggctgatctctcgcccgcttgctacaagagtgaaaatggatggaagtgctagagggggtgggcattctgatgcattaagaaactacaacctgggaagaacattaggtattggtacatttggaaaagtgaagatcgcagagcataagcttacaggacatagggttgctataaagatcattaactgccgccaaatgaaaaatatggaaatggaggagaaagcaaagagagaaatcaagatattgaagttgttcattcacc

SEQ ID NO: 15158 - DNA, 382 bp, Setaria italica
  Peptide Sequence Number=SeqID_81132
atcggaccgaggccggcagtcccccccatacgcccaacccccaaaacctccctccgctctcggctcgtgggtgctctccccgtctctcctcccactctcgcccgcccgcgcgcaggcccgtcgggtggccggcgagcctggtgaggtaagagtgaaaatggatggaagtgctagagggggtgggcattctgatgcattaagaaactacaacctgggaagaacattaggtattggtacatttggaaaagtgaagatcgcagagcataagcttacaggacatagggttgctataaagatcattaactgccgccaaatgaaaaatatggaaatggaggagaaagcaaagagagaaatcaagatattgaagttgttcattccaccc

SEQ ID NO: 15159 - DNA, 409 bp, Setaria italica
  misc_feature (396)..(396): n is a, c, g, or t
  Peptide Sequence Number=SeqID_81133
aggacggggaagtagggacgggcggtagacacggagcagcgggggaggaggggtagggtttttgtcaggagggcggtcaacgccagcttatatagccctcctccaacggtcggattcaacggtcaagagacctgatccattggttggggatgagggctggaggagtatcacgctggcgtcatgccggcctaaaaaccgtgccgtgcccgagatgatccagtgtgctgaaggttgtggcccaagcactgcctgatgattaggattgggtcggcctggatactattgccttcgtgttgtgcggcgttagtgtcgagctttttagggccgggtctagtgccaccacagacctggcccatctagccatctaagccgccggcggaggcggaggcgcggctnacctgacggcgtg

SEQ ID NO: 15160 - DNA, 469 bp, Setaria italica
  Peptide Sequence Number=SeqID_81134
acgcttcccctcttttcttccttctccctccgctttataagcagcgccctgcgggaagccgccgctgctgacacacaccgctcccgattgatctcctccctccagcgccggccggcacagggagtcacagccgcacaagagggcaagttggacacgtcatcgagattcgggaggagctcagcgtccatggagaaccgcaaggaggagcagcagggcgcagctgtgggctggatgacggtgccggccttcggggagtgggacgtcaagaacggcgccgtgccggactactccatggacttctccaagatccgcgagatgcgcaagcagaacaagcgggagctctccagggccagcctcggcggcgacgaggacctcctccaggcgcagcagggcaagccgcaggcggcggcgcagcccgacaagtcctccgccgccgtcgcggcagacgaccaccaccgccggccgctgc

SEQ ID NO: 15161 - DNA, 1144 bp, Setaria italica
  Peptide Sequence Number=SeqID_81135
aaatcttttacaaaacctgcaaatcgagttacacgactcttccagtgaacagcgcaacgcagttggcgctccagtagcaactattcccttcccttccctccccactcttgtagtccgcaactcgggtgtaacaacagcaaaccaagagagtcgattttacagtttacaggcaatatcaataaccaaaaacaaaaacttcatatcatattcatatctcagcgagacccaatccaatatcccaacaacaatgtactctaaccccacctagcagcacccgaaccggcttgcctgctgcttctggtcgtctttcgagtcgccgtcgatgctcaccctgttgagggagagctcggccttgtacgagtccgagttcaggatcttccggctcacgttgctgtagatctccttgatgacgatctcgaaggccgtctccacgttggtggcgtccagggccgaggtctccatgaagaacatgctctcggcttccgcgagcgccttgccttcctcgacgggcacctcgcggatgttgtccagatcgcatttgttgcccaccagcatcttggctacagtagtgtcggaatgcgtgttgagctcctggagccatcggccgacgttctcgaaggtggagcgtcgcgagatgtcgtagacgaggagcgcgccgaaggctcccctgtagtacgcggaggtgacggcgcggaagcgctcctggcccgcggtgtcccagatctgggccttgacctccttgccgtcaatgtccatgctctgggtctggaactcgaccccgatggtggccttggagtggaggttgaactcgttgcgcgcgtagcgcgagagcaggttgctcttccccaccgcgctgtccccgatgatcaccaccttgaagaggtactcctccgcctcgccctccgagtcgtcccccatcgctcgctcgctcgctcgcggcgcccgaggacggacctgctccggaggctccctcgctgtatgtggctgccgccgcgcctcgccgcgcccgcacgtcgtcgcctcgggaatgcgcgagatttgtagcggtttcgcggtgggttttggccgaacgcggcgcgggtcaggtcggcgcggcgcggcgcgggggcggggcgcctccactggtggccgggccggaggtgtg

SEQ ID NO: 15162 - DNA, 432 bp, Setaria italica
  Peptide Sequence Number=SeqID_81136
cggacgctgggaggagaggccgaggcgctgagcagaaggcagcggcgctcctcgacagaggtgggctcgaccgaggcgctggagcaggaggcggtggtgctcctcgatggaggtggggcggcacggcacggcggggcggggcgggatggcgacgaggtggggcgccgcagcggggcggggtgggtcggcgacaaggcggggtagggtgggacggtgacggggtgggacggcacgggaaagctcacattccactgcttcttgacttttcatgtaatcatagcttatgtaggcttttagctttcggaaaggtcatcttagaagctggctgtctgtttgagctttcggcttcttaaggtggaaagctgctggaaagcccaaacaaacaggacctgaatgtcagtactgcatttgcattgacacagataagttatg

SEQ ID NO: 15163 - DNA, 1735 bp, Setaria italica
  misc_feature (1703)..(1735): n is a, c, g, or t
  Peptide Sequence Number=SeqID_81137
ggttggttgcagggagggggaagggggatggaggggatggaggaggccaacagggcggcggtggagagctgccaccgggtgcagtgtgacctctccaacccgcgcggccagctcgtccccaacaaggatctcgtcgcggcgacgggggaggccgtcggcaagttcggctccctcaccgccaagctctccaactccaacggcaatggcctccagggccacgccagggtcaggaagatcaagaagcccctgcccatcttcgacagcaacctcttcctggagagctctgcggtggccgtcgccgctgccactccagccaaggcgcccagcgcgagcccgatcactggcctccagctgttcccgaggtaccagatggagggctcgtcgtcaaaggatcctatcaggatccatacccagttccccaagaggttgatgctagagaacccggctgctgctttggaggggccatcttcgcaggcccctccggtccatatggtccagccggtgtccgtcgcgcccccagcggggacgccgacaccggcattgcctgcagcacaccttcatttcatccagcagcagcagagctaccagaggtttcagctcatgcagcagatgaagattcagaacgagatgatgaagaggagcattggggatcagggtggtagcttaagtggcggtggcgggggtggtgctaagggggtgaatctcaagtttgacacctcgaattgcacggcgtcatcgtctcgctcgttcctttcatctctgagcatggaagggagccttgcgagttttgatggaagccgggccagcaggcctttccagctagttagtggctctcaggcatctagcacacctgagctgggccttgtgcagaggaagaggtgcactggtagggaggatgggagtggtcggtgcgcaactgggagccggtgccattgctcgaagaaaaggaagctgaggataaggaggtccatcaaagtccctgcaataagcaacaaggttgcagatataccagctgatgagttctcatggaggaagtatgggcagaagcccataaagggatccccacatcctaggggttactacaagtgtagcagtgtgagaggctgcccagcaaggaagcacgtcgagaggtgcgtcgacgacccctcgatgctgattgttacctatgaaggcgatcacaaccacaaccgagtggtagcccagccagcctgatctttcaggctatcagttgaagacctgcttctatagccatcctccctacctagacaagggaggacaaaaacaacaacaaccagaagaagagactagtgtctgtacatatgttctgcttctaacagttggggaggggggagagtcagttagctagctctttcagaagaaccaatggcgaaagaaggaaacttatggtgcaggtggtcggtggcgaaagccgaaaggagtgttagttcctcatcaaagactcatagttttgtagctttgatttcccttttgtgttaaaatgctgtgctaggagggcccatcctgtggttttgcagcgcgacattgagctgcagttgtatgtctggggatggtgttactgtgttaggggattggatccgagaagaaggcataaggcagggaagtgcctgtaaaagttgctacacctaggaacagaatgtaccctcatcttcagtcggtggtacaatctttgttgaggcgcaacnnnnnnnnnnnnnnnnnnnnnnnnnnnnnnnnn

SEQ ID NO: 15164 - DNA, 718 bp, Setaria italica
  Peptide Sequence Number=SeqID_81138
tcgtcttgtagcactcggcagatggcattcgctttaactgagcatgacaaaacacaagaatgcagcagagtcggtgcaagccatcagagtaaaacatgactcaaatcaacgttcatatgcaaagagctcctaggtctgatgcaactctaggctccttgacttgtgctgcttgtgcttgttctttcttcctgacttgtgctgcttgtgcttgtttttgttctttcttcttttgcttcttccctttctggcctttcccttggacacctttggccccttgaaggttctcctggtggtgtagccgtggctaaactacaagacaccttatgattctttgtagatccacaagaacaatccttggttttggatttttccttggaatgtgaatcttttggtttctgaaccgtttcatctttgctagaacaacttgcttcatccttgtgatcgatcgcctggttctcatcgtgccatttggaaaattcatctaatgcatagtccgtataaggggtctccctctgcatcattagcacccattgcaaattgctccgctatcatgtactcaatagcagcatcaacatcgccgtccatttctcccaaaacgtgctcagctatggcagcatcagaacatccagttccagccatgaccaatttaactgattcttgatcataggttgatctgtgtgaggatttcttcgggtcctttgctttttgttttgggtct

SEQ ID NO: 15165 - DNA, 312 bp, Setaria italica
  Peptide Sequence Number=SeqID_81139
ggcgttctcggagaaggcgaggaggcggaaggaggagtcgtcggcgacggcgagcgtgcagccgaagggctggatgtggccgccgcgctggatgcgggaaaggtaggcggcgatctgctgctcggaggacggggtgggcggcgcgcgcagcgactgggagtagtcgaagctgcggcccgacgcgcccgactgctcgaacaccgcgtggaggcgcgcgtccaggttgtactgagccacggccttggagaccgactccgtggccgctgtggccgcgccgcccccgccgccacctcctccccctcccccgcccgc

SEQ ID NO: 15166 - DNA, 669 bp, Setaria italica
  misc_feature (1)..(13): n is a, c, g, or t
  Peptide Sequence Number=SeqID_81140
nnnnnnnnnnnnntttttaatccaaatgtttgtaattgcataccaaggtaacagtcagatcaataagccacagcccacaggcaagaacaagtctgatatttgttacagccttgcagatgcaaggtcacatagccaaattcgttcttgaacatttatgctatacacataccaatgggtgttctttgctgaaagaagagaaacggccaataattcttgaaatttggatgggaggccaactgcttcagaaattagaacatcgagaggaaataggttgcgatccaacagtcagctccttattccggctgcctataacttcgccggtgagaagatatgtacaatggaccgagcataacctttgatatttacaggggtgactgttatcatcatccaggtcagctggctgaggtcctgaaaggtgggctgtcagacttcagaaaccggaaatattccttctgcaacatctgccctccattcacttggtcaaagctgcacctgtagaagctggagaaaacaaattggcacgattaatgaaatacgcgatgcttcctacaaatggaggtggaagatgctggttgctggctttcattagataggaagaaaatctgacaaatcaaccgtactaccaactgaaacttttgtataaaaaaaattgtcaaatcaactatatag

SEQ ID NO: 15167 - DNA, 1305 bp, Setaria italica
  Peptide Sequence Number=SeqID_81141
ttttttttaagtaactaattaacctaaaggttaaactaagttacaagaatacaaataaagccacagcccacaggcaagaacaagtctgatatttgttacagccttgcagatgcaaggtcacatagccaaattcgttcttgaacatttatgctatacacataccaatgggtgttctttgctgaaagaagagaaacggccaataattcttgaaatttggatgggaggccaactgcttcagaaattgttactttgttttatttcactattcctaggttctagtcttggtcttgaggttccttagaacatcgagaggaaataggttgcgatccaacagtcagctccttattccggctgcctataacttcgccggtgagaagatatgtacaatggaccgagcataacctttgatatttacaggggtgactgttatcatcatccaggtcagctggctgaggtcctgaaaggtgggctgtcagacttcagaaaccggaaatattccttctgcaacatctgccctccattcacttggtcaaagctgcacctgtagaagctgccatccaggccaaccatcattacggtgttctgtgcaccaaatgctactatgtagcgtgtgacttcaggtagatggaattgagcaaatgaccactctgaactgaaatactttggcaggatccctctcatgaaagacagtgatgaactcgcattggacccagtgttcgtctgaataagaggatcaatagaactggaagagttctggtggtccatccgtggaccttcaagagtgtgttgctcattgcttgaatcctccccagcaactctgactctcagagagaaaatatgaacagttcctttgtcgctggacactgccaaccactgaacattgggcgacagcgcaatgctatatatttcagctttgtcaagtcctctgcgtacctcttgtaggcgagtgccatccattgtgttgaatattctgatcaaagtgcccttcgtgctcgcagttgccaataggagaccatccattgtcagtgccatgcaagagatgtttgaatcatgagctgggattgtctttgtcatcttcagcccgaaatgctccacccgacatgcccctggtgcactccagggcatgctaaaactgaagtattggaatgatgggagaggcagcaaagtcctttgggatttgacagagtgtcaatctggtagagcagcttcaaatcggtgaagttgtagacatatatcttccgctcgaggacaatcacaattagtccttttctatttcttttcttagttcccgttaaatttgttctt

SEQ ID NO: 15168 - DNA, 1095 bp, Setaria italica
  Peptide Sequence Number=SeqID_81142
ggatggcactcgcctacaagaggtacgcagaggacttgacaaagctgaaatatatagcattgcattctgatcaaagtgcccttcgtgctcgcagttgccaataggagaccatccattgtcagtgccatgcaagagatgtttgaatcatgagctgggattgtctttgtcatcttcagcccgaaatgctccacccgaacatgcccctggtgcactccagggcatgctaaaactgaagtattggaatgatgggagaggcagcaaagtcctttgggatttgacagagtgtcaatctggtagagcagcttcaaatcggtgaagttgtagacatatatcttccgctcgaggacaatcacaatgtagtcctttgccaattttacagcccggacatcagagcggaaggcaaactctccaatgcagcggctctgatgatcatcccagatcatcaccttgttcggcggatactgcacattggagcccccgcctacaagagcaaggatgttgcaacgaaacagcatctcgacgatcccgaacccgccgctcttaaggtccctcctgaaagtttccttgaaaggctcgcagttgaagatcctgaatccattgctggtaccagcagcaaagcatccacagtcctgattccaagcaactgacaacagcctgacatcctggtcgtcaccaagacctgctccgggctggctcgtaggtgcggacagcggccagacatgtgacgactcaaatgccccaagtttgccaggcgggtgtaacccccgtgatgtggagacttgtgagctcatgaggaaggcgtgaagccaaatcaattgcttttgaatgtaagagctcagttaaaccaaatgtgttgctgctggcaaagtcttggaaatcctctttgcgccgcgacgcctgccgatgaggggtggcggagaccgatcgacgaggcgagcacgcgtgcgcgcggtggcggatgagcgaggggaagggggagtgggggcaaccgggcaaggcgacgagggaacgggaggccggacggtggaaggaggagccgaaggttccttttgtcctaatttttactagtcccggtactattctagtagtcggtaa

SEQ ID NO: 15169 - DNA, 465 bp, Setaria italica
  Peptide Sequence Number=SeqID_81143
gcgacggcggcgcggtcggtggcggtgccctggaagacgcgcgcgttgcggcccagcacctcgcggcgcgggtagccggtgagcgcggcgaggccccgggaggcgtagacgatggggtggcccgccagggacgggtccgtgagaaggaagctccccgggagctcgtccagcgcctccagcacccagtccgagtaccgcgccgtcagcgacgacgcgaggcggcggcggtcgtgctgctgccgctcccggtctcccgggtccacctccgccgcgccggaggtcgccatcccgggggtcgccggtaaggcggcgcgatcgccggggaaggaggggagcgagaaaagatctgcgcgcgggggaagcgggggctatggctgcggaattttcgttggggccttttttatttattttttaccagggcagaagctctgaagtactagtacgaactgctctgaagcagacgag

SEQ ID NO: 15170 - DNA, 467 bp, Setaria italica
  Peptide Sequence Number=SeqID_81144
cgcttttgatcgttactaaacttttagcaagtgccgctggctatgtcaattcacattataagactatactctatatggtgagtgtattatggtggtatatcaaagagtgccatgtcagactttgggtaagaagttcatgtgcagatattactacttataccgtattattaaaaaaaagatcaaggttcaatcgtatcagttgtccaatcgaattgcttgttgcagttttgatggattttcatcaaaacagaggcagtcacccactggaacagtgaaaattctggtaattgatcaagttatttgtaaaaaaattcacaagccgaacctaagcacacttgaaaagactaacagatgaaaggataagcagaactttatctttgtgccaagaaaccagttggaatccaatagtacgaaccgcgtgctccatccaacaaccaaaatactcccaatcgagaaagtcacggacc

SEQ ID NO: 15171 - DNA, 1060 bp, Setaria italica
  misc_feature (1043)..(1043): n is a, c, g, or t
  Peptide Sequence Number=SeqID_81145
cggtggtcgctgataacttgtccggcaagagcacgctcagtgaagtccgcaccagctcgggcaccttcctcaggaaaggccaggatccaattgttgcgggtatagaggacaaaaattgctgcatggacattccttccaaaaagagaatggtgaagatatccaagtcctgagatataagcgtggggagaagtatgaaccgcactatgattacttctctgacaatgttcacactgtccgtggtggtcatcgctatgctactgttcttttgtacttaactgatgtagcagcaggaggggaaacagttttccccttggccgaggagtttgacaacggtaaagatgcaaccctgtcagagtgtgctcagaaaggcattgcagtgaaaccacgaaaaggggacgcactccttttcttcaaccttaaaccagatggtaccaccgatacagtgagcggccatggtggatgcccggtcatcaagggtgagaaatggtcagctacaaagtggatccgtgtggcctcattcgacaaggtccatcacaggcaaggcaattgcactgatgagaacgagagctgcgagaaatgggcagccctgggagagtgcataaagaacccagagtacatggtgggaaccgcagtgttgcccggttactgtcggaggagctgcaacgtgtgttagcgtcaggatacgagaaagtgggcttattggaaccatggatcttgactcgaggaacaggctacaccgagttgattcacaaggtttggccaggattctgccgttctttttttgggtgctcctgattaggtattggtttttgagttaccgctagcgttcttcggcggtaaccaggcaggagccggaaaactctttgttagtgcttaccatttagtcgtccatagtctatgctgcatctgctgtgtcataaaaaaaggtccataggcaatatgctggatggagatgcattttgaacaaccttagtgtattaatttatttgtttagattgcttggatctgctagcttataatccgtgccaagaattcaaaaaacntctggatccattgcatc

SEQ ID NO: 15172 - DNA, 258 bp, Setaria italica
  Peptide Sequence Number=SeqID_81146
ctaagaaggataaaaatttaagagatgtaatttctctctcgaacaccccatgtcacattggtttacatagtaatacatcaaaaccctagaaccaaaaaggaagacataatattgcaccacaaaatgaaatttcatctcagttcacattttaggctgatttccaagaagctgtccgactagattagttacctgccagtattttgaaacacatcgatcaatgcagctgttctcacccatgttgagctcagcttctttgtg

SEQ ID NO: 15173 - DNA, 1068 bp, Setaria italica
  Peptide Sequence Number=SeqID_81147
gccccactccttcctgctcctttaacccccgcgccgcgccgcgccgggcgccggcgactcgcctctccactccaccggttccacgcccccacgctgctctccacgcgctgccgctcaatggcgggagccggggcgtcgtcggcgtggggcccgagcccggcgctggtgaccgcgctcgtggcgctgctggggctcggcctcgccgcctacatcgtgggcccgcagctctactggcacgccgcggaggcactcacggcggccggggcgtgccccgcatgcgactgcaactgcgacgcgcgcccgctcctcgacctcccggaagactgtgccaaacaattcaaaggggttaagagtcgtgcgactggtgaagaaacagaaaagagtttcacagagctacttatagaagaactgaggcagagagaagaggaggcaacacaagctcagcaagaggctgatgtaaagttgctcgaggccaaaaagttagcttcgcagtaccaaaaggaggctgacaaatgcagctccggtatggatacctgcgaagaagctagggagaaatcagcggaagcattggtcgaacaaaagaaactgacttctttgtgggagcaaagggctcgggaactaggatggaaacctgagaatacaaggcacacctaaagtagtaaatctaatacgctagcagatggcgctggatacatttgtgtagcaacaggcatcttgttgcaaatacggcccacaaagagcttgagttgctagaggaaactagtgggttccctgttggcagactcatgccacgggcttatttgtccatagtaaaactatattcagtctgtagtatatttcccttgctgtttgtgagcactgtgttaagatggtcataggattacactaatctgcatttaggccatgaaggtttcattagttattatctggatgttctaaaaaggaagagctattgtttgtggatggtgaaattgtctcgatgttaaaagaaaagaagaaaaaatattgcctgtgtatgatggtattgataaagaagttgtctgcagtttagttaaagaaaaaaaaaaa

SEQ ID NO: 15174 - DNA, 470 bp, Setaria italica
  misc_feature (458)..(458): n is a, c, g, or t
  Peptide Sequence Number=SeqID_81148
ggcccggaactgcagcgggccggcgggggcccggtccgtgcgccacaccggcccgtgcacccgcgtcatgaaccgccactccgacgaccccaccggagccacgtccaccgccaggatgtcggtctggccgccctggtacaggaacttgacgaccaggttgcttggactcttgctcccttcttccacgagtacggacaggttcttgtccttgtagtcgcaggggattctcttgtactctacggagagagcatccaacctcttcaactcgtgggccaccccgggcttggccaggcccgcgaaggcgggcccgccgagcaggaagtcagtacggttgctcctgtggaagtcggtgagcacgacccgcactcccctgctgctgcacagccttgcatctctgcatctcatctggaagcatctcccgcagccgagccctccccggtgctgcctgggcccccggnggcgaggaaccg

SEQ ID NO: 15175 - DNA, 1889 bp, Setaria italica
  misc_feature (1)..(21): n is a, c, g, or t
  Peptide Sequence Number=SeqID_81149
nnnnnnnnnnnnnnnnnnnnnggttcttacaacagctcaatttattcctttcttgatttacacatttctactttgatcatggtgttacaaagaagatgcagatatactattgcgaatagaggattacattagcagacctcgtgctaaccgatgacgacataacaatcacatgtatgtgtgcaacagatcaatttgcacctgaaaaatgaagtgctgaaccacgcaggtctcagaagaaccgagccagaaccatgggacagcaaccacccaggacccaacctcaaaaaccagacgtgcacccatgagtgcacacctactcgtgctgccctactgggcttatctgaaccttaagctgtcctcttctcgtgaatcacgcataattggttgtggcgaccacttcagacgcaagttcagcttcccactctttgctccctccaggttgaagctctcctcgtagtcttcttccagcaaaacttttgtcaaggtcaggatgcaccgccccatgtaatctctccggaatgtgtcgtgatcatatacttccaatataagcatatcatgtaagccatcttcaacgacaaagtcgaaagtctgattccagactgggttcaagctttcattcacaaccctggtcttgtactttgtttttgtcttcttgagagaaagtacaacatatggatcggactttccattcatatccattgccggcaaatcctccccggatatcacagttactgacagaaccccccgcacgataatttcctttctcttccttgatgaagacatcatgtcaaaactagatcctcctgatccgttttccatactagtcattgttctctccaacgaagtcatagaaaactgttgtctgaaaggatttggagcatcatccttcatgtcaaatggacagtagagcagctcaagatgcacctggcccctgtcttttctgtccctttgaatctccagatcttttacaagcttcaaccagatatccttcactttccctggttgtagatcctttagcctgacttgagcacagccaattaattcagattcctgaataccatcatcatcataaatcttcacggttacagtttgagtatcagcatcttcaacaataaactcgaagtgttcattccagatagggttaagatcgttgttaattgttttacttctcttcattttgtctggcaatgggcggacgtacacaatggcaaaaggatctgattttcctatcagatctttgttcgtcaaatctcttgcttgcacaagtttgacttccaatgtaccaacaggcttcagttccaaatcactgtagtccccaggtattataggaataactttccttactggccatgttattgaatcttcaatagcattttttatagtttcctcaagagcatctgaaattccaggtatagcagaaatttcaccaccaatgaccttcagtctgaaatccagctttttcttctttcgtagagaaaagcaaacagctccaaagcaaggtagctcttcaaccagtggtttgaaaatcaagcggaaaattcctgtaaagccaatgtccttcacctgtattggaagtgccacaccaagtctagtttttacatcaagtataatatttggattggcatcccaattcatctctagctccatgacaatacctgattccttattattctcaatgatggaaataccggtaaactgtggtgcaacagtaccaagagtgagttttgagaacttcagggacgctaggattattggcctatattgttcaagagtaggctctacagaggttttgatcagttctgatgccgcctgattcacaaacggccagatctttgtcagctcttgattaagccattttaccttgctgcgatgagaaaccgaagaaaaca

SEQ ID NO: 15176 - DNA, 486 bp, Setaria italica
  Peptide Sequence Number=SeqID_81150
attcaacatccaggcatcgatggcacagccatataagaatttagctgttgatacctttttaggggaaagtacaatgggaggcttccagcttggaacctcagccatgttctttcttttatcaagtggaaagggtggcactttagaaagaacatagcctccgcatttccgtataagagactcaatttctttttccttctgattaggaaacccagtcaatataaactctactccttgaaatgtggcttcattattatcaatgtactctctggtcttaactttctcttctattctgctatctgatcgactgaatctagatttaggaagcatccttctattgctcttggttcttatgctactaggttttgcttctgaaaattggaccctttttcttttaaggcactgtttaccattattcaaatttactgatgaccgacagacttcccatgggacctgttgctctctgatttgatcctcactgtcatccct

SEQ ID NO: 15177 - DNA, 268 bp, Setaria italica
  Peptide Sequence Number=SeqID_81151
cgcggccgccattgacgcggtgtcgcacgaactcccctagatctgagcaaagcaccctgcgaatcctcacccgacataccaaatctggtcggaagcggtgaagaattcggacacgatcctaagcatcgttcactaagaccacacacatctatctgctttttcccctgcctgtttttgtgtagtttttttctcgtttcgaacgactcgtaagaacaaatctgcaaggggcttgcagatcctgcagatctacctgcgagaggcaggcccc

SEQ ID NO: 15178 - DNA, 400 bp, Setaria italica
  Peptide Sequence Number=SeqID_81152
ccgcgccgtcggtcccctggtcacccgtcacccgtgaccgcgacctgcctatccggccgcccaaattctggagcctcggaagaggaaactctcctgtgcaactcgggagatgtcttggttcgagataccggaacccatagtcaagctggagttgggtggggtaaactacgggctgtgggcattggtaacgaggatcactctccaagcccgtggtctctgggggcacatcaccggcgagagtgcctgtcctcctgcccctgtccctcctccccagccacaggctaatgctgctaaggaggtcgtcgatgctgccaataaggctttcaaggactatcagagcgctcttgatgcatacaagcagtgggatgtcgacgacgcccgtgccatgctcattctgctt

SEQ ID NO: 15179 - DNA, 319 bp, Setaria italica
  Peptide Sequence Number=SeqID_81153
ctccttcagtatggcaaatagacgctaactctggtggttttggtttctcttttcatttgtgtaagatagtgtgggaagttacaggttttgtgcagtttagtggttggttcgttcattttcttacgggttcgtgacatggttgactttatggtttcttggtacagaactgttcgagcttccttcaggaagatgtaaaaaaataacttgtacgtgtggttattgtcatttgttgtggctcagtcgagtggtatgcactacctgtttgatggacaacgtgtgtaagaaggtgtgcaaacaaagaaataaattttagccccgt

SEQ ID NO: 15180 - DNA, 266 bp, Setaria italica
  Peptide Sequence Number=SeqID_81154
tccgcgtcgtgcgccgtcggcggcgccgagtgcgactaccggtacctctacggcctcgccgccgactcgcaccactacacgcagggttacctcggaagcgagatcttcacgctcggcggcgacgccgcgccgggaatcggcttcggctgcacgaacatgtcggagggcggctacggcaccggctccggcctcgtcgggctcggccgtgggccgctatccctcgtctcgcagctcaacgccggcgccttctcgtactgcctcgccag

SEQ ID NO: 15181 - DNA, 2014 bp, Setaria italica
  misc_feature (1918)..(2014): n is a, c, g, or t
  Peptide Sequence Number=SeqID_81155
aaaggcaaaatagtgtacaaaaaacctactgggaattcaactttttgagtgtgcccgggggagtcctatctccttcagatcatgtcaggcacttgtattagtactgacgttcttatcatatgccagctaccatgccactagaaaaactacaagtattgttaagagtgttcttgatcctaagacaaaccttggcatattgcactggcccagtcatctctatcttcaaaatttgaaaggcgctgagaacaataggactctctctagtggttgggctccattcaacgctgaagatggcaccgcgttgctcggcgagattgacctggcttttcttggtgtatatgcaatcggcatgttctttgctggccatttgggcgaccgggtggatctgaggatcctgctgactatcggaatgataggaaccggattgttcactgctgctttcggagcgggctactggttcaatatacacaacttctactactttctgggcatgcagatgatggctggcctgtttcagtcatctggatggccttcagtagttgcagtggttggcaattggtttgggaagagcaagagggggctgatactgggaatttggaatgctcacacatctgtaggaaacatatctggctctctgattgctgctgcaatgttgaagtatggatggtgttggtcctttgctgtgcctggtatcatgatcgcactagtcgggctcacggtgtttctgttcttgcctgttagtcctgatgtgattggaattcaagaggatttccacttgaaggactccgaaaagactggcatggacacccctttgttggaacggcgctcgcaagcaaaagaaaaggcagttggatttattgaggcatggagaattcctggtgtagctcctttcgctctctgccttttcttctgcaagcttgtggcctatacgttcctgtattggcttcccttttatatcagccacacagccattggaggccaatacttgtcaaactcctcggccggggtgttatcgactctgttcgacgttggtggcgttgtcggcggcatcctcgccggccacatctccgaccgcctggacgcccgggcgctgacggcggcgagcttcaccttctccgcgataccggcgctcttcttctaccgcatctacggcagcatctcgctgacgtggaacatcgccctgatgttcatcacggggatgctggtgaacgggccctacgcgctgatcacgacggccgtctcggccgacctcggcacgcacagctccctgaacggcaactcccgggcgctggccaccgtgacggcgatcatcgacggcacgggctccatcggcgcggcggtgggcccgctgctgacggggtacatctccgccaggagctggagcgccgtgttcacgatgctgatggcgtcggcgctcgtcgccgggctgctgctgacgaggctcgtcgtggcggaggtggtcgccaagatggagccccggaggacgcccgacccggctgctagcgacctgcccgtgtcctccatggatgaaccttaggctgtggagtgggagacggctgggctgtgtcttcgtggagaactggaatggcggcggcgggagagcagatcacctctgggttgaggagaactgtggcatactggcatctggcacctggtagtgtcgtggttgttgtgcgtcatggtatatgtgtatggaatgcgtggttgtggttgccgacgaggatgaaatgtggtccagacctggtagtttgcatctctaagcttttgttggagctgcactgaacatccaccggccatagtcacccgagtcttcctattagcaaatgcaactccggaaatgagtgcggaaggttcatccacaaccacaagcagaacatatgagttttagctgcaaaatgattggggcatctgttccgtnnnnnnnnnnnnnnnnnnnnnnnnnnnnnnnnnnnnnnnnnnnnnnnnnnnnnnnnnnnnnnnnnnnnnnnnnnnnnnnnnnnnnnnnnnnnnnnnn

SEQ ID NO: 15182 - DNA, 265 bp, Setaria italica
  Peptide Sequence Number=SeqID_81156
gttctacatggatttgggtggtgacgaggggaaggcagtggccaactccgccgcagaactgcagatggcgaatggcatcggccgtgtagccatggacttgccagtaacagtggaggatcacaagcaacaagactctgctttgtgtacgatgctcaagaaggtcacagaagtttgggagtggcccattgcatttgttctgaagctcaccataccatcaacccttccttctgagtggaacaaagtttacatttgtgcaaacatctgt

SEQ ID NO: 15183 - DNA, 357 bp, Setaria italica
  Peptide Sequence Number=SeqID_81157
gatgcctatttaatgttctgtatgtttatgtggcagttgatctgaggattcctgatctgtttccttgatgcagctgcgtgcaggcttagctgccagttatctgattagcaccatgtgcacaagctttttatgttcctcaggatgatttgatccacgcctcaacaaaaacaagttggtaacattgttgattggaaagtctgctaaagcattccttcttaccagttgtttggtcggtgctgcttagtttcagggttgtgttcggggagatcagcatgctttggttagtcgtggattcagattgcagcattttgtaatctgaaattttatggagccaaaaaagtgcaacaaattttgtaa

SEQ ID NO: 15184 - DNA, 487 bp, Setaria italica
  Peptide Sequence Number=SeqID_81158
taaaattaacctaaacgtaaccttaactaaaactaaaaaaactacaactttaacaagttggtaacattgttgattggaaagtctgctaaagcattccttcttaccagttgtttggtcggtgctgcttagtttcagggttgtgttcggggagatcagcatgctttggttagtcgtggattcagattgcagcattttgtaatctgaaattttatggagccaaaaaagtgcaacaaatttgaacagtcattagaaatttcttgtgtgctgtcatgttaattcccaggaggggacacgtgaggaactcagttccagctagtcgccaaggggcagtgagttgttgccaacagtagcgaccactggaatctgagttcttacgaaggtgtatccctaaacgtggcgtcagcgtcacatgggaatgcttctttagaaattgcaaatttacatttagtttaattaacaatgcaatcttatgtgtactccattattt

SEQ ID NO: 15185 - DNA, 716 bp, Setaria italica
  misc_feature (669)..(716): n is a, c, g, or t
  Peptide Sequence Number=SeqID_81159
tagaagaaaggaatacgggaattactgattcagatgttgatgttaggaaaagaggttcaccgtgggcagagaagagtctgatcagaagaaacttgaaatcgagcttcgtgagaaggcccttgaatctcttagagccaagaaagccatcaacaactagcctgagaattttattccgacgcatttgagtttctattttcaagtgcttatctcaatgttatggaagtgtggttatatgatgcctatttaatgttctgtatgtttatgtggcagttgatctgaggattcctgatctgtttccttgatgcagctgcgtgcaggcttagctgccagttatctgattagcaccatgtgcacaagctttttatgttcctcaggatgatttgatccacgcctcaacaaaaacaagttggtaacattgttgattggaaagtctgctaaagcattccttcttaccagttgtttggtcggtgctgcttagtttcaggtttgtgcagtagccaatatatttgattgctatatcacactactcacactgagatgctatagccatcattcttttcagaaacgtagttttaatgctgacttaagagaaagtgaaaaaaaatataccatgataaacttttatgcttggaatatgaaaccaccaaaccagctgatgatttgagactnnnnnnnnnnnnnnnnnnnnnnnnnnnnnnnnnnnnnnnnnnnnnnnn

SEQ ID NO: 15186 - DNA, 3240 bp, Setaria italica
  Peptide Sequence Number=SeqID_81160
ctgatctctcacgtgccgcccccgcccctccgctgcatatctctcgtcggtccgtactctcgtcgcctacccttccccagcggcacacgcggacgccttcgaaccctagtcacccgcgacccccctgcagtcccccgacgcctcctgcccccggcggcggctgcggcatctgcgtcagcgaagatgtcgggcggcttcttccgggggacgtccgctgaccaggacacgcgcttctccaacaagcaggccaagctgctcaagacgcagaagttcgcgcctgagcttgaccacttggtggacatgtcaaaggtcaagatggatgtgatgaagccctggatcgccaagcgagtcactgagcttctcgggttcgaggacgaagtgcttatcaacttcatctatggcctcctcgaagagaaggaggcggatgggaagaagatccagatccagctgacagggttcatggagaagaacacagtgaagttcatgaaggagctctggggcctcctcttaagtgcgcaacagaatgccagtggggtacctcaacagtttctagatgaaaaggaggctgaaatacagcagagaaaggcggaggatgatagaattgcacaggagatccaaaagaagcgggagaaagagggaatagacttagaactggagaagcagaaaatgatggatggggatactagcaactcaagatcctatggtgatccaaatggctctgctttaaataaaacaaatatcgatgccacggaagaaatggaattggacttcaagcgcagctcaagaacaaagaaccggggaagtcgcagatccaggagcatatctttgtcaccccatggtaggcaaagatctatttctcccagaaagcgttctcgatctccttccaggcgttcccgctccattgatagacatcgtagatcatcacggcgttcaacttcacctagacgctctgcttctccccgaaggcattctccaagaagtaccccttcaatttctagaaggagatcaccttattcaaggagagggtcaccttcactgtcaaggtatccgtccccaccttcacgcaggagatctcctcttcgcagaaaatcaccatcatctggatcacgaaggtcaccttctcctcgccatcgtcgttcaccagctcgtgcgccaaggaggtcaccatctcctgcacgtcgaaggtctcctgttcgacacagattttcaccaggcagacatcgatctccatctccagcaaggcgtaggccaaggtccccatctccaggaaggcgaaggccaaggtccccatctcctggaaggcgcaggccacggtccccatctccaggaaggcgcagaccacggtccccatctcctggaagccgcaggccacgctccccatctcctggaagacgtaggccatggtctcgatcgccagtaaaacgtcggtccccatctccaaaacgccgaaggagatccccaagttcaccgaaaactcgttatgcaaatcgacgtccatctccacagcggagaaggagtatcagtccgtacagtagcaaaagtcctaatcgttctcgccggagtttgagtgtggagattgagaaaggaacaaatggcaccccctccactaaagacagagttgtgcctgaaagggaccgagaacgaagatcaggtgatgatagtgacagggatggtgcaaggactggtgatcatcgttccccagattctgaacgtaggttgtcaaattccttgaggccgccaaataatgaagaaagaaactccacacgtgataggagctcagggaaacaattacctagtcaggacagcacagatacaagtggagatgaggacgaaggcagtcgtgctagagagagtgcacgaaaagcaaattcagcacgtaggaaaaccaaggatttctcagcagatcggcagctgaataaagttggagctggtgtcttaagccctggagaaaaatctccattcatgttacaaagtggcaagggcgtccagaagaaacaccctgatcaactgtctgaatcatcagaagatgagcttgttggtagaagaatgaagcgtagaactgattctcctgatgagcgttccccacctagaattgaaaaagatgactcgcattcaaaggatgagaggaacagtgagcgtgccgtgaggggttcacgtgatgattctgataatgctactggggcaaagaaatatttttctaaagtcaatgagggctcccaatcggaagatggaagtcctgtcaaaaagctcaagaaaagaacagatgttaaaagccacattgattctggcagttcagggtccgaagaacctgacaaacatagatcccattctgagaagcaaaggaacaagaaggcccataagcataagaaacagtatgatgatagttctgagtctgattccgagccagatggcaaagaggcaaagaggaggaaggaagaaaagaagctaagaaaagaagaaagacgtcgtagacgtgaagagcggcatcgcagaagggcagaacgccatgccagcaaacaaaagtcgaagcattctgatactgttgcaccttcagattctgagaaggatcgggattctgattcagatgttgatgttaggaaaagaggttcacccgtgggcagagaagagtctgatcagaagaaacttgaaatcgagcttcgtgagaaggcccttgaatctcttagagccaagaaagccatcaacaactagcctgagaattttattccgacgcatttgagtttctattttcaagtgcttatctcaatgttatggaagtgtggttatatgatgcctatttaatgttctgtatgtttatgtggcagttgatctgaggattcctgatctgtttccttgatgcagctgcgtgcaggcttagctgccagttatctggtaatgtttgcttctacagatttgtatgaaccataacactgaaatggagatatttatgtttcgtgaattgattggattcacgccttacaaaacaattggtaacattgttgattggaaagtctgctaaagcattccttcttaccagttgtttggtcggtgctgcttagtttcaggtttgtgcagtagccaatatatttgattgctatatcacgcaggtaaatatttgatgctatagccatcattcttttcagaaacgtagttttaatgctgacttaagagaaagtgaaaaaaaataataccaatagaataaaaacttttaaaataaaagaaaaacttaaaaaaggaaaaaaa

SEQ ID NO: 15187 - DNA, 290 bp, Setaria italica
  Peptide Sequence Number=SeqID_81161
ggccgtctcgggagggaagaaacctttggaaaccctagccacgccacgccccccctctccgcttcccggctgctctgcgctgctaggagaggaggaagctatgggcgccgaggaggacgctgctgcccgccgcgagcgcctccgtgccctccgcgccgccaaggagctcctatccacccccgcccccgacggagaacagcaaaatggaacccatggtgccacagaagaacacgtggaacagcctgcattaccaggtccacaggatgcacctgatgaagcttctaaggaga

SEQ ID NO: 15188 - DNA, 1114 bp, Setaria italica
  Peptide Sequence Number=SeqID_81162
aaaatgggcagacaaaaacagcgatcagatcagacctgcgcgccaccgtgacaggtgggaaccacaaacctatcaactacgcttctgtcctatatgatccgcacccactccccccattccccgcaagctcagtcacccagtcgctccaaaacctgatcggattcgcatccatggccaagttcgccgtcctcctcctcctcgccgtggcggcctccgccaccgtgctggcgcacggccgcgagctcccgactcaaatcaagctggtgagaggcgcggtcgccgccgccggcggaggcgtgtccggcgacagcatggagtgcgtgtacacggtgttcatccggacggggtcgatctggaaggccggcacggactcgaacatcacactggagctggcggcggcggacggcaacggcgtggggatcacggacctgccgtcctggggcgggctgatggggcagggccactcctacttcgagcgcggcaacctggacatcttcagcggccgcggaccctgcatggcgaggccgccgtgctggatgcgggtggcctccgacggcacggggccccaccacgggtggtactgcaactacgtcgaggtcaccgtcacgggcccgcacaaggggtgcgcgcaggagctcttcaccgtcgagcagtggctagccaccgacgcgccaccgtacaagctcgaggccgtcgtcgaccattgcgcccgcgccggcgctggcgccgccgccgcgtgacgtggcctgggggtgacgagtcggagctgctgcagttcgtgcagcgagtcgaataatcgagagcctttgtcgcgtgggatgatgcatgcgtagtgagtaggtttggtggttttgtagatgccctgtgttggatcttgatctgtgttttgatcttttgagaaatggtgatctgcgttatcatgagtgttgtttcttctagcttgccggcgcttcagatagcgtctatatccagtctgctcgggtactgtagcaaggctttgccggcttctgtagctgaagccagcacaaccgagcatcatggacagcaccatccttgattgtcattctaattgaagtgttataagcatatatataaaaaaaaaaaaaaaactaag

SEQ ID NO: 15189 - DNA, 450 bp, Setaria italica
  Peptide Sequence Number=SeqID_81163
ggctggcgatcatacacaagctggtgcttacctgaagctcatggattggaggagaagacgaagatggagatcatcctgaaactctctcggggctaaatgccgtctgattagctttctgaagaaataaacctgtataatcttagaggtatggaatatcttcgtgatgagctccttttgttttgtcattgtctggcttagaggtatggagtatctttgttttgttttcctttatatacaacgataatcagcgagcagctctggtaaaggaaatggcagtacgagcgtttaagagaaagaaagaacagttagtacatacgactcatcagcggtaaataaagttaaacctcaaagggatcagcaactatacaatgataaatacagcaataatttacaaacactacataaggaggtaacctcatatgctaggattacaaataaatgaattgctgt

SEQ ID NO: 15190 - DNA, 2959 bp, Setaria italica
  Peptide Sequence Number=SeqID_81164
acaatgataaatacaggtatacttcacagccaaatgttcttatctgcaagctcgctcacccaaacactgaacccgcttcttttggccttgatatttttacagcaataattttacaaacactacataaggaggtaacctcatatgctaggattcaaataaatgaattgctatcaagattttcaactgccacctcaaaacaagaaaagtaaactctcgaggagaagatggtacaagatcacaatgcctctcctgattagtcagtctggtgccgtgttttacgcctgcaaaaattgggtaagccaagggatgatgcacttgattaccagcattgagcacaatggcatcacctcctatgtgcacgagaaatgtaacttcatagcgtgtgagacccagctgcactttgttctgttatcacatttttattcccaatcttctcatctctgcttgaagagtggggctggatgtcaatgtccgatgtgccaacatccttatatcttctcgagaacaatcccttgagattcgaacaagttcccataaggcaccttcactgataatgtcttttgaatttacttcatgttgtgccaaatggcaaagtgcaagttcaatgtggcgcctaattggagcggcttcgttattggcattttttacaatccaaggaagtgctccatcatcaattaataatgattttcccaccttatttccttgagtggctgctctagattcacattttgcaaaatttgcaatgccacgtgcaacttgtgcaaggacatcagggtgcccacacctaaccattccaagcaatgctttaattccaccttctcccctcaaccgagtttgcagtttgtcgttgccacaaaggttagcaattgctccagcaaccattcttagagtttgtggatcctctgcatcagatgctgtcatagacaacaaggttacacctccttgcgccatgataaggtcttgatttgtctcattcattgcaagattagcaattgctcctgctgctactctgcgaattgtctcatcctcagagctcctaagtagcacaaggagggaagtaaggccacctgcttctacaatcttttcctgatttgcctcttcagcagccagatttgcaacaactttcactgcatgaacacgaacatcaggttcttcagattcgagcaacgacaatatcttctgtaacccaacttgttcaaagagtttggcaatcggctgcttaggtccattgctttgctctctgggttgtgaacctcgagtctgagacaccaatgaatctaaaccaggaaatatttttcctggcccgtctcctttatcaagactcctccttgtctcatcggcttccatactcatctgcaataactgacttctcaaaacaccaatttcttcttcaagtttctctttctggctagcttcagtatctagcattttccggagttttactacctcagctgtagctgtagcctccagctttttccagtgtgacacttgattcttgaggtcactggcctcgtcttcagcagattggcggagcattttctcattctgcagtaaattttgcacttccccaacgtcactggatgtggactcagcctctttaatttgtttcttgggtgattgttgatgtattttccacttctcctccagtatttttattgagtctaagtattcttgatggtacttcattttctcattctctaacatgattttgcactctctttcagcctcagcaatacgacattgagcttcagctcttattctttcaacttcatcatcaaaatatttcctctgcctttcattttctgctattaacttatccaattcaatatcaagtctcctgcacaagcttttgtaatcgaactcttccttcaatttcaccatgttctcaactttcattgccctttgtccaaacattattgtactggtagtttccccccgatgtctgggagatggaccaattgtcacaaccaatgatgttcttgcagtacctccaaatgaatctttaagcagtctagtaagcttagaatcacgaacaggtacatgaggactgttttcagcaagtgcattgatgcatttccctagagcacttaaggacaagttgatagactttgcctcttctaatgtatgaccctcacttcctgacttgtctatgcgctctgatccagccaagtctacaactacaagcttacttttcctaataacaggtggtcgtaaagaccccatcatggacgatgaatggccattttcaccagaaatgctgacatccatttcagttctaccttttacagaccttctgacatttaccatgaggatcgcgtgacttcgagatgactctgtgtttaacttcgtgtttgcagcaacgcgatgggcctcaccaacccttagaaggtccacaaagcttttctgatctctaacttcaactaccgtggctccaggcagtgaaacatctccagtccttgggtcttctacaatggctatattgtcatttacaggatcaaggaggtcttgtatcatttccatgtacaactgtagatatgatactgaaacagaatcagtttcaggtgttatatctgctagaatatcctccattgcacgaaccataattcccctagcagcagtatcttcttcaccaagtcttcccaacgtaaaagtcttcccagtaccagtctggccatatgccataactgtaccattatatccctccataacactctccacaactggttttgcaacaacttcatacactctcttttgtgaagaaaactccgtgagcaattcatcgaattcatatgtttccgactcccaattgtttttacgaagctttaaccttttgagctctggctgaagttcaacacagtcaccgaaatccgcatctgccgccaactcttcagcattcctaggcctaagcctcacagcaactcttactctactagaaactccgtccgacgacgcgcgcccg

SEQ ID NO: 15191 - DNA, 295 bp, Setaria italica
  Peptide Sequence Number=SeqID_81165
ctagtcactagtgaagttattgaacacgaaacaatgtcgacagttacttctcacaccctactgagccggcccaccatatcttctgctggattatcctttggtttgtgaaccagcagtggtaggtctcccttgtgcctctgcagggaagaacaggcctcgttccatctgctactctgtggataccaagagcgccgaccatcaattcaacatctcaccagtcgcccttgtgcatccatacatgccgcccacgtcaacccatcgatgggagatcaaggatgacggcaagaatgtcaag

SEQ ID NO: 15192 - DNA, 831 bp, Setaria italica
  Peptide Sequence Number=SeqID_81166
agtctaccaatggaagtccgactcacagaaccgcaacatatttgcttctaacttcattccgttgtggctaaatgcacatcattcaggatcggtgcaatttgaccgaacgactgacaaaaatcaaagagagtcatggcaagcctccgaacatctggattactccacgctgcaggaatagcaacgtctctaacaaacacaagccagcaatgggatttcccaaatggatgggctccggtgcagcatcttatagttgaggggctgttgcattctggatcagaggaggcggtgaaattagctgaggacatttccacgaggtgggtgagaacaaactacgccgcctacaaagcaaccggcgcgatgcatgagaagtacgatgtggaggcctgtgggaaatctggaggcggtggtgaatataagccccagactggttttggctggtccaacggcgtggtattgtcattcttggaagaatttgggtggcctgagcacaaggaaataggctgctcacgacggggagaagttgacctcgcgggagcctaatctggttaggccggtttacgactgtacacacacgagcgggtgtaacacgggcacagccgcacaccgcacatatgcaagtatttgtattgcattctgcagtcagccgccggcaagtgttttctgtttgctcttcggtgtaccacggtcttcatgtatctgctgcgacagtgtacttagtcccgactcccgagcccctgtataaaaagtgaaatatccattttgccgtagcctaatgatggaggaaaagagtgcaatattttttaacaaaaaaaaaaaaaaaaaactaaaaag

SEQ ID NO: 15193 - DNA, 1250 bp, Setaria italica
  Peptide Sequence Number=SeqID_81167
gggttcctgccccgcgtcgggagccccgaggcgcgggcgtgggcgctggaggtgcacgcgctctggaaggacctggcgcgccgggtggcgccggacgtcgccgcgcggccggagcgccacacgctgctgccgctccctggcagggtcgtcgtgccgggctccaggttccgggaggtctactactgggactcctactgggtcgtcaggggattgctggtgagcaaaatgtttgagacagcaaaggatattgcgcttaaccttgtgtacatggtggaaaaatatggttttgttctgaacggcgcaagatcctactacactaaccgaagccagccaccacttttaagctcgatggttttggatgtatacggggcaactggcgacgtggactttgttaggagagcattcccctctctgctgaaagagcatagcttctggatgtcagagattcataatgtagctattagggacaataatggtcaggtccgtaatttgtctcggtaccaggcgaggtggaacaaacctaggccagaaagtgcaacaattgacgaggaattggcttcgaagatcaattctatagctgataaggaaaactttaccgcgaaattgcttcaacagcagaatcaggatgggattttagctctcgatggatgagaaattctactgacatgacaacattggcaacatcttacattatacctgtggacttgaacacattcatatttaagatggagcgggacatagctgcctttgctaaactccttggagagaatgcaacctctgaaaagtttttaaaggcttcgaaagcacgtcatattgcaattgactctattttgtggaattccgagatggagcagtggcttgactattggcttcctactgatggagattgccagaaggagggagtctaccaatggaagtccgactcacagaaccgcaacatatttgcttctaacttcattccgttgtggctaaatgcacatcattcaggatcggtgcaatttgccgacgctgcaaaatcaaagagagtcatggcaagcctccgaacatctggattactccacgctgcaggaatagcaacgtctctaacaaacacaagccagcaatgggatttcccaaatggatgggctccggtgcagcatcttatagttgaggggctgttgcattctggatcagaggaggcggtgaaattagctgaggacattaaggtaactattttcctaacgttaaggttagggtttagttaagttaaa

SEQ ID NO: 15194 - DNA, 283 bp, Setaria italica
  Peptide Sequence Number=SeqID_81168
acgagaaggccggggaagcaggcaggatcaggcggaggaggtagggcttctccactgagcacggcgacggggcagggtggcccggcgagggcttgtacgacgagcgcggcaactggagagggaggccgcgggcccggagaggaggggtagcggaagccgacgaagcccatgagctgggcgcgggacggggtgccccggaggatctggagcaggacctggatgaggaagccgatccaccccgccaccgcccgccttccccgctgctgcgccgccgccgccatgg

SEQ ID NO: 15195 - DNA, 482 bp, Setaria italica
  Peptide Sequence Number=SeqID_81169
ggccgggacggcgccggtgaggcccgggttggtgcggaactcgagcgtctccaggctgcccgacagcttctcccagctggcggcggggatcgccgtggggttgctcgccgggaagcagctgtagaaggacagcgtccggaggcgcctcaggtcgaacagctgggggctgaacttggcgtcaggggcgcactgcagtgagttgtcaagaactgggccaatgctgatcgatgttgggtaccacaagccattgaacaagtcacatgacaccccctggatgggcgaccagccgcaggggtcggggtagatgccggagccgttccaccccttgccgacgaagctctcgatggccgcgtacagcgccgcccgctccttctcctccatcggcgccgtcgggagtcggacccgtcgtccctcctccccttggcccgcgcaggcgccgagcgccaccagcaacgcgaggccgagccgccagcagccggcgg

SEQ ID NO: 15196 - DNA, 373 bp, Setaria italica
  Peptide Sequence Number=SeqID_81170
aagtatatgataccggtcttaaagattttgttcataaagctttcacagatccagatactggaagtcttccatggtagataatgggtaatcactgtatttgatctggcacggctcacaattgcccgcatggagatgcacagacagggaaagaaacacaaaaaagagttaggtagaagagtgatttgctctttggtaaatgttagtcttaaggtttttcatgttcttcttttctattagaatcatctatttttttacatatgaattctttgtagatacagataggtagcaggttcactgtaagttttcttgatgaaagaggaaatgaataggatgactacttgacttttcttttctaaaaaaaaaaaaaaaaaaa

SEQ ID NO: 15197 - DNA, 264 bp, Setaria italica
  Peptide Sequence Number=SeqID_81171
agcttcacgccgtacttcgcggccgtcaacctcgtcgcgatctcagacacgccgagtatggtgaggaagccgccgaacagaggaagcacgtcggagacgtagtcgtcgaaggtcgcgccgggcttgaggaagaagccgctcatgagggcgaccgtcccaaacgtggtgaccgccagcgccacggcgctgagatagccccacgccgtgctcagcctggtgatctccagctggaggtcgatctccgccttgggctggaccatgcag

SEQ ID NO: 15198 - DNA, 1656 bp, Setaria italica
  Peptide Sequence Number=SeqID_81172
caacatcctcgacctccgcggggagccgcaccacgccctcgccaggctcgccgagatgcacggccccgtcatgtccctgaggctcggcaccaccgacgccatcgtggcctcctccgccgcggcggcgcacgacgtgctgcagaggtacgaccacgtcctggcggcgcggtcggtgaccgacgccgggcgcgcgctggggaaccacgagcactccgtcatctggctccccggcagcagcccgctgtggaggcggctccgcgccgtgtgcaccaaccacctcttctcggcgcgcgggctggacgcgacgcgcgccgcgcgggaggagaaggcgagggagctggtcgcgtgcctgggccgccacgccggcgccggcgaggccgtggacgtggggcgcatcgtcttctcgtgcgtgctcaacgtcgtctcgaacgtgctcttctccgaggacgtggccgacctcagctccgaccgcgcgcaggagctggagatgctggtcagagacacggtcgaggaggcctgcaagcccaacctctcggacctcttccccgcgctcgccaagctcgacctgcagggccggcgccggcgcagcgctgagctcatcggcaggttctacgacttcttcgacgcaatcatcgcgcgccgtctcaacggcgccgccggtggaaaggaggatttcttagacgtgttgcttcagcttcgctcggaggatcagctcagcctccaaactatcaagtcctttcttttggatctgtttgccgccgggacggacacgaacgcgatctcggtggagtggacgatggcggagctgctccggcacccggccgtgatgtctaaggtccgcgccgagctgcgggacgcgctgggctcgaagccgcacccggacgagtcggacatcgacaggctcccctacctccgcgccgtggtgatggagtcgatgcggctgcacccgccgagcccgatgctgatgccgcacctggccatggccgacggtgccgaggtcggcagcttcgcggtgccgagcggcaccaaggtgatcgtcaacctatgggccgtcatgcgtgacccggcgctgtggccggagccggaggcgttctcgccggagcggttcgtgggcgcgtgcgacgcggacttccgcggggggaaggagaaggaccgactggagttcatgccgttcggggccgggcggagggcgtgccccggcacgccgatggccacgcgggtggtgacgctgctgctggcatccatgctgcacgcctttgagtggaggcttcccgaggggatgcagcccggggacgtggatgtcagggaccgcttcggcacgtcgctcaacatggtcacgtcgctcagggccgtgccggtgccggtgcaccggtgatccacgacacgtgacacccagatgattactcgcatcctcatgtccgaagggtcccaattgtagcattccactgaatgtttcagaactagtataaaaatccaaggaggtcctttatgacaggcagagatatagttcaccaagagctaatgcagccatcaaagcaccaatctcagacgatgcggaattcttagcatcatttggagcgaacaacctcttttccttgtgcaactacatcattaggaaagcaccccaacttaaagctaatcaaggaacaacttcct

SEQ ID NO: 15199 - DNA, 641 bp, Setaria italica
  Peptide Sequence Number=SeqID_81173
tgaaaaaactaacaaaaagtagccggtgcaaacagctaatgaacgcaactgcactgcttcacgaatccttcccgacaagcaactcccttgaattagcatatgaagtgacttgtttgtcagactgcaacctcttttagagtgatatttaaaaacctcaatagcttcttggatcctctctgtgtgacacaaaacctcaacaagttgtgagaaagattccgaattcaaggacaagtttctaacacttacccttctgaacatacctaaggcatctatgtacaatcctaatcgacagtaacaagatataatggcagaataggtactctcatctggtgtaaatgaagaaacaaccattctaccaatgagctcagatgctcttctaatgtttccttcattgcagaagtgagttataacaatgttccatgactcacaatcaaccaaacctctgttgtgcaatttctcaagatatcttactgaatcctgcaatctgccatctatgcacaaccatctcagcagcacattatatggttctgaatctgtgacgtcattttcctccagaaagctcaaagccttgcggaacttggatgatgtacagtagcaatccacaatgtccgcatatgcacttgccattggagcatgacctg

SEQ ID NO: 15200 - DNA, 382 bp, Setaria italica
  Peptide Sequence Number=SeqID_81174
accgacccgaccgaccaatacgccgtccccgccgacctctcccgcatgggcctctccgagatcgtcaacagcctcctcgccgccgccgaaccggaccacaaggcgcaacccttcgacttcctcgtggacggcgagctcgtgcggctgccgctccagcagttcctcctcgccaagggcatctcggcggagagggtgcttgagctcgagtatgtcaaagccgtggcaccaaggaagcaggacgaaccctgcccccatgatgactgggttagtgcggttgatggatcaaacccaagttttgtattaactggatgctatgatggtcttgcaagattatggaaagatgcagcagtatgtacacaaattttggagggacacagcggtg

SEQ ID NO: 15201 - DNA, 1171 bp, Setaria italica
  Peptide Sequence Number=SeqID_81175
agaacaactagaaagaaagatcaagtactagtccatgtagtgactggctcaaaggatagatcattgcggctatacaagtgtgatacatcagtcagtatggactacccaaagcgggttggggcttacaaaattcttcgtgggcacacatcatcagttcaaagtattgctgtagacccttcaagagatatgctatgttctggttcctgggatagcaccatcaagttgtgggcagttgaaggatctgaagaagacggtgatgctgtttcattgaagaagagaaggacgaattctgactcatctggacctgaagagtctcagttagagggttcagccatttcaacacttctgggacatacacaatgtgttactgctgttacatggcctgagcagcaaacaatatattcagcatcttgggatcattctgttcggcagtgggatgtccaagcagtgaaagaaacatggaatatgttttctgagaaggccttgaattgcttggactgtggcggtgagggctcttccttgattgctgctggaggctctgatcccattttgagagtatgggaccctcgcaaacctggatcattagctcctgtttttcagttctcctctcactcaagctggatcactgcctgtaaatggcatccaagctcctggtttcatctggtatcatcttcttttgatgggaaagtgatgttgtgggatctaagaacagcatggccgcttgcttctgtggactcacacaaagacaaggttttatgtgcggactggtggaaaggggacagtgtgatcagtggtggagctgattccaagttatgcatcgcatcgggtattgaaattgtgtgatgaagttttttgtcgtgccccttgagtccatgctattcagataacattggtcgacaagccatacctaaaagccaaccaatgtcaattatggttgggacatatgcagccccttcagtcagatgaagatacagcacagggcttgccatttatgtatgccacttatgcatgagtatgcataagtaagatccttagtaatggatcactaattttgctctcaactttttgcttgttacttcattggtgaaattgacaccaaaattgttgtattatcccaagaccatgaattgtaagtcacttggttgctgggctggtccgcctggtcgcttct

SEQ ID NO: 15202 - DNA, 185 bp, Setaria italica
  Peptide Sequence Number=SeqID_81176
ttgaatttccttcttcaaagaagaagcaggtactttatgtcatgaatccaaacaagttcagggcttgtgagttcctgattcgattccatgagcaacaacgtggagacaagataattgtgtttgctgacaatctatttgcactaacagcttatgcaattatcttgtcctctccgcatggcttgtgg

SEQ ID NO: 15203 - DNA, 437 bp, Setaria italica
  Peptide Sequence Number=SeqID_81177
caagtcctcggccccgtcgaaggcggccctggtggacgagagcgccgagttcgactacgccgatgacttcgacgacgatgcccttgacgcgaatacggaggtgaagaagagggatttcacgaagctcgagttgaagccggatcacgcgaaccggcccctctgggcgtgcgcggacggacgcatcttcctcgagaccttctcgccgctctacaagcaggcatacgatttccttatcgctattgctgaacctgtgtgcaggccagaatctatgcatgagtacaatctaactccccactcattgtatgctgcggtctcagtaggacttgagacaagcactattattagtgtcttgagtaaactctctaagactaagttgcctcgtgaaataattgacttcatccacggatcaactgctaactacggcaaagtgaagcttg

SEQ ID NO: 15204 - DNA, 538 bp, Setaria italica
  Peptide Sequence Number=SeqID_81178
tgactttacatttatgcagatacctagtttcctctagtttgcgcttatttatctttgaatcacattcagccatgcggagaggacaagaattctctaccaattcaagaacagtccagaagtccatacaattttcctttcaaaggttggtgataactcgattgatatcccagaagctaatgttatcatacaaatatcatctcatgctggttcaaggcgtcaagaagctcagcgtctagggacgtattctcagggcaaagggtaagcatcaagataggatggctggaggaaaagaagaatacaatgctttttttctattctctagtgtcaaccgacacacaggagatgtactactcaacaaaaaggcagcagtttcttattgaccagggatatagcttcaaggttaatacaactaagtttagaccgaccaacctagaaagaaaggaacctaaatactagaagactaattaacaacgacttagaatagaaacaagacttagaagacttactagggacaaaggtagactagaaatagacaaga

SEQ ID NO: 15205 - DNA, 331 bp, Setaria italica
  Peptide Sequence Number=SeqID_81179
gctgtcactttctgttagggcaaaccgtactagcacctcgttttgagcaaggttactgagctattatatcgaggacaattttggtctttggcttacgcctgctgctttctgttcgcaaacgaggatatatatcttcttgaaaaatgtaaatattgtgtaaggcttgtatgcatattgagctataagcacgctaaagctgcaacgacctggcactggccttaatattttaactccaaaaaaatttaaattttacaatcctgtgtatgatgcagtatggtcaatggttaccagttcgatgtcttgtgattattgttcataagcaaaactaaaa

SEQ ID NO: 15206 - DNA, 415 bp, Setaria italica
  Peptide Sequence Number=SeqID_81180
ttcgttcattgctggctgaatcgccttcgcaccgccacagccttccgtcgtcctctccgacatcgactcgcaccgaccactagcggcgccacctcctcctcagccccagccatggccggcggcgacggcgatcgccaccgcgcgccgaagcggcacaagtcctcggccccgtcgaaggcggccccggtggacgagagcgccgagttcgactacgccgatgacttcgacgacgatgcccttgacgcggatacggaggtgaagaagagggatttcacgaagctcgagttgaagccggatcacgcgaaccggcccctctgggcgtgcgcggacggacgcatcttcctcgagaccttctcgccgctctacaagcaggccagaatctatgtctattgtagttacttaatttctttaactt

SEQ ID NO: 15207 - DNA, 678 bp, Setaria italica
  Peptide Sequence Number=SeqID_81181
acaagggaacttaagtaagaagttacctagaattacgaattccatgagcaacaacgtggagacaagataattgtgtttgctgacaatctatttgcactaacagcttatgcaatgaaactccgcaagccaatgattttatggtgccacaagccatgcggagaggacaagaattctctaccaattcaagaacagtccagaagtccatacaattttcctttcaaaggttggtgataactcgattgatatcccagaagctaatgttatcatacaaatatcatctcatgctggttcaaggcgtcaagaagctcagcgtctgggacgtattctcagggcaaagggtaagcatcaagataggatggctggaggaaaagaagaatacaatgcttttttctattctctagtgtcaaccgacacacaggagatgtactactcaacaaaaagtcagcagtttcttattgaccagggatatagcttcaaggttatcactagtttgacgccacctgaagaaggacctaatctgagctattacacgcttgatgaacagcttgagcttttaggcaagatgccccattcaccacttccaacaggtgctgaacgcaggggatgacatgattggcgttgagcacttggaagaagattctgatggcaaggactacttaactaagaaaaagaaacaaa

SEQ ID NO: 15208 - DNA, 466 bp, Setaria italica
  Peptide Sequence Number=SeqID_81182
gccgcaacgccttcctgcctcctctccttcccgttcccgagcctcctcctgctcccgggcccgtgcggccgtgcctgtgcccaagcgcgtcgggccggcgcgccgaaccggcctcccgcttcaccccaccgaagctcgtcagccacgcggagggactcgtttcctctcagagtctcagtcgtcttcggtgcccacgccctcgtcgtactccaggggttaggtttagcgtggagtggagcggggatcagtccagacctgggattcaatccttgcccttgatggattccgcagctcttcaatatgaaaaccaaaagttgttgcaacaattggaggcacagaagtctgaaatgcacgcattggaggtcaagttcaaagagctgaaagatgagcaatgttcttatgacaagactcttatttctctgaataaaatgtggaatcagctgattgatgatttggtcctgcttgg

SEQ ID NO: 15209 - DNA, 872 bp, Setaria italica
  Peptide Sequence Number=SeqID_81183
ctctctctctctctctctctcatcgacacgcttgatttggcaagagaatgatgtggtctcatgagccggcaaccgaggagccgaaggtctcgccggctcgacggagctccgtcgccaagctgacgacggcttcctcgtccttggccaacctcctctccgtcttcctcggggccacctccccggagcccaggccgaggcggagcttcgacgccggcggggtcgggctcggcatcgttgcagacatgagccgaccctgtctggccggagccgagccgatcgccatcggccccgcggccaggcgccgtgcgcgcgaggaagacgagctgtccgagagctacacttgtgtcatcacgcacgtggccggcgccggcggcggcagcgtccgcaagcgtgtttacttcgggttcggcgacagcggcggcggcggctggcttgtgaaagccgatgatgaggtgcctgcggagagggccgacttcctgagccgatgctacctgtgtgacaagaggcttgatgggctggacatctacatgtacaggggagagaatgccttctgcagctcagagtgtcgatgccaccagatgctaatggatgaccgtcctgagaactgcagatctgaagtgcatagagctagtgactgttcagtgtcaccgcacactgccccgatggcctactcaccaagtgttgcagcggcgtagtccactggcccataatgtcaccaagctgctccccaactagcaaagagtatagagatgaaacataccatttaaacgaatcgaacatatagggtagtttctaaaatgcttcttaattatgacataaataaaagggaggaagaaaattttgaagaaaaaaaaaaaaaaaaaactaagaga

SEQ ID NO: 15210 - DNA, 1200 bp, Setaria italica
  Peptide Sequence Number=SeqID_81184
acacggtacacggttacacggggcctcgtgccccggctatctagttgcctagcactggtcctccaccagctgcctgaagtttatcggcgcggcgaagtggagcgagccgtcgtagatggccgcggcggcgatcttggaggcggcgtgcgtcgggtgcagcaggtcccagaacaggtactcgtgccggttgtcgcacagcgtcgcgttgggcgtgcacccggacttgccgttgaaccgccccgacccgcagcacgcgttcgtgacgtccttgaacccgagcctttgcgggtgcttcatgatgctctgcacgacggcgtgggagctcccgacggagtacttgagtccctggaagctcgcgccgaggccgtgcatggcgtccctgacgcccttgttgaacccgcgcgccagctcgttgaggacgtcgatgcaggcaccgagcgggtgcaggctcctggggtacggacagcacccgatcggcgggacgtcgatcaccgcgaacttcctcgcgccgagcacgtacagtgccttgacatggttctggtacagcgagacgaggttgccgacgaaccgctgcttgtcggcgtccgacggcgtgctgttccgcgagaagaaggcgaagaggtcgttgccgccggtgctgacgaggaacaccgatcgcgacagcacggcgtcggccgccccctgggtgatgcgcgcggagatgttgcgctgcaaggcgtcgaactgctcgacctgctggctcaacgggatgatggagctccctgtcgtgtcaagaatgcctgatcctgcagaggcgaagttcactcccagtagacccctgaagacctgcttgttggttttgttggccacggcgaggaatggcggggggctgcgcttgaagcccatgttcatagccaagaagtcgacgccgttgtagccattgctgaaccttccggtgggcctcgacgtcgggaagtcgacgccgttgtgcgggaagttggcccgcggcacggcgctgcccggcaggtagttgttgttgcccacgtccgccgtggagtccccgaagacgtagatcgccggcaccttgttgctccccgccgccgccgcggcgcatgcgaacgtagcagcagcgagcagagcgcgcagcagcagcactcgcacttgtggcacggtggccatggccgggccgtgatgctgtgcagcctgcccggcgtagtgcgg

SEQ ID NO: 15211 - DNA, 537 bp, Setaria italica
  Peptide Sequence Number=SeqID_81185
atttacctcggccatgacccatgaggacggtggctgagtcgatgggcatcaagcatggccgtcggcaacgcgctcctcgatctcaacagctgcgagcggtcatggacctcatgcatggcaaagatggcggtgtgagccaccggccagtgctctcttcacctcgtcgtcacttatcgtggccgcgccgctcgaccatggcccgaccggtcggtcctgttgaatgtgccgctcgcaccaccaacagaccgggcggggcatcccgtcgatgccgactgactgcaccaccaacatcgcccgcgcctccgaggcgacgaccagcgccgctcggaccagcctggcccgccgcccgcaccatcgtggttgctgacggcaaaaggaacgaagttggagctggcggcggcggatccagcacagggcagccaaaggcccccgatttgtaagatgaggcggaacgttggctcggagaaggccggcgacggcgcgaggaggagagggtgaggaggcggcgacgaggtgatggcgtgcgaggtgaggaca

SEQ ID NO: 15212 - DNA, 499 bp, Setaria italica
  Peptide Sequence Number=SeqID_81186
ctgcgtccgccacgaattcacgctggggagcgtccagcaggtatccaatgcatgattctgcaggcttctcatacgcaagcaggcccacactctccttcagcaacccctccaaaagactttgtgagtcaagaagcttgccaggttagcacgagcatatttcacagcatcctccagttgttcagccctgatatattctatgaatctctgagaatggagtaagaagcaaataaccgatttctcatcctttataacttgtggataccactccccgagtcttttgaatgtagtgtcaatatctccactcatgataagcttcaccaaatcaaataaactgttttcagaaagcagaagccatagcagagacaaaaaaaggagggcaatatatcaaatcaatatcatgaacagcatctgagacacgacggaatgatgtagacaaatgtaataatgacaacatggtggcactgcacaactaaagatatgaaagagctcgagcttgcaa

SEQ ID NO: 15213 - DNA, 1049 bp, Setaria italica
  Peptide Sequence Number=SeqID_81187
ttccctatgaccattttggcgactggcagggggatcagttgcatttgccaaatcaaatgaattcaatgtatcttggtagccataatgtaggagatatgaacgaacaatccaatgactgatgtttggttcttccaacttcactttgtctgtcaccgattgttgcctcattttctcttcaagaatataaccctgccaaatagaagcggaatacatcgataacaaagctaccgacatcatacaccaactgaacactcttgaatcaagtgtttagtaaatggcataaagccagttacatcataactatatccacataacatgcataaactcatcatcataaaggaaaatcaatctttttttacggcagcatatttttagtggtggctggtcaaggcgtcaagggcgcatgcaattgaagttcctttcaattgtgttttgactatgcagccaaatttgaaaaaaaatgtgatggataatttgtaatagaaagtgaagcatgaaccacagatgcagaagagtactgttgatatacagctagtgccatcactaagacactaaggatttcaagttgcgacagaaaagtgtaacaatcttaggtaaatgagtgaggtaatggttgatgaacaaaaacatttgcctcaccacaatgtcaaacagaacggttcttttccaaagtttacagtcaacttgtcacatggtgttgaaaaaaggtcctccagctcagtaggtagtaaagcaccatcctgaatataccaattgcatatcaggataagctaacattatcgatgtcaaccatgttgcatatccctgtcaagaaatcaaccacttcacctgtcagctccagtgtccgcagaaaaagctgagttcattacttcaccatcaatggggatacattcctgaggactgttgactgcgtacctcctggaaatctgcaagttgggcgatgagctccttggcctattcttcaggagcacgtgcgtacagctccagcaatgtagttgcgccggtgtggacctgcaggagggggcgcggcgtgggaggagccgggaggg

SEQ ID NO: 15214 - DNA, 815 bp, Setaria italica
  Peptide Sequence Number=SeqID_81188
cgaatggaatggaacaacaacggccaacactttaattgctaaattgtgtgcatttgaggcctgccaaattatgagaaatcaagcaacctcacatccttttggaatctaacatttccaatgacatgaaactgaagttctgaaagaaaaggcacttacgccttacctgattctttcaaaaatgaatctacatgtagcaggatgttatgaagaggatgctcctggaaatctgcaagttgggcgatgagctccttggcctattcttcaggagcacatgcgtacagctccagcaatgtagttgctccaatgtagttctcttgtaaaaaactttttgtagaagagcaagcccttttgaaaaagaattagtacacaccagcagctgagctcgatgcagtgaatgagagaattgatgttaccgttttcggtacgctcgacgacgccgtaggggcgagcttggcagctgcgcggccggcacagcagtggccagaggtcgacgtctaccagcgcggccgcgaacggaggaggcgtggcggcgaacggaagaggcgtggcggaccctggtggggcggcgaacagaagaggagcagcgtgtcgggaccccgacagtgacggcgacgccgtgcccgcgagcgcgtcgtaggaggtggcggcgaggcggagttggggaggagcaggccctgcacgacccgcgccgccgggagcgggtgagaggacgcggagccccagttcaagcccaccgcggaagccgcaggtggcggtgccacggcgaggagcatgaggaggaggaggccaggtacgactggcggcaacgccccagt

SEQ ID NO: 15215 - DNA, 448 bp, Setaria italica
  Peptide Sequence Number=SeqID_81189
tagttacaagagcttcatctaaacgctttggataagacataacagaaaccagttcagaatttcagtggcatatctggggaaaaaaactgtaaacatggaatggaacaacaacggccaacactttaattgctaaattgtgtgcatttgaggcctgccaaattatgagaaatcaagcaacctcacatccttttggaatctaacatttccaatgacatgaaactgaagttctgaaagaaaaggcacttacgccttacctgattctttcaaaaatgaatctacatgtagcaggatgttatgaagaggatgctgaagaaattatgaacttgtattcagattcatcaaccaatcaagtataaagagttgtggacattatgaaaaaaatcttgccagctaactatcgaaactgccatcaatagatgggagttgggattcaagtgtcaaataacca

SEQ ID NO: 15216 - DNA, 1976 bp, Setaria italica
  misc_feature (1)..(29): n is a, c, g, or t
  Peptide Sequence Number=SeqID_81190
nnnnnnnnnnnnnnnnnnnnnnnnnnnnnacgtagaaaccaaggtctacaggggcgaaggacatgtattgaagcgtttttagcattcacaatgtcaaacaatacattagccaaccaacaaattatggtaacagcgacgttggccgaatctgaatgtttgtttgttttctgattacaggaaggaagctccttccaaagcgtctgagctctgtgcaattcggcgcacacctatgggaattcaggaagcccagggaggctgcagaccttcaaagggaaggaatctgtgcttgctgttgccatgagtcaacccactccgaacgaggtgatccttggtcctccaaacagcagttggagtctaacatctgagtcagattctcagctgtgcctatcagcgcctcgacctttcacagctgcgcacttctttgtgaagtaggaatgcatctccttggtcgttgttgaatgtgcgtcgctcaaagctacatactgtgagctgccgtagtaacctctcgagacatgagtaaagacagctctcagggtccttcatggcagggttcgttgacaggacagctgcgttcactgcgtccgccacgaattcacgctggggagcgtccagcaggtatccaatgcatgattctgcaggcttctcatacgcaagcagggccacactctccttcagcaacccctcaaaagctttgtgagtcaagaagcttgccaggttagcacgagcatatttcacagcatcctccagttgttcagccctgatatattctatgaatctctgagaatggagtaagaagcaaataaccgatttctcatcctttataacttgtggataccactccccgagtcttttgaatgtagtgtcaatatctccactcatgataagctgacgcaaaagttttctgtggctaagaccatatatttctgggggaggttccctatgaccattttggcgactggcagggggatcagttgcatttgccaaatcaaatgaattcaatgtatcttggtagccataatgtaggagatatgaacgaacaatccaatgactgatgtttggttcttccaacttcactttgtctgtcaccgattgttgcctcattttctcttcaagaatataaccctcaatgtcaaaacagaacggttcttttccaaagtttacagtcaactcttcaccctgactatgaactgcaacggtaggatatagtgggcctttgaggtcctttggaacggctccaaccagagatccatttttcgtgaaaaaaagttcttgtgacaagtagttgatgccagcaccaattgtgtcaccagatgtaaatttgggcccgaacgattcacctttcccctgacctcggtaaaggtggccatcatcaccatggtatccacaactgttagactcccaacccggttgtcgccgcatcttgaagctatcggttgtgaacccgattgaggtctgccccttgtagcccgcgttcttgacccccatctcaaagtagtacacgggccggcgcgtgggcgcggggcggttggcctgcacgaccccgacgtcgtggccgtggttatggctaccaaggtatctgacggacaacttgtcggtggagacgacggcgaagaggcccgagctgttgacggtgttgagctcggacgggagcggctcggcatccaactccgccgccgcgcggtcccactccgtcgggcaccgccaccgcgatgccagccgcatcgggtccaccgtcgtccctgcccccggcgatcccgcctccgcctcctggttcgctaccattcgccgggaggcggaacggactggatcggtggttgcttgcggttgcgggcgggtggatgggaggaggtcaggggaaggaaagacggagaggatgaagaagagttcgggagaagcaactggtaatgtccatctcaaagtagtacaacgggaccggacgacgttagggacgtacggggtacggtttaggtacctta

SEQ ID NO: 15217 - DNA, 525 bp, Setaria italica
  misc_feature (508)..(508): n is a, c, g, or t
  Peptide Sequence Number=SeqID_81191
tagtacttaccttacgaagacttacgttactaacgggtaacaagcgcgcgcttcgagctcggcaagggctccggcgccatgcacaaccacaagggcggcgtcatgctcgactgggtgaggaaggtgcatcaggagaagatgctggacctgctggtggaccaggaccttggcccgcactacgaccggatcgaggtggcggagatggtgcatgtggcgctcctctgcacgcagttccagccgtcgcaccggcccaagatgtccgaggttgtccggatgctggagggcgacggcctggccgagaaatgggaggccacgaaccggccggcagcggcggtgtgccacgacgcgctcggctacgaccaccgcaacgactccaacggctccgtgttcttcaacgacttccacgacatcgacagcagtctcagcagcgacgaggcgcggtccatcgacatggtcgaggagatggagctgtcagggccgaggtagcagacgtcgccttgctgggganaaccagttcgctattca

SEQ ID NO: 15218 - DNA, 248 bp, Setaria italica
  Peptide Sequence Number=SeqID_81192
ggtttagttaggggggtctcgacgagggatgagctgtgtgttctcgagtttccacggcatgggccggtgactgtgctctcgtgttcccgtcagcggttcgctgtcgaccgcaaccgctaccgcgcgttgttcgggtcaacgtcagtgtgcagctgtagtccagcgttcatatatctactgctattctgctacaagcaaagataatgactgaaaaatgtgtgccctgttctttacattatgcattcgca

SEQ ID NO: 15219 - DNA, 1347 bp, Setaria italica
  Peptide Sequence Number=SeqID_81193
aaacaacagttacagcgttactagcaggatgaatgactggccacgtttttgattttactaggaaggagaagaaaaataaaggaacccacgaccacgagtcagccattttggaggacagctttaaaaactctggccatcctcaggaccgaccaacccaaccaaacccaatccaatcctcctacaccaccccaccaagcagtaacatgccccggcccccaatcatgtggcatctcaattctcaacagcaaccagaccccacggtaacccccaaacaagccaaactatcagaaaagaataaacagccccataccacctctacatgcacgcacactagctccgccactctacactgctgtaagatcccgcattcaacagcacggtacatcactgctggcctggaaaatgcggcacatcaaatggcagcactgtgtttctatcgcctggcactaaacaccatggtggcctcacgacgcactgcatgttcctcagaatagtccaccaaagaatcaaggagccatgcacatcttatgcagtattcagggcctgctggagctgagcgaatgctgatggatggatcctgctgatggcagcattgaacgctgcatccccatggagagctgcacatgctttcaagttctctcttagcacgttctccagcgatgcttgtttgataggatctgagtcctttacttggcgctttctcaactctttgcttgaagtattggaataacctgaaccatcattgcctatccaggaagagcttgtgatatcgccactagtatcatcgtcagtctttacttcacggcttcctataatgacagtagtgcatacacttaatatgtcatcaagtttgtcgatgacctgaggtacgtgtaaggtcagaactactgaaagagccattgcgtattccttctgctgtacagcattcgcatcatctaccttatcgatccacatatctactagagaaataagcagattattgttcacagcaatccctgcttgttggatgcttgccaaaagcgcagactctgataatagttgtgctgaaaagttcgtgttcatcaccagaagcctggcaagaatcgctccagaggatgcacggacagttgtccttgacgggttttgcccatcatcttgactcaacgatatgaagataagtttctgaagagcactggatatcaatggtggagcttccagaggaaagatctgaataagaagatcaacaacaggaagtgcagtgagaagtcctttgtcattgacatttccaacaatagcatcaacgatggtcgctagacttgcaccatggcttttcaaaaattctgatccaccaaaaattgtgtagtcctc

SEQ ID NO: 15220 - DNA, 475 bp, Setaria italica
  Peptide Sequence Number=SeqID_81194
cgtaagcaagcaacaaaacccatatagttgctgctgcttttggggatggaggcggaagaggataagcatcgatgggagcgctattttgtgggtggttcggaagaagactcattaaggccactaagaccatttcaggtacttcaatattgacaggcactccagtataaggtacacatgcattaaactcccttattctacgccacaatctgatttttgctccaggaacagcgtcagatgatgctacagcctctttagcaactgcagctaaatgtttatgtgcatggtagcagcttccatatcaacagaaccatgatggggcatctgatgatgggctaccccacaaggtggatctatccgatgcccaggcatcgttaaccttggtagcactggaattgcacactgtctctgggttgtaaaacatcaagaactgttgcaagtagattatcacggaagtgcttgcatatacatgaatcga

SEQ ID NO: 15221 - DNA, 3798 bp, Setaria italica
  Peptide Sequence Number=SeqID_81195
tgcggtcgtgcccacgttgcccgttgccccgtcaccgttcccccatatcgacgcgagggctcggcgaaatcggaaaccctaggtccgattccgccatccggcggccggcaactggttaaggccgcatttgcgggctccaggcggccggtccgccggagttgcacgcctgtgcccggccagcggctgatccctcgcctcgtctggcctccgcggctccttccctcggacctccgttggcgagcaatctgattgcttgattgagtgagagcgtgctccgtcactggaagggttagggcatggcgagcgatgggcagcttagggagtggatctctgacaagctcatgtccctcctgggctactccaagagcgtcatcgtccagtacgtcatcaggctcgcaaaagagtgctcttccaccagcgaccttgtgggcaagttagtcgagttcgggttcacctcgtccgcggagacccgcacctttgcggcagacatctatgccaaggttcctcgcagggccagcggcatcagtaattaccagaagcaggagagggaagcagcaaagcttgtccagaaacagagcacttacaagctgttggccgacgaggatgacaacgatgctgacaaccaaacatcaacgagtagaaagagctcaacaactcaatcatctaagagtcggaagcaattcaggaggaaagcagatcaagatggcggggatgatgatgatgaggatgaaaaagtagcaaaggattctggaaggaaggtgcggaggcgaacagaagaggaggacgaagaagatggcaacaacagttctgatgaggagaaagaaaggataagagatcaggaggcaagggcccagctagaaaagaacatgaaagaaagagatgcagcaaacacacgaaagttgatggagcggcaattatctaaggaagaacaagaggagcttaatagaaaatctcaagcaatggacaagaatgacacatcagatctgagaaaattctcaaggcaagcgtacttgcaaaaggcgaagggacaaaaaaatggaagaaattcgcgatgaaattgtggaccatgagtacattttttcggatgtgaaactaactgaggcagaagaaaaggagttcagatacaagaaaaggctatatgatcttgtcaaggagcatgttgagagtgctgatgatgttggtgagtacaaaatgcctgaagcttatgacatgggtgaaaatgttaatcaagaaaagagattctctgtggccatacagcggtacaaagatcctgaggccaaggataaaatgaatccttttgctgagcaagaagcgtgggaggaacaccaaataggaaagtccaaactgcaatttggatccaaagataggaagcggtcttctgatgactatcagtatgtatttgaagatagcattgattttgttaaatcatcggtcatagaaggaacccagcctgaatacaattcagatcaagaggacattgatgcaaaagatattttgaaaagggagctccaggatgagcgaaagactcttccaatctacaaatttagagatgagctgctcaaggctgtagaagagtatcaggttatcgtgatagtgggtgaaactgggtctggtaaaacaacacaaatacctcaataccttcatgaggctgggtatactgcgaaaggaaaggttgcatgtactcaacctcgtcgagtggctgccatgagtgtttcagcaagggtgtctcaagaaatgggtgttaaactgggacatgaggttggttactctataaggtttgaggattgcacttcagagaaaacaattattaagtacatgactgatggaatgcttctaagggagtttcttggtgaaccagatttggctagttatagtgttgtcatggttgatgaggctcatgagcgtacactctccactgatatcttatttggtttggtgaaggatatttctcgttttcggccagacctgaagctgctcatttcaagtgccacccttgatgcagaaaaatttagtgactacttcgattcagctcctattttcaagatacctgggaggcgatacccagttgaaattcattacacaaaagctcctgaagctgattacattgatgcagcaattgtcactgttttacagatacacgtgacacagcccccgggagatatcctggtattccttacagggcaggaggaaattgaaacagtagatgaaatccttaaacacagaacaaggggcttaggcaccaaaatttcagaattgattatatgtcctatttatgcaaatctccctactgagcttcaagctaagatatttgagccaacccctgagggtgctcgaaaggtggttctggccactaatatagcagagacttcattaaccattgatggtataaagtatgttattgatccaggcttttgtaagatcaaatcatacaatccccgcacaggaatggaatctctgcttattaatcctatctctaaagcgtcagcaaatcagagggcaggaagatctggacggactggacccggaaaatgcttccgcctatacacaagttataattacatgcatgaccttgaagataatactgttccggagatccaacgaaccaaccttgctaatgtcgtgcttactctgaagagtcttggtattcatgacttggttaactttgactttatggatccacctccatcagaagccctattaaaggccctggaacaactttttgctctcagtgcactaaacagtcgtggagagttgacaaaaactggaagaagaatggcagaatttccgttggatcctatgctgtcaaagatgatagtagcttcagagaaatataagtgttctgatgaggtcatctctatcgcctccatgttgtcaattggtaattctatattctatcgtccgaaagacaaacaagttcatgcagataatgcaaggttgaacttccacactggcaatgttggggatcatatagcactactaaatgtttatagctcgtggaaagagacagactattcaactcaatggtgttatgaaaactatatacaggtgcgcagcatgaagagagcgagagatattcgggatcaactagaagggcttatggaaagagttgagattgagatttgctcaaatgccagtgacttggatgctattaaaaaggctataacatcaggttttttccatcattctgcacggttgcagagggatggtacatataagactgtcaagaatcctcagactgtacatatccatcctagttcaggactagcggagatacgtccacggtgggtagtataccacgaattagttctcacgacaaaagagtttatgcgccaggtgacggaactgaagcctgaatggctggtagagatagcaccacactattaccaactaaaggatgtggatgattctggaacaaagaagctaccaaaaggccaaggaagagctgcattgtagccaggactcgaggcattttgctgtatgttgtataattggattcagagcctaggagcatcaggctttagagcggagatgtatataggatagatgatgtcagtaatcatgatccagattaggtttcagagtaacctgattgctgatgtaaattttgacatgaaggcgtgcatgtgcatggctatagtttatgcatcagtttgaattgttagagttgtgcttactgcatcagttgcaaggatgaaacctagatggagcatttcatgtgacgacccggcacgacagatatttgtttcgaggattaaccactacatgttatacgattgtcacacttgccgacttaacgaa

SEQ ID NO: 15222 - DNA, 380 bp, Setaria italica
  Peptide Sequence Number=SeqID_81196
agaagattcaacgtgttcatacaggtaaactagattttagctgtttccttttcattataacattttcctttgttagcggtgatactacaataggctttgaacctcagggaagaatggtgctcgagaatttcaatattgaacagtcagctggtgcggatggaaagccagttatcaagacattccaaacacacgtcactaaatcatactctagagattcagttctattgggcaggcagagggacaagaagcattccatatagaggttcttacggccctctgatatctgcaatatcagtaactccaaatttcaagcctccgctggctgttgaacctcccaaaactggcagtagcaaaaaggccgcaagggcatctatgtctga

SEQ ID NO: 15223 - DNA, 691 bp, Setaria italica
  Peptide Sequence Number=SeqID_81197
ctctggtgcggatggaaagccagagggctgttcaatattgaaattctcgagcaccattcttccctgtatgaacagccctctggtgcggatggaaagccagttatcaagacttccaaacatacgtcactaaatcatactctagagattcagttctattgggcaggaagggggacaacaggcattccatatagaggttcttacggtccactgatatctgcaataacagtaactccaagtgtgttctttggactcctggtttgtcaattttgaatattctgttccactaattactatgggcaaggacacactattgaatatcatgtgtggtgttattagttgtgcggattatagttataaaagaaagctgttattagtttatgttcatgttcagatttccagattccatttggtcttgaacctcccaaaactttcgtttagaagtttcggagctaacgagatagcaaaaggagttcaagggtatccattgctttagtgattggaatccctgttatagcaatattcactgctctgattgttggcatttattgtattaagaagcgaagaaagagtttgatgcataaagaactcagagctcttgacctgcaaattggctccttcactttgcgtcaaatcaaagcggcaactaggaacttcgatgcagctaacaagattggtgaaggtggttttggtt

SEQ ID NO: 15224 - DNA, 1715 bp, Setaria italica
  Peptide Sequence Number=SeqID_81198
acgacaacttcattgcaacaagcatatcaaaattggtcatgcccaattcagagttgtacaccaaagcccgtctttctcctctttcgctcacatattatgggctttgcatgttcagcgggagctacacggttaatctccactttgctgaaattgttttcacaaatgacagcacatattgtagccttggcaaaagaagattcaacgtgttcatacagggaagaatggtgctcgagaatttcaatattgaacagccctctggtgcggatggaaagccagttatcaagactttccaaacatacgtcacaaatcatactctagagattcagttctattgggcaggaagggggacaacaggcattccatatagaggttcttacggtccactgatatctgcaataacagtaactccaaaactcagagctcttgacctgcaaattggctccttcactttgcgtcaaatcaaagcggcaactaggaacttcgatgcagctaacaagattggtgaaggtggttttggttcagtttacaagggtttattatctgatggcaccatcattgctgtcaagcagttatcatcaaggtctaaacaagggaatcgggaattcgtgaatgagataggcatgatatctgcactccagcatcctaaccttgtcaaactttacggttgctgtacagaaggaaaccagctctcactagtttacgagtatatggaaaacaattgccttgcacgagctcttttcgttgaacaatacagactgagactggattggccaacaagacacaagatttgccttgggatagcaagaggtctagcatatctgcatgaggagtccgcaataaggattgtgcaccgagatatcaaggccagcaacatactgcttgacaaagatttgaatgctaagatctcagattttgggctagcaaaacttaatgaagatgatcacacccacataagcacaaaagtagctggaacaatcggatacatggctcctgagtatgctatgcgtggttatttaacagataaagctgatgtatacagttttggtgttgttgccttggaagttgtcagtggaaaaagtaacacaaactacaggccaaaggaagactttgtttatcttctagattgggcttgtgttctacatgagagaggagctcttctagaattggtagattcagatctaggatccaattactcaacagaagaggcactcctgatgttgaatgttgccctgctatgcacaactgcagcacctacactcagaccaaagatgtcgaaagttgttagcctgcttgagggccacacccctcttcagcccttgctgtcagacctcagccttgcagcaagtagcctgagctcaagtggtgtacgccggaacttctggcaaaacctaagtgagagccagagcctgacagcagaagcttcgtgcaatgacactaatgaatcatcagccatagatacagatggtagcctgagaccattggtgagtcagatgtagtggatgtgcatcataaactaggtgtacatgtaagacctagtagggataggccagtataactataccaagtatcaacactgcaacataaatatcaagtagcaataatgtagtatattgatgtctaatcctagtaagtggtaagttagaagtattttagaagtctctcctttagattcaatgggaatattaagatgatgatattgatacaaaaaaaaaaaa

SEQ ID NO: 15225 - DNA, 538 bp, Setaria italica
  Peptide Sequence Number=SeqID_81199
tatgaaatgatctactaaactccgataaacatctctcagatgcaagtccactttcgatatatctctgtatactgtatacacggatacagaatccgctatatccgtttgtgaaataaaggctaaatcccctcaactccatatccaaataaaagcggtaaggaaaaagttttaaagagaagaatccatggattcatgattaaaccctcctacttcttgtattttcgtacaattttgattaagtgagggatcaaatagaaatatgtagtcaactttatttgaaggtagtttggaggattttaaatatgactattgctttccaattagctgtttttgcattaattgcgacttcctcagtcttagtaattagtgtaccccttgtatttgcttctcctgatggttggtcaaataataaaaacgttgtattttccggtacatcattatggattggattagtctttctggtagctattctgaattctctcatttcttgaatttgtttagtatttagtagcccgatataaaataaataaaaagaaag

SEQ ID NO: 15226 - DNA, 834 bp, Setaria italica
  Peptide Sequence Number=SeqID_81200
taagtacttggtctattactattattcttgtaattctttctacttgagaaagcaaccttagaccaacatactacaatcctgtacagactgggtagaaaggaaaagagaggtgataatgtcaagatcacaataccagtacatcaacaatgacttgctaccagctgaccagatggcgatgacaagggtttccattgcatgaaaagctgttgttcttgtcttggtttgtactctgaagcaaactacctacatcaccagaggggttatcaatcactaatcatttcctgtccctccgcttcattgtcgccagtcgactgacttgaggtgatatgagcagtgctattactgccacggcaatgcaacagctgaagttgaaggctctggataagctcgttaagttgctgaatgtttttctcttgtgccaatattattttctctttaacagcatcttccctttccagtgcctgttgcctcctccgattagttgttggattagcctcagcctcaccaatctgctgcttccactcaaactgtgacgtgataatgagcacgagcaggaggaagataagaacaattggcctcgaattcatcacgccaatcagcaattacacaaccgtctcatctcacggcgcggatgcaaatccgtgggggaaccgacgcgggaaagggaagatgctgttaaagagaaaataatattggcacaagagaaaaacattcagcaacttaacgagcttatccagagccttcaacttcagctgttgcattgccgtggcagtaatagcactgctcatatcacctcaagtcagtcgactggcgacaatgaagcggagggacagg

SEQ ID NO: 15227 - DNA, 541 bp, Setaria italica
  Peptide Sequence Number=SeqID_81201
taacaaataacatcaatgcaacaaatgttatagataagttaggtggcttctgctagaaatggctactcatttccagcatgaaactggaaatgccaaaaattaactaaaagtggaatgtttttctcttgtgccaatattattttctctttaacagcatcttccctttccagtgcctgttgcctcctccgattagttgttggattagcctcagcctcaccaatctgctgcttccactcaaactgtgacgtgataatgagcacgagcaggaggaagataagaacaattggcctcgaattcatcacgccaatcagcaattacacaaccgtctcatctcacggcgcggatgcaaatccgtgggggaaccgacgcgggacgcgggtcgagcggagtagggttcttccgattcccggatagctcgaacgaatcccagcttgcccgcccgcccgcccgccactccttgactgccgtgactcctctctttggagtcgtggagaagacgacgtcgaagtattcgtgcgagtgcaatctcccctcttaattt

SEQ ID NO: 15228 - DNA, 261 bp, Setaria italica
  Peptide Sequence Number=SeqID_81202
gctccaactcggcatcctccgccgacctccccgccgccgacgaggacgactccgtctccgcctccatcgggcgccgcagcagcgcctaccgctcgctacggagcatccgcgagatcgacctcctgcccgacgacgccgtcgccgacctccgcgccatcgcgtcccgaatggccgccgctggctacggccgcgagtgcgcgcaggtctacgcctccgtccgcaagcccgccgtcgacgcctccctgcgccggctcggcgtcg

SEQ ID NO: 15229 - DNA, 574 bp, Setaria italica
  Peptide Sequence Number=SeqID_81203
cgctgtaccatcctctggttggtggtataacaccagcagattgtatacaagatacatcactaacggcaatgcaaatgcgggcgggagccaggtacagtagagagcactgtcgctgtggtgcccagacaaaccccacccacaccacaagcagggggggctctattggctgagcagtttggagtcgcaggccacaatcttcactttgcccacctgctcggtgttgtcatcgttcttgaactgtgcgtccgtcaagatgaaggtccacacattatcgcagaacctgtatgtgtgcagatggcccttgatgttaaccttgctcttcacctggttctccagagcatccgtcatagactaaaagaggcacagaaaagcaaaggtcataggtttcccgcaggagactagacaggaataacatgatccacaggcaaggaggtgttcgtgtcgccttctaccattgttctaaaacctgaatggcgagctcgggctgaggtgccgctggagaccatctcgtcgagcgtctcggtgaggcacatgccgatggtggacctccggtagagctcgaaggtggccatgg

SEQ ID NO: 15230 - DNA, 784 bp, Setaria italica
  misc_feature (1)..(6): n is a, c, g, or t
  Peptide Sequence Number=SeqID_81204
nnnnnnttgtttttttttttttttttgttatctccgcacaacgtcaaccagctactactattcattgcaagtcatttgatgaattagagtgccatattatcaacaacacataaatccaagcacagacgaaaattgttacacgggctaccaactcaaacaaaaaggtttggagctgcttgctgtcataccacgctgtaccatcctctggttggtggtataacaccagcagattgtatacaagatacatcactaacggcaatgcaaatgcgggcgggagccaggtacagtagagagcactgtcgctgtggtgcccagacaaaccccacccacaccacaagcagggggggctctattggctgagcagtttggagtcgcaggccacaatcttcactttgcccacctgctcggtgttgtcatcgttcttgaactgtgcgtccgtcaagatgaaggtccacacattatcgcagaacctgtatgtgtgcagatggcccttgatgttaaccttgctcttcacctggttctccagagcatccgtcatagacttgtcaaactggacaaggacctgaatggcgagctccgggctgagggtgccgctggagaccatctcgtcgagcgtctcggtgaggcacatgccgatggtggacctccggtagagctcgaaggtggccatggccgccgccaacaacggatgacgagatcaacccgagctgcgcagagatggatctccgccccacgccggctccgaaacaggagaggaggatggggacgcgggaggtcgggaggg

SEQ ID NO: 15231 - DNA, 745 bp, Setaria italica
  Peptide Sequence Number=SeqID_81205
ttgggtgggtcaggaactccccaccttgcgctaggcgctcgatgtgtgccttggcgttgtccgacggcgcaatgtagaggatgttttctacccagaactcggccatcaccttccagcacagagaacgatcctctatgctctccagctctgtcccaagctttagtcctttggtgaagatgctgttgtcagctccggagaaggacaagggcccctactcgaaagggtccaagtctctgtctcgagtcttgaatcccaacgcttctctggctttgtacatcgtttcatcaaagacaaacctggtgtcaatggaatttcctggaagcaattctggggcattagacatcaggtaggcgcagtagcatgacaatttggttgcgacttcacggttatcataactgggaagctgcctgcttctcacttgtggagatcccatacacttttctgtgtcgtcgtatagtgatattctgcagtaatcagttgcaatgtgccaaataagcatgctctctgtttgagactcattctgcaatgtccaagaaaactgttggagaacaccgttgcgctgcaatgatgctttcccattggtcagatgaccatcactgctagatttcagcatgcaaacaatctgaggcttcagcttatccggtaacttgacaaaatacaaaccttttcttgaaaatagattgcccaaagatcgacccagataagcaatggccttggaagaaatgaacgtgggcagagtaagtaa

SEQ ID NO: 15232 - DNA, 337 bp, Setaria italica
  Peptide Sequence Number=SeqID_81206
ttaggtcgcgcccggggctaggattagggtttctggagaggaagagaggggtgggcatggtcagggggcggggccggcggaagttgcggacgcgaccccgcaggacggagctcaggagcatcaccaacagcgccgtcgctgcgacagccggctcacatgtctcgtgcaatccccatccgctttccgctgctctgcgtgcggcgggggcggccggctcgacggagggatcctcgccgctgtactgtggggcctggggctctgcgcgagaaaataaaacgctgacgccggcgtcggcgaggaaacggcggcggcgattggcgggggatggtgggagagt

SEQ ID NO: 15233 - DNA, 821 bp, Setaria italica
  Peptide Sequence Number=SeqID_81207
tttttctaaaaaaataaacatatttgactagttttatattctaataatgcgcagacagacaatccttcttattttcatgaatatggatccagcacacttcaaattctcggaaacatggcatggagttgacatgcacataagcttcaattcaacaaacccagattatgttacacggctaagaataagtgatttacaagatggatcagcagtctgattgatcatatggcagcagtggtgagaacaagccaaaaagggatctgatcatgctccgttgttggcctccaaagcctggaacacgtccgtacgagtgacgattccgatcacatgctgttgctcattcacaactggtatcctgtgaaccttctccttgagcattagtgctgcagcctccaggacagtcctctcaagtgtcagggttatagctggagacgacatcacttcaccaacagttgactccatcccattgggcgccttggccttgtccttcttggaaacgaccccgacgcacctgccttcttcgtcgtcgaccacgggcaggccggagaactgctgcgtggcgaagaaggcgtcgacctccgctagccgctgccccggcgtggccacctgcacggggcgcgacatcacgtccacgagcctcgcctccgggctcatctcgccggcggtggtgatctgggactcgaggtaggcgcggaggtcggcgtagctgaggtgagagaagttctcgggccactccccggacacgatggccgggcgcaggtcgtccatcgcggcggccgccaccaacgccgcgccccgccgcgctttgccgcccgcggcgcgca

SEQ ID NO: 15234 - DNA, 314 bp, Setaria italica
  Peptide Sequence Number=SeqID_81208
tagtttacactagactctgaaactggattggcactaccttatctataaaattgtacctaatctactacatagtgttttctaaaccaacgatagtgattaatgattaccgctcgcagcttcgaggtcggatgaaaattgcctcggttgctcgattttgcgcaggaggaccatggccttgtatgccgaacccttggctttgttggcttgtggtagtctatgcttgctatttgcacaaaaggagcagaagaaaatcaagctcattgaattattggtagtttggagcaactagccaaaatgcaattgctgtgatgtgg

SEQ ID NO: 15235 - DNA, 1083 bp, Setaria italica
  Peptide Sequence Number=SeqID_81209
aaaaaaaggacaggcattctgttgaccataccacttgctagggctaggtacatatactagtaatatctctccaataattgagatctgtcagtccgacactatgccaccaccaagggttttacataactcatcatcattacaagtaagaaaaagaaaagaattacatattaagttcacctctaattctttctgttcaggctatcccaagaccttttttttttccagtgaccaggcacctgcacatctaaactcttgacatctgtaccaccaaggaggagatgagaagcatggatctgtgcagcagatgaccaacagacaaggctaggagctgttgtacaggctcttcaaccgctttgctgtgtgaatgaagcccaggatgacctgcaactcgtccaattgctgtgactggaaatgctgctgtgccccatggaagagctcctcctttgatggactggggttcatgcttgcaaggttgaagtgcttccagtatctccacagcgagggtgttccgagctttgtcagatttactttcgctcgcagcttcgaggtcggatgaaaattgcctcggttgctcgattttgcgcaggaggaccatggccttgtatgccgaacccttggctttgttggcttgtggtagtctatgcttgaataatccatgtctttctcgcccatgtcggagctgctgcacaatgaattattgccattgatatcattgtcatcttcattgcctgttggagcttccaagatactcagagcattcctctgcaacttcacctctacaccgttctttagaaccaaccaatgccagcctccaaggccaacagccttcttgacaacaccttgtaggccgaccaagacagactttgttcggttgttcccagtgacaataaccttggtatgccggggaagcaccgagagctcctcatcgccactctcatctcgcggaagtgacagaacactggaaggacatagttgagtccccatcatcatgttgcctctttggcctgatctcctcctagtgaaagattagggtctgcggtgctcgatttcgcacaggggaagggaagaggagtgccgggcggg

SEQ ID NO: 15236 - DNA, 1442 bp, Setaria italica
  Peptide Sequence Number=SeqID_81210
ttttttttttttttacgtagtttcaggttagtaaacaaatgcaaaccaatgcatatatttgcatcggagcctcgagggcaccaaaagatgttaggagcacatcacacggacatccagccaagctgctgctactaacttgtagtacatttgatgctactggattctgattgagagatcttcttcagttgaaacattacacagctccaatggtacgagcaattgaattgatgggcctgcatagcgattttaccccttcaacccagcttgtaagaacttttggttggaacagcatgtcatcatagaactcttaactgaaggtcggggtatccagttctggccttgtatttctcgaatagctcttgcattgcagcgacaaattgcttgtggacttcattgatctcatcggtggtaggctgagggttctttacaacttcaattggccttccaacaaccacatgcattggtgtagcaaaaggtatgggagttcccaattttccccagaagataattggagaaaatttgattgctctagcaatcttgacaattaatttgccacttggtctccaccatttgtatacgtaactctgtccgaaagcaaaaacagggactacagggcaacccatctcaatagctatcttaacaaaaccttttcttgatttaagaaaagcaacctctgaatcatgatccatatgaagtatttcctgcacacctccgggcactatgatacagctataaccagctccaaggcaggagtagaaactcttccttgatgcaggagccaaccccaaccacgtccatatttgcctaaggaacggggtatagaacaccgcactgcttgcaagaatcttcatcttcggtagcggcatgaatccaacaaggtccccgaggatcccgacagcgatgggcaaaacagaatgaggctcatagccgaacacgtaagctctgctgggatcgaaggcgtcgtagtcctccaaatgcaaagtgacgggaaaatacccaatcacgtacctgcttatgaacctggcgatcttgcggcccaatctgctcttatcattgacgggcacgaacatgaagaagagctgcgtggccagcaccagggcggcgacgcggcgcgggaagaggaagagcgaggcgaggacgaggaagacgttgaagtggatggccccgagccagagtgcgagcgccaccgtggtccgcagcggcgcgtacgccgtgccccggaacaccgcggtcccgtcccctgcccgctcccccttggccgccgcgccgttgggcaggccattggtggtggtgcccgcccccatcgatcgggccgcccgccggcgggagccccgaggcgtcgagctcgagtgggcagcgagacggagaagagggggtgctgtgctgctggtggtggcgtagagagggttctagcgtggtccgcctcccctccctcgctcgcg

SEQ ID NO: 15237 - DNA, 604 bp, Setaria italica
  Peptide Sequence Number=SeqID_81211
ctcagttccaaattgcaggtgtgcatagatatttgtaatgcatctaaatatagtgtgtgtctatataaacctttgacaaaacgatatacaatttggaacggagagctacactcccaatcccaatctagatatattttttttggtgtgtggctgcctttgctttgtttcgtttgaatggaagcggtcgtgtcgtcagcagcagattatccggccgcgccctgtcatgtccagcagcttccattccatcatccttcggccagcctccaatcccggccccgttgccagggcccagggctgggctatatctatatatatacatacagctgccacaacgcaactcactcgagatcagtagtgtagtagtacaacacagacagacattcagaggagcagcaggagaggctcgatccagaactaacagcaagaagaatgccggtgagcaggatctccgtgggcgctccgggcgagctgtcccaccccgacaccgccaaggccgccgtcgccgagttcatctccatgctcatcttcgtattcgccggctccggctccggcatggccttcagcaagctcaccgctggcggcgccaccactccttctggcctca

SEQ ID NO: 15238 - DNA, 261 bp, Setaria italica
  Peptide Sequence Number=SeqID_81212
cgcgtccatgttggccgtcgaccgcttcggccgccgcacgctgttcctggccggcggcgcgcagatgctggcgtcgcaggtgctgatcggcgccatcatggcggcggagctccgcgacgccggcggcgtgggcaaggggtgggcgggggtcctaatcctgctcatcgccgtgtacgtggccgggttcgggtggtcgtgggggccactcgggtggctggtccccagcgagatcttcccgctggaggtgcgcgcggcggggcg

SEQ ID NO: 15239 - DNA, 818 bp, Setaria italica
  Peptide Sequence Number=SeqID_81213
cagcactgatgtacacgtagcagcacttgtattatgccgcagcaggcgcttggttgcaggcaaaaccaattccattgccaccgccatcgatctgacctcaccctcggccatgtcggctactgctccacctgacgccgcctccgtggagaagcggaagccagccgcccacgcggtgttcttcccggtcccggcgcagggacacgtcaaggcggcgctgcacctggccaagctcgtccatgaacggggcggcgtccgcgtcaccttcgtccactccgaccgcaaccgccgccgcgtcctccgctcacggggccccgacgcgctcgccggcgcccgggttcgctttcgcctccgtcccggacggcctgccgccgccgtctggcgaaggcggcgacgacggcgacactccgcagtacatggtcgccctgcattcatccctcgagacctctgccggttcgcacctcaagaaactgctcgacgacgcggctgccgccggcgcaccggccacctgcgtcgtctccgacgtcgagtccgtcctgcgcgccgccggggaggtcggcgtcccggccgtcgccttctggacgccgagcgcctgcgggctcatggcgtcgcagcagtgccagcagctcatcgacaagggcttcgttccgctcaaaggcatgatcaaataatgctattttcaaagcatccaaatgtccattaatcgactaagtgttataattaatctcctatatgcagatgcagcgcagctgagcaatggctatcttgacagcacagtcatcgactgggttcccgggatgccggcggacatgcgcctgccg

SEQ ID NO: 15240 - DNA, 806 bp, Setaria italica
  Peptide Sequence Number=SeqID_81214
tcgacaagggcttcgttccgctcaaagatgcagcgcagctgagcaatggttatcttgacagcacggtcatcgactgggtgcctgggatgccggcggacatgcgcctgcgcgacttcccaagcttcttccgcacgacggacgccgacgacgccatgctccgccgcgtcctcgacctcgcggactgcgtccggaccgtcgcctccgccgtggtgctcaacacgttcgacgagctcgagggcgaggtcgtcgaagccatgtccgccttcctcccgcccatctacgccgttgggccggtccccttgctcgctcaacaagtcgtcgttgcaggcggcggggccccgccgctcgacgcgccgccggccgctagcctcaccaaggaggacgacgggtgcctggcatggctaggaaccaagcggctccgctccgtggtgtacgccaacttcgggagcatagccgtgctaacaacccagcagatagaggagttcgcgtggggtttggccaacagcggctacgagttcttgatggtaatcagagatgaccaagcaaacggcgcctccggcggcggaatcacgccgaagttcgtcgaggagacgaaggggaggtgctacgtcacgagatggtgcccgcaggcggcggtgctccggcacgaggccgtcggcgcgttcctgacgcactgcgggtggaactcgatgctggagagcatatgttccggtgtgcccatgctgtgctggccctttggcgcggatcagcagaccaactgccggttcgcctgcatggagtggcgcgtcggcgtcgaggtcggttct

SEQ ID NO: 15241 - DNA, 256 bp, Setaria italica
  Peptide Sequence Number=SeqID_81215
cgacagcgcggcctgcaccccggagaaacccacgtacaccgtgccgccgtcctcgccatgcacgagccccgacgcggcggcggtggcggccgcgcaacggtcccaggcgcgcgccagcagcggcgaggacgcgagcagggcgccgaggacatggctggtctcgaacatggaagcttcttcttccccagcggcgtcgtccatggctggctgatgagcttcccagaagcggggggtagagagagaaagagagagactt

SEQ ID NO: 15242 - DNA, 371 bp, Setaria italica
  Peptide Sequence Number=SeqID_81216
taagcgtcggtattccggaaactccaggaggcccagaaaaggaaacaatgtggctgattgcttctttctgaaacatgagttggtacttatgtatgacatgttgcgcaacagacaacacctgaggattgctggggtagccgagtaacagaaatcagaactacacatttgtttagtaacaagtcctgtagcagcgacagatgatttttttggtcagtcaacaaattgtaccatgtatgtatgaatagtctgtaatcataatccttaactgtgtactggactatgtcatccaacatgatgtgaccattttttgctgacaaaatgggaaaaggaggcctcgcggaatggttcgttaacaaaaaaaaaaaaaaaaa

SEQ ID NO: 15243 - DNA, 910 bp, Setaria italica
  misc_feature (879)..(910): n is a, c, g, or t
  Peptide Sequence Number=SeqID_81217
tcgggcggctcgacctcgaagccttcggcggtggggacggtgaactggggcacggcgacccttgtgggggtcttcgcggggctactctacggcgggagcaaggaggcctccgcctctgtcagcaaggatgcagaggtgatgctgaagatgggaagcaccccggacaagcgtgaacagtatagattgatgagagacgcgatggagaaaaggttcatccgggttgccaaaggctcactagttggtggtgctcgtcttgggatgtttactgcaactttctttggcatacagaatcttcttattgatactcgtggggttcatgatgtcttcaatattgctggagctggctctgctaccgcagctgcttttgggcttattttgccaggttcagtgatgtggcgtgcaaggaatgtattggttggatctgctcttggtgctggaatctgctttccccttggctggatacagttgaagctggcagaaaaggccaatcttgagattgcaaactcgaaaccatcgtctgatttggcagagggaaaaggaaatcagagccgtgtgggcgctgctatagaaagacttgagggcagtctgaagaagtgatatttacgcttcaatggccctttctcattgttttggttccatataaatgtagcagttacgagagctgagctatgctggctcaggacctcgttctttgttatttttggtgtttttcatgtgcttctcatgtttatgatattaaattcgatgtatggcagcttttatgaatgaactaatagaatacgagtttgcttgatctggattattctgattttgtaaaatgtacatgacatcacactatccatgtgaaaatatgatagcattggcaatttgcacctacgnnnnnnnnnnnnnnnnnnnnnnnnnnnnnnnn

SEQ ID NO: 15244 - DNA, 1462 bp, Setaria italica
  Peptide Sequence Number=SeqID_81218
cccaggaaacactcgctgctggtgacgagttctcctctaacattgctccggcgaccacggttgctactggggatgagcctccacctgaggaggcgcctcctgtggagaaggatcccttcgcagccagcgacctgattaacaacaagccggaggaggcattggttggtgggttcaagaagaacaaggagactgcccttgtggttgctgatcctgcagctgcacttgctgggttggaggtcacgactctgcctccagctgaggcaactaagccgacatttattggagttgaagggtttgagggtgactatggtggaattgagttcggcaacgaggaggcttcacttgctgaggcgtttgaagggttcaatgcgccatttggtggtgggctggatgcttctgagtttgttaccacgacgaagaaggatcataaggacagggctgtcactggtcttgagctgctagcaaccagtgggcagccaccaaatgcagctggtggtactccgttggagaatctattggtgaccaagcgcacagaaatgactgctcctgagttgttcattgcagaggagatcaacgcagaattcaaggagtctattcttgtgcgggttggtttgaagggtacaatcttccttcgaaccttgccattgaacaaggcagcggggaaggaaacagagttctccttccgtcttgagggcacatcaggaatgaagagggctgcattgcagagtaatgtgttgagtaacctccagaatgggctattccatgtcagaactgtgtcgaaggaggagcccattccccttctgaagtacagcttcctgccaaagcactcgcctctacctttgaggatgcgccttgtgaagcgccatagcgggacattgctctcagtgatgatacagtatgcatccaacccaatgctgccgcagcctctgagcaatgtgacattcattgttaagcttcctgtggaccccactctgctcaatgtttcacccaaggcagtgctgaaccgggcagagagggagctaagatggcacatttcagacattcccctgaaaggtccagctggaaggctcagagcacgaatgcctgttgaccaagactccaaggatggtgagctagaggttcttggcatggtgaaatttgcttaccaagggccatttacattgtctggcatcaaactacgtccagccactgatggcattgcccagtttaatgaagttggacataccttttccagtgggagttacctgtgcatctgataggtaccttcttgtactgtaggtgcttctttacatctttcattgtgtttgtttctgcagcagggtgtgaaaatcctattgtatgtagcaaagtgtgtttgtttttgtgaggctgaagttccaccatgtttttgagttttctttgctcttgatatatcatctgtgattactcatgaaagctatctactgttcatgaagtttattca

SEQ ID NO: 15245 - DNA, 298 bp, Setaria italica
  misc_feature (265)..(265): n is a, c, g, or t
  Peptide Sequence Number=SeqID_81219
cgaaccggccgttccggagccagcgctcgggccggaactcgccgcagtcggggccccacacggactccatgcggcccatggcgtaggcgtggtaggtgacccgggtgcccttggcgacggccgtcccgtccgggagcttgtcgtcgccggcggcgaacttggagtcgaactgcaccggcgggaacagccgcatgctctcatacagcgcggcgtgcacgtagtgcatgtccttgagcttgctgaaggtggaggcggtgagccggtnatcgtcgccgccgacgcgggcacctcgtcccgg

SEQ ID NO: 15246 - DNA, 419 bp, Setaria italica
  Peptide Sequence Number=SeqID_81220
ccaattggtgctctacgttggtgaaaggatgctacgagccttgaggtcaaatgcttataccgtaaaaattctcaaggtgtgccttctacctggaaatgtattgactataacaatgtcaaagccctatggatttcggtacagaagtggacagtacatatttcttcagtgtccaatgatatctccttttgaatggcacccattctccatcacctcagctcctggagatgactacctcagtgttcatatccgaacaaacggcgactggacacaggagctcaagcgcatgtttgtcgagaactacttcccaccacatcttaacagaagagcttcatttagcgagctagcttgccaaagttgcttgtagatggtccttatggtgcccctgcacaggatttcagaaactacgatgtcctacttct

SEQ ID NO: 15247 - DNA, 623 bp, Setaria italica
  Peptide Sequence Number=SeqID_81221
ccataggcgtcgcagaaggcaaacaccggggcagccaggtagatgagcgtcacatggtggggcttgatctgcgggtagaggtaggggatggtgatggtggagaccaccgccaggaggatgtagcagaggatgctgaccgagttgggtatatggtcccggacaaacacctgcgccctgcggcggtcatcgaagctctgcatggccttctgctgctcagcggcgttgaggttgtggaacggcaactgcgtgtcaccgtcatcatcaacgccaccaccttgcattggctggctgcgcctgttgtacatggcgcacaatgtgcagaacatgatggataggaagttgaagaggccatcggcgagtatcatggacactccgatgaagatcttatagcccctgatgccgcgaaggcttccggggctaaggtcagcagagtaccagacacctgccttagttgcaaggtatggcgtaacaatcccccacgagacagcactcccgatgaataaggaggcagtgatcatgtatgggcatagcatgccgatggcgacattggtcatgcagaaatcgaagtagaatccgcgcttatatgcctcaaggccgaacgtggggaaggcttacttagtaaa

SEQ ID NO: 15248 - DNA, 225 bp, Setaria italica
  misc_feature (215)..(215): n is a, c, g, or t
  Peptide Sequence Number=SeqID_81222
agctcacatgttggtgccaacatattgtatagtgccactcttaatattatggtgcactatttgccataattcattaattgcaactatacaggccagtgtcaaattttacgttttgttatgacttgtgcattgatgctatgtttgaacaggaacgaggatttgctcagccagggtctttctttgaacgatgatatgcagcgtgtccttgcaaaacncgatgctatt

SEQ ID NO: 15249 - DNA, 1425 bp, Setaria italica
  Peptide Sequence Number=SeqID_81223
ggtccggactgggccatgaacctggagatctgcgacatcctcaatcgcgaccctgggcaagcaaaagatgtggtgaagtccctccagaaacgcattatacacaagaacccaaaggtccagcttcttgctctcacgttgctggagacgatgataaaaaattgtggggacattgtccatatgcatgttgctgagagagacatacttcatgaaatggtcaagatagttaagaaaaggcatgattatcatgtaaaagagaagatactcacactgatagacaattggcaagaagtttttggtggtgcacgtgcaagatatcctcaatactttgcagcataccaggagctcttgcgcactggagctgtatttcctcaaagatcaaatggttctgtgcccatcattactcctcctcagactcagcctctacaaaactatccccctcctttaagcatttctcagcaggaggaacctgaattgtccattccagatttcccagcattaagccttacagaaattcagaatgcacgtggcatcatggatattctttcagagatgttggatgctttggatccgtgtaacagagagggacttaggcaggatgtcattgttgaccttgtggatcaatgccgttcttacaagcaaagagtagtacagcttgtcaacactacctcgaacgaggatttgctcagccagggtctttctttgaacgatgatatgcagcgtgtccttgcaaaacacgatgctattgctgcaggtatagcaattcaggtggaaaagccaaaatatctgcagtcacaaattgagagttctgcaacaagaaagccagatactgcgaaagaaccagttcagaggtcttcggcaagtacaagcagcaccaaccagtctccctttgagattttagcgcttcctgcgcctccatcatccagtagctcaaaagctcctgtggctccagctgctaagattgacctccttagtggagatgattatttcaaacctgaacctgcaaactccctggcacttgttcctgtcactgaatattcagcttcagaccagaacgtcttagcctttgcagatatgtttgaacaaaatactacgaacaagagcaaccataatcttccgaactcctttaattcctcgactccaaattctacatccaacgccattgtaccttatgatcaacagccagagttgaactctacaggttcatggaatgggcagccagcttatggaacaggtcaccaaaagcaagccctatattatggtacagataatcgaaatggaggtattccaccagcgccatcagaaattaagcgatccactaacccattcgacgatgacagaccagttgggccggcattacaaccaggacaatcagcaagcatccatccccaaccagtgcatgtcagtcagcaaggtaatggattcatg

SEQ ID NO: 15250 - DNA, 396 bp, Setaria italica
  Peptide Sequence Number=SeqID_81224
gttctaaggaaaaggaataagttgtctttgttcttccttgtgttcaggaccagaagcaatggcgttatctgctactctcctcaagtcgtctttccttccaaagacggccgaatggggcaccacgcgccaggctgccgctcccaagccggtgaccgtctccatggttgtccgtgctagcgcctacgctgatgagcttgtccaaactgcaaaaaccatcgcatctccaggaaggggtatccttgccatggatgagtcaaacgctacctgcggcaagaggcttgactccattggcctagagaacactgaggccaaccgccaggcttacaggaccctccttgtcagtgctccgggactgggacagtacatctctggtgctatcctcttcgaggagaccct

SEQ ID NO: 15251 - DNA, 818 bp, Setaria italica
  Peptide Sequence Number=SeqID_81225
aaggtcgacaagggtcttgtgccacttgctggttccaacaacgagtcgtggtgccaaggtcttgatggcctcgcttcacgcgaagcagcctactaccaggctggtgcccgcttcgccaagtaggacgacaactgttatcagcatccccaaccggtccatccgaacttgccgtgaaggaagctgcctggggccttgcccgctatgccgcgatttctcaggacaacggcctggtgccaattgtggagcctgaaatccttcttgacggtgagcacggcatcgagaggaccttcgaggttgcacagaaggtgtgggccgagaccttctactacctggctgagaacaatgtgatattcgagggcatcctcctcaagcccagcatggtcacccctggtgctgagtgcaaggacagggccacccctcagcaagttgccgacttacacccttctaagtcttccttccgtcagaaggatccctcctgccgtccctggcatcatgttcctgtctggtgggcagtctgaggttgaggcgacccagaacctgaacgccatgaaccagagccccaacccgtggcatgtgtccttctcctacgccagggctcttcagaacacctgcctcaagacatggggcggccggccagagaacgtgaaggcggctcaggatgctctgctgctccgcgccaaggccaactccctggcgcagctcggcaagtacacctccgacggcgaggccgccgaggccaaggaggaatgttcgtcaagaactacgtctactaatacgcgctgctagtagccaagtacctacctcgagggcacactgta

SEQ ID NO: 15252 - DNA, 4026 bp, Setaria italica
  Peptide Sequence Number=SeqID_81226
gagagagagagaggcgccgccgccgcctccctaaaccctcgtcaggctcactcccaacagcggcggcagaggcctaccgccgcaaaccctctttccccgcaccagcacgcgcagggaaaacttgggagggagcgaaccggagctagcactatggctccggcggacggaggcggggagcagccgcacaaggctcaccgccagcacaagtccggcgccaaggcgcggaagaagaagggcaagggcaagggcgcagccggtgatgacgcggggggcgagcagaagaacccaaggctttgcatttcagtcagcaacaaaggccaaaacgtctgcaagctcggtcagcagagattgaacaacggcgacttcatgtgccagtcatggatcgttcaatcggtgaacctcctccttttgttgtagttgttcaaggacctccgcaggttgggaagtcgctgttgataaaatgtctggtaaagcattacaccaaacaaaacctgtcagaagtccatggtcccatcactgttgtatcaggtaaaagcaggagggtgcagttcttggagtgtccaaatgatataaacggaatgattgatgctgctaaaatagctgatcttgctttattgctcattgatggaagctatggttttgaaatggatacatttgagtttcttaatatcatgcaagtgcatggattccccaaggtgatgggagtgcttacacatcttgataagtttaaagatgtgaagaaactcaggaaaactaaacagcgccttaaacatcgattctgggctgagataaaggagggagcaaaactattctacttgtctggtctcattcatggaaaatacaccaaaagagaagtccataaccttgcaagattcatctctgtaatcaagcctgttccattgagttggcggatggcacatccttatttgttagttgataggtttgaagatgtcacccctccagaaattgtgcgcctggacaaaaagtgtgacagaaaaataacattatatggttaccttcgtggctgtaatatgaaaagggggaccaaggtgcatatcacaggcgcaggtgatttcagcttgtctggggtgacgggtttggccgatccttgccctttgccatcagctgcaaagaaaagaggattgcgtgacaaggaaaagctgttctatgcaccaatgtctggtcttggggatctactttatgacaaggatgcggtttacatcaatatcaatgatcattttgttcagttttcaaagaatgatgacaatgacatacctaaaaagcaagggaaaggtaaagatattggtgcggacctggtaagatcacttcaagaaacgagatactcccttaatgaaaaactggaaaaaggttctataaatctctttggcagagggccttctgcacaattcaaagacagtgacgtggatggcaatgccatctctgcaagccaggatgaccagggagatgcaaagcaagtagacggtgttaacattgcgaatgctgacaccatggacagcaatgggcattctgaatgctctagtgatagtgaaggggatgatgatgatgatgataagttaagggatcgtgatgttgaattaagggaaaaattagaaatttgcaatggaaggttgaggcggaaagctgtatcctctaattttcaagatgatattgacgacgagggaactgatgaggatgacagtgataatgaggattctggcgatgacgagttatctgaaggttctgcagcatcagatgacagtggagaagctagtgcttcagatgacgagactggaaataattcaaaatggaaagagtccttgcttgcaagaacactgtcccgacggagtgccagtctgatgcagcgtgtttatgaacaaccttcaacaaagctagatggtgtgctgtcagaagaaaacaatgatagtgaagccaatagctcagatgaagaatttttcgtaccaaaaggacaaaacaaggtacagcaaacaaataacgatttaccaacctttgatgatattgatgctgaggattgctccaagtttttcaaagcagagctaagagattggtctaatgaagatctcatcaatgccatccgtgaccgttttgtgactggaaattggtcaaaagctgctttaagaggacaggagttaaatgaaaatggagaggatgatgaagagatctatggtgattttgaagatcttgaaactggtcaggtacataggatccaggcatcagaaaattctgaagggaatagtggtggtcacaaagaagatgacctagaagttgaagagagaaaacttaagaagctggccctgagagcaaaattcgatgcacaatataatggatctgagctttctggcgacgaagctgatgatgacaagaagaattccaaacgagaacagtctaatgcagggggctattttgataaattaaaggaggagatggaaattcgcaagcaaatgaatatatctgagcttaatgatctggatgaggatacccgagtagaaattgagggattcaggactggcacttatgtcagattagaagtacatggtgtgccatttgagcttgttgagcattttgatccttgccaccccattcttgttgggggtattggccttggtgaggagaacacaggttacatgcaggcaagtttgaagcgccataggtggcacaggaaagtgctgaagacaaaggacccgatcattgtctcaattggatggaggcgatttcaaacaactcctatctatgcaatagaagatcggaatggtcgacatcgcatgctgaagtatacgcctgagcatatgcattgctttgctatgttctggggaccacttgctccaccaaagagtggtgtgttggcagtccagaatctttccaacaatcaggtgccatttaggataactgcaacaggctgggttcaagaatttaacaatactgccagaattgtgaagaagatcaagctcacaggcacaccatgcaagatatttaaaaagactgctctgatcaaaggaatgttcacatctgatttagaggttgctaggtttgaaggtgcggccattcggacagtaagtggaatcagaggacaagttaaaaaggcagcaaagattgaaccaggagatgtgctaaagagaaaaggggaaaatacagaaggaattgcaagatgcacatttgaggacagaattcttatgagcgacattgttttccttcgcgcctgggttaatgttgaagttcccacttactgtaaccttgtgacaactgctcttcaacctcgaaaggaaacttggcaaggcatgagaacaactgctgagttgcggagggcgcacaatatacctattccacacaacaaggactcggtttacaagcctattgagcggaaaccacggaagttcaatcctgtagagatccctgcaaaactgcagcagttgcttccttttaaatctaagccaaaggacagacctaagcagaagcaaccaacagttgaaaagagggtgccaataattttggaacccagtgcaaggaagacacaagaagctattcgacagctaatgctgctcaaacaggagaaggcaaagaagaagaaaatcaaggaacagcagaagaagaaagcatatgagaaagagaaagccaagactgaacaactaacaaagaaacgacagcgggaagagaggcgtgagagatatcgggaagaagataagcaaaagaaacgtgcgcgcagatgagcgcaatgagctgaagaaaggatctatgcctaagggacccagcagcaacccagagcttgttctctcagtccacacaacatgtgccgcactcttgctcagttgatagctggtgagttcgaatgctccgataacatcagggtggaaaggcgtggatcatcagggttggattcagctacctgcgggcctaagttagccgctcatcaagttttgtactgttcgctataacgtgagttttgtcattggcacgtgatctttagctcccaaatatgttgggagtgtgaatttggagtctatactaccctat

SEQ ID NO: 15253 - DNA, 1676 bp, Setaria italica
  Peptide Sequence Number=SeqID_81227
aaagattgtgtgtcaaggaaaggatagtgcttgtctccttgtgttcaggaccagaagcaatggcgttatctgctactctcctcaagtcgtctttccttccaaagacggccgaatggggcaccacgcgccaggctgccgctcccaagccggtgaccgtctccatggttgtccgtgctagcgcctacgctgatgagcttgtccaaactgcagtatgatttctgaacacaagaaaaaaccaatcgcatctccaggaaggggtatccttgccatggatgagtcaaacgctacctgcggcaagaggcttgactccattggcctagagaacactgaggccaaccgccaggcttacaggaccctccttgtcagtgctccgggactgggacagtacatctctggtgctatcctcttcgaggagaccctctaccagtcaactgttgatggcaagaagattactgacgtccttgttgagcagaatatcgtgcccggtatcaaggtcgacaagggtcttgtgccacttgctggttccaacaacgagtcgtggtgccaaggtcttgatggcctcgcttcacgcgaagcagcctactaccaggctggtgcccgcttcgccaagtggcgcactgttatcagcatccccaacggtccatccgaacttgccgtgaaggaagctgcctggggccttgcccgctatgccgcgatttcgtcaggacaacggcctggtgccaattgtggagcctgaaatccttcttgacggtgagcacggcatcgagaggaccttcgaggttgcacagaaggtgtgggccgagaccttctactacctggctgagaacaatgtgatattcgagggcatcctcctcaagcccagcatggtccacccctggtgctgagtgcaaggacagggccaccccctcagcaagttgccgactacaccctcaagctcctccgcagaaggatccctcctgccgtccctggcatcatgttcctgtctggtgggcagtctgaggttgaggcgacccagaacctgaacgccatgaaccagagccccaacccgtggcatgtgtccttctcctacgccagggctcttcagaacacctgcctcaagacatggggcgggccggccagagaacgtgaaggcggctcaggatgctctgctgctccgcgccaaggccaactccctggcgcagctcggcaagtacacctccgacggcgaggccgccgaggccaaggagggaatgttcgtcaagaactacgtctactaatacgcgctgctagtagccaagtacctacctcgagggcacactgtaggcagtgtgccatattacaggttcagattggccgggacaaagagtacactgcgattttactatcctcggtatgctggtactacaggttcacattcacatggttactacctggcctgtggtatgctggtactacaggtgttgctctgaatagctcaggcttgacccaagtaagagcagtgcaaattcccaatttccagaaaacaggaggacctccaaaggacttcaatgtaattttaatttctttcagaggtccttttgcaaggggctggatgtaaagtacttttataataatccaagccattgtgcttctcaaaaaaaggaaaagaaaaaaagaaaacagacgaggtgaaggatttttctaaaaaaaaaaaaaaa

SEQ ID NO: 15254 - DNA, 289 bp, Setaria italica
  Peptide Sequence Number=SeqID_81228
tctggaaacaacaattcagatgattcacaccttggtaaccacttcttgaataataacttgcggcaaggagttcaagcttccctccctcagtgcctgtttgctgctggagatccctcagttgaaacctatgaactttgtggcaacaattcatgtgaactgattaaagttgaattgctaaaaacttttggcgagtgcacattccattatgatgttagtaccaaagatcaagatggcaatttagtaagctcaacttctatgtcgatctgtttggctcctttggttttatggg

SEQ ID NO: 15255 - DNA, 561 bp, Setaria italica
  Peptide Sequence Number=SeqID_81229
tcaatttgagctgaaactatcttcagctctaccatatgcagatgcactaggcaaaacaatgtcaggtaagttaagattagaattccctttagctacagatgcgacttatcacttacaactatagtggtagtgaactctgtgatctagtaacaacttatccaatatgtgtgatatgtcattctcaaatgatgacgtggtggcctgccatctagactgctaccatgcttcctctatgtacacttgttattcagttaaggttgcagcaatctggagtgatcaatgaactgttgatacattggcattgtcctgtgggggaaggttgagatctggtagcacgaagatgtctcgtgtggactgcataactgagtgtcgatcaatctgttcctttcctttcgggtccttcgatatgatttcattctgcaagtctgattgccctaaccttgtctcaagcttgtcgttttcttttgacagcaccctgcaagctctctgcaaagctcgcatctcctcgcggaggctctcattctccaccgagagcgaccgcaccatttgctggatctccgg

SEQ ID NO: 15256 - DNA, 1217 bp, Setaria italica
  Peptide Sequence Number=SeqID_81230
ttgaaaacgagcaggtcatgatttggaagtgtgtataaactttctatatgtggaaacaaaatcaagaagtgactcgcgtctcttctttaacgcctttacaaactctacatagcattattatttattggcatagtctcccaattgaaaatcaaagaaatcatagaatgacatacgggactttctttacaatgtgaggctttcaggatcctcaacaatctttgcaaatgtctgcaggaatgatgccaaatcagcaccatagataatcctgtgatcagcagtaacattcaccagcatttcattcttgatactgaagaaaccatccttatcaaccaccacagtaggttttgatgctccaacagccatgatagctccctgaccagctggaaggattgcatcgaatctatcaaccccaaacatacccaagttggacagtgtaaacgtccctgagttgtattcatttggttgtagctgcttggtgcgtgccttcttgagtagcactctccacttttgtgcaagcagatatatatccaacttatcaacatcctccaaaacaggtgtaagaaggccaccctcgatcgcaacagccactccaatgttgatattactgttgtagctgaagctctttccatctctgcagctagcatttacaacagggtgttgggtgagcgccatggctgctgccttcactagcagcactgtctttgtgacccccttcgacttaaccttttcatatagtgcatcgagcttattagtgatcatggagtatccgactcggaacgttggcactgacatgctgtccaccatgttcctgctcactgccgcctgcattgttgtgaacggcaccaccttgccaccgggcactggtggcagcactgcacccggaggcgcagggcgaacagcggcagggcgtgggggtggaggtggagcgacctttggcttcggcttgatgccagtagctgcctcaacgtccgccgccgtgacgcggccgtgtggcccggtgccgacaaccccggcgatgtccaccctgtgctgcttcgcgatcttcttggcgtaaggcgacgccacgccctttgttgctggagccaccactggcgctggaggaggtggcggcggggcggcggcggcatggggaggagggggttcatggctctgcccctgggagagggcctgggcgcgcgcctgcgtcttaattcgtcgtaaccttccttccttcggta

SEQ ID NO: 15257 - DNA, 270 bp, Setaria italica
  Peptide Sequence Number=SeqID_81231
aaattgattggtgtggtatcaagttctcaacttcatcagtatatgatgcgacgactgacaaagatatgagacactgtcattcttgtaaggatgttgatttactgcagatgatggatggtccttgctgcagttgcatttgagagacaggagtgttgctagctccaaaagatatggcctatgtttaacctctgaaagcaacccactactgtttgccagtggaatgttcacagtacaaaatttcctacacaagtgctatggaaaatggaaaga

SEQ ID NO: 15258 - DNA, 507 bp, Setaria italica
  Peptide Sequence Number=SeqID_81232
agttctcaacttcatcagtatatgatgcgacgactgacaatgatatgagacactgtcattcttgtttccctgacataaatgtaaatgaccagttgcatttgagagacaggagtgttgctagctccaaaagatatggcctatgtttaacctctgaaagcaacccactactgtttgccagtggaatgttcacagtacaaaatttcctacacaagtgctatggaaaatggaaagaacctagcggtagaaacgctgttaagttgccacctgaactctgcagagtagtcatggcgccagtgtcaacaaatactttgtgcagcttctcatctgttccttccataatgcaccgtatccagtgtctgcttctttctgtgaagttgaaaatccagttgggcccaagaatgcaacagttcaacataacagctatgaagattctggaagcacttacaacaaaggaatgccaagaggaattctcactggaatcattagaaacacttggggattctttcc

SEQ ID NO: 15259 - DNA, 469 bp, Setaria italica
  Peptide Sequence Number=SeqID_81233
aaaccaatgctgagtaattagaaggcatattccatgcaaaagaaatagtaggcacatgtagtaaaccactgtcaaaagacagaatcagctttagaagtttataatcatagccattgatcctactgctatttataggccatgttttgtcatataggggttaacttgatcatcctttccttgcttcagaacctagcggtagaaacgctgttaagttgccacctgaactctgcagagtagtcatggcgccagtgtcaacaaatactttgtgcagcttctcatctgttccttccataatgcaccgtatccagtgtctgcttctttctgtgaagttgaaaatccagttgggcccaagaatgcaacagttcaacataacagctatgaaggttctgtttcctcagcagtcatctattttactccactactaactgcagtaggtgaatagatactaagtgaactggatgggcctaca

SEQ ID NO: 15260 - DNA, 518 bp, Setaria italica
  Peptide Sequence Number=SeqID_81234
tgcgcgtgacggtccaaaaagttcagactgtgtgcccagcagcaggatctccttggggatcttcatcggcggcaacggcggcggtgtggaacctgagccacttcttggacttgcacagtatcatggcaccgtgcaagccaacgccgagcgccgtcagggcgccggcgagcgagaacacccgccaaccggcgaccacgcacacgtacaccaggaacgccgacggcacggcgcacatcgccgcgagcgcgggcagcgggagcggcacgcggtaggggcgcttgagctccggtaggcgcgcgcggagccagaggaaggcggcgaactccagcagcgtgccgaggctgtagaggaagttggcggtggcgacgacgtcgtcgaacccgaggaaggagacgccgagggtgacggcggaggaggcggcgatggcgacccacggggtgcggaagagggcggcacggcgggcgaaggcggacgggaggaggccaaggtccgccatgcccagcagctggtacgcgccg

SEQ ID NO: 15261 - DNA, 1130 bp, Setaria italica
  Peptide Sequence Number=SeqID_81235
tcaccactccatcctgcatatcgatctgctaaatcaccacttcgtcacacgtatcaatatgctaaatctccgatacatcccacataccgatctgctaaatcaccgatgcatccagcacatcaatctaattctgttaagactgatgattgtttcagttctgcacttcagtgtctcccaaatatttctttggaagcccaggagtgctgtactgagaggattgagtttgaatccagtaacgaatcttatgatcacaaagctgaaatgatggacaagaagtccagtaccatgaggccaaggaacagtctcccgagaagaattgacttcagtgtgatatcagataacatagttcaaagtgcaaggagagacagtcagactatgaagatgtttgatgaaccaaatgcaagtgaactgagcataaatatcagaaatcacgaagtcacagggaatggctgccaggatcataaggatactgtaaggcaaccagaagaagtttcagagatgaatggacattgtgtgcccaccaagaatttacaccagatgtcttcttcccttcttgagatgcttgatgatccagatgtgcccacaagggagcttgcactttctctattggttgaaattcttgaaaaacacaggaaggcaatggagagttgcgtggaaattctcatagttaaattgctgcatgcaaccaaagatgcggccttgaaggttgtaaatcaggcccatatctgcttgacaactgtggtcactcagtttgacccactgcgatgccttggggccatttcttctcagttggcctgccaagatgagaaaattcttattatcagcatcaatagtttgagcaagcttgtgattcgattgtcacaggaaaacctcatggctcatctgtcaacatttcttcctgcacttctggatgcatttgaaaaccacagcccatatgtccgcaaggcagtgatggtgtgcgtggtggacacatacctgaagctggggccgtcgctgctgccgtatctggagggcctggacagcgcgcagctgcagctcgtaaccacctacgccagccggctgtcccagccaagattcattgcagcggacggctgatgcagtggagtggaggatgtctcgcggcacgggca

SEQ ID NO: 15262 - DNA, 249 bp, Setaria italica
  Peptide Sequence Number=SeqID_81236
ctatgccacgctagtgagcaacaacaagcgccgccttcatcggacctggcatgggtgagcctggatctggagttatccgtcgcatcactgtcctttcttgtgaccaacttgttgcccactcttggaggacaggaagagggagagaggggacaaggaactaacaatggtgccgccgggaaggtggctgtggtcagttcttggggcttgcgctaggcaatttcagctcgcttctcatcacctccaccggcc

SEQ ID NO: 15263 - DNA, 267 bp, Setaria italica
  Peptide Sequence Number=SeqID_81237
tcaaaaatagctggaataaacgttagctagagaaaaaatagctggaataaacgttagctagagaaaaaatgaatacgcacttttctgattttttctcatttgaaagtagttgtgcacaagaattgaattagagacaaatttatgggtcttgggcataccgttttgtgacgtcccgccgttgtctggaaactgagactgttggattgatgttgggagcagactgcagagaccagagagccatgagcgaatggaacatttggctcccct

SEQ ID NO: 15264 - DNA, 658 bp, Setaria italica
  Peptide Sequence Number=SeqID_81238
gtcctgcgtcagtccaaatcatcaggcgcgatgagtaatcctaggcaaagagctcgagcaagacgggcggctcggcggcggcggcgcggcgtagttccagctcctccgggaggcgttcgacgctgcgccagacccatgcgtcggcggcctcggcggcgcccatctcctcgcggtgccgcctcatgtgtccgcccagcgcctggcccatctcgaagccgagcccgcagatgtggcactcgtgctgcggccgctgctcctgcttgtcgccggcgcccttgcctgcagcgtcggccgccttgtgctgcttgagcgccttggcgccgacgccgagctcgaggccgtggcggccccgcaggtggctggtccggtgcccgcccagcgcctggaacgaggtgaaggcccggccgcacgtcttgcacacgaactccccttcccccgacgtcgccaccaccggccccctccgccgcgcccgcttattggacgccgccgccgacgccggggaccccgcggtggcggagtccgaggtcgtcgtggacgagtccgtcgtgctcagcgacagggctagcgacacctcctcttgctggtcccgagggtgcttcatcttgcggaggattggctgcttgttgatcttgccgagctgtatgatgcgaggcaaaag

SEQ ID NO: 15265 - DNA, 466 bp, Setaria italica
  Peptide Sequence Number=SeqID_81239
aaatcctcagtgcccaatttgtttcaatcttgacttgatgttcatggttttgaagtttgatgcattaagtagaagcaatgcacttggagaagatgagaggatttagccgttgtcttgttaaaatataattgttatccagtattcagcagtcagtaccattttctcttgtaccatatttcattttgaagggggctttgggccccaaatggcccatgtactgcatagtacatacagacaatggggtctataatattaatacgtcaaagattaggccatgaaagaatccaatgcaaagaggatcttgagtttacctaaaaaggagaattaaaaatctgtatactggggcttaaacttgaggaagcttttaatcaggaacacaccaaaaattctcgtgaaaaaaggtataacacatatttttactaaattatgggactcaatagatgacttccaaactccaccccgaccc

SEQ ID NO: 15266 - DNA, 863 bp, Setaria italica
  Peptide Sequence Number=SeqID_81240
agtctgccaactgagtagaactactagtgaggaacagcagcatccatatcatccataggattacaaaaaatctaggcttcatgcttcgccttcttatgagactccagtgctttgtcactgccgaaagtcttgctgcatgacttgcaggcatggctaccagatttgggggacttatcctttgacttcttgtcagttgctggggtcttgccagacttttctgcaggagtcttgctggcttgctttgcaggatgaggagttgacacatgaacgcccttcttgtcaccagatggttcaacctttgccttcttaccagaagatgccacagcttcagttgctctcttcttgccaacaacttcaggcttctttggtgtaggagtctgttcttccgaatcatcagtttcatcttcagaatcaccagtgagatcagcaccactggatgtttcttcatcagaatcctcagacatttcactatcatctgaatcatcagtgaaaccatcatcaccactggacgtttcttcatcatcatcttgtttgacatttttaacatttttcacaggaacatttgcaccagattttttaatttcatcatttttaatggggatatcttcagtttccagctcttcatctgaactaatttcatcatcaccagaatcaggctcaaaaattggaatcggcgacttgtaaccacacaagaagacacttgcagtctttgaactgtgcgatatctcaaaatcatcctcaaatatcaagtcacacataatctgagggtgcttatcaactgacagagttccaagcaccagcttcttgtcatcaacttggatagctactcacactgagtcactccctttctttcgtttccccca

SEQ ID NO: 15267 - DNA, 519 bp, Setaria italica
  misc_feature (423)..(519): n is a, c, g, or t
  Peptide Sequence Number=SeqID_81241
aaggaacgggtaagtatgaaaaagggaatacaaaaaaataaggcttaggcatgttgatactggaggttatctgcatagtcacaacaagaagtacaatcgccttggtggtgggcagcaagaggtctgcggtgtccgagagaagcgagccgagaacatttggttggcagcagagggtgtttatctcccggttaacggaagcaagtgaaacagcatcttctagtgttttcctgtttcatgagagttagcataggatcaggtgttttccccgttttcatttgttcttgtttgttctttgaaaacacgggacctgacccttgagtgatatgctgaatttagatgatatcgacaaaatgagtacagtacaggcttctaattgatatttacaattcagtatgaccatgtatagatccagacacccaaacnnnnnnnnnnnnnnnnnnnnnnnnnnnnnnnnnnnnnnnnnnnnnnnnnnnnnnnnnnnnnnnnnnnnnnnnnnnnnnnnnnnnnnnnnnnnnnnnn

SEQ ID NO: 15268 - DNA, 171 bp, Setaria italica
  Peptide Sequence Number=SeqID_81242
ttgttgttatatggaggctgcaagcataactgactagccctacagcaatactccaagatgcgcagggcgcaattcgggctgcaaattggatgcgagaaatcgggcagcttgcatgcggcaggcaagatctggatcgcaccctcgctggccaagctcgctccggcagcaggt

SEQ ID NO: 15269 - DNA, 599 bp, Setaria italica
  Peptide Sequence Number=SeqID_81243
taggtacgttaggttaggtactaagtcggtccttccgtcgtattcggtcgtcgttccgttctagggcgctggacgacggcgtgcttgccggcgccggcgggtggttccacaagatcctgtcgctggtccccgagcggccgatgtcggtgggcggctcgccgcggtacggcgtttacgagaccgacttcgggctgggccggccgatcaaggtagagctggtgtccatcgacaagacgcccggcacggtgtcgctggcggagggccgcgacaagctggccgggatcgagatcggcgtggtgctgccggaggccgacatggcgcgcttcagctcttgcttcgccgacggattggagcagctgctgtgatgcgagcacgacagtacaggaaaagagctggttggtggtgctcgtgaagttgttgtttatctgcatgcaaattgcaattgctggtgacataaattgtagtaatatagataatcgaatcaagtgtatatttgagcaagaggtgtatacatgtataatgtattttgataatctctcacatgtatgtgagactctttgttaattgataaaactgagcgacaagaaaattcaagggtt

SEQ ID NO: 15270 - DNA, 744 bp, Setaria italica
  Peptide Sequence Number=SeqID_81244
cggaaatttagtgcttgtggaaattctcgagcgagcgtagctgaaaacgaagacgaaagattttgtcaaaaatgtggggtagaatttgttgattctcggatacgaagatatcaaatgggctacataaaactggcatgtccagtgactcatgtgtggtatttgaaaggtcttcctagttatatcgcgaatcttttagataaaccccttaagaaattggagggcctagtatatggcgatttctcttttgctaggcccagcgctaaaaaacctactttcttacgattacggggtttattcgaagatgaaatttcatcctgtaaccacagtatttctccctttttttctaccccaggctttgcaacatttcgaaatcgggaaattgcgacaggagcaggtgctattagagaacaattagcagatttagatttgcgaattattatagagaattccttggttgaatggaaagaattagaagacgaggggtatagtggagatgaatgggaagatagaaaaagacgaataagaaaagtttttttgattagacgcatgcaattggcgaaacattttattcaaacaaatgtagaaccagaatggatggttttgtgcttattaccggttcttcctcccgaattgagacccattgtttataggtctggggataaagtagtgacttcggatattaatgaactttataagagagttatccgtcggaacaacaaccttgcctatctaattaaaaagaaa

SEQ ID NO: 15271 - DNA, 632 bp, Setaria italica
  Peptide Sequence Number=SeqID_81245
ccacaggcggggtcgtcggtaggacttcggtagttccgagggcgaggagtcagctccggccgtcggcgcgcgggaggaggccgcggcggcggctagggtttctcgagatcctgagcccgagaggcgccgctcgtcctcgggcaaggaggccgtgagatcggggaacgggtacgcggagcacgggaagaagaggaaggagagggttgaggaggccgtggtggatgtggttagcgaccggtggaacagcggcgtctgcgacgatcacctggtcgacaagaggtccaagagcgagacttttgggcatgctgatacggagaaactgcccgacaagtccaggggatcaggggacgagtccaagaggtcaagcagacgggcagtggttgtggatgacagggctgaggaggttgtgtcgaagagtgactctgggaagcggcggtcggagaaggagaaggatttggggaggagggagagtaccgggcactacaaggatgacagatatagggatagagaaagggatagggaaagggagaaagaatgggagcggcagaaggagcgggacagggaaaagagcgaagggacagagagcgcgagaaggaaagagagcgagagaaggagagggagagagagaggga

SEQ ID NO: 15272 - DNA, 247 bp, Setaria italica
  Peptide Sequence Number=SeqID_81246
gcaaagcggcttcagtttctagctagttcttaggaactcttcctgttaacctagtagcaaagagaacaccaagatcagtcatggcttccgcctcggctctcttcgccacggcgctcgtcatggcgctcatgctcgccggcagcagcacgagccacgccgcgcgccacctcgccgacacgactccggcagcagcgcccgccgccgtggccgggcatccctgcgattccgaagccgccggtgcccaccg

SEQ ID NO: 15273 - DNA, 460 bp, Setaria italica
  Peptide Sequence Number=SeqID_81247
ttcaaacagtaaggattacttcatctggaacttcatcatgtggagcatgacctgcgttcaactctctgatttgaaccttgctgcaatgctctcggagcatggtaacaaatgcctcagattttgtaaggggatctttcataccctggataactaatatttttcctccaaaagaatcaaataagaagttaatccagtcttatgatcctggtgctgcaacagttcttgagagtgtattcaacttcaatctttcaattcctcttaacttcttatttgattcttttggaggaaaaatattagttatccaggtatgtacctaataccatggacaaattacactattgccattggtgtttgttaatgtgtgggaggttaattttatttttatttgctttctttgaaacaaagggtatgaaagatccccttacaaaatctgaggcatttgttaccatgctccgagagc

SEQ ID NO: 15274 - DNA, 437 bp, Setaria italica
  Peptide Sequence Number=SeqID_81248
ttctttttaaacacagctggttcagttgttccaaattactccttcgtcccattgagtgaagaaaaacaaacatcatggctttccaagttgcaggcacagcttcttttgctcttcttgagatcaagagtagaaggcattcttaaagaatattatcctacaagaacggaacgggtggacaagccacttgtggaccagattataagagctgtatcctcatattgcacagtatagttggccatacatttaacagtctttagaaagtttccttgacaaataaatccagtcttatgatcctggtgctgcaacagttcttgagagtgtattcaacttcaatctttcaattcctcttaacttcttatttgattcttttggaggaaaaatattagttatccagggtatgaattgtaaagtatttcctctttttactttgtaatttt

SEQ ID NO: 15275 - DNA, 2424 bp, Setaria italica
  Peptide Sequence Number=SeqID_81249
tccccgcctatggcttctgctgctgctgccgctgacgccgccgcgctgccgctcccatggctctcctcgcgctccgtctcgggccgcttctcccagccccgccccacccgccgtcggggcctccggaaccggtgccagggccggatcgtcgcctccaatgccaccacccccgtgagggacgggggcggcggccgcggtggtgtggttcaagcatgatctccgcatcgacgaccacccgggcctcaccgccgccgtcgcggagccgcggcgccccgtcgtgccgctctacgtcttcgaccgacgcatcctcgcaggttattcagataaaatgctggaactgctgctatttgctctgaaagatcttaagatggcattgaagtcccaagagtctgatctgctcataggcttgggaaatgctgaagatgttgtgctgaagcttgtgaatgaggtacaagcaggtcttatttttacagaagaggaagttgaatatagagtgcgcagtgttctggtcaatgttgaatcatctttatctaatgggtcattctcatggggaagccctcccaagatagtggcttggagtgccccattgtatggctataagaatttgaaagaagtatcgacgtcacatgaccaatttttgaagacaaaactaccagtggccacacctcttgctgccgccactttgcctgctctaaatttggagttagacacaggttttctacccaccctggaagaattaaaaggtttcctgaaagacagtagaacaccaaaggataattgggttcctcttaagaacacgtctgcacgatctattctaaaaaagactctcagtcaaagaaagatcaaaagtaacactacattaagcaccagcaatggcgaagacatagaggatttcaccatggattctggtacatcaggaaggagaataatgaattcaatgtttgcatcagaaaactcacttgaagttaggggtggaacagatattactttggatgccttggccgcctacctaagatacctggaaggcacaggaaatgctagttggcaagagttgcatgataaattacgcttagctgaaaccagagatggtgcctcattctacaccttgtttggccctgcaattcaacttggagtcatatccaggaggaaagcttataatgatactattcaatacgagaaagatcgcaatgctggttttctatcaccatttgggtactcaacacctacagtgaaagcagcagttgatgctatatgttcgatggagtggtattggctcttggcatcgaaatcccaagtatctgtcgggggaaattatcctataagaatttggagatggaagggttatcttgtacagtacacctttgttggcaacgaaggtccagctgctcttcttgtgcacggctttggagctttcctggagcattttcgtgacaatatagacaacattgctgatatgggccagcgcgtttgggcaattactcttgttgggtttgggaaatcagagaaaccaaatgtcaactattcagaacttttctggtcagagttactgagagactttattattgatgttgtgagggagcctgttcatcttgttggcaactctattggaggctatatctgtgctattgctgctggtttatggccttctcttgcaaagtctctggttcttttaaacacagctggttcagttgttccaaattactccttcgtcccattgagtgaagaaaaacaaacatcatggctttccaagttgcaggcacagcttcttttgctcttcttgagatcaagagtagaaggcattcttaaagaatattatcctacaagaacggaacgggtggacaagccacttgtggaccagattataagagcttcttatgatcctggtgctgcaacagttcttgagagtgtattcaacttcaatctttcaattcctcttaacttcttatttgattcttttggaggaaaaatattagttatccagggtatgaaagatccccttacaaaatctgaggcatttgttaccatgctccgagagcattgcagcaaggttcaaatcagagagttgaacgcaggtcatgctccacatgatgaagttccagatgaagtaaataccttactgtttgaatggatgaaacagattgaagtaaaaccagccctggagaagaccaaggcaatataggtaacatttagaattctggaagtaaaaccagccctggtgaatccattggctgattgtttaacatgaccttcggaagcactttggtaacaccttttatcagtgtcctgctagcaattatttaagtgaacctgtacataactgtgtatgtataccacttttgacttttaagctttgccatctggcagttaatattgagatgaaacaaacaaaaattatttcttctcttgatcgcattgttattgttt

SEQ ID NO: 15276 - DNA, 303 bp, Setaria italica
  Peptide Sequence Number=SeqID_81250
ttactgtttctatcagagtacaagatatactctgtgatttttttctttttttcccgtgctcctttttgcagggtttaacaacgaaatattagacatccatagccagaaaatagcaatatatgccacattttatttattaactctgcaaatagtaagttcagcaagccatctaggttatgcttgtcatactctaaacagaagtgatgaagactggagtacatcatagcctcaagcggtcaagcctataagtccccataaatcataacagaaaagcatgtgacaagagcaatagcgctgaaaacg

SEQ ID NO: 15277 - DNA, 265 bp, Setaria italica
  Peptide Sequence Number=SeqID_81251
attctcacaggaactttgcagataactacttcagtatgacaacccgccaggaacttgcaacctataatcaataaatataattacagacaaagattacctaaagaaaattagagatacaaagccacatgccacggaaaagaacctcaggacaaaactaattaacaaaaactaggattctaactaaattcgcaatatcatcgcatcaccacacctaaatccagcactcaaaaccgacacttctaaagcttagtgaatggggaaacca

SEQ ID NO: 15278 - DNA, 322 bp, Setaria italica
  Peptide Sequence Number=SeqID_81252
gccccggggctccgcctccgcgccgccgctctcgctgcgggcccgagcctccatgcaggccgccgcgcccctgccgcaagggcagggcggcccgccggtgcacggcgtctccaacacggtcgtcggggtgctgggcggcggccagctggggaagatgctctgccaggccgcgagccagatggggattaagattgtcatcctggacccccttcaggactgcccggccagctctgtttgccacgagcacgtcgtggggagcttcaacgacggtgacacggtccgggagtttgcgaagaggtgtggggtcctaacagtggagatt

SEQ ID NO: 15279 - DNA, 1217 bp, Setaria italica
  Peptide Sequence Number=SeqID_81253
gcttcaggctccatcgctgccggatccaacaccgccggagcgccctccactgcgacacctccgggggaaaccgaggagatgaggctggtggggttgacgggcgggatcgcgtccgggaagagcaccgtgtccaacctcttcaaggacgccagcgtccccgtcgtcgacgccgacgtcgttgctcggaatgtagtgcagaaaggtactggaggttggaagaaaattgtaaaagcctttggggaagaaattttgttggacaatggagaaattgacagagctcgcttgggacaaattgtgttttctgacccatcaaaacgccaacttcttaaccgtcttctggcgccacatatttcttctggcatattctgggagatggcaaaactgtggatgaagggatgcaaggttgtcgtcctcgacatcccgctgttgtttgagacaaagatggatagatggacaaatccagtcattgttgtctgggttaatccagaaacccagatcgagaggctcatgtcaagagatgggtgctctgaagaacaagctcagaacagaatcaatgcacagcttgcgctggactggaagaagtcggaagcagacatagtgattgacaattctgggtcactggatgacaccaaacaacagtttcaggaagtgttgaggaaagtctctgagcccttgacatggaaggagcgcttgagatctagagatggtctgatctctgttgtcatgtgtacagcagtgggggtattacttgcccagaagaacctgctatgatcctgataaggtttaggaggttaaaaacggtgatctgttgtttcaggagacctgcacaaataagcttgtttggtctcttaggagtcttgaaattggatggcagcatttgaaacatttagtgatgaaacaaaatctgcaagatttactgttttgatgtagaaattactcaataccagtgccatgtagcctgtttgagtggagaaaactgcccatctattttctcagttgcttttacctgattctggttcaagtcatggaactctgtttgtagggtttgttttactgggccaaatattgcttcaaaccatatggattggcaggatgggctaagaattagaactcaattcagcccatccgtgtggatataccattttgtcaggcaaacgaagccttcgatgccaatttgtgcatgcgcattcatgttagtgcgtgaaatgaaacttaaa

SEQ ID NO: 15280 - DNA, 2878 bp, Setaria italica
  misc_feature (2845)..(2878): n is a, c, g, or t
  Peptide Sequence Number=SeqID_81254
agacctaccactcctctctccctcctcgtggtgtcgctgcaggctgcagcagttggccagcctgcccccgctcctccaccttcgcgctcctgccgtcaggcggccagactccgggtcggcatctcctcgttgttctgccgttactgaggcctgaagtgctcgcgcacagcgatgcaaggtactagtattgctattgagattgatggcgaggccatctgtcttgacagtgtcggagatgatgaacaagaagctcaggagaatggagagatgcagcaaataatttacggtgctgaaaatggggagcaagtggccttcgacaaccaagaacagggaagggaggaagatcctgcaggaaatgaagaggatagggaacatacttctataatcccaagctgtgaggagttgactgaagaattgcggaataaagttgcatacagtgaggaagaagcttacaggctgtattgcgactatgggcaccgtatgggcttcagtgttcgaaagggaaagcagtactactttacaggaaccaaaaccatccgtacaaaagattattactgctcaaaagaaggtttgaaggatgatgagcagcttactgaggcaaactttaataagccagagaccagaactaattgcaaagcgatggtccgttttagagttgattctgaaggtcaatggcgagttattcaaatcattcctgaacataatcatgagttggtcaggccagaagagatacacttactgagatcagtgaggaccctttcagttccgaaacctggtgtgcttaatgcaatggtgaatgctgaaatccaagcaatgcatgacagtttgcatataaatgaagatggtacggaatgtcacagccagcttagcatccgtagttacacactgcttgaaccagaggactgtgaggcccttgttggatatttcaagcgcagaacaaatggacaaggtatgttctattgggatgtagaagtagatcaagaaggcagaatgactaatttcttttggagggatgggagaagccgggtcgattatgacagtttcggagatgttgtgatgtttgatgcatcacatcgtaccaacaagtataatatgatatgtgccacatttattggtgtgaaccaccaccggcaaaatgtcatgtttggctgcgcatttttgtcggatgaatcaccaacgtcctatgaatggttgttcaagtcattcttattgtcaatgggtggtcgtcctcctaaaacaatctttactggccagaatgaatcaatctccaaggcaattgaagatgttcttcctgggacacgtcattgtctttgtcaacggttcattgaaaagaacctgcagtcccatttaggcactatcaatgattctggaacatttcatagcatgctttcaaagtgcatgagagaatgtgagtcagaagcagaattcgatgaggcatgggcaatgatgcaccatgaatataacatgcaagaacaccagtggctcagcgatctgtatcagcagaggcataaatggtgcacagctcttcataaggatgcatttgatggcgggattgaatcattggataggagtgagggttcaaatgatgttctgagcagtattgatgatgaatcaacttcacttgccacctttgttcatgagctggataaaattgtagggagttggcgtgaaaatgagtctctagaggacattcagtgcaaccaggctgctccggagtgtacagttgagcatagcagtgttttgcaacatgctgctgaattttacactcacaagatctataagtctcttgaaacagattttctagatggatgcggtgcaacttcatatcaggaagttcagtgtgatgaaacattgtataggtttgagttcatcctgcaaagaagtggtccaaaagtttgggtagttttccttaacacctcaaccatggacttgagctgtagttgcaaaaaatttgagactatgggtgtactttgttcacatgctctaaatgcgcttggtctcaagaatgttgataggattcctgaaaggtatattttaaagcgatggacaaaatatgccagaaaaggaacatatccatttccagttgatggatttgcagaacaagatcgcagccatgcgcttgtgtatcgtaacagagctatgaggtttgtttatgatctattgatgaagagcaaaagtcatcaaaatacaagaaaactaattctggatgtgcttgaaagcggagaaaaatcgctggaaagtgtgtgtgaactgaaaagattgcatatgcatcccttgggaaaagagaaagatggaagtagggttgaaaagagaaagaaaaaatcaactaagcaagagaaacatccaagaaatgtaaagcaagcggttttgccccagccagctggctcggttttcgtcgatccaccaaatcaagatcaatattatgcagcggaagatattgcatcgaactcatctattggtagacctatcttctaccagggatatcctgctactggtgtttcaacaagtcagattcaggggcatacaaatatgcagacagtgcctcaatgtgcatcacaggaatattcagaatatgccgcagttcagccgccatctcaatttggtggtgaaagaaatttctgaagttgcgtaccattgatgtgtgaatatcttgttgtaattccttctactgattgttgtatgtgaatggtctattgaacctcctacctaggcagtaggcatcaacctagcaaacagcagaaataggtctctcttcctttttgtggatttgctaatttatgtactagatgtagatctgttactcgcttgtatggaatggaagcatcgtgttataagaactagacannnnnnnnnnnnnnnnnnnnnnnnnnnnnnnnnn

SEQ ID NO: 15281 - DNA, 380 bp, Setaria italica
  Peptide Sequence Number=SeqID_81255
tccctttgtcgtagtcttttgctgcgatcgttcaaccccccaaaatccatccatctgaactgaatttcgtcagcttgatcagtctgcagcccggctccgatcatcagacatggcgaacgcggcgtccggcgtggcggtggcggatgagtgcgtggcgcggttccaggagctgcggacgggccgcgcccaccgcttcgtggtgttcaaggtcgacgactcccagcagcaggtggtggtcgacaaggtgggcgccccgggacgccggcttcggcgacctcaccgccagcctcccccccgacgactgccgctacgccgtctacgaccacgacttcaccgtcggggaggccacggccgccggccccgggggagaggcgccccgc

SEQ ID NO: 15282 - DNA, 1264 bp, Setaria italica
  Peptide Sequence Number=SeqID_81256
tggaaacattatcccatattagcatatttcacatttatataaaaatgtatccagaataaagctccatatgctcgaacagctgaagagatattgacgcagtcccagtccccaaccaacaacaatgtcttcagcactggcaaatattctgagagaccatagatctcttactctattgaggcaatgccgcctccacctccttccacccctcattatccgggaacttctccttcatcttctcaataatcccctttgcctcatcgatctttgagctcccagcaagcccattcacaagcatcttcatggtcgagaagcatggcacccaattcttcggttctatctcattgtataatccaagcgcagtatcaaaatctccaccacgacaaaggaaatgaatgagcatatagtagaagttgcaatccccaaccaaccctttcattcccatctccttgtacagacgctttgcttcttccaaatccccctccttacagaatccataaaccaaatggttgtaagtcacccagcttggctttgtgccctttttcaccatctcgttcactaacgccttcgcctcaccactccgaccgagtttgcacaaactcctcaccctcacattgtacactggaagtgtctcgccacaaccatgcttcttcatgagctctatcaccttcgccacgtcatcaaaccgctcctcattgtagaaaccagcgagtgcagtggtaaatgttctggcgtccggcttcacacccttcttgcacatttcgtcgaacaccgaatagaaggaccttatggtgccggactcggcaaaggatttgatgatggtgttgaaggtctcggtgttgggcttcacaccatgggcgtccgggaacgtctggaagatgcgggcggcctccgtgtggttcttggagacaatgcacgcgaagatgagggcgttgagggagcgggtggagggggaggactggaaagtggaaatggcatcggggaggaggccggcctggccgaagagcacgatggcgtggggcgcgtggcgcggggtgaggacggtggaggtgaggtcgcggagggtgtccggggcggaggagagcttcgacgcggcgagcgacagcgcgacgcggtcgatgtgggtctccggggagagcgcggcggcgcggcagatggagaggatctggtcggggggggcggcggggaggacttgaggagggagatggcgaggcgggtcttctgcagcgaggagagggggtgttcggggaggacgggttgaggatgg

SEQ ID NO: 15283 - DNA, 1584 bp, Setaria italica
  misc_feature (1570)..(1584): n is a, c, g, or t
  Peptide Sequence Number=SeqID_81257
gagcccaagccgccaacagcggaggagaccgccgcggcagccgccgccgccgccgccgctgctgccgcggccgccaaggagaggaaagaagagcagcggcggaagcagcgcgatgaggaggggctacacctgctgacgctgctgctacagtgcgccgaggcggtgaacgccgacaatcttgacgacgcgcaccagacgctgctggagatcgccgagctcgccacgcccttcggcacctccacgcagcgcgtcgccgcctacttcgcggaggccatgtcggcgcgcctcgtcagctcctgcctgggcctgtacgcgccgctgccgccggcgtccccggccgcggcgcgcctccacgggcgcgtcgccgccgcgttccaggtattcaacgggatcagcccgttcgttaagttctcgcacttcacggcgaaccaggcgatccaggaggcgttcgagcgggaggaacgggtccacatcatcgacctggacatcatgcaggggcttcagtggccggggctcttccacatcctcgcctcccgccccggcggcccgcccagggtaaggctcaccggcctcggcgcgtccatggaggcgctccaggccacggggaagcgcctctccgacttcgccgacacgctcggcctgcccttcgagttctgcgccgtcgccgagaaggccggcaatgtggacccagagaagctgggcgtcacgcggcgggaggccgtcgccgtccactggctccaccactcgctctacgacgtcaccggctccgactccaacacgctctggctcatccaaaggctggccccgaaggtggtgacaatggtggagcaggacctgagccactcgggctccttcctggcgcgcttcgtggaggccatccactactactcggcgctcttcgactcgctagacgccagctacggcgaggacagcccggagcgccacgtcgtcgagcagcagctgctctccagggagatccgcaacgtgctcgccgtcggcggcccggcgcgcaccggcgacgtcaagttcggcagctggcgcgagaagctcgcacagtcggggttccgctcggcgtcgctcgctggcagcgccgccgctcaggcctctctgctcctcggcatgttcccctccgacgggtacacgctcgtcgaggagaatggcgcgctgaagctcggctggaaggatctttgcctgctcactgcatctgcttggcgcccaattcagaccccgtgccgttaaatctgagagcaaaattattacagagctaaagcattactattactactagatctcacttgaggttcttgccaagatcttttgcctctgtttagctagctgctcaatttggtcaattctgagattaggaaaatgaaaacatttctgatcactaattgctagatctcttcacagtgatagttactgatgtaagcttagtttttcatggtagattttgttcagctgtcgatcatcttcatcaatcttgccaatcagtcaagttttcaacttcattttctaattagtagttccttttgcttaattatatagagtccttttaacaaaaaaaaaaaannnnnnnnnnnnnnn

SEQ ID NO: 15284 - DNA, 390 bp, Setaria italica
  Peptide Sequence Number=SeqID_81258
ccggcccaggccgaggcctacctccgcatgatccgcgaccagcagcgcctcggcctcagccagctccgcggggacagaggcggcggcggcggggaagccgaggccgacggcgacgaggagggggagacgcggaggaagggggtggcggcggggagctcgctggggcacagggtggacccgcgggagctggagcccggggagtacgtcgtgcacaagaaggttggcgtcggcaagttcgcctgcatcagcgccgaggacggcgtcgactacgtcttcattcagtatgccgacgccatggccaagctcgctgtcgaccaggccgcacgcatgctctacagatacaacctattgatgtccttttcaggcctcatgagaagaagagaccgacgg

SEQ ID NO: 15285 - DNA, 426 bp, Setaria italica
  Peptide Sequence Number=SeqID_81259
aatatctagatcaacaaaagaacgaagagcacatgctttctaatgtctaaatcgatcaaaaaaaccagcgctcgatcgagcgccgtatcctcacgagctctcgatgccggcggccggccggagcaggtcgtacttggcccagacggcgtcgagcgggcacggccgcccggcgtccagccggtcccagggcttccccttgccgctccagtgcagcaggctaacggcgccggcgtggagcccccggcagagcccacggtagttgtcgccaccgaggccgtgctggttccaccggtggtccaccgacgcgatgcggccggcgaacactagcaggaacggcggcagcgagcccagctcgtagatgcgcacccgcttctggagctccatccactcctcgatctgcgcggtgtaccccgcgcggcgccaccg

SEQ ID NO: 15286 - DNA, 707 bp, Setaria italica
  Peptide Sequence Number=SeqID_81260
aacccctccctgcggcggcgggggcggggtcgctggagccgccggacctgccccgcctcgccaaagccgcacgcatctcgctctcaccgcaggaggccgaggagttcgagcctaagattcggcaggtcgtcgattggtttgggcaacttcaggcagttgatcttgagtccattgagccttcacttagagctggtacagctgctggtagttctttgagggaagataagcctgaaacatttgttaacacagatgcaatagtagaggccattccgagctatgatgatccatatatcaaagtgccaagagtgctgaacaaagaatgatgtagtctgtatatgaaaattgttagaatgttgaaactctgagccattttacaacacatcatggttaaacaaaacgatgaaagctgtaaaaggttgaacagagcaatcagcaagctgagttgacttcgtgtcatttcaatttgataacgttgtatttcgaatcgagtgcttgagataggacagttttgaaacatctgcttcaggagttaccctaaaagggcagttgttttatgctttgtgacatgcatagatgactgcgcatccccaagttaatctgtttccaattccttggagattgtgctctatagtaaaactgtgaaaggtgttgttaatcagcttcagctaaaatgggtaatatcaaagcccactggttctatagtaagg

SEQ ID NO: 15287 - DNA, 654 bp, Setaria italica
  Peptide Sequence Number=SeqID_81261
ttatcactgccaattacccaaggaataataaacatcggaagagctagtatgcaatatgctgtggaagaacaccgggaaacaaacgttgtgctatgatttagtttatgaaattggtaactatctggaaaggataaagtcgacgtgatgcactgtgctgttatcgatttgctagttgaaaggttagcatttccaacatagccacctgtggatatagtttgatcagattggatgtttgccatttgtagggatactaatgtgagataatggttcttgctgatgtggcatagtgggaggataatgccctgaagaatagtttatatatattaggctcgtatggtggttctgtgtcatcgagtggttcttgatcacaaaatggatggttcttgttactgttttgtgtttatgacaaggcatataaccaggattttttatgtttgttttagaaaaatcaagctcaactttgggggtattggattttttatgtttgtttgtatttgttgtgagaaatcaagcttgactgtttattcggaactaggcactcattgttttaacttcttcctttacaggtttgagcaacttcaggcagttgatcttgagtccattgagccttcactttagagctggtttgcatcttgttgacgtcttgtcaattga

SEQ ID NO: 15288 - DNA, 406 bp, Setaria italica
  Peptide Sequence Number=SeqID_81262
aaaaaaaacaagcgaggaagaacgaagaagagacgcccccgccccgcctcctaccaagcccgtctctccccacctccgccgcaccgactcgtcaatcctcgtggcatcctccccccggcgaatctcacggcttatggtaagcggtgagtgatctaccactgacagtgcaagaatggatggaaatagtgagaacatccaattctcatggggaaagcgtagagcaaagggcggtgctaagatggatacacagttttatgagtccttcacattggacaatgtgaaatattcattgtatgactgtgtctatctgtttaagcatggtgatccagaaccatacatcgggaaaatagtgaagatttgggagcaaaatcaggctaagaaagtaaaaattctttggttcttcctc

SEQ ID NO: 15289 - DNA, 362 bp, Setaria italica
  Peptide Sequence Number=SeqID_81263
aacgccgaccatgtccacgacgagcgcggcgaggggcgcgtccgcggccagctcccgcgcgcggcgtcgcggcggagatgggcgtcccgttctacatgttcttcacctcgccgtggatgacgctgtccctgttcctgcacctccccgggatcgacgcggcgcgcgccggggagcaccgggacgccacggagcccatccggcttcctggctgcgtgccgatccacgctcacgagctgccggcatccatgctcgccgaccggagcagcgacacgtacgccgggttcttgtccatggccaaggctgtcaagggagtcgatggcattctcgtgaacacgtcccgcgacattgagcccgcggtgggc

SEQ ID NO: 15290 - DNA, 749 bp, Setaria italica
  Peptide Sequence Number=SeqID_81264
attcgaaagctcttggggtagatattgagaatctgattgtctgccagcctgacaatggagagatggcactagaaattgcggaccgtatgtgcagatctggagcaatagatctcatctgtatcgattcagtgtcagcgctcactccacgtgcagaaattgaaggtgagatagggatgcagcagatgggtctacaagctcgtctgatgagtcaagcattgagaaagatgtcaggcaatgcttcaaaggctggctgtactcttatgttcttgaatcaaataagatacaagattggagtattctatgggaatcctgaagtcactagtggagggatagctttgaaattctttgcatctgttcgcctcgagatacgctccactgggaagataaaatctgccaagggagatgaagacgttggtgtgaaggttcgtgtcagagtgcagaagagcaaagtctctaggccctacaagcaagctgaatttgaaatcatttttggagagggtgttagcaaattggggtgtgttcttgattgtgctgagctgatggaagtagttgcaaagaagggttcgtggtatagctacaaagatatgagattgggccaaggcagggaaaaggcattacagtatctccgagagaacccaacaatctgtgatgagatagaaaaggtggttagagctatgataccagaaggaaccagacatatgagcctactagcttttgggcagtcatcattaactgaagtatttcataca

SEQ ID NO: 15291 - DNA, 706 bp, Setaria italica
  Peptide Sequence Number=SeqID_81265
catttatttgttacctataaatttcacaatttcaccctagattttctgaagaacagcatacatgtgcgcccgtggcttgcagagagcttcaagagggacagccttaaacatgatggtgccggtgcctgttgccatgtcaacctctccatctccaatcctgctccaatcgaagcactggagcagcaccccgagaaccagccccatggtccgcatggcgagattctccccaggacacttgcgccttcccatcccgaatggcatcataaactttccctcggctctgccatgctcaaacctttccggtctgaactcctctgggttctcccatattgccggatccctgtggatggcataggcattgacaaggaccatcgaccctaccgggacatcatatccatggatcttgcagtcggtggatgcctcgtgaggtagtagcatcggcgcggcagggtacagccggagagtctcgttgatgatgcagtggaggtacggcagatggggaaggtcgttcttgtcaagaagacgatcccctccgacgttcgagtcgatttcttcttgcgcctttttcagtacatctgggtgattaagcaggagagtcattgtccattccatagtcgttgaggtcgtctccgtgccggcgccgagaatatttcactgccacgagagcgctgataaaggtatccgtgtacacgtctggctctgtttt

SEQ ID NO: 15292 - DNA, 514 bp, Setaria italica
  Peptide Sequence Number=SeqID_81266
caagggcactgccagaatgtcgtaatccttgggcgcctgcagcgcaattcaccaagaattattgttcatccatgtttacagttggttgctgccgatcagaaccttggagcgatcaggattcagcaaggtagaacgtcacataccctgggtaacttgcgcagcttcatgtttgcctgctccagtgtcttctgacccttcctggagttgcatcttgaacaggcagtcaccaaattttcccattcccatttaccaccacgtgaaatcggaataacatggtcaattgtcaagttgtcccgagaagagcaatattgacaggtgaattcatccctgtaaagaatgattacgtgaatcaaatctgaacactagaagggaaaaagagaacttcacacccaatgcaatgtaaacactaatcttcctcccatcgaaaaatcatctgtctttgtccagcaaagtgccgcaaatgacaaaattagaaggaaaaaactaatgaaatacttgaaaattgaacaaaaat

SEQ ID NO: 15293 - DNA, 242 bp, Setaria italica
  Peptide Sequence Number=SeqID_81267
attgaaggaggctgtccaaatgatccgtgaatatctgaaggacgaaccatggctaacattgctctgcaagaagctgcagctggatatgaatgagatcatcaaagatacaacaaccaaaactagtgaagcttcattttacgcagacagttctcccgcacctgcttgcccctctgagagtaaggtggcgaatggtagtgccaagtcaagcaaagggcgggcggcgaagaagccaaagacggagg

SEQ ID NO: 15294 - DNA, 464 bp, Setaria italica
  misc_feature (408)..(464): n is a, c, g, or t
  Peptide Sequence Number=SeqID_81268
cggaggccgtccgcctcagtcctgagaacgcccgcgcccacgcgatgctcggcgagtgctacgagaggaaaggccaggccgcccaggcccgggacgccttcaagaccgccgcatccatcgacccgaagctcaccgctgctctcgacggtctccgtcgggtagacgggggcgacgaaggcaatggaagtgactgatgatcctgctactggtgaacattaacttctgctgtatatttggggtggagtgcacgatacccttgaccttgaggtccaaaagtggtaaatgtgatatgtcatgcagtctttctgttactcgttaccttgaagatggtacctaccttggttcaccattgtatattaatggatttgcatttttagttgaatgaagtttatgatttgtggctaaccnnnnnnnnnnnnnnnnnnnnnnnnnnnnnnnnnnnnnnnnnnnnnnnnnnnnnnnnn

SEQ ID NO: 15295 - DNA, 470 bp, Setaria italica
  Peptide Sequence Number=SeqID_81269
aattcactttgcagagtggaactacactacaaattcacttcaattcacttttagcatctacttgactactaggaattagcaaattcagcatgtttaaaggtatgcaaaggttcatggcaagatcaagaagtactgaaatttaagcagctctgaatgaagaaggttggagttcagacaaggtgggtaattcaggctcagatcatacctcggccgtgcagagcagcctggtggaagcagggcaaccgcgtccgtcagtccttgaagatgactgtgtcggcgatggcgagtagcgggccgaggcagtcgggcgcgaacttgcgcgcgaacatgtgcgggtgtgtgtggttggaggcgcggagctcgtcgatgagccgcggcgtcacctccgccgcggcgtacctgtgcgggtgccccgcgacgctccccgtccagttgacgcgggtgagcgtgtaccgcgcgacgccggcggg

SEQ ID NO: 15296 - DNA, 641 bp, Setaria italica
  Peptide Sequence Number=SeqID_81270
aggggaggaggagaggaactgaacactttttcttttccttttctcccaaaagacgtgggggatgactcaaagtctgaacgaactctgaagatgcaaacgaactgcaaagaggaagggccacagctttccttgtcgctgggcccggctttgatccctgcaaaggatcatccaaacggagttgttagattcagtggaccagtagctagcagctttgattgattgatcgatggaaattggcaaatgtgaaacgaaaccaaccacgacaaacctaatccgcacggaaagatcggccgagatagtcaaatgaggaggcagtgcgtggcagcgggcagcgctggttagagacttcttcgattggggggattattaggatatcgttgtcaactctacgacacgtccgtgcatgacctcggtaggcaaccgagagtacaaagttttcttggccacctgcaggacagggttttccatttgcactaatggaggcagcggctttcgttgcaaattgcaatggcatgaagcaaagcaacatcggagtgggttcatatgagatttaagttggggccgtactaatttgcagtgtcaaatgaagaagaacagagctgaattgctgcactgacaaaaccacctctttgttcaaccat

SEQ ID NO: 15297 - DNA, 1081 bp, Setaria italica
  misc_feature (1)..(32): n is a, c, g, or t
  Peptide Sequence Number=SeqID_81271
nnnnnnnnnnnnnnnnnnnnnnnnnnnnnnnntactttttttgtattaaaaaattctgcaagcaaccttttggttatgcacgtaagctttacttacacgacagcagagtccacaagcaacaagctgtacaagagggagggttttatactacataggcaaatccatcacctttttatgcattcaggcagccttctttggctgctccaggtaaacacatactacaccggatggatcatggatcatctgatgacgatccctgcaaggctgcaacgccttccgcttcgcttcaggccgttgcttgctttgctttcttcttcttcttcttctctagtctacatacaggaagtacagaagcactgatatacaactagtacaggggaggaggagaggaactgaacactttttcttttccttttctcccaaaagacgtgggggatgactcaaagtctgaacgaactctgaagatgcaaacgaactgcaaagaggaagggccacagctttccttgtcgctgggcccggctttgatccctcggccgtgcagagcagcctggtggaagcagggcaaccgcgtccgtcagtccttgaagatgactgtgtcggcgatggcgagtagcgggccgaggcagtcgggcgcgaacttgcgcgcgaacatgtgcgggtgtgtgtggttggaggcgcggagctcgtcgatgagccgcggcgtcacctccgccgcggcgtacctgtgcgggtgccccgcgacgctccccgtccagttgacgcgggtgagcgtgtaccgcgcgacgccggcggggtcggccatgtcgagcagcgtcgggaagtagtgctcctccgggtagcactcgtcctgcgccgcctcggggaggcagggcgcgcggaacttgcgccagaggcggcgctcccggaccacgagcacggcgtggcggcgggcgagcgtgaagaactgggagccgatgcggaagcgctcgtagggaacctccgggagcatggcgccctcgccgcgcgccgcgtagcgcgacggcatctgcggctcccccgtcagcacctcgatgtagctggggagccgccggtggcgcgcggc

SEQ ID NO: 15298 - DNA, 397 bp, Setaria italica
  Peptide Sequence Number=SeqID_81272
ctgtgcagatactcaatccctctggcgatgcccttgatgatggagatcctcgtggaccactcgaggacacggccgccggcggtgtcatcggcgtcgacgtcgaggaactgcgacaggcagccgttgggcacgaagtcgtagacgaggaagcactccccgcgcgccctggagcagcagaacccccgcagcgccaccacgttgtcgtgccggagctcggcgagcagcttgaggccccggaggaactcggcctcctcctgccggcagcacgtcttgcccagccgcttcacggcgacgggggtgccgtcgcgcagcgtacccctgtacgtggccgccaggccgccggccttgttcctcccgcgcctcccgaggaggttgagctccgagaagtagcgcgtcg

SEQ ID NO: 15299 - DNA, 248 bp, Setaria italica
  Peptide Sequence Number=SeqID_81273
ttgggctttagcgctcgctcgcgtgcgtgactgctgctgcgctccgcctccattccttcgctcgagaggcttcgatctccggccgcgcttcggtgcatcttaaaggagattttcatatactttggtgaagatgaagagaacccgaagggcgcagtcaggaaaatcccactcatggtggtgggatagccacattagtccacaaaactctaaatggcttgctgagaatttagaagaaatggagaagcaag

SEQ ID NO: 15300 - DNA, 1120 bp, Setaria italica
  Peptide Sequence Number=SeqID_81274
tactaattagggtacctaagtaaacgtagaacgccaccgtgctcgcgttctggccggcgctgaccaggatcctcttccgcggcggcctccagaaggggctcgatgcgcggcggcgccagaaggagctcttcgtgccactcatcgaggcgcgccgggagcgcaagaagcagctggacagcccagttggtggcggggccgccgcggaggcgccggagaaggagacgacgttcgggcactcgtacgtggacacgctgctcgacatcaggctcgccgacgaggggaaccgcgcgctgaccgacgaagagatggtgaacctctgctccgagttcctcaccgccgggaccgacacgacgtccacggcgctgcagtggatcatggcggagctcgtcaagaacccggccatccaggagaagctctacggtgagatcaaggcggcgtgcggcggcgagcaagaggaggttggcgaggaggacacgcacaggatgccgtacctcaaggccgtcgtcctcgagggcctgcgccggcaccctccggcgcacttcctgctggcgcacaaggcggcggaggacatcgaggtcggcgggtacctaatccccaagggcgcgacggtgaacttcacggtggcggagatgggctgggacgagcgggagtgggacaggcccagagagttcgtgccggagcggttcctgcccggcggcgacggcgagggcgtggacgtgacgggcagcagggagatcaagatgattccgttcggcgtcggccggcggatctgcgccgggctcggcatcgccatgcttcacttggagtacttcgtggccaacttggtcagggaattcgagtggaagggggtgcccggcgaggaggtggacttggtcgagacgcgcgagttcaccaccgtcatgaagaaaccactccgcgcgcggctgctgcgcagaaccgctggctgaatgccccagccatcgccgcgtctgagtaggtagccatcggcagagtagctatctgttggacggacggccagacggggaacgcctgcgaaaacgaagccgatgggattcctgggccgggccgagaactccgggagttttgggctgcgtaaattgctttatctggtggacgcttt

SEQ ID NO: 15301 - DNA, 497 bp, Setaria italica
  Peptide Sequence Number=SeqID_81275
ggaagagggtcttgaagtatcctgccatgatagcctccatgtcgcacgtgtcggcgaccctgggcatctggtagatgtcgcgcgtgtaggcgtggaggctggggtactcggccagcttccgcctggtgcaccggaacagcgtgttgtagacgaggtcgaaccggatcagcgtcgtgaacaggcacacgtcggcgagggtgagcctgtccccgcacaggtagcgggagctggcgaggtgggcctccagcctgtccagcgcgccgaacagctcgctcgccgcggcgtcgtacgcctcctggctctgcgcaaagccgcacctgtagacgccgttgttgacgctggggtagatgacgccgtaccagcggtcgatgtcctggcgcagctccgacggccaaaggtcgaggccgccgccgccgccgtcggcgtccgcgaggccgcagaggtacttgatgatctcgatgctctcgttgcagaccacctcacggcgctcggcgtcc

SEQ ID NO: 15302 - DNA, 235 bp, Setaria italica
  Peptide Sequence Number=SeqID_81276
ctctaactcatatatgggacgagagttgtgcacagctgatgtcattgttggaggtttgatcaaattggtgtgggctacaagccaccttgagagcccatgccctggacctcctaactgggatcagatgttcagcaaggaaagggtagctcaggcaaatgaatctttgagaattctgggagccttccgcaatgtaatattctgcggagacatgaactgggatgataaaggagatgga

SEQ ID NO: 15303 - DNA, 271 bp, Setaria italica
  Peptide Sequence Number=SeqID_81277
tcttctaatttcgaggctttttctggtggagagaaaaaaaggaaacaaggagcggttgaaaacaagcaccggagtttctctcggatttgtacggggaccgaagttcttccgtaaattcgtgcgagttagcgtgctctgaaggagagaaaaatcctatccgctccgaaggcaaaaggctcgtacttccgagagtgagtgaaagactgagggagagaagggggacggaggcgcaatgcggcagagatctcctgccgtgctgcttcagctgcgg

SEQ ID NO: 15304 - DNA, 368 bp, Setaria italica
  Peptide Sequence Number=SeqID_81278
ggcggcgccgccggacatctcctcgatgtcgtccctgttccccagtatcacgcgttaggtttgcgagctccctgaggtggcggctctccccgtaggccttgagcagcgtggtcacgttcttcttcgggtccggccgcgacagcgccaggatcatcggcttgtgcgggttcgtgaagaacctcagcacctcagaccagatggggggcagcggattcttggcctttccggggctgatgagcgcctgcaggtcgccgtcgccgtcgccggcggcgaggtcccccgtgtcgacgtagctgaagtccatgccgggcgggatgacgaccatgcgcggcatgtagcggccgaggcagctgacgccccggcggcgg

SEQ ID NO: 15305 - DNA, 238 bp, Setaria italica
  Peptide Sequence Number=SeqID_81279
ctaccatttccagactcagggtaaaaagtttcgtgtatatgatgccaagcatggatgagccccttcttggcaacggtgttgagaagaccggaggcgcggtactgactgagctgagaaagcagctgtaccttgctgggcctctgatcgcggcatggctcctgcagaacctcgtctccatgatctctgtcatgttcgtcggtcacctcggcgagcttgccctttccagtgcctccatccg

SEQ ID NO: 15306 - DNA, 255 bp, Setaria italica
  Peptide Sequence Number=SeqID_81280
ttagagccggacgcactcgcccacatcctccggactgaggccgccgtctcgggcatttcccgcaaggccgcggccgtgcggcagcagtccacccgcctctggccccgcgccgtcctcgaggccctcgactccgccgtcgccgcctcccgctgggagtccgccctcgagatcttcgagctgctgcggaagcagcactggtacgagccgaggtcgcagacctacgcgcggctgctaatgatgctcggcaggtgccgg

SEQ ID NO: 15307 - DNA, 777 bp, Setaria italica
  misc_feature (50)..(50): n is a, c, g, or t
  Peptide Sequence Number=SeqID_81281
cctctgggcataagagatctcagctcagtgcgtgtggggcttacttgccntaaaagcgtgcccctgcttctcgcctcaagccagctcagtgagaaatagtgcccctccatgcaatgctttggtctatgtggtaactggcaactggtttgaatggttcgacacaatcagctgggaggcaggggcaatttgatctttttgtcagagcatagtcagcaaagaggaggcaatgaacagttagtggcatggcatgctttcctggcgccaagtcatcaaatgcacccaacttgcaaatgcaaaggatcaaaataaaccttacgggacaaagtgaaccttttgctaaacttgagggaccaaaatggttactaaccctatttatttaatacctgcccatgacctgaaagctcggacatcttcaatccttttgttctgagcttcagttttgtcatgcagggagttcaaattcctatacaggttcttgtgtagcttcaggaagacatgcctgtatttccacttgtcgcagtgaatattatgttttgacatgtaactaatgacctccatcaccctcgaaaaatatccacctttaaggaaattcaaaatcaagcaatcaagcaagtccctgtccacatctagctctccatattcaagtctgcgctttatttctccccaaagcatggtgatctccctatgcatgtccattgaagaataactgcacagtatgtggcaaaaaagtataataagtgggcctgataatagttagttactactacaataacgaca

SEQ ID NO: 15308 - DNA, 221 bp, Setaria italica
  Peptide Sequence Number=SeqID_81282
gatgatgctgttggctcaacttgcaacggtgcatcgttgtcttttgtcctccatgaggaagttgtggagttcaacaaatgttgtatatgtgtgtaggtgtgtctgtatcaatcagtagtgctattattttgtaacaatattagggttccatttctgtttcaaactctattttaatttaaccccattaagtattatgtgtgaaattcaatatttaattcaaa

SEQ ID NO: 15309 - DNA, 2046 bp, Setaria italica
  Peptide Sequence Number=SeqID_81283
cggtggcggcggccgccgcggtgtcggccgcgggggcgaggccgacgtcgatggagcggaccgtgcgcacgctggaccgccagatctcgcagttcgtggccatggaccgactgatctgggcggactcgggcgacgccgacgcgttcctggaggcggtcgacgacctcatcggcaccgtgcaggagctggatgccgcggggaccaaccgcgccctgctcgaccgcgcggacgagctgctcagccgctgcatggcgcggctggaggacgagttccgggcgctcatagagcgccccgacgacgcggcacccgtcgcgccgggcgggttcgggtcggacggcagcgacgacgaggacgacttcggcggcggcgacggctacggcgacgagccgatcccgatcgccaagccggtcacggactacgacgtcgtcatcgacgctctctcgccgggctccatcgccaacgtgcaccagatcgccaagaggatggtggacgctggcttcggccgcgagtgcgccgaggcatacgccgcggcgcgccgcagcttcgtcgacgagagcgtcgcgcgcctcggcgtccgcccccgcaccgcggaggaggtccatgcctcaccatgggaggagcttgagttcgacatcgcccgctggatcccggccttcaacatggtgttccgcatcctgattcccagcgagcgccgcctctgtgaccgcgttttcgacggcctcgcccctttcggcgaccttgccttcatcgccgccgtgcgcacccaggcgctgcagctcatatcgttcggcgacgctatctgttcctcaagccgcgcgccggagcgcctcttccgcgtcgttgacatgtacgaggctgtgcgtgacatcctccctgaccttgatcctgtgttctccgacccctactctgcagcactccgtgcggaagtctcggcgatgtgcaacacactggggtcctccatcaaaggtatatttatggaattggaaaatctcatccgccgtgaccctgcccgtgttgctgcccctggtggccacatacaccctatcactcggtatgttatgaactatctccgtgctgcatgtgggtcgcggcagacattggaagaggtgatggaaggtgacttaggtgctaatggaggtgcacctgtggccgttgaccctgaccgccccacctcatcacttgctgtgcacatcgcatggatcatggatgttcttcataagaatttggatacaaagtctaaggtttaccgtgatccatcacttgcttctatcttcttgttgaacaatggcaagtacattatacagaaggtgaatgacagtgagttaggtgttttactcggtgatgagtggatcaagcagatgacaactagagttcgtcgctggagcatggattatcagcggacaacatggggcaaggttacaactgtgctgcagactggtagtccaggcattggtggactcccagccaaggcgatgctacagaaactgcgtatgtttaacacatactttgatgagatctttgcggcacaatcagaatgggtggtagcagatgaccagctaagggtggacatcagggctgcagtggaggattcagtgatgccagtttacgcctctttaattgccaagttgaagtcttctcctgaaaccgggcgtgatttgtacatcaaatacaccccagaagttgttgtagaccgcatccatcacttgtttgaaggagcagcaaagtgataaattagtcggtaacctgttatgctgcagcttctgcttttttgaatttgtgaagaggctatcatgggttttggattcgtggttaatatcttgtagtcacatatgatgatgctgttggctcaacttgcaacggtgcatcgttgtcttttgtcctccatgaggaagttgtggagttcaacaaatgttgtatatgtgtgtaggtgtgtctgtatcaatcagtagtgctattattttgtaacaatattagggttccaattttgttacaaaataatagcactactgattgatacagacacacctacacacatatacaacattt

SEQ ID NO: 15310 - DNA, 365 bp, Setaria italica
  Peptide Sequence Number=SeqID_81284
atagtcctccatcggatgattcgtcatccctcttacaagattatagccataacagaccttgacctgcccctgacagcctttccctttaccagatgctgtcaatagaccatgatccgaatgttgagcgcagcgtaattgaaaataggggtggctttgtttcgaatatgccaggagatgttccccgagtatgcggtcagttggctgtctccagagcttttggagacaggaatctaaaatcactattgagatcagagcccgatataaaagtcgaagacatagatcacacggcggagctacttgtcctcgcgagtgacaacctcctgattgttcataaccttccaaaactactcacactgagtcggaga

SEQ ID NO: 15311 - DNA, 1326 bp, Setaria italica
  misc_feature (1291)..(1326): n is a, c, g, or t
  Peptide Sequence Number=SeqID_81285
cacatcaacaagatcggcgacatgatagtcctccatcggatgattcgtcatccctcttacaagattatagccataacagaccttgacctgcccctgacagcctttccctttaccagatgctgtcgaaccatgtccggtgaactccgagcaaccgaagcagcataaccttgccatatcttggtaattccctctcagttccaatccaggaactgaaattttaaaaataaaacaaaaaggagagggcgaattcgcaagtacccacagccaccgagacacctctattgggaccagaagctgagcctttaagactattgttgtactactagtcttgttcttacgaaacagtggcagagcactaatatttgcggataattgctgaactcactaagtgcactaacttgaagattgttaacgagtgcatacacattgtcacgatcaactctgtggaaaccactcacttcacatgagttttgaagctagcatatgttaatttccaatatagtcatagttgcaggaagataacattaatattttttctttcacgtgggaactctttaattcttttaatatgcagtacctagataagcaattaagcaaaattacgtgcctaaaaataaacagaactatgtaatttaaattttctgtttacaacctattgaatctgacgctataaatttcaggagatgttccccgagtatgtggtcagttggctgtctccagagcttttggagacaggaatctaaaatcactcttgagatcagagcccgatataaaagttgaaaacatagatcacactgcggagctacttgtccttgcgagtgacggtctatggaaggtgatgaacaatcaggaagttgttgatgtggccaaaaggtacaaggatccatatgcagctgccaggcaattaactgccgctgcgctaaaaagagagagtaaagatgacatatcatgtattgttgttcggttcaaggcgtaaatggattgcaggcgactgacggaggattttcatcgagagcagagaaggagtaaattaggccgacggtagtggtaatccaatggatgaataattacagggggcattggtgtaaatgatttgttggctccagtgtaagttcatagataaatgtattctaggattgtttggcttggcgatttcaaaggtacaggtgtgaaggcccgagagctatctaaatatagctatcatttgtaaataatggttgcagatattggaagttgaccgtgctccattgtgaatttatgagagtagattgagcagaaatttggaaaattnnnnnnnnnnnnnnnnnnnnnnnnnnnnnnnnnnnn

SEQ ID NO: 15312 - DNA, 278 bp, Setaria italica
  Peptide Sequence Number=SeqID_81286
gcttccggccttcgcacccatcttccttccaggattgggtgcgatattccatgaaaagggcgcgatttagggaggaccgtcgtgagcgaagtcgacctgtgtcccgagggaagcatcggtggctgtggggggcttctgaattttcttcccttttcttttatttttgagagggaatcccgagcgtatggcaaggttttgctgctttggtgctgggttctcagaggtgagtctgcttttaatggctttctgtatttcatcattcttttgcgtcatatata

SEQ ID NO: 15313 - DNA, 1243 bp, Setaria italica
  Peptide Sequence Number=SeqID_81287
cttaaagatcagatgaagtttgtattttgtttgtgtgcatcaagtgcttgtgagagtgtatccatgcaaatttttacagctactccaggcatctaggaacaaatgtaattgggagagcaaccaaggaagggtgtgagagtgtggatatgcatgcatgcatgcaaatttagagctgcttcaggcaagcatacaatagtgctcttggcttcttttagaattttctctagagcaagggggggccacggcccaccttggcctcaacgtggctccgccagtgatcattagcacttcaaccatatcactttccttgttgttctgcttgtatacagttcaccgggcatgggtcaacagcatctggtaaagggaaaggctgtcacggacaagttaaggtctgctatggctataaccttgtaagagggaagacaaatcatccaatggaagactaccatgtcgctgattttgctgaagtgaagggaaacgagcttggtcttttcgctatttatgatggtcatctaggagataccgttcctgcgtacttacagaagaatctgttttcaaatattttgaacgaagaagaattttggacacatacagatagagcgatcataaaagcttacgagaaaacagaccaagctattctgtcgcatactccagatttgggacaaggtggctccactgctgtaactgccattcttgtaaacggcaggaagttatgggtagctaatgtcggggattcaagagctgttcttttgaaaggtggtgagcccatacagatgtcaatagaccatgatccgaatgttgagcgcagcgtaattgaaaataggggtggctttgtttcgaatatgccaggagatgttccccgagtatgcggtcagttggctgtctccagagcttttggagacaggaatctaaaatcactattgagatcagagcccgatataaaagtcgaagacatagatcacacggcggagctacttgtcctcgcgagtgacggcctttggaaggttatgaacaatcaggaggttgtcgatttggccaaaaggttcaaggatccatatgcagctgccaggcaattaactgccgctgcgctaaaaagagagagtaaagatgatatatcatgtattgttgttcggttcaaggcgtaaatggattgcaggcgactgacggaggatttccatcgagagcagaaatgagttaaacggcacgacttaggccacctgacgatggcagtggtaatccaaag

SEQ ID NO: 15314 - DNA, 770 bp, Setaria italica
  Peptide Sequence Number=SeqID_81288
agtgccacacgtccttccacaacatcgtcaacatatttgtagatctcatcaataagaatgtaaagcttttccattgaagactccattccttccaggtcattgggaagcttctccaccattgtatatttcaggatctcaaatccagctttctccgcctcaatcatccttagatccagagggatttcctggaattgcgcagcgaggtgcctatctccaagggacaggttggatgagatgtaggctttgatggaagcctcccccctagtgaagccagtgtcaactgtaagatggatggggttttgtacttcccttgaatagaagtcgtggataagtgtactcccccctgaaacaccaaaaccagtcgagaaccatccaacgataacttccttggggttgaccttttggtgcgaggcgtacatgttatggtggtactcgatgtctatggcgacctggtcggcggactcgctgtgcggcacgacgtaggagttgcggacatggacggtgccatcggggaggagggatccgaggagggtgccgatgacgcgatccgcctggtcggggcggcgcacgtagctgtcgcagatgttgaagagcaccaccgcctcgacccgcgccgaggacggggaggaggatgaagaggtcgaagggaagaggagagcgggggaggtcgccatggtctcgacggagggcgagcgaatcggaggaggcttgcttctgctgcggcggcctgcgggggcggcggcgcgacggagagagaaggggtccccgtt

SEQ ID NO: 15315 - DNA, 1295 bp, Setaria italica
  Peptide Sequence Number=SeqID_81289
cttcaatggaaaagctttacatcttattgatgagatctacaaatatgttgacgatgttgtggaaggacgtgtggcacctgacaacagaattgggaggttcatctctgaatccgttgcttcaattgccaaagttgtctccagctgcttttgataagcttttcaacgacaagattcaggataaccttgcactggtatacctgtcaagcatcacaaggacacaaatcagcatagccgagaagttgaacactgctgctcaagtcctgtaatactagcgcgtgctggagctgcatctcaggtacagctgacactacatcattcaccaagttcggcacaggcagatacagcatcattccagatccactacacatgaggcgattgtgcagcacatatcttgatcacattggcgttcgacgcagtcattaactgtatcgccataaaatcaacaagcattacaaatactcaactagaagcagaatactatccaaaacgaaacgtctcggcctccgccgctctactagcactatgggatcccatcttgactgattctttccttctgatctcatttaacaagaacaaaaattgaatttctgccaccaactgggcacatgcccaaaacatcataaattgcatcaattcatccacagatgccacgccaccgaaattacaggacttgagcagcagtgttcaacttctcggctatgctgatttgtgtccttgtgatgcttgacaggtataccagtgcaaggttatcctgaatcttgtcgttgaaaagcttatcaaaagcagctggagacaactttggcattgaagcaacggattcagagatgaacctcccaattctgttgtcaggtgccacacgtccttccacaacatcgtcaacatatttgtagatctcatcaataagaatgtaaagcttttccattgaagactccattccttccaggtcattgggaagcttctccaccattgtatatttcaggatctcaaatccagctttctccgcctcaatcatccttagatccagagggatttcctggaattgcgcagcgaggtgcctatctccaagggacaggttggatgagatgtaggctttgatggaagcctcccccctagtgaagccagtgtcaactgtaagatggatggggttttgtacttcccttgaatagaagtcgtggataagtgtactccccctgaaacaaacccctagaaatacttagtacgtaaactaaaactccaaaaaactaaaaagataaaaccaataaggatgacacaacttcaaaaggttttggcttcta

SEQ ID NO: 15316 - DNA, 640 bp, Setaria italica
  Peptide Sequence Number=SeqID_81290
accaaacagtcagctgcagaatcgtcttttcataagttgtcagcaagcatcagcatctccttgagtgttgctcaactcttcagcctaattgatgtttaggcacctctattgaaactaaaacagcattccatatccaagaaactgataacacagcctcggctcagtccttacctccatacaagtgatacaactgcttttaaatagtgaaacttgcaaacagaaactccttggtgttcagaattgttcctggcatgaagagtaacttccaggcgaacagttaggtatgatattatttggtttctctggtagaagtagcccaatgctgccctcaagcttggcgccagcacactgttgtcttgatgcatccataggagagcctcaatgctgctggaagcagaatggcttcaccatctcacattttgtttgaccccataaatttgttttttctctcagcaggtttgagaatttggaatgagcacatcaaagtttcatcaacgctcatcatcgcaccagcgttatcaaattcaccacaataattggggggggaccgaagaaataataggtagaacgaagactagtactagtacaagaacaaaaagaaaattaacaataaacccaaataacctaacaaacaaaccta

SEQ ID NO: 15317 - DNA, 1834 bp, Setaria italica
  misc_feature (2)..(2): n is a, c, g, or t
  Peptide Sequence Number=SeqID_81291
cnctttttagtttttttttttttttttttattaaattgaaagcatgttcgctaagcaaaaagaaaaacagaagcgcccatgtcacaccataacaaaaatgtgcacatgtgaattccatgatgcaagtcaaagacacgaaacgcctaattggcaattaatctggccaacagatcaaaattcacgatgtccagaatactaatctgaccggaaaaccaaacagtcagctgcagaatcgtcttttcataagttgtcagcaagcatcagcatctccttgagtgttgctcaactcttcagcctaattgatgtttaggcacctctattgaaactaaaacagcattccatatccaagaaactgataacacagcctcggctcagtccttacctccatacaagtgatacaactgcttttaaatagtgaaacttgcaaacagaaactccttggtgttcagaattgttcctggctggagaaggaaatcgcctcaggtcaatttggcaacttcatccttccataatcaatatatctacagctacatgattgttccacacgcggtaacaggaaagaggaaaaaaattcaggcacttgccatgaagagtaacttccaggcgaacagttaggtatgatattatttggtttctctggtagaagtagcccaatgctgccctcaagcttggcgccagcacactgttgtcttgatgcatccataggagagcctcaatgctgctggaagcagaatggcttcaccatctcacattttgtttgaccccataaatttgttttttctctcagcaggtttgagaatttggaatgagcacatcaaagtttcatcaacgctcatcatcgcaccagcgttatcaaattcaccacaataattgggggccgagaatatggtgacgagctgtctgtcagcaaagaattcatacccatcctcaacaacctggtgagcacgacaaataagatcaagatcatgcttttccaagaattctgaaaccttgtcagcaccgaaggtatatgagacccctctgtcattcatgccccacccttgaacatcttttcctggatctgaccaaagcaaatcacacagtagaccttgatccggtacatcggttggacgttgcaagttctttatctcatccaagtgtgttagatcaggtgagagtccaccatgcatacataatattttatcatcgattagagcagccacgggaagagtgttgaaacattcagtgaagactttccatagccgcacattaaatcggcgcttgcattcatcataaaatccatatattctgtttattgaagcacattcatgattgcccctcagaagaaaaaagttctcagggtacttgattttgtatgcaagaagaaggcatatagtttccaaactttgtttgcctcgatcaacataatcacctaagaatagatagttggcttcaggaggaaagcctccatattcaaaaagccttaaaagatcactgtattgaccatggatgtcaccgcagatcttgatgggcgcctcgagctcgaggaggttgggctggctgaggaagatgtcgcgggaggcggtgcagagctggcggatctccgcctcggagagctgcacctgcttcccggggcgcgcggtccgcacctcgagcaggcggcggatgatgtcgtcgaggagcgcgttgtccatgcccccgccgccctgccctcccgccgccggcgccgccgccatcccctctcccggtctgggctgggctggagagagatagatcggtggagctagggtttccggcggcgcgtcgggaagggggcggggagggagggagggagggaagagagagagattgcgcg

SEQ ID NO: 15318 - DNA, 412 bp, Setaria italica
  Peptide Sequence Number=SeqID_81292
agaaatagggaaatctgctagtgcatgatcagccttcagaaatgcacctcttattgccttttcaacattgttggggaaatgcatatcttcaacaatgaatttgagtatgttcttgcgaacaaagcatgctgcatctgtaccgccatgaccatcaaacaccccgtagaaggcgcccggggcagggatgccggcggcgcgccccccgaggtgctcgatgaggttgtccacacatacgtgctcgtcctccatatacgacttgggcccaatctcagcgcagctccccgatcggaacacgggcaggaaccccggccggacgtccgtgggcgagatcaagctcagcgtccccaaatccatgccgtagtcggaggacgcggcggcggcggcgatgcgcatgctgctggcgcagtggcgg

SEQ ID NO: 15319 - DNA, 1151 bp, Setaria italica
  misc_feature (157)..(157): n is a, c, g, or t
  Peptide Sequence Number=SeqID_81293
aggattgagatcaggcattcctgtccagagactcccctagagttaaatgcaacccttccaaggaatgcttcttcggactcgggatcttgggatgtcaatttgaggggtggattggatgagaaacatataaccacaacagtcaagttatcataactancccgtttcagcgcttcctggactagctcacttgagcacctctctgggttgtttatgttgcatcagttctttccttacgatcgtcacagcacactgactggtcatcacatcccaaagcccatcacagcctattattaagaactcatcttcttcagaaagtacaatctcctgcagctcaggttctgcactcagagggctaattgagcctttcgggcctttcatgtgccaatctccaagtgcccgtgctactgctagctgaccattaagatagccgtcaaaaacagtaccacctagtttttcaattctaatcttctcactcttgcagttgggtttatggtctctcgatagttccactgcccgacctctttttcctagaacagctcgacaatcacctgcattcgcaacgaacagtgtcctgccaaatataagagccgtcaatgcagtggttccagaattgttgtcaagggaatgggaatctgctagtgcatgatcagccttcagaaatgcacctcttattgccttttcaacattgttggggaaatgcatatcttcaacaatgaatttgagtatgttcttgcgaacaaagcatgctgcatctgtaccgccatgaccatcaaacacgtgaatgtgacctgagatgccaacgagaactcaccccgtagaaggcgcccggggcagggatgccggcggcgcgccccccgaggtgctcgatgaggttgtccacacatacgtgctcgtcctccatatacgacttgggcccaatctcagcgcagctccccgatcggaacacgggcaggaaccccggccggacgtccgtgggcgagatcaagctcagcgtccccaaatccatgccgtagtcggaggacgcggcggcggcggcgatgcgcatgctgctggcgcagtggcggatcgaggtgagttggtggcgcggcggcttgccgacaccgacgtccatggaggggctgtccggcggggtctgcggctccacgctccca

SEQ ID NO: 15320 - DNA, 335 bp, Setaria italica
  Peptide Sequence Number=SeqID_81294
gaattgtccaaagcaggaaccttattctcagaccttggggatgaactgggacattcacttttaacatcagaagttgccggataggaagtgcagaagttgccattacattttcaggagctgctgatgttaaaagtgaattgtccatagcaggaaccttattctcagaccttggggatgaactgggacattcacattccagatctttgttattaggagaagatgaaggggaaacctttgattgaggagaatggttatctgaagaatttgatgcaaccgcctcaggtacctttttccgactcacaatcttctccatcttgcctgtaatttgaaaccaa

SEQ ID NO: 15321 - DNA, 1419 bp, Setaria italica
  Peptide Sequence Number=SeqID_81295
taaaactaaaatttaaaccaaaagtaaaataacttttaagtttaaattaaggaagaaagaatagaaaggggaaacctttgattgaggagaatggttatctgaagaatttgatgcaaccgcctcaggtacctttttccgactcacaatcttctccatcttgcctgtatttgaaccaggtgaattagtactagtaacattttcaggtgatgctggtgttaaccctgagttgtcaaccgcaagctccttattctcagatcttggagctggactaggaacctcacggtcaatatcttggttatcaggagaggacacatggaaaatcttcgattggggagactgattaactgaagcattggatgtatctgcttcaagtgttctttgctgattcatgatctcatccatcttgcaaatatcggaagcagacgccaaaggggctgaatgtggactgcagattggaacactttctgagtgactcagcatgccagatggcgaactagaacctctgtcttcaataggagttgctggagcacagctcatagactttgcagaagcaatagaagaatgaagttcgtcaacaaagtttggattggttgttgaacttaagcaagagccttcatgctgacttgaagcggtcctggactcggacggactccaagcaaacacaggactggagacatctttcccgactcgttgagtaggtagattttttgatagatcccgccttgaattcagatctttaacagatccacattgtgaactacctttagaatcatgttgacattgcgaccatgaaacatgttgattctgatgagattccgtattaccacgtccactaccactcatgtgggctgtggttggactccatagggctgcgctgctgtgacggtggttcgattcaccagagcatcctccatgtattccattatggtgcaagtctgtttgcccatatgaattcccaggagattgaataaaaactgaatgttttgtctggcactgtgcttggctattcacagtacgaacatccttgggtggaaccgaactagttgacagtgacaagctatcatctggagagtacacacactctctttctggagcataatacttattagactgaacagttattccagaagaaccagccacactataaccaacaggggatagagcattggtctgatccacacttgggctgttcattgtatgtctagtgccagccaatgttaccttgctacttgtaagtgatgcagcttgattaaaatctttctgctgttttgaaagcacttcagtcaacagcaatgatctctcttcactctcaaatgttagccaaactctcagatcacgtgggaagtaacttgtccactttgatagctgcaaagagtgaatgggccctgaacaatcccagcaggatccttgtagtgccag

SEQ ID NO: 15322 - DNA, 2818 bp, Setaria italica
  Peptide Sequence Number=SeqID_81296
gaattgtccaaagcaggaaccttattctcagaccttggggatgaactgggacattcacttttaacatcagaagttgccggataggaacaatgtgttcttcatcagcaagttaaatcatccagtaacacagaaagatcagaagctaaaccaatcaatcagacatcactgtttccaacacatcgggcgtatcagtacgtgaagagatcgtggtggtacaattgctgttccatcgaacagtgtcaagatgatacagaccctgcccaaaagctgaatctacttgttggggcaagcacattcggtcatacctctatgctaaacatatactccttgctacagttgagtggagcagagatggtcatttacgctctgttgactacattgtaattagcctatacaaagtggaaagatatgacaaagaattttaaaacctatttctgctgcagagatcaaggatgcaggtagctacaagatgcacccttcctccctcgtcaaatttacattagcccctagtgtgcccttttgaagtcgatcttgatgacccaccactgccaaatctatcagacctactcctagagtgatttgaactaagaagccaagactcactgatctgagagtacctgccacggtgatgattccgctggatgccccgattagcattaccagaaggtgggttcaagccctttcgggtgtttccaatgacctctcctgaactagaaatactggaatcggtggattcctgcttccttggtgcttcccatgtctttttacttgagggccctgctttttcattactggacatgttgagattctggctagtgctccatgtagtaccctcatttaagttctgattggctgatggctgccaacctacaactccggtactctcatctactgacgacattgacatatcatttggtattgatgggatctgctcgggcaatacccaatctgtgggtgcacccaagttcacctggttcacattgtcctcccctggcactaatcctcctcgaacaatttcattattattaccatgggctagaactacctcattgataccaaaagctaccttcccctcagttccaataccagatgaaggctggagtgtaggtcttggtgaaagcaatgaccacatattgttgattggatcatcttgggcaccccatagtgcagaatcaacagcatcaccttggtagtaactaggttcaccccaaggagatagtgcaatagggctagagcattgtggttcttcctcgacagaagtggctaggaagtcctccaaatcagttgttccttgcatgtacgaagtcccacacctttgttcttccattaaagattccaggacatccgacacatctatcgactcagcaccatatgaaagatcaattaacatgtttcctcttgtaacaacagtagattcactttgacagtatagttctttttgaatagtttcttcacatttaaaatctgactccatcgcacctaatcccccagttgatggaccagacttgtgtgatacaaaagcatctggtgagtccacatgttgcttagttaaattttcaggtgctgctaatgttaacacagagctgacaacaacaggttcatcaagctcaggtctaggaaccccagttggtggatcagacttgagtgatacaaatgcatctggtgggtccatatgttgctcagttaaattatcagacgctgctgatgttaacacatagctgaccacaacaggttccttaatctcaggtttaggatttgtactaggagaagatacagggaaaaccttggattgaggagactgaataactgaaccatttgacgggtttgcttcaagtgttcttttctcattcaaaatatcctccatcttgcatatatcgggagtagatgcagaagttaaattttcaggcacaattgatgttaaccctgagttatccatgacaggctgctcgctctcatatcttggagttggacgaggatattcacactccatatcttggttatcaggacatgaaaagctagagtgaggaggctgattaggtgaaacattcgatgcatctgcttcaggtgttctttccttattcaagatctcctccaccttgcatgtaccggaagcaggcgcagaagttgttggtagattttcaggccctgctgatgttaacactgacttgtccacaagagggtccttactgccagatattggatttggacgaggagattcacactcaatatctttatcatcaggagaagacacagggaaaatgtgagtgtgaggaggctgattaagtggagcatttgatgcatccgtttcaagtgttttttgctgattcacaaactccatttcgcatgtatcggaagcagatgcagaagctgtcgttaggttttcaggtgctgttgatgttaacattgagttgtccacaagaggttccttactgtcggatcttggagtaaaactaggagattcacgtccaatatcttgataatcaggactagttacagggaaaatgtgagaatgaggaggctgatacagtggagcatttgatgcatccgcgtcaagtgttttctgctgattcacaaagtcctccattttgcatgtaccggaggcaggaacagaagttgccgatagattttcaggagctgctgatgttaaaagtgaattgtccaaagcaggaaccttattctcagaccttggggatgaactgggacattcacattccagatctttgttattatttgatacatccgtgtcaactgtttttgctgattcataaagcctctatattgcgcgtgtaccgggcagaggtgcagaagttgccattac

SEQ ID NO: 15323 - DNA, 402 bp, Setaria italica
  Peptide Sequence Number=SeqID_81297
cgaaggtggcgttgatgttgggctcaccgtagatgcggccgcggaagaagaggcaccgcgcccgccccacggtgtgcgcgccggagagcgccgtcatgtcgcgcgccgagaggcctttggcggcgaacgccgagacgagggacgcggcgctggagcccggaccgggcaggttggcgttggcggcactcgggctcgccgtgcgcgagtccttccggccgagctgcacgttccacgtcgggcctccgagcaaatttacggcgtcacgagatgccaaggcgacgatgtcagcgcacgacacggtgccattgcaggccgcttctacctgcgtcttgatggcgtcgatcacctcgtacccgcggacggagttggcgttggcgccggcattcttctcgccggtgaacg

SEQ ID NO: 15324 - DNA, 448 bp, Setaria italica
  Peptide Sequence Number=SeqID_81298
aattgaatcccagcacgcaggtggtctactccgagaaccctgacagcaccgtccccgccggggcaggcgaggggcgtcgcggtggtcttcgcgtgggtgtggagcgacgaggcgcagctgcggccgttcgtcgagctctacgcctcgctcgggtggcggtgcctcgtctgccaccccgacctcgtcgcgctatatctctctgagaaagcaacatcactggcaactggtattattagtgagctggttaaggaactgaaagtaaagcctctgccaaccgttcttgcttccttttctggtggctctaagggatgcatgtataaggttattcagttactagatggaagatgcgaaggggatgcgaccatgaaggactatcggttagtgagaaactgcatctgcgggcaaatttatgactctagccctgtagaatttaccagtgatgtgggca

SEQ ID NO: 15325 - DNA, 852 bp, Setaria italica
  Peptide Sequence Number=SeqID_81299
ttttacttttaggttttttaaaaggttttaaactttttgtttaaaagttttaaaagtttccttttctttgttccctctgccaaccgttcttgcttccttttctggtggctctaagggatgcatgtataaggttattcagttactagatggaagatgcgaaggggatgcgaccatgaaggactatcggttagtgagaaactgcatctgcgggcaaatttatgactctagccctgtagaatttaccagtgatgtgggcacccagtttctccaaaagtctgcagttggaaattcatttcagtcatccgtattacgttcatggatggcaaaggctttggcatctggcatggatactctcttcccaagcagaattgaagctcagcgtgcagagtactggcacacactatactcatcagcaggattgggtcctgttcttatattttgctcagaagatgataatctcgctccaagccatgttatctgtggttttgcgaggcgtctgattgaactaggcacagatgttaaacttatgaaatggagcgattcccaacatgttggtcattacaattcacatgaagctgaatacaggacagctgtaaatgatatgctgaagaaagctctcattaccttctgccaccgaagccagctgtatgactcaaatatggcaggtgatcgggaatacaagatagcgcattcagtctgcagtctacacaatgcggcagcaaattcaaatgagagcttaagaagggttgccaacagtcctagtgatcacttcttcctgccaagttcgaaggatcatgacgagtctagggaaccaggttctctgattgaagaccagaggcgccactttattcc

SEQ ID NO: 15326 - DNA, 850 bp, Setaria italica
  Peptide Sequence Number=SeqID_81300
agaattgaaagaaccaagaaggcgaccaacttaatacccaataccaacccaagacaataggagacctaaaaggaaaggcgtctgatttacacagatgtggagcgattcccaacatgttggacagctgtaaatgatatgctgaagaaagctctcattaccttctgccaccgaagccagctgtatgactcaaatatggcaggtgatcgggaatacaagatagcgcattcagtctgcagtctacacaatgcggcagcaaattcaaatgagagcttaagaagggttgccaacagtcctagtgatcacttcttcctgccaagttcgaaggatcatgacgagtctagggaaccaggttctctgattgaagaccagaggcgccacttatcccatccacccagcatggagcctaaaggagtccttggccagatcctgtttgatgtttgtgttccaaagaatgttgaaggatgggacatcaagccgacagtatcctcaaatgggcggccaacattcgcttcagcccggcaacttggcccgttcaatcccatcaagtacttcagacgttcaagactatagtttgttgcaggagttgagaattttgtgtatatattggaggcaaggtatctaatgataactctgagcaagatttcacctatgtaagttcccttgaattgtttctattttccttttgcaccgcttggcgagagaatgtgcatatgctttgtatatcatatgagtgtgtattagaaatgagatcgtggacataggttttaggtgggttgtaaggtgcatactaacaatgaatagcgaagggaatgattattatgcctttgtagtttcctctaaaaaaaaaaaa

SEQ ID NO: 15327 - DNA, 1946 bp, Setaria italica
  Peptide Sequence Number=SeqID_81301
cccatctttccatttccgacgtgttggctgataagattacgacaacaaaatacatcagaaatggttttcactgccaaagcatacatctagtcccacatttgggtaatgatagcagatgataacttaaggcagcttgataaatccagttttgcaacagagcagctacaaaattcaagacagtgttttcatcttaggaacttgacactgaggtttcttgtcaaggttgcgagagttgctgacgaaggcctctgcgaagctctgcgtgctcccgcgatatcaccgcctgaaaaatctaagcttcctcgtctcttcggtttctcttgtctatgtactataaccacccctctatttagaggcatgtccatgtggctggactttgctgctcccaacatttttcagactaccattctgatgctccttgcttacagctgacttctcttctgcaaagctgccaccaccgtttgagctcccattgcattctggtttctcctcagttgtgtacgatctgtttgttggcgagctctttggagaaagatggccattagacatctccttgccagcaatcttgttctgcaggtaagctgatgctgaaccttgtggagagttaggttcaccgtgaccaggagaacctggcatcatctggtgaggcagtgggtggcctgatcccggaggaaggaacaccccagtaccaggaccagggaatcgcggcggaggcggccttggagtagcttccggtatccaagctgctgttgtgttcggcaagggaacagctggcgtgaaaggtatggctgcagcagaaacaggagcaggggctacaaatattggctgcattccatcagatggtgagacgtgatgaggtccaacagctggcgctggaagaacaccacttgcaggagcatatccaaagtgtttaggactttggggatggcgtgccatgttacccggccttgatgacggaccccacggcataggaggtgtcaatggaggagtaaaccgagcactttcagctgggatgtgctttcttgctacagactttccaaaactcagtaggattcggtgcttacgtgtagcaggaatagctcgtttggcaaggtcagcactttgcccttccaggagtagaagtgacccagctgtgagcgagagcttcaggggacctctatgatcacctcgttctcctgatatagctcggccaaacaccatatcacaatctgttaagcagagcgtacaaagaggtctaccataccaaggaggggagtggtgaggatgtaagtagtctccctcattgaagaagtcaataacacaataatctggtttgaaagctataatttcctgctgagacaagcgatcaaacagatcatgcagcagcccaggaaccggctccacccttgtctctctttgattttcatcatcaggagggccttcaatgataggaatacccatctgaacaatttcccttccatgacccttcgttggtcttttaccaattataactgtctgcccagcttcaagaccccctcgccggcaagaagcttttgtttcattaactaaagtaagaatcttatttgtctcggccacatttaccaacccttcataaaccttgagcccttcaacagaattaaccttctttccatcaacgatttcagtggttgaatgctctacaggggttggaaccactttgctgcttccttcagaaacagcttgcagctttgaatttttttcaccttcatcaattataggagaatccaaccgcaagcttttagtatcaaccatgttctccacttctttcatcacctttccttccttgtgattgtgaatatcacgtccatctttatcggatccagctgccgggaccgcgccgccgccgcgcgccggatcggggcgatagtgtccgccgtggcgatggtgctggtgggagtggtgggactgcgagaacggttggcgtcgag

SEQ ID NO: 15328 - DNA, 376 bp, Setaria italica
  Peptide Sequence Number=SeqID_81302
tcttcttcggcgggctggcgaaggccgccgacgtgtacaccggcaacccggtggggtcggcggtgacggcggcggacgtggaggtgctgccggggctcaacacgctgggcgtgtccatggcgcgcacggacttcgcgccgtcgggcggcgtcagcccgccgcacgcgcacccacgcgccacggagatcctcttcgtcgtcgagggcgccctcgaggtgggcttcgtcaccgcggcgaactggaggctcctgggccgcaccgtccgcgccggcgaggtgttcgtgttccccgcggcctcttgcacttccagcggagcgtcggggcggtgcccgccgtggcgatctcggcgttcaacagccagctgccggggacgcag

SEQ ID NO: 15329 - DNA, 311 bp, Setaria italica
  Peptide Sequence Number=SeqID_81303
cctttctattagaaagacgaaccacagattcagggagtgctagtgctacagctaatgatgaatacccagtaaagatgccgacttcaatgcagcgctgtgccccaagaatctgaaccagcattgctaacagctgagcctgtgcaggagaaacctgcatctgacttcccttcatggcagccgtctcctcgcggagctcccggagaacggggtgctcgcggacgttggcgaggaggtagtcgtatagcggcggcgtcatcccaagctgcttccgcccgcgccgcgcctcctccaccgccgccgctgcggagtgg

SEQ ID NO: 15330 - DNA, 830 bp, Setaria italica
  Peptide Sequence Number=SeqID_81304
agattccagagtatgtgcacgtctcccagaactgccgccacctgctctcccgcatcttcgtcgcaaacccctacaaggtgcattccctcccatttctttgtgctcccgatcgtgtccaccgacagataacaaaactatacatgtatatatctgcagaggatcaccatgagcgagatcaagagccacccctggttcctcaagaacctgccgcgggagctcaaggaggaggcgcaggcggcctactacagccgccggggaggaggagacgccagcgccggcgccggcggcagcgccaccagcaacaatgcccccgccgccacgttctctgcgcagagcgtggaggacatcatgaggatcgtgcaggaggcgcagacggtgcccaggccggccaggcccgtcgccggctacggctggggcgccgcctcggacgacgagcaatacgacgacgacgacgacgcacaagaccaggaggaggagggggaggaagatgactacgacaggacggtcaggcaggtgcacgccagcggggaattcgacatgagcaagctccaaatctgaccttagtgatcggcaagccacagcttaattagcatggattttgtgttcctgttttcaacattgatttttttttcttctctttcatcatatattctaagttgttagcgttgctatttctcagttccaacctccccgcttgagatgtaattttcatctccaccgccaccaggaaaggcagagtcctacatgtcattaacacgcgagctgacagcatacaccaccaggttactcaatggcatgtagtttcagtccgacatatataagcacaaggc

SEQ ID NO: 15331 - DNA, 579 bp, Setaria italica
  Peptide Sequence Number=SeqID_81305
acctgtcaaagctagccacctgctccgactcagctccacccacatccttcccttccctcttgccctgtcgtcgtctctgcttatctccgccctcctcttcctcgtcgtcctcatcgtcttgcggtctagctactagctcgaggagaattcaacagcaagaggaaacagaggagaattcaacagcaagagcaagaggaaggaagaagcatggagaggtacgagcccgttcgggagatcggagcgggcaacttcggtgtggccaagctgatgcgcaacaaggagacgcgggagctcgtggccatgaagttcatcgagcgagggaacaggatcgacgagaatgttttccgcgagatcgtgaaccaccgttcccttcgtcaccccaacatcatccgcttcaaggaggtggtcctgacgccgacgcacctggccatcgtcatggagtacgctgccggcggcgagctgttcgagcgcatctgcgaggccggccgcttccacgaggacgaggcgcgctacttcttccagcagctggtgtgcggggtcagctactgccacgccatgcagatctgccaccgcgacctc

SEQ ID NO: 15332 - DNA, 1097 bp, Setaria italica
  Peptide Sequence Number=SeqID_81306
tcagctccacccacatccttccttccctcttgccctgtcgtcgtctcttgtcttatctccgccctcctcttcctcgtcgtcctcatcgtcttgcggtctagctactagctcggtagctccacctccactcctctcctcgatcgatcggttaagatagaatagataacgtagctgggcagctaatcgcagaggagaattcaacagcaagaggaaacagaggagaattcaacagcaagagcaagaggaaggaagaagcatggagaggtacgagcccgttcgggagatcggagcgggcaacttcggtgtggccaagctgatgcgcaacaaggagacgcgggagctcgtggccatgaagttcatcgagcgagggaacaggatcgacgagaatgttttccgcgagatcgtgaaccaccgttcccttcgtcaccccaacatcatccgcttcaaggaggtggtcctgacgccgacgcacctggccatcgtcatggagtacgctgccggcggcgagctgttcgagcgcatctgcgaggccggccgcttccacgaggacgaggcgcgctacttcttccagcagctggtgtgcggggtcagctactgccacgccatgcagatctgccaccgcgacctcaagctcgagaacacgctgctcgacggcagcccagcgccgcgcctcaagatctgcgacttcggctactccaagtcctccgtcctgcactcgcgccccaagtcaacgtcggcacgccggcctacatcgcgccggaggtggctctcccgccgggagtacgacggcaagcacgccgacgtctggtcctgcggcgtcacgctctacgtcatgctcgtcggagcatacccattcgaggatccgaaggaccccaagaacttccgcaagacaatctcggtatcatactcttgcttttgcttgcttgcgcatatacatacatgtatgcatatgtaatgcttttgcgctgcagaggatcatgtcggtgcagtacaagattccagagtatgtgcacgtctcccagaactgccgccacctgctctcccgcatcttcgtcgcaaacccctacaagaggatcaccatgagcgagatcaagagc

SEQ ID NO: 15333 - DNA, 1764 bp, Setaria italica
  Peptide Sequence Number=SeqID_81307
ccgtgaattacctgtcaaagctagccacctgctccgactcagctccacccacatccttcccttccctcttgccctgtcgtcgtctctgcttatctccgccctcctcttcctcgtcgtcctcatcgtcttgcggtctagctactagctcggtagctccacctccactcctctcctcgatcgatcggttaagatagaatagataacgtagctgggcagctaatcgcagaggagaattcaacagcaagaggaaacagaggagaattcaacagcaagagcaagaggaaggaagaagcatggagaggtacgagcccgttcgggagatcggagcgggcaacttcggtgtggccaagctgatgcgcaacaaggagacgcgggagctcgtggccatgaagttcatcgagcgagggaacaggcggccttgccttgccttgccttgcctgcaattcaattactaatcatcaattactagctattagatcgacgagaatgttttccgcgagatcgtgaaccaccgttcccttcgtcaccccaacatcatccgcttcaaggaggtggtcctgacgccgacgcacctggccatcgtcatggagtacgctgccggcggcgagctgttcgagcgcatctgcgaggccggccgcttccacgaggacgaggcgcgctacttcttccagcagctggtgtgcggggtcagctactgccacgccatgcagatctgccaccgcgacctcaagctcgagaacacgctgctcgacggcagcccagcgccgcgcctcaagatctgcgacttcggctactccaagtcctccgtcctgcactcgcgccccaagtcaacggtcggcacgccggcctacatcgcgccggaggtgctctcccgccgggagtacgacggcaagcacgccgacgtctggtcctgcggcgtcacgctctacgtcatgctcgtcggagcatacccattcgaggatccgaaggaccccaagaacttccgcaagacaatctcgaggatcatgtcggtgcagtacaagattccagagtatgtgcacgtctcccagaactgccgccacctgctctcccgcatcttcgtcgcaaacccctacaagaggatcaccatgagcgagatcaagagccacccctggttcctcaagaacctgccgcgggagctcaaggaggaggcgcaggcggcctactacagccgccggggaggaggagacgccagcgccggcgccggcggcagcgccaccagcaacaatgcccccgccgccacgttctctgcgcagagcgtggaggacatcatgaggatcgtgcaggaggcgcagacggtgcccaggccggccaggcccgtcgccggctacggctggggcgccgcctcggacgacgagcaatacgacgacgacgacgacgcacaagaccaggaggaggagggggtaggtaagtattgtacttacgtactaggtacggttctactaggatgactacgacaggacggtcaggcaggtgcacgccagcggggaattcgacatgagcaagctccaaatctgaccttagtgatcggcaagccacagcttaattagcatggattttgtgttcctgttttcaacattgtatttttttttcctctctttcatcatatattctaagttgttagcgttgctatttctcagttccaacctccccgcttgagatgtaattttcatctccaccgccaccaggaaagggcagagtcctacatgtcattaacacgcgagctgacagcatacaccaccaggt

SEQ ID NO: 15334 - DNA, 261 bp, Setaria italica
  Peptide Sequence Number=SeqID_81308
ccacgacggcgccgttgatccggcgccgtcgggaggggttcggcgccggcgcgcatcgccatgtggtgcgcgatgttggcgccagcgctctcgccgccgacgcacaggcgggagaagtcgccgtggtcggtgagccagggctcctcgccggacccggtggcgtgggaggccacccagcgcagcgcccgccaggagtcgtcgtaggcggccgggagcgggtgctcgggcgccaggcggtactcgacggagacgacgatggcg

SEQ ID NO: 15335 - DNA, 664 bp, Setaria italica
  Peptide Sequence Number=SeqID_81309
aaccggctgctggttcgtccagtgatggcggcgccggcgtatggttggagctagcgagagtctttttgtcatgcatgctcacgtactggatctgctgttgctttccaattgatagatcgtgcacgtgccttcttttcatttttaactatagtgtgttggtagtaggagtagctgctagcagttagcaggtatgcgcgcgcgtgccgctacacatgccagtgccagccacatgagcgactcttgtcttgtgtgcaggcctgcagggttcattttcactaccctgttgcctgttggacgctgcatgctggttcactagctagttgcaattatcaataagcatttcgccatttcggtatggtttgaataaaatgttgtcaagtttgcttatcacggtcacagatcatgacagctttttcgttcccctggaagtttggagtgcttccatatgtaatggattattttacagaccctgagtctgaagactttggtgccctgtcaggctatcaactcgatataaggctatcaatctgttgaaattactcttgtattcggaaatttagaatgatataaggcaacattatatttggcaataattaatgcacgtaatcagaggtccatttgctttctaaagaaacggcgagcacgtactagttgtcttgttgta

SEQ ID NO: 15336 - DNA, 839 bp, Setaria italica
  Peptide Sequence Number=SeqID_81310
gcttgatgaaatgctttccgtgtttggagaagttgtacatacagtcatgtggatcagtcaggcagaatttgtggcatagttaaaacaagaattttatccaaaactatgacatccatatcaagactgtagtgttgggaatgtgggaatgtatctgggcatcagagcgcaagtcaactttgcttcgtacacagaatgcaacagagttggaggtaatgagaattgagacaattttactttgtccatacaattaattctcaaatttgtagtgttcggattatttattaccccagaaccatgggttgtttaatcaaataatgctattattagtgttatgatttatgtgatagtgctagaaccaatgaagtgcagagcgccatgctgaaaaggtctcttcacaaggtgcttatgtgattttccataggaacttaacttgaactatatcatgcacatgccctttgtgcacccctatgatctgttaactctgtatatggtgaatttatgcccaaaaaaaattaagctacagtaaacatttttgtaaggcagcatcctggattttttattgtgaataattttgctcattcatcccctcctgtagacctatttaaatttctctaagtttcagctcatacgaatccctcacaactttgagaaattgtctttcacaagtgcttagtattcttttcattgtgtataaacataacaatatcttgttcctacagttctttactttacctggtgacttaagatcaaattgaggcatttctctggctttgttgatttatatttcgctgcatgtacttccagataatgtgttgaaagagctatgtttctccatttcg

SEQ ID NO: 15337 - DNA, 326 bp, Setaria italica
  Peptide Sequence Number=SeqID_81311
tttgcccggcatcttcaaaataaaagtctccaattgacagaatatataatcgatcatcaagataagctaaattgctacttaatttatatattgttttattcatgctttctgcctgatacgtacaattaatggatcggaatatatttgagttgaattgatgctaattaatgttactgcaacaactgaccatatatgtatatatttcatttggagtgagcagatgacggagaagctgtaccggcagctggaaccacgcaccaagaagctacggttcaccgtcccattcccgctgctcgcgttccccgtctacctcgtatgttctgaat

SEQ ID NO: 15338 - DNA, 344 bp, Setaria italica
  misc_feature (35)..(35): n is a, c, g, or t
  Peptide Sequence Number=SeqID_81312
ctcaaaccacctgctggtgcatcatgctcgcctcnctgctcgccatggcctgcaccttcggcccgatccaggtgctcaagatatacggcgtcccataccttgtaagtgtgtagtacacccagctagttattgtcaacaacttgtgtgttttgcttccaagcaactactcctccgtatcctttcctagctagtatttagtacttggttgaatcgatcaggccggcaagcaactcaaactgtaccaaaatggatgcatcacgcaggtgtttgtgatgtggcttgacctggtgacctacttgcaccaccacggcagccatgacctcccctggtaccgcggcgaggag

SEQ ID NO: 15339 - DNA, 588 bp, Setaria italica
  Peptide Sequence Number=SeqID_81313
agtccgtcccgcccaccacccaagccctccgccgcacgcttgccggacccgtccgagagctctcccacccgcgcggcgggtctccgcttcgcccccttcctgttagccatatgacgaggaccaacggcgcgagtggcggcggcggcggccagcaacaggcctcggcggcggggaagctcccccggaagcggttctaccgcgcccgggcgcacagcaacccgctcagcgattcgcacttcccggtcccggtgtcgcccgacgagttcgacctctcggagcactacccgcgctacttcccggccgataagggtagcggcgaggaggcgccgccgccgccgcggatccgctttgctgatgtgggatgcgggttcggtgggctgcttgtcggcctcgcacccctcttcccggacacgctcatgatcggcatggagctgagggacaaggtaactgagtatgtcaaggagaggatattagctttaagagcatcaaacccaggacagtacgacaacatatctgtcgtgcgcaccaactcaatgaagtacatcccaaactatttcaggaagctcagctcaccaagatgttcttcct

SEQ ID NO: 15340 - DNA, 848 bp, Setaria italica
  Peptide Sequence Number=SeqID_81314
cctgtcagctggaacaccaatgtaatgtggaaataactggtgaggatctctgttgatcctctggcaaccttggtggagccgcaggcagtactcgttccacttcttctgtagattcagtatttttgtattcaataccatctgatcatctctaaccttgactgcatcaaacccactgttaggatccatcatgctgccattctgcagcagagatggtagaccttcctggtgagcttcagctgtaatgccactccctctaatgatagttgcaatttcctgctcatatctatcattgcactgttggcaccgagtgcttgatggcatgagactatttgcgtcataggcatcgcacataaaacctccaaaaggaacaaatgactccatcaagcttgtacttgcgggcttggacaaggcagttgcagtggtggcgggaggcatgactccggcggctgcagtgcctgcgtcgcgcacggcggtgattggcaggagctggagctcccagtccttgtcgacgagcgggaacttggagaggaaggcgaggtatgtctcgtaggtggccgaccagcccatgacccagaccgtgtggcctgctctgtgcgtctccagcaggcgcgtgacctcggacacgacccggcgtcccctctcctgcaggtcggggtcgtcgtcggcgacaaggtccttgaggtcgccgatgctcaagatgaggccggaattggaattgggattgggattattgatgggggtgggccgacggggaggatgcggtagggcgacgcggtggcgaagtcagctgctgcggacgcaaccccatgctcgtcggcgtgggggccgcgtccgcagcagctgacggg

SEQ ID NO: 15341 - DNA, 4473 bp, Setaria italica
  Peptide Sequence Number=SeqID_81315
cacacatcctcctcgattcattctctctctctcgttgctgccctgccgtccggtttcttctcccctcctgtctgtcctccttcctcctagtgtccggcctgtccttccttccttgttcaattcccagccatcgattcctcctagtgtccggcctgtccttccttgttcaatttccagcaccaatccatcgattctcctccacctccgtccccggccgctccagatcaataatgcagcagcagcagaccacgacgcagatccagacgctgccgccgcagataaataagaggacgacgacgacgatgatgagggcggaggcggcggccaaggccaccgaggacgacgacagccgcttcgacgccggcaagcctccgccgttccgcatcggcgacgtccgcgcggcggtgccggcgcactgctggcgcaagagccccctgcgctcgctctcgtacgtggcgcgggacgtggcggtggtggcggggctggccgtggcggcggcggcgctcgacagctgggcggtgtggccgctctactgggcggcgcaggggaccatgttctgggcgctcttcgtcctggggcacgactgcggccacgggagcttctccgacagcgccgccctcaacagcgccgtggggcatctcctccactccttcatcctcgtcccctaccatggatggaggatcagccacagaacgcaccatcagaaccatggccacatccacagagacgagtcatggcacccgatgacggagaagctgtaccggcagctggaaccacgcaccaagaagctacggttcaccgtcccattcccgctgctcgcgttccccgtctacctctggtacaggagccccggcaagaatggatcgcactttcttcccagcagcaacctgttcagccccaaggagcgcggcgacgtcatcctctcaaccacctgctggtgcatcatgctcgcctcgctgctcgccatggcctgcaccttcggcccgatccaggtgctcaagatatacggcgtcccataccttgtgtttgtgatgtggcttgacctggtgacctacttgcaccaccacggcagccatgacctcccctggtaccgcggcgaggagtggagctacctgcgtggcggactcaccacggtggaccgggactacggctggatcaacaacatccaccacgacatcggcacccatgtcatccaccacctcttcccccagatcccgcactaccacctcgttgaagctaccaaggcagcaaggccggtgctgggcagatactacagggagccacagaagtcggggccgctgccacttcacctctttggtgtgctcctcagaagtctcagagtggatcacttcgtgagcgaccatggggatgtcgtctactaccagactgaccacaccttgaacactgcagcagctcatggcagctgggccactgaaaaccataagcaaaagtgattcatattattctgaagcctcaacaagagttaccatactactattcagaagttgatccattcgttacgggattggatttgaagaatgatagtagatgatagcatagaaagtcaaataataattcaagcagaaagcaagggataatcctcgatgatgtaattgaagcatgcatatgcattcgttggttgattgggctcatgaaatcgattatatttacccactagagtagctaagcattgctatacaatgtaatcgtggtttgtacaaactactagatgttgaggtaaagatgagaatctgtattgatgactgcctctcagaaaacattagtctgtatgacacaagtaataataatattacatgccgcctgattgattcatatagagttgttgactaggcagtggcacagcagtacagcaacattttacagcagcctatctgtgctcagatcaactgctgattcgattagattagattacagcaacccggccaagacatggacatcaactagactgctttgctgcttattccatcagcggccaccaaataatgataatatgatgctatatactatcaataccgccactatactactagtaataagtatatactgtgacggtggctaaccaatatatacttacagctaccaatacttacacgtcatcataatcatcaatccaggaaaattcttgagggaagcagacctccaaaaccttcatctttcagaagctcatcctcgcacgctaccagcctcagagtacacgcgctcacgttcttacacttgaccttcagctgctcaaggctcctcacaaacacctgctccacccatgtccgcacgggcctcttccctgaatctgatgcacatgctgctcccactatttgcaccatagccccaacatctatctccaacctgcaccgagagcccacaacattgctcgtgcggttggtaaactcctgcagcaattcctcgcagagtttgccaaaatcaaccggcttgaaattgattgactcgtcgactgaacgcaacaggttgtcaatagatccatctggatcgccagacgagttctcgtggctgctgctgctgccgtcatcgccatcatgggtttcagcctcgtcgacaggaaggttcaagtcaaatggaacgcttgatgttctatgcagacgctttgaagtgctcgatggttcttctaccttttctacaccatcagatatgttgagcttcctcttactgaaggaactggagtacaaagatgcttgaatgtcgctcaaggaatgcctggaggaaactaccgctttacctccagggcctccaccgacgtttgctgtgcctggctcaactatgatcttcaggtgatgtccacgagctgccagaactttttcttccgacaaagcatggccctctcccatcccaacagaggcttcttgacatcctcggatcattcttgtagacaacaccacaatcgagtcattgagatcagccaccctccccccatgcaagtctttgtacctgccagtctcaaaggcctgagtcagactctcctgaacaaggaagtcagctttgtcgatattctcaaggaatataactgatcgccgcttctttctcaactcctcaaaaatacagtctgtggcacgctttcctctgaaattggagttgtcccagtcttggacgctaaagtccaaatatatcaggttatctgagctaccgtgcatcagctctgcaagtgccacaccaactctccgcttggcaatgttgtcggggccatggaaactaaaccatatgtcattcttcctgtgtgcaccacggcgtctctccactgatcggcaccgcacaatggatgcacaaatagcactcaaggcttcctcctgcctcccaactgccttaaacaggtgttccatgagtagcttgtaatcgaaactttgtgctgcaaggggtgaaggcctctgccattggccaaaggcagaagtgcctcctggagctgctgaatgcagagcactaggtgatgtttgactttgaccccagtttgaggaactcctggagcaatagtaaggctgtacagagaactggggaggcttcagattcaaatcatcaaccttcttgggcatcggctggatcgacccctcagcatcctctacatgtttacagagggcattacttgaatccttggaagaagatccgcgaggggtgcccaaaaccaagtcagttgccacagctgcagcagatgatggtgacacatgatcttcacggttgtcacaattggatgaattgctatgttgggattgcacacccctatcatgaaggggttcatcactctttgattgcctgacttgaaggttcaacacaaggtctgcattcctttgattggaaatagatggcgatgaaatactctttgcagttgtgttggtatgtgaagcagacactgcagaaggtttgataacctccctttgaagtgcaactgcctctgaaccttggcttggatttggtcctgtttccctgtcagctggaacaccaatgtaacgtggaaataactggtgaggatctctgttgatcctctggcaaccttggtggagccgcaggcagtactcgttccacttcttctgtagattcagtatttttgtattcaataccatctgatcatctctaacctgcactgaagaaaaactgcacatcttctataccaatcatatccaaaactactcatctatcagcgagctgtacaagttgcattcactactaacttcagaattctagaagatagaagtagcctcacaccttgactgcatcaaacccactgttaggatccatcatgctgccattctgcagcagagatggtagacattcctggtgagcttcagctgtaatgccactccctctaatgatagttgcaatttcctgctcatatctatcattgcactgttggcaccgagggcctgatggcatgagacttatttgcgtcgggtcattcggtcttggtattcgtaccccttctagtctattccttcttacttattgtttttacta

SEQ ID NO: 15342 - DNA, 221 bp, Setaria italica
  Peptide Sequence Number=SeqID_81316
tcataacagctgatttgtgctatgtgatatgaaagagtcagattgcagttaccatcagctactggctactagctaggtacataaatcaaactctatagaaaacagaactggtaggcaccaattattttcaagaagtagagaccagttttcatgatataaaaatcatcgttgcacttttgtttgtatatcatgagaactggtaggcaccaattattttcaag

SEQ ID NO: 15343 - DNA, 430 bp, Setaria italica
  Peptide Sequence Number=SeqID_81317
gtactgtaaggagtacacccaatactgtaagacagtcttagaacctatgccaatcaccatgtgatctagtcttgtcagagaactcattacaaataattgcgtccatgaacaatgattgcgcagatttcagtgatacttggagacgatgcttataatattttatcgttttcagtccactccaaaatgatgatgttacaaaaagaaccttctgacactcagcaaaaaaactcatatcacatagcacaaatcagctgttatgaaagagtcagattgcagttaccatcagctactggctactagctaggtacataaatcaaactctatagaaaacagaactggtaggcaccaattattttcaagaagtagagaccagttttcatgatatacaaacaaaagtgcaacgatgatttttagccatgcaattgaattt

SEQ ID NO: 15344 - DNA, 724 bp, Setaria italica
  Peptide Sequence Number=SeqID_81318
tttttttttttttaaaaaaactaaaatacatagtttttttattaaaaaaacaaaatcaccaggtatacagcagcgggtacatactcccaagtcccaacgcaagtggcaacaaaaatgctcgaccttgtccagtttatggaatttatgcacgtgagctcatcaacttactagctaagtgaacaataacacatcctttgccccttatcctacctagtctacgcggcacaagatttgcgctgcaggccctcaacaacaacagcagaacccatctcaaataacctgatggcatcagctgcttgcatgtacagggcaagttacaactgattccactcttcctcggatgcttcgatcatactggacgtgtgcatcaattgacaccattttttctttccagttttattgcttcataagacttgacgacctccttgaacttctcttccgcaccctctctatcatcttgattctgatcaggatgaacctccattgcttttgttctaaaagcagtctttacttctgcatccgtatatggtgttgctcgtgatctgtcaagaccaagaactgcataatgatgtgacataggataaaccctaggtcctgccggtgtataagtccgtcagttttatgttccgagtgagaagtgtcagtctgccaataccaatcatcccgagggatataattgtagccaccaggtgggccattctccctccaactttcataacctcca

SEQ ID NO: 15345 - DNA, 841 bp, Setaria italica
  Peptide Sequence Number=SeqID_81319
tttttttcttacgtcttaggttcaacaaactgcatttcaagactgtaaacacattgtgttgtacaacacttggcatcaggtgccacaggatcaaactggagaaaagcaggcgcgcagcatttggtacattcggctcagtgcgtgcttgtcagcgaaaccaggagagctaattacacaggtaagccaatcagagggttcacctatctaaatttccacgcaagataatcatgagaaaagaaaagggggccaaagaacttctgcttagtggagccaagggcctaactacatgcacacatatggatgcaggtcgctgttttcactcaacacccaattttaccgaaccatcctttataagcttcatgctaaggctattaaaccttcctcttgaatagtgccgggacgcctttctccaatctgtaccggtcttcatcatcgctacaaattcgtcatagctaatcttgccatccttatcagtgtcaacttcttgcaatatgtcattcaccacttccatgctatcagctgctccatcgtccactagagcctctcgaagctcctcaggctcaatgaagccattgccatccttgtcaaaaaataggaaggcccgccgaaggtgctcgtcatctgccatcctttgcaaatgaagagagaccgccaaaaattccccataatcaagcgctcccctaccatttgtgtccacagcttcaatgagcatctgcacttctgattccgcaagatgagaaccaagttttgctattccggtctttagttcttcataagatactaattccctattctatttattctagttgttcctattagttctttaaaactaatactacca

SEQ ID NO: 15346 - DNA, 1978 bp, Setaria italica
  Peptide Sequence Number=SeqID_81320
taacaaccaaagcagcaaattgcaagaaaggtcaacagcaaaacattttacaacacttgagtgtcaggtacaccggagatgggcaagcaagcaggcgcacatcattcagtacatgctcctcagcaatactgaaagggctactaattacacgagtgaaccaatcagggaggctccgcctaactaaaccccagacaaaataatcattagcaaatggaagagggtttctgcttagtgggccagaggggcagactacaatgcaggaagccgcgccggctgcaagcaggaacctcactcattacccagttttagagacccatcttttataagctttatgctaaggctattgaagcgccctcttgaataatgccttgacgcctttctccagtctgtgccagtcttcatcattgcaacaaattcttcatagctaattttaccatccttatccgtgtcaacctcatgcaatatgtcattgaccacgtccatgctatcggctcctccatcctccaccagggcttcctgaagctcctcaggctcaatgaaaccattgccatccttgtcgaaaaataggaaggcccgccgaaggtgctcatcatttgccatcctttgtaagtgaagcgagacagccaaaaattcaccataatctagtgctcctctaccatttgtatccacagcttcgataagcatttgcacttcagattctgcaagatgggaaccaaattttgcgatcccgttcttcaactcttcataagaaactttaccatcattatcagtatccatcactttgaacatctcttttatgtcctcaacctcttcagcagacaagtgatcagcaataacccttagagctcttcttttgaatctgttcatccttgaaaactgtttcagccttgacttcacgatatctccaagaggaacatttggagctttcttagcattttgaagccagggatgctcaagaacttgttttgccgttagcctgagttttggatcaggctgaagcatctgccgaacgagatctttagcattatctgaaacattgggccagggttctcgcttaaaatctatatttccccgaagtatagcttgtgcaactccttgttcagtctcagcccaaaatggaggaacaccacatagcaaaatatacaagataacaccagcactccatatgtctatttcaggtccatagttcctcttcaggacttcaggagccatgtagtagggacttcccacaatttcggaaaacttttcaccaggcttgaagaaaatggagaggccgaagtcgatggccttgagcggcgagttctccttcttgttcgcgaagaggaagttctcgggcttgaggtcgcggtggatcacgccgtggcgatggcagagctgcacgacctcgacgatggtgcgggtgacgttggcggcggcgcgctccgtgtagtgccccctcgcgacgatgcggtcgaagagctcgccgccctcgcagagctccatgacgaggtgcacggcgccctcgtcctcgcaggcctcccgcagcgacacgatgctggggctcttgggcaggtggcgcatgatggcgacctcccggcgcacgtcctcgacgtcgacggccgtccgcagcttccgcttggagatggacttgcaggcgagcagctccttggtgtcccgatccatgcacaggtacgtgaccccgaactccccgcgcccgagctcccggtccagcgcgtacttatcctcgatcccggcgcccacgtcgcacccctcctccccgagcaccgacagccgcttcttctccccgccgccgccgccgcccccgccggccccgccgccgttccgcgcctggtggggcttcttcttcccgccggccgaggccgggaagtgcgacgacttgacgtcctcccgcgccgcggcggccggcgagcggcagcagttgcccatggctgccgcgcgagatcgggagtgggggcactagggtttgcgcggcattggg

SEQ ID NO: 15347 - DNA, 660 bp, Setaria italica
  Peptide Sequence Number=SeqID_81321
caggggtggtccacgacgatcattctgagttaattgctctcctaattcctccaatccaggcccaacaaagtagtctgcaatgtttgccctcctcatgccaacaccacgccgtccattgatgaacacatcgaaaccattatcctctgtgagatgaccagggagctggccacggaagagcagccatggccctgagccaaactccatctctaggtctgaaaagatgtttggccttcctctaacatcaacctccctgttcatcccagtcataccatgccgcatcacagcggagattgcctccattatcccaaaccttgggtcacgttggaaatcaggatccatcccaacgaagtggttcatgagagcatcaacatcatccatttcagccacaaacccggaatcacagtaaggacacaccatctcccggccacgaggccttatccgctgtcggcattggtaacaccagtatgattgcctgccaccagacatttcttccaactaatgtgccgccttgcgaaaattcaaaggtgaatccgaacctcctcagcacgatgggcgaaggaaccgtcgatgcccccgcccgcgagagggaggagcggtgccgcggacgggagaggaggaggcgggtaggagcggggaggccgcagcgagccaggaactccg

SEQ ID NO: 15348 - DNA, 423 bp, Setaria italica
  Peptide Sequence Number=SeqID_81322
ccccccgccctcgctaccgtcgcccgctcttccccggccagcgatcccgattcaactgatattaggatggacgaagtcacgcaagctgttgagaatctgaagaaagaatggaaccaagcggtttctcagcttgaggagagcattgctgcaatcagatcatgtggaaaaacagggaaagggacagaggaagcaaattctcttccaaggttgaatggttctgcacaggatgctctgcaattgctcaagtcactgcagtttcgtcttgatcttctagcacagcagcttcccacttttgaagaagtgcagtctggccaagcaaccttagagtcatgggatgaacaatacaagaagctgcgtgctagcctgaggaatgctaacttacaagcgaaagtaagtaaacaatttaagtaaaagtacttagta

SEQ ID NO: 15349 - DNA, 812 bp, Setaria italica
  Peptide Sequence Number=SeqID_81323
catttgcttgccactattttgtggacacacttgttgcgctctgtttcaccctatgcttttgtgtttctctggcatgcaactgctttgtagtccaaacaaatacaactccacgcatgatggctgccagcttatatgcatattgtttgttccgatcaacatgagaatatgagattggattgaattgagattttggaattggtactgcatgagagctcccaggaatactgtgtgcaggaaggtgaatgtctagctaattttgacttttaaaatcaggatgcttttgtttttatgtttcaatggcgttctattgcttcatattagagccactgattagggaaagtagctttccatgcgatacacgcatgtaaatgccactaatctttgatggtgttttcatgatcagttgggtcccctgtcattgggtcgtttgattttcgtgcaatgtcgcaaatcactagcagaaggctggtagtgaggtaggattggaagagggaagggatgaggaagcttagtctagatagaattttggaagggagtgtagattaggctcacccatttatagtggtgccaagcagggccaggccaacgccgccgctgccgcatcgccgtcttctctccacgcccctttccatcaggtaattctctccggcggcatggggcacccagatgcctgttcttccttggatcaatccttcttttaagtcagtcttgtgtctttgttttggtggttatgtcaccggactgattgcttgctgctggaatgctttactccctcctgtcccatcatcatctacgttggtattacttgtaaa

SEQ ID NO: 15350 - DNA, 306 bp, Setaria italica
  Peptide Sequence Number=SeqID_81324
gggatcaggttggagctagcagagagctcggagacgccagagccgatcgacaggccaccgatccgatggccggcgggaggaagcgggagtggctgcggaagaaggtggcggcggtggccggggaccggggggcgcagccagcagcagcagcagtcgccgaggtggacgctgcgcgtccgggcgctgtccgcggcgctgcgccggcggaggctcggggcaggcggcctcccgcgcgtcgacttcctccaggtcctgtaccagaacgtcctcttctacctgctgtgggtggtcgagtccgtcgtcgtc

SEQ ID NO: 15351 - DNA, 245 bp, Setaria italica
  Peptide Sequence Number=SeqID_81325
gtgatgtacaggaacagcagcgtggccacgaactcggcgatcacggcgcggtacagggaccacttgccgagctcgtcgatgtccactagcggcgccggcggtgggtcgacatagtcgcgggcgccgccggcctcgagagcggacacgtcgacctccttacccattttcgccggcttggcaagctgttgccactgccagaagctagtttgcaagagctgcttgaaaagctattagtgcttgctgtg

SEQ ID NO: 15352 - DNA, 284 bp, Setaria italica
  Peptide Sequence Number=SeqID_81326
cgtccgtctggtgcttgtacccgatcaccgtggcgacagtgatgtagaggaagagcagcgtcgccacgaactcggcgatcaccgcgcggtacagcgaccacttggtcagctcctccgcgtcgatcagcggcgccggcggggggtcgctgtagtccttggccgtgtactcgccgccctccggcgccgccgcggcctcgatgtctttcgccatccttgcttacaccaatgcaagctcggaagagctcacgaacgctgtgtgtttgcttgctgctgctgacttgcta

SEQ ID NO: 15353 - DNA, 348 bp, Setaria italica
  Peptide Sequence Number=SeqID_81327
gcccacgcgatgccgaggatgcccacgccgccacacgccgcgtcgggccccgacgccgacgcgtccgtctggtgcttgtacccgattaccgtcgccaccgtgatgtacaggaacagcagcgtggccacgaactcggcgatcacggcgcggtacagggaccacttgccgagctcgtcgatgtcgacgagcggcgccggcggcgggtccgcgtagtcgcgggcgccgccggcctcgagagtggacacatccacctccttgcccatttgagctgattgacaatgcaagctctcgctggaagctagtgtggagagccgagagcaagagctgttgggaaggtgagtgctttgc

SEQ ID NO: 15354 - DNA, 826 bp, Setaria italica
  Peptide Sequence Number=SeqID_81328
gccgcgtgcggcggcgtggggatcctcggcatcgcctgggcgttcggcgggatgatcttcatcctcgtctactgcaccgcgggggtgtcggggggccacatcaacccggccgtcacgctgggcctcttcctggcgcgcaaggtgtcgctggtgcgcgcgctgctctacatcgtggcgcagtgcctcggcgccatctgcggcgtggggctcgtcaaggggttccagagcgcatactacgtgcgatacggcgggggagccaacgagctcagcgacggctactccaagggcaccgggctcgccgccgagatcatcggcaccttcgtgctcgtctacaccgtcttctccgccaccgaccccaagcgcaacgcccgcgactcccacgtcccagtgcttgctcctcttcccatcgggttcgccgtgttcatggtccacctggccacgatccccatcaccggcaccggcatcaaccccgccaggagcttgggcgccgccgtgatctacaacaacgacaaggcctgggatgaccactggatcttctgggtgggcccattcatcggcgccgccatcgccgccgcctaccaccagtacgtgctgagggccagcgcctccaagctcggctcgtccgcctccttcagccgctagatcgacagcctctcccgccggacaaccggaggcgtgaactgtagatatatcagcggccggcctcccccactgcaaatctcctgaatgctacgtgtgcatcgttggtagcttccctgctagtgggatcatgcatgcttaattatgatctgcgtgcctcctgtaattttccgagtccactgcgtct

SEQ ID NO: 15355 - DNA, 771 bp, Setaria italica
  Peptide Sequence Number=SeqID_81329
gtgtcacgttagtttttttttttttttttttgaaagaaaaagaaaacgatcacttggatcccttcatctttattaatttgacttcaagccaacatggtgcacacacgcagacaaagttacacttgctttccacagcacacacaaatacttgctctgccgttgctggcagttccaacacttaactgaagctactactgctactacattaaccacgccggggctctccctctccgttcaacttaaactccggaggaggaagagcacagtctcggcctgctcggctgtggatgtcgtcgacgacgaggtcggcctaggcgttgctccggaaggagccgtagcccctggcgctggcgcggaggacgatctggtggtacagcgccgcgatcgccgcgccgatgaacggacccacccagaagatccactggtcgctccaggccttgttgttgttgtacacgacggcggcgccgaggctcctcgccgggttgatccccgtgccggtgatcgggatcgtcgccaggtgcaccatgaacacagcgaacccaatgggcagcggcgccaacaccgggatgtgggagtcgcgggcgttacgcttggggtcggtggcggagaagacggtgtagacgagaacgaaggtgccgacaatctcggcggcgaggccggtgccggtggagtacccggtgctgacctcgttggcgccgccgccgtagcgcacgtagaagccgctctggaagcccttgacgagcgcgactccgcagatggctcccaagcacg

SEQ ID NO: 15356 - DNA, 1417 bp, Setaria italica
  misc_feature (1)..(98): n is a, c, g, or t
  Peptide Sequence Number=SeqID_81330
nnnnnnnnnnnnnnnnnnnnnnnnnnnnnnnnnnnnnnnnnnnnnnnnnnnnnnnnnnnnnnnnnnnnnnnnnnnnnnnnnnnnnnnnnnnnnnnnnnaaagtatatgcaatatttttttttatgatgattataactaaataaaacctcacataactcgtttccaaattctccatacggaatacatacatacaggaagcaaagatatatcacacttcttttcgaagaaaaacagcggcaagcggacgtggcggcggactccgggacacatcgaagcacggcgcggagcccgcgtgcatgacacgattactacgagcgacggagattgtggcagcagatcctgatcggaacagggcgtcatggagtggatggaggcgggcgtcggttgtgcgcgcgtatctacacttcggtgcccccctcctcgccgcggccggccggacttaggcgttgctccggaaggacccgagcttggcggcgctggccctcagcacgtactggtggtaggcggcggcgatggcggcgccgatcagcgggcccacccagaagatccattggtcatcccaggccttgtcgttgttgtagatgaccgcggctcccaggctcctggccgggttgatgccggtgccggtgatcgggatggtggccaggtgcaccatgaacacagcgaacccaattgggagaggagccaacaccgggacgtgggagtcgcgggcgttgcgcttggggtcggtggcggagaagacggtgtagacgaggacgaaggtgccgatgatctcggcggcgaggccggtgccgttggagtagccggcgctgagctcgttggcgccgccgccgtagcgcacgaagtaggcgctctggaagcccttgacgagccccacgccgcagatggcgcccaggcactgcgcgatgatgtagaggaccgcgcggacgagggacaccttcctcgccaggaagaggccgaacgtgacggccgggttgatgtgcccgcccgagatgccggcggtgcagtagacgaggatgaagatcatgccgccgaaggcccaggcgatgccgaggatgcccacgccgccgcacgccgcgtcggggcccgacgccgccgcgtccgtctggtgcttgtacccgatgaccgtggccacggtgatgtagaggaagagcagcgtcgccacgaactcggcgatcgccgcgcggtacagcgaccacttggtcagctcctccgcgtcgatcagcggcgccggcggagggtccgagtagtccttggccgagaactcgccggcctcgggccccgacgcctcgatgtctttcgccatgccgatcagtaccttagcttgctcagctcagggctcaggctatgagcgcgcttgctttgtgcacagctagcgacacgcaacagaggataggcaaggcacacaggggatagg

SEQ ID NO: 15357 - DNA, 2518 bp, Setaria italica
  Peptide Sequence Number=SeqID_81331
ggggcctacttgtcagtcagtcagtccacatcagcgtcttggtccaactcagcgcaccaatgtggcaaaaaccactatagaaaaccaccttagggtgttatttaaatggttttacaaagatgagagggttaaacatccggttttatagttgaggtgatgtagtcgatactccatacattagggggttatgtagactttttccgggattttttttaaccccagcctgaaattcgctcacacagggagtcaaacccaggacctgaggagtgctactaaagccacctaaccaactcagctagaggcccgttggctgacaaagttgacatcaacattgcaattgttttagaagtagatgaagaacaaaggctttatccatcgtaactcatcaaataacaaagattaggatcgccatggcgaaatgttaaaacactatccatactaaacagtagaagcctaattctaactctatcatgaaacagctgctgtacactccgataaatgttccataattgtacaacacagtacatgctcgctttccatcatcacagagaccctacaaagattagtgacacaaaattgtacatccctaccaagtaccgagtgaacggtaatcggtagatatcagttgtccagaggccagttcttcccatactgcaggtctggaaagtaagcgagtcatcatcttcacaagtcaggtgagaagttagaagagcaatcatcgcaggcacagaagtggagaaaactgttcacgatttctcttccttcacatccaatgatccaagctcttttaacaactcctgatacttcttttttgcctcagcaatttcagagcggagcttttgttccttcattacaagttgtttctctgattcctcgtattgtaagcattctttacgtagcttgtcattctccagggtcaaagtcctgtattcattaaaccgtttccgttgagaaacatcaactccattcgtatgatctagcccatcctgatcagcactatccgtcatggcggaatcaaacttcctcttcaatcccatcttgctcttagaatgagactcaagactattgatcttttcccttgctgcagaggctgataatctaggtataccacagctgcttgttggaatatcagccgcaagcaaccgaggtggagcacttattggggaactgcgagcattcatatggttggcacgatggagtgcacgggttgctttaggtaaacttttgttgtcataaccaagacgatggcaatgaaggccccagtattcataggtcatttctttcaagcgaatctcaagcctttgataaaggacagacttctcaaaatcctgcttatcatgggtaggtttaatgaagttggcctccagaatgccaacaactcctcgccctttcccgtacgagttgtttgcaactttccagaagggcgatattaaacgatttttgtgatatacattaaatccttgtacatcaatgtctggagcacctttaacaaatccaatggtcgtgattacagaagactctgtaagtccagcaatttgcggtttatacaacacgcactcacgatacatcaaatcgttaactatattatgtggctccacatcacatccacgaaggataattctgaaattatcaggtacatgaagatacaggatagatgcatacgctctaagagaatagcgaagccgagatgaaacgtagttctgtttggcgatcttctctgctttatttgttttcaacttcttgtgtgccccagtaatgaggatatccttttcatcagagttgaaatcaagctccatatccccatcatcgttgaaccagaggttgaatacaattatctttgttccatgctctcccatgtcatcaaattgtttaagcaactcagcttcactagcaaaaggggaccatttaagaaggattcccaggttagaagagaagagcttctgatcatgacgcaacatctgaatatatgaagcggttgttagatcgtactgatagtccaccgttggcaccaacacatcgtcgcaacctgtttccatcaaaaatgtataagaaagaaggccgatacttctagtcggcgtccagttattttggttttgtgtaaaaacaatcacatctgctccaagcctcatcgtactagtcttgaaaccatttccatattgtccaatgaaagcatcagactgcttatccgaaaatccaaagctcatgcaacgtctcagtgcctcaggatccatcccccctccatcatcttgaaccaacaatgagggactcccatcccgtgggtttgtaaatttattaatacggacatatgtcgccccattgttcacctcatcgattgcattgtcaagaagctcagcaatggctccgaaagcccacttgtgggaagtcgcattcgagtgcaggaacttggggtttatccggagccggtttcgcccaccaggggcgttcgcgtcggggttgcggcacgcgacgacgtaatcgccggacttccagaactggcggcagaggcgcggtcggtcgt

SEQ ID NO: 15358 - DNA, 605 bp, Setaria italica
  Peptide Sequence Number=SeqID_81332
ttttcatctgcaaaactgtatttgacctgaattatcatggcaggacacaactttgttcttttttaccccaccattaaaagaacatttttactcaaaaactttgaaggcaataaaatttttgccattgggctttccaaacaagctgcccttgtagaaaccagaaaaaattatgaaatctgcttgtataagctcataagctttcgactagatcccatgactagctattatcaccagcagatagaatacatacaagaaatatcgtataaacatcaagtcagtagaaccagcaatggtctaaccgagtccaagttctttcttcagcttctcaagggcagcctctatttcagaaacaccatcgtcaaagttgtttgttactgtcttgctatccttagcattttttgcttgccctccaaattgtgtgtatggatcatttccagtgtcatccttgggggctggagtcatcaatcttcagttcattttccagaaattccacgaattcctcaccaattgctgctaattcttcccagaggcttttaggtttctgatctgaattcaacccagcttcccagttctgaaattctgtctgcagatctttaaggattccg

SEQ ID NO: 15359 - DNA, 878 bp, Setaria italica
  Peptide Sequence Number=SeqID_81333
tcctgtagttcttgaaaatttgtatcaactactccaaatcagtccgcaatacattaaacaataactcaggtcaagtttcaagactagcagcacatgaactcattaatttggataggtggacagggagacttggatggacaagatagatcataccaatagccgaactagaaaattcacacaccaaatctggcatatattaaacctaataagagaagaacaaatcttggctttgaaatgaaaagcaaactcatgtacacatccatagacagagaaatagctccagataaataagaatgtgctataagaaatagtaatagcttcaacatgttatctctacttgattggaaaaaccaaaatgcaagggaatataaatagtaatggaaaatatatcacaaaatcaatttctctaactctttgcaatcaaattaggagtttctacttaactaggagctgaggcatcttattcagatctggaggagatttatcaacatggctttcagagacacaggtaaaatatatagactgcaactaggagaagtagtgtagacatacgtgcttacagcctaaactctcactaattcacacaattccaccaaatgcgatgatatttggctcaataccaatatcactgaactctaggcatccaacaatatgcaacatgatgatataagagcactcaggttttgatatgtaattttcaaactcgtgataagtgaaggaattctagtacaatgcctaaggaagaattgcatataagttgtttgagacaacagataactatgttaagtttcaactccctgaatccctaacgtgtggattttctaaatccacaatcagtaaaattattctactatagtgagaaaggacaaactgcatat

SEQ ID NO: 15360 - DNA, 362 bp, Setaria italica
  Peptide Sequence Number=SeqID_81334
ccgaagcggagaaggatcccgccgcatcagatcgagttcgagcgcctgtacctcgagctgctggaggaagaggacggaggaggtgtgagcctggaagtcgtaggagagttggaacccgcggtcgaggaggcccatggtgccgtcgtcgcaccccaccgtgacgcagctgcggccgcctgagtagcaggtgacacggcccgcgatctcgaccggcacggcggcggacgacgaccccccgccggccccgccgccgcggccgaccgccttctccttgaagaactcaaacttgcaccaatggtacataccgggccgacgcgaggcgggcggatcgggctccggcgggatagggctcaacggcggac

SEQ ID NO: 15361 - DNA, 241 bp, Setaria italica
  Peptide Sequence Number=SeqID_81335
ggaagaaagaggacaagctgctgccttcaccgtcgcagagcccgtcgtcgacgccatggatgcctctcctcagccgattcagcttgcgcagcagaggaccgggtgccagcgaagcaggatcgtcaagcttcgccgtcgacaaagacacgccaggagcgatccccatcgccggctcttcttccccgagctaccgcttcccgctcgccatgatccaggaagcgacggacaacttcgacgagcg

SEQ ID NO: 15362 - DNA, 510 bp, Setaria italica
  Peptide Sequence Number=SeqID_81336
tcgccgaccacgcggacccggggcgcacgttcctcgccggcgacagcgccggcgggaacatcgtctaccacacggcggtccgggccagccgcgacggcgtcggcatcgagggggtcgtcatcgtgcagccctacttgtggggcgccgagcggctgccctccgaggcggcctgcggcgacggcgcggcggtgctgccggcgtacggggtggacaggctgtggccgttcgtgacggcggggcaggccggcaacgaggacccccggctcaaccctcccgacgaggagatcgcgtcgctgacgtgccggcgcttcctcgtcgccgtcgccgagaaggacaccctgagcgagcgcgggcgccgcctgttcggccgcatccgtgactactacgcggttgccggcggcgaggcgacgctggtggagtcggagggcgaggaccatggcttccacctctacagcccgctgcgcgccaccagtaggaggctcatgcagagcatagtgcgcttcatcaacc

SEQ ID NO: 15363 - DNA, 459 bp, Setaria italica
  Peptide Sequence Number=SeqID_81337
ctgactccggacaggaagatccggccgaggtcgccgtggtccgccagccacgggtcggcgccggacgccacccagctgagcgcggcccaggagtcgtcgtaggccgccgggagccggtgctccggcgcgaggcggtagcggacggagacggcgacgacgcgggcggcggcggcgagagaattgacgtagcggtggaacagcgggtggtagggcgagccgacgacaaagtagccgccgtggaagaagacgaggaccgggagcttcgccgccgccgccgccgtggccgtggccggctggacggctggggggaggtagagcctcgcggcgacgccggtggccgcgtcgatagcgacgtccttggaggtgacgccggtctcggcgtcgaagccggcgggcgccgtgtccgcgacgccaccgcggtcgacgtggccgtccttgtacagccggaagtacgcgcag

SEQ ID NO: 15364 - DNA, 1195 bp, Setaria italica
  Peptide Sequence Number=SeqID_81338
ttttttttttttttttttgttattgtcttaaaacttaaactaaaactaagttgttctacttctaatcgtatcaagctaacatgaccgactcacacgattgtgcacatgaggaacatacccagctccaatgctccattgttttgcttgcacaaatcatatgagttttacttccatgatttttatataggtagcatcaagctgtagaaattaaatccgaggtccaaatgcccaaacaaatccaatcagtggccaccaaggaaatcaaccactcgatccatcagcttagccgcctcgcggctgccgtggtcggggacgaagaagccgtgcccgccttgggactcgaagcactcgagctccccgcgccacccgctgtcccgaacggcgtcgcagtacgcccgccccctcggcgccctcgggtcctccgacgccgtggagaccagcagcctctcgccagccagcttcgccaggctcggcgcgccggccgccatcgggtttatgctggggtcgtcgagcccgccgtccgcgccggggaagatgaccgcccacctgtccttgttagactgccagaactcctcgtcctctccttccatcttttgttcactagcgaaggaagggtggagcaggatcacgccttcgatgcgcgccggtgttcccgttccggcgcgcaggccgctgacgcccgcggcgatggccatgttatgggcgatgttcgcgccggcgctgactccggacaggaagatccggccgaggtcgccgtggtccgccagccacgggtcggcgccggacgccacccaagactagaagcgcggcccaggagtcgtcgtaggccgccgggagccggtgctccggcgcgaggcggtagcggacggagacggcgaggaccgggagcttcgccgccgccgccgtcgtggccgtggccggctggacggctggggggaggtagagcctcgcggcgacgccggtggccgcgtcgatagcgacgtccttggaggtgacgccggtctcggcgtcgaagccggcgggcgccgtgtccgcgacgccaccgcggtcgacgtggccgtccttgtacagccggaagtacgcgcagctgtagacaacctcgccgccgccggagtccatcgcccgcacgctgctggtgctagcaagcgacaaccgatcggaaccgcgccgcgccgcgcagacgtgtgtgagtgtg

SEQ ID NO: 15365 - DNA, 771 bp, Setaria italica
  Peptide Sequence Number=SeqID_81339
gggaagtcagttcatcacgcacacaattgggagagttttgtcacaattgaatctgaagtcaaccccaataaataccaaaggttatgagagcttgctacaacttacacataacaccgtaagtgatagtttcgatctatactacgggctcttcatgtataatgttaatgccacggagcaggcacagcttgacaatttggagagggcatttgagaaggtgagacaaatgttgtatggtcggctccatgatttactacgaaagcaaatcgtggagagggtccctatgccggtggtttcttcaagaaaattggaaaatggcaggtctaattcttttgcgggcctctcttatcgcctctaactacaaaagagaagaaacatgtatcctccgatccgttgcttttgtagcctctactactacacgtcaaccggtcgcttccatcccaagtcaatgctaaatccatgcctctccctattgttgttttgttgtgaaagttgtatgtgtgcaattaacatagttgttagcatcagtgggagagtaagatcattgctacactttagttgttatgactcctgatctctccccttcctttcagaccgcctgcctaatgtaataatacaattcaagagatgtgattagaaatgttcattgtagattgagaggacacgagggatgaggcagaaaggatatcttgttttatagaatagtatattattgttataaataatgaacatgttgcagccactatagtttagaaacaaaaaaaaaaaaaaaaa

SEQ ID NO: 15366 - DNA, 317 bp, Setaria italica
  Peptide Sequence Number=SeqID_81340
tacccttagtacttaaagtacgtaaagtactaatgctaagcgaagcattcaggttgcttcaaaaaataaagttactattgcggtagaggtaaataattttggaagcctgcgtgtcagctgggttactgaactatcccactcactcatcctgccttcggtcctcattcagtttcatccgtcgccatttcctaagctgtcccaagattgaaaacaaaagaaatgttaacaaatagcaactgagcagcagaaccactaagaaaagcaattttaggtcaggaagcaattgagctactgacgtgccttattcttttaactaa

SEQ ID NO: 15367 - DNA, 938 bp, Setaria italica
  Peptide Sequence Number=SeqID_81341
tttttctgtcctcagcttgagtatcaccaattttcacatttttaacaaccaatagtctaatcaaacatgagacaacatgccaaaaaaatatggcaagtccagttcaaaccaagaaagaaccaaagtccgacttagttcaaaaaaggtcaagttgtcggagtactgctatgctgtgaccatctatttccacccatatgtctcttcaagcatgaaacgagaagcttacctacacatgtcctgcattttttttggtaccatatcatgtaatcactctttgttacgtgagcaaccatcaaaatgatcagtgtttacaactgatgattcttgcctaatgggattcatatcatttcctggcagaccaactctttcttgacctgaagttagctgatgatttgcaatcatctccccccgaagcatcatctcagaagattcaggcatccgaaatgttcgaaggtgggactgtgacgattccaattgaaattgatgttctggaatggtttttgtcaggaacacttggtaagacaaaagatagtggttgattttgtggaggaggatttaatgggtcaaatgcctgatgagctcctgaactttggtttacaggtggcatcactgccccagagcttgacgctgtgatgtggcccccaccaagtgcagcaaacatttgtgatgcttgtgcaggctcaagtgcaccagataaatacggtgggttcaggtaaacaccatttctcatagacagcatctgcacttggagctgcagttgcttcagatactcgatggcctcgtcaagcatggatgccttgtcagtcttgtttgagttcggtatcaggctctgcagcgccttcatcttctcgttgatcttgctcctcctcctcttctcggagaggttgtgcacctcggcggcgcggctccgcttgctgccggaccccccgcgctgccgc

SEQ ID NO: 15368 - DNA, 767 bp, Setaria italica
  Peptide Sequence Number=SeqID_81342
cttcaggacctctgatctagtagcacagttctgagtggagctggcaaactagcctcacaactctgatctagcttacacacagcttggcttacgctgctagttgaaaaacacattacagtctcagtcatctgctggtttcccaattcccatagaccacgaaatgtgcgacgttccatggttttctactatcaatactgccctgctaagcgaagcattcaggttgcttcaaaaaaataaagttactattgcggtagaggtaaataattttggaagcctgcgtgtcagctgggttactgaactatcccactcactcatcctgccttcggtcctcattcagtttcatccgtcgccatttcctaagctacacatgtcctgcatttttttggtaccatatcatgtaatcactctttgttacgtgagcaaccatcaaaatgatcagtgtttacaactgatgattcttgcctaatgggattcatatcatttcctggcagaccaactctttcttgacctgaagttagctgatgatttgcaatcatctccccccgaagcatcatctcagaagattcaggcatccgaaatgttcgaaacggtgaaactgtgacgattccaattgaaattgatgttctggaatggttttgtcaggaacacttggtaagacaaaagatagtggttgattttgttggaggaggatttaattgggttctaaattgtccttgtattgttagttcttttccttttgttttaaactttttttaggttttttttaa

SEQ ID NO: 15369 - DNA, 622 bp, Setaria italica
  misc_feature (57)..(57): n is a, c, g, or t
  Peptide Sequence Number=SeqID_81343
cgaaatttgggctatatggttcgacttggactttggggtgaaggaacatcatttcanaatttttacacaatttttaggtgctcttgagaaaggtggtgtggggggctcttgaacttgttgccatggacatgaaagctaggggtatgtatgtatgccgtactctaagttataaggggggctgattttgatatcgtggaggctccgcttgaggaaagaatgatgaacatgtacagaaaggcggctgaattttcggactgaattgcgccttgagctcatatcagcaagtgaattctttgctgaagagaaaggcaattcaaatcaaatatggcgattgtattgggccagccatcagcgtttcttcaggcacatgtgcatgtctgcaaaggtacctgctgttgtgaggttagctaaggaggccttggcagagaacaaatgtgtggtgattggtctccagagcactggagaagctcgaactgaggaagctgtcaccaaatatggagttgaaatggaagattttgtttctggtcctcgggagcttcttttaaagcttgtcgaagaaaaactaaccctttgcctccaaaacctgaattcttttacaagcaaactaactacaacaactgaa

SEQ ID NO: 15370 - DNA, 269 bp, Setaria italica
  Peptide Sequence Number=SeqID_81344
agttcttgctgatgttgaactaaacagcccaagaactccacggagaaaacactatggcggccctcatattggtgagtgcgcctttcattgttttgaaggctcaactgaaggaatgtacaaaataatccgacctgctattggtgaagcattaaggtatttgcggttcatcatttttttctcggcaaggtttagtagtgttagaattttacacttcatacagcctagcaggtttcatatctgatctaaaggatggaagttcctagtttttg

SEQ ID NO: 15371 - DNA, 3159 bp, Setaria italica
  Peptide Sequence Number=SeqID_81345
tttaaacgtaaaactttaaggtaaacttttaggggttagaaagggtacaacgacaaatcatttcataattttacacaatttttaggtgctcttgagaaaggtggtgtgggggctcttgaacttgttgccatggacatgaaagctaggggtatgtatgtatgccgtactctaagttataagggggctgattttgatatcgtggaggctccgcttgaggaaagaatgatgaacatgtacagaaaggcggctgaattttgggctgaattgcgccttgagctcatatcagcaagtgaattctttgctgaagagaaaggcaattcaaatcaaatatggcgattgtattgggccagccatcagcgtttcttcaggcacatgtgcatgtctgcaaaggtacctgctgttgtgaggttagctaaggaggccttggcagagaacaaatgtgtggtgatcatgatcccaatttcctaccatggctgtattcgaaacatctgtggccgagtcttgataataatgccgaaaacagtttgtgtacttgtggctgcagaatgcttgcagaacaataaatgccttggtctccagagcactggagaagctcgaactgaggaagctgtcaccaaatatggagttgaaatggaagattttgtttctggtcctcggagcttcttttaaagcttgtcgaagaaaactaccctttgcctccaaaacctgattcttttcagcaaggtgaagaaaaagtcacagagatccagcgtaagcgccattctgcactggatgtatcatttaaagggcgcgtaaggaaagtagcaaaaatggtagatgtgagtgatgacgacaccgatgattattctccttctgaatcagatcatgaatcaacagaatctgatgaggagttccacatgtgtcaaatctgcaacacagaggaggaaaagagcctgttgcttcattgttctggttgttctcgacatgttcacccaagttgtctaacaccaccttggactgggatgatgactgatgattgggcatgctacacatgcaagatagtagaagatgaggaaaaagagcaagatgcccatgtagctgatttttcaaagaggtatgacgctgcactagagaagaagttgaagattttggatataatacgttccttggatctccctaataatcctttggatgatatcatcgatcagctggggggccctgacaatgtcgcagaaataacgggacgtcgtggcatgctaataagagcttcggatggaaaaggcgtggtttatcaggcgcggaacgcgaaagaagtctcaatggagatgattaatatgcacgaaaaacagcagtttatggacagcaaaaaactaattgcaattatatctgaagcaggatctgctggtgtttccctccatgctgatagaagggcaaaaaatcagagaagaagagtacacataacacttgaactcccttggagcgcggaccgtgcaatacagcagtttgggagaacccatcgttctaatcaaacttctgcacctcaatataggctcctttttacaaatctcggcggtgaaaagcgctttgcatcaattgtggcaaaaaggctagagtctcttggcgctttgacacaaggagatcgcagggctggaccttctttgagtgcttttaactatgatagtaattatgggaaaagggcgttaaccatgatgtataggggaataatggaacaggattcttttccagttgttcctccggggtgttctgatgatgaagctagcatccaagcattcatcaatgaagcaaaagctgctctagtatcagttggaattatcagggatgctgtcgcatgcaatggaaaagatggagggaagctttctggtcggattgtagattcagatatgcacgatgttgctcgttttctcaaccgtctcttggggttggctccaaacatccagaatagattgtttgatctttttacaagtatacttgatgttgtcctgcacaatgcacggatagaagggcaactagattctggaattgttcatatcaaagctaagaatgctgaaatgaaagaatcacccaagactgttcacactgatagcttatctggtgctttgacggtactatttactttcactattgatcggggagttacttgggagtcggcaaaagcgatgcttgacgaaaggcagaaagatggtgctggttcatcaaacgatgggttttatgagtccagaagggaatggatggggagaaggcacttcactctagcttttgaaggctcaactgaaggaatgtacaaaataatccgacctgctattggtgaagcattaagggatatgcctttaactgaactgaaaagcaagtacaggaaggtgtcatcaatggacaaagttagtaaaggatggcaggaagagtatgatgcttcatcgaagcagtgtatgcatggatctaaatgtaaaattgggagctactgtactgtaggaagaaggttgcaagaggttaatatactgggtggcctcatacttccagtttggggtacaatagagaaggccctggccaagcaggttcgtcaggttcacaagagaatacgtgttgtccgtttagtgacaacaaatgacagccaacgaattgttggactgctgattccgaattcagcagtggagtcagtactaacaggattgcaatgggtccaggatattgacgattgacatggaaaggcttcaattttgtttctcactcactcatattgccgggttttttaatcactgttctgatgtcacatgcagcagcctttagggcctctgcatatttaattttgttaaataggaagctagcaagctaacttatcacaagcgctgaaattcttagcttacagatcaggcaggtatacacggacaacattttgtatgtaaaatacgcggtgtgctgtcgtcgtcgttgctttcttttcccctcttttgttctctaccaggtctatatgttgtatatttgttatgtaaagctactacaaaacaatgaaaggcgcactcaccaatatgagggccgccatagtgttttctccgtggagttcttgctgatgttgaactaaacagcccaagaaaaatttgagacatctgtacattagaccaaattatttactatacgtgctatacctttatgtccggtgaaaaaaaa

SEQ ID NO: 15372 - DNA, 1282 bp, Setaria italica
  Peptide Sequence Number=SeqID_81346
aactaaagaactacaaacaaattaaaagacaatggtaccaatgctaccggcagagaaacgggaggccatctgtatgacaacgcctgaggcattctaagtgcctcacagtctagcatagacaggaataaagctaccagtggccattaaaccaggtggtatggacatcatagatgttgcggaggccatcctttttcactttcaggcaatcaggtttgtcgccgtgcgtcctcggttcatgtgttaagcctttcagtgaatatttaaacgaggtctttggatcaattctaaattccgatcgatcatgatttagctatgctacttatattatacagactacgcatttgctgctttctgaactataagattacaggaccaacggccccaaccatcacagcatgcctggaaaacggcatctttggttggaatctgggctctggtgcagggtagaagtagaatgctcttatgcagcccaccgagcttcctcactgtctgggatgacaatgtcagtcctcatcattggcctatactcgtccggtattgcagctccagcctgcacacacagctctacgacagctggagcttttccatagaaactcctgagagaggatctgagaggagggccactggggtcagggacatgccacacgtagttaggcgggatgacctcatcaaccaccgcgtcctgccacccgtgcttgccatcccgccactggtgcttgaaagccccgcagagcttcacattgtggccccatggaccgacgtggacctcagagcagtaaccacatgctttcacagtgtacttgctcatcagttgctcaacaccttgcctcacattgaggtatgctttcagtgtcctctctgcaagctctttcacattggatggtgaaggtgactggccctgttggttgttgaatgtgtccagctcagcaagtagagatacacaatcttctgaccggtgtggcttaggctcatcaacaaactcaccgcggctaatcaccttcttgcctatcatcctgacaggagaagtccgtcgcctcgagggatattgtggtaagtcgacaccagcctgaatgcatagttcaacaattgccggaatcctgtcataatcaaacctggtttcatgcttgactctccgtccaaatggatcaaaaagatggtacgactcgatcgggatgaggacatcattgatggaaccgctagcccaagaatgatgactgttccgacgctggcttcctgaaccatagcaatcctggatctggtggccaactggaccaacatgaac

SEQ ID NO: 15373 - DNA, 1187 bp, Setaria italica
  Peptide Sequence Number=SeqID_81347
atgatggttgcctgaaaagtagtcgtcctctgcttacattacacaaagtatgtgcaacgaaaaaaaaaattggagccttgttcctcgctgaagctcggtggatatatccgtggaacatggcagtgaggtctaagcataaaaatttacaaaaccaggccaaatgaatggtagtacaatacaggaggccagaaatcgtttctagaagttggtcaaaattttatcctgtgatacaccgtccgcaacaagggctgtggtgacttcctcttgcatttgcctctgtccacatagcactgctcctgtagaagatgggtttactatgttcttggctctcaagaaagcatgctgtgcgtatccacattcacctttccaactatcatctggttgtgataggacaggaattattttaagtcctgctgactcccaattcttaaatctatcctgatacgccatagtttttagacttctggcaccataataaagtctcacgtcagctctttcattggcaccaaaaccaaactcaacaagtgaacgaattgtgctgatccccgtcccggcagcgaagatgagcacggtctgcgcggcgtccgccggcgttatcctctcgagtgggaaccccttccccatgactgcgccgagctccaccacttccccgtcgcggagcccacacaggcgctccgcggtggtccccggcacggacttgacgaggaactcgaaccgcgccccggcgcctggcggcgaggcgacggccatgaacgccggcttgagctcctccccgccgccggagggcacgcggatttggaggtactgccccggcgaggtgtaggactccgcgaggtcggcggcgtcggagaggtcgacggcgacgtggaagatggagccgtcggcggtggccgcgccgaccgcggagacgggcgcgggcgtccagacggccgcgtcctgcttgacggcgtggacggcggtggtgagcgggcggcggaagcgacggcgtaggatgggcagcgaggaggccgtggagcaggaggagggggaggggtggaggtggagcgcgaggcggggaggccgcggtggcgcggagatggcggccgcggcggccattgtggtcggtcaaccgtgggggggttgaagccgggggacgggggatgcgccgcgcggcgccggccgagaaagctggaggaaacggatgaccg

SEQ ID NO: 15374 - DNA, 259 bp, Setaria italica
  Peptide Sequence Number=SeqID_81348
ttttgtaggttacttaatttcttaagttacttgttttgtaatctctttgagaaagtatgagccactacatttttttcttttttgttcacctgctaacgattatattagtccacaaattctggaaagtcattaagcagcaattcatttttcttcctgctcgaccatgggggagatgttcccaggctctgaatttattgaggtaggagagtaccgaatcctggttggccaggatctggaaaccagattccaagggttcaaa

SEQ ID NO: 15375 - DNA, 1638 bp, Setaria italica
  misc_feature (1619)..(1619): n is a, c, g, or t
  misc_feature (1632)..(1638): n is a, c, g, or t
  Peptide Sequence Number=SeqID_81349
gtgcgcttccccccgccggcccggggagccggactgcacgtactacctcaagttcggcacctgtcgcttcgggatcaagtgcaagttcaaccacccgtcgcggaagaagaagggtagtagggcgagagggagtgggagcagcgggagcgggagcaacagcagcagcaataaagcatcttctcctgatgatgatcaggctcctagagaagaatacgaaggccttgttccagatatttcagattctgtgagctttgatgataaggggagttcatctaactcagaaaatcataggaagaactcatatgaggttattgatatgaagaaggggaaaatggagccaaaggaaaagatttcggaagagcctgaaaagggaatttatttcaagaagttagacgagacgaataatacaagccagaagggtgccaaggataaaagaagggaaaccttttcggaaggtagtgctcaggaggagtgcaagtattattcaacaccaggtggatgcaaatttgggaaagcttgcaaatacctccaccgtgagggaaaagaagggaaagcagaggttgaaaaggttgagctgaactttctaggtcttccactgcgaccaggtgaaaaggagtgcccgttctatatgcgtactgggagctgcaaatttgccactaactgcaaatttcaccacccagatcctacaaatgtgccttcaaaagaaccagttttggaacatgagaatggggatacaccacagcaaaatgtccaaggaccctctcagcccagtgttccaatatggcctgaacagagagcattgaatgagcaacatgttccttttctagctccagcaccatcgtacaatggtggaatgattccacctcaaggaatgtatccatctcctgactggaatgggtatcatcaggttcctgtgaatccatattatcctcccccctttccgcattttccagctcctcatatgaatcacccgatgtacaaggctgtggatataccaggacatcagcaactaccttctgatgaatatccagagagacctggccaacctgaatgccagcattttgttaagagtggtttctgcaaatacaggatgaaatgtagatttcaccacccaagggcgcgtcagcctgcaccactaacaggtcttagccccattggcctgcctatcaaacctgatcaacctgtgtgcacatactatggccgcttcggtgtttgcaagtatggtccagcttgcatgttcaaccaccccttcaactttggccctccggtgcctgcagcaggaccacccctccccggccaataccaccccacaccaggaaacttcaccgtctagcaggcacgagatgagcgattttctggaggtcgccacaagtgcttgtaataacttccacctgtaaaatagctgtaagtggctggcggtagagatccagctcccaaatcgcaacgaagttgcacgaagctgggtacattgccttttggattaaaccattcgaacctgttgacagtactgcaaactttacgctgtacagcatgttacagttcgtacataactgcccttggacttcaaattccagttgcatgttttggtacgagtaccaggaagttaaaaaaaaaaaaanaaaaaaaaaaacnnnnnnn

SEQ ID NO: 15376 - DNA, 1499 bp, Setaria italica
  Peptide Sequence Number=SeqID_81350
gtctacagttgtttctgctgttgatctgcgggaaacatctgccagtgatataggtgttagtgggggtgaggataattcactgctttccctgctatgtctagactccaacaatttattcactgtaataataggagttcgttgactatttgaaggtattgaataactgcgagtcatggcagcaggcggccgtggaagtggtgatgctgtatgtgatggtggtgagacacgggttggtgcattaggcatctgccgccttgaaaccaaaggaccagaatatccaaccaaaccaggacgaatggtgcctacattcgctggaggcctgggcagttcatgcagctcacttattttgggagttgttgttgggagagaagtgactcttggagtaacttttggaggtaaagatgacttccaacctgggccatgtgattttgttgacaatacacgagaaggataattcattgactgtctgcgatcagttgcagaaaacaacggattgctggatcctgttttgctcggaattggaccagaaaaggcttccctcttcattttcttaaaatctgaagtagagtaggaataaactagtggtgctgatatcccctcattatttgatggcatcttaataggtccactgtacatggaactcggcttaaaatctttcaccagtggagaggaatgccacacatttactgccacatgagattttcttgcaggtggatctgaatgaggtgatgtgttggtgactactgaatcagggttcttgtcatcggctggtgttgggagtttgtaagaatgaaaagttctgtttggcaggttcagtttccgaaaccccatagatggatcaggcacattctcggcaaatatgggtgctgattgggtaccaatctcaggcttcacatgaggaaccacaaaagccgccttcatttcttcggcattttcctgctcatgttccttcagaggacttggggaattcgtcggttgagtttgatccaaatccattggacttctggaagcaggaaggtctttgtccctgtcatttatctcatagtcaaaacttaactcgctgccatcactgtggttatcctggtaagagctataatcatcaatatcactatcatcatccagtccactgaagtggtaatcaatgtgctgcttctcagcaactgctttgacataaggctctagagcctctagatgcttcagtcctctcctgaaaaaactgatctgagcagcatgatggcgagcagcctgggtcaaaatacttagaaattggccttgctttagcgacttcaagcgaaatataaacaatgctgcctcctcttggtactcaagaaatgaagtttgcagttgttctgtggagaatgattcggatttggagtgcgttgatctccctttgtctttataggctgcccgcataccttcatattccactcttttctgatcacataggtctttcatttcctctacaacttgtagctccttcagaagtgactcttgtatta

SEQ ID NO: 15377 - DNA, 377 bp, Setaria italica
  Peptide Sequence Number=SeqID_81351
gtgacgtgcgcgcacaggatcccgacgagcatgaacctctccatggccgcaacgacggcgctcggctccttccggagcgccccggcgagcacctcccgcggccggccggccttcacgtgcgtccacgcccagtcagtaatcagcaccacgccggacgggtccgacaggtcgatcgcgcggcggccactcatggcctcgagcaccagcacgccgaagctgtacacgtcgctcttctcggtgagctgcccgtagagcgcgtactccggcgagaggtagccgtgcgtgccggcgacgcgcgtcgtgaggtgcgactggccctcgcggctccgccgcgcgaggccgaagtccgccacgcgcgcccgcatgtccgcgtccag

SEQ ID NO: 15378 - DNA, 857 bp, Setaria italica
  Peptide Sequence Number=SeqID_81352
cacagttctgagagaatctggaggatggattgatggaagaatgtactattcaagaatagcccttgggttagtcacggatttcgactattggaatgattcctattaacttgcggcaatgccgtacatgccccttgcctattatttccttatttggaagtgattgtcattaggggttgctccaaccttgtggagttgtcatttccacattctgcttgctgtcaacaggagaaagaggcactgccatttcctaaactctcggagctcaagattggaaattgtccgcagctattgtcatttcctcctgttccttggactgaagctccctgctccattaagatagaaggaactggcaattcgggtcttcaaaaactggtttgtacaaaaagtttgaattctagatattgtttgacaattgaggaaaaggatattccaggtagcacgttttggaatgtgctggattttcataatctaactagactcacagaattggacatgctcaaatgcaaacctctaccactgcgtcacttgcaaatgctaccatccctgaggaccctaaagatgtcctgttcaagtaactcctttccatttgatgaaggagataatcatgtccagtaccaatttccagttgaatccttgcttatccaccggtggggtgctagtgggaaggagttgacacagctactcacttacttcccgaagctctcagatctgcggatgtggtattctgagaagataacagggcttggtgtgatggggcaccaggcaatggcaactcctggaccatcatctccaggtcacaaagtgggccagcagcaggacccaagagcggaggaggaaatagtcgcattggcagcaga

SEQ ID NO: 15379 - DNA, 410 bp, Setaria italica
  Peptide Sequence Number=SeqID_81353
ttcagattgtgcgcgatccatttcgaatatgttccctgtacagaggaggcagcgccgccatacccaccattacatgcagcttaagctttgctcagccttgcatctctccctctctctcccatttccatctcccattcttttcccagttcttgactgttgtgtcggtttcgcacagcagttcaagaaaataaaattgaaaaactcgagacaaagtttttcttttgctctactgataagaacagattgcgctccgcctaggctgactggactggtccggggctactggatccgcccgacggcgccgacgcgctcggcggcggcgcgcatgacgccctccaccagctggggcatgcagagctcggcgccgcccgcggggccgcacccggcgcggacgcccacgctcgccatcg

SEQ ID NO: 15380 - DNA, 219 bp, Setaria italica
  Peptide Sequence Number=SeqID_81354
ctcacaatgctagtagaatgaggggaataatgggatgacggctcaggctcggttagcaagtagcgcatagcgctgcccagagcatagccaattgcgatgcgattcagctcaaacgcggcacggacaacacaaaggataatcaggatatggtcaacacagcagccacacatacactaatttgtactcgcgtatcagggatatggcacgcagctgcagtag

SEQ ID NO: 15381 - DNA, 328 bp, Setaria italica
  Peptide Sequence Number=SeqID_81355
cggcatcgtgcggtcgacggggcggctgaagcaggcggagtggaggatcagcgacctggagtcggagtgggaggcgttcctgttccggcgagggtgggcgccgaccacggtcggggtggaggcctgcgagatgcgcaacctcttctgctgcgccaagctcgtcgtcaagagcgcgctggcaaggcgcgagagccgcggcctccacttcaccgaggacttcccgtacctggaggagagcaggaggaagcccacggtcatcttcccggacgccgtccaggagctcacgtggagctccaagccgctgcagaggcagctgcaatgcaaatag

SEQ ID NO: 15382 - DNA, 301 bp, Setaria italica
  Peptide Sequence Number=SeqID_81356
gtcccgtagtctaaggtttattttgttgcgaattagcccatccaatacaacattataaatgatagcatcgggtttggcatcacccttcgccagcatgtcattaaaaagccggagaccaccatcaaccatcccagacatgcataaccccttgatcattgaagtataagctattgtatcaggtgcacagccacggctaagcatatgtttccagaccatcatagcatcttttaatctccctacattacacatcccagtgatcaatatactgtaactaatagcagtttggtctactactagtctt

SEQ ID NO: 15383 - DNA, 880 bp, Setaria italica
  Peptide Sequence Number=SeqID_81357
gtgccttctgcacatttccaactcgtatgcttccttctcaaatcagcaactgtggaaaattgtgtccataggcttggatgcttgctccccaaacaaggttaggtcctttatagagtagaagatctgccgctggagctcagtagcaggaaacatattccgagaagcatttagtgcctttaccagcttttctggtattgcatctccagttgtttcatctagagcaaatgtcttcagcacacgatagtcccatgcataacattcaaagaggtttgagggagtttcagccacatcaagagcaaccctagtaccagagaaatgctgataatccgttcttgatagcagagaatgaagggcatgcccaaactcatgaaaaagagtttcaacatccccatggttaagccttgcagttattccactagaacttgagaagttgcaaactaaggcaatgatcggaagttggtaatttgagtccgacaatttccgccccccttggacagcaaaatgagcacaccctgaatatttacccttcctggagtagagatcaagatacatgaatcctaaatcaccctcatcaggatgacagagtgagagctttatcacatctggatgccatgactctccatccctcatgggaatctgatggaatgtggcaccaaataatgattcaaccagcacattcagaccttttaggcattgtgacaagggaaagtattttgcaataactgaagcatcgaggctgtgtacagatgatttcatcattccaatgaaataatcttcatcccagggttcaagatcagcactcttttcattacatattcttctcttgaaatcctttataacattaaattcctcatcagctttatgcctaacaatgttactc

SEQ ID NO: 15384 - DNA, 269 bp, Setaria italica
  Peptide Sequence Number=SeqID_81358
cggaggccaattaagcaggagggatggcagcagggaggctctaccggccgaaggccaagagcttctggatcctggtgcgccgcctcatccttcgcaggggtcacagaccgccggcgccgggtggcgcggaggaggaccggagggaggagaggaccggcctcctcagcagaagctctctggagcagctcctggtcacggacggcggcgctcccggggatgacgatgtccgccggtgcgccaagaagcacggccagccggtggcagtgctg

SEQ ID NO: 15385 - DNA, 415 bp, Setaria italica
  Peptide Sequence Number=SeqID_81359
tgatgaagcagattgagatatgccaggaagagacaaaatacttggatagaatgcaccgccagaaagttgctgaggttgaaaagctcactcagactgtcagagagctagaagaagctgttcttgctggtggcgcagctgcaaatgctgtgagagactatcagcggaaagttcaggagatgaatgtaatgcctctgatatgcattatgcattttaggatatgtatacctgaaggtgccatgactaatgcaagttttacaatgtttcctattctcaggaggaaatgaaaactcttgatcgtgagctagcacgtgcaaaggtttcagcaaatagggttgcagtagtggtggcaaatgagtggaaagacggcaatgataaagtaatgcccgttaaacagtggcttgaccaacgaaggatt

SEQ ID NO: 15386 - DNA, 519 bp, Setaria italica
  Peptide Sequence Number=SeqID_81360
accatcttcaaaatagatagatgatgctccgccgcgattccatggcgccgccgccatgcccccgcagcccgccgtcctgacccaaaccccaaccccgttccttgtgggaagatcacaagagcaaaccaaaccaaaccaaaccaaaccccacccacccccaccagaggaacaggatggccgacagcggcggacttagcgccaacaacgccgccgccgcccacgacgacgacgacgccaacaccgcgcctttccccgacaccgtccaggtcggaggatcccccgagtacaaggtcgagaggaagctgggcaaaggtggcttcggccatgtctttcttggccgacgcctaactgctgcccacgctgcacgctcctcggcttccgctgcccaagaggttgccatcaaatttgagcacactagcagcaagggctgtagctacggccctccgtgcgaatggcaagtctacactgctctaggaggcacgcacggcgtgcccaaggtgcattataaaggccgccagg

SEQ ID NO: 15387 - DNA, 2390 bp, Setaria italica
  Peptide Sequence Number=SeqID_81361
agcgcagcaacagcaagtagggaggggagcccagagcagagcagcagctgctgaggcagagcggttgttccttttctttctcgctcctatcatttcgtttcgttcccgtccctgatctgatcaggccaggccaggcaggggagcagagcaggccacgccacgccactccctcccccacccccctcctcggagcagggggcaggtggcggagatcgccgcgccgggcaccgcattgcgccgcgccggccatggccgatccgtacggcgatggcaagaagaaccagcagccgcgccccggccccggcccccgcctcaagcccgccatcgagatggaggacctcatcaacctcctccacggatccgatccggtccgcgtcgagctcacccgcctcgagaacgagctgcagtacaaggagaaggagctgggcgacgcgcaggcggagatcaaggctctccgcctgtcggaccgtgcgcgagagaaggccgtacaggatcttacggaagaattggcaaaggtggacgagaagctcaagctcacagagtctctccttgaaaccaagaacctcgaagcaaagaagatcaatgacgaaaagaaagcagcacttgccgcgcagtttgcagcagaggctacactacgaagggttcatgccgcgcagaaggatgatgacatgcctcctattgaggccattcttgcaccactggaagctgagctgaaactagcccgtcaagagattgcaaaactacaagatgataacagggcactagatcgtcttacaaagtctaaggaagcagctctacttgaagcagaaaggacggttcagatagcattggcaaaagcttccttggtggatgatctgcaaaacaaaaaccaagaactgatgaagcagattgagatatgccaggaagagaacaaaatcttggatagaatgcaccgccagaaagttgctgaggttgaaaagctcactcagactgtcagagagctagaagaagctgttcttgctggtggcgcagctgcaaatgctgtgagagactatcagcggaaagttcaggagatgaatgaggaaatgaaaactcttgatcgtgagctagcacgtgcaaaggtttcagcaaatagggttgcagtagtggtggcaaatgagtggaaagacggcaatgataaagtaatgcccgttaaacagtggcttgaccaacgaaggattctgcaaggagaaatgcagcaactccgggacaaacttgctattgcagaaagggctgcaagatcagaagctcaactgaaagagaagttccagttacgacttaaggtacttgaggaaggattgaggatgtctacatcccggaccaatgtcagtaccacgcgccgccagtctattggtggtgctgatggtttatccaaggccaatggctttctgtcaaaacgcccatcattccagatgagatcatcagtgtctaccacaacaactctagttaaccatgcgaaaggggcatccaaatctttcgatggaggctgtagatcacttgaacgctataagggccttgtaaacgggaacggtatgaacgtatctaccgattccagtgaagataaggagtccagcaactcagatgagaagtgtaatgagtttgcatctgctgagtcggaggacttggtgtcaggtgctctatatgattttgtgcaaaaggaggtcattgccctaaggaaggcgtgccatgaaaaggatcaaagcctgaaagacaaggatgatgcagttgagatgttggcaaagaaagtagatactttgacaaaagccatggagtcagaggcgaagaaatcgaggcgtgagttagctgctatggagaaggagttggcagctacgcgtttggagaaagagcaggataaccgagcgaaacggtttggtagttcaagtggctctgccaacagttcgcagctcccacctgacaggagtttacctcggagcggctcagcacgcaacatgtgacaccttggttgattaggagtggtgacaaggaaggagcctctcctgatccgggagaagatggcattgtggaagaagccatcctgcctacatctcgtgggttgtgtttgtgtctaacaaaggcaaagctagtggaaggaagggtgtgctccggctagtgttttttttccccttcttcttcttcttttcattttaatgatgatgacatggcatttgctggtgattattgctgtttccttttttttttttactttttggcattggcaatgcaatgatctttgttggtgttgtataggtttggtgaggagttgctttctttgatatccatccatccgttgtaatgtaaaacgtatgcactgaagagttgcttataatttgcctgacgttttcccctgtttcgttctatcaatcaatgttggg

SEQ ID NO: 15388 - DNA, 2053 bp, Setaria italica
  Peptide Sequence Number=SeqID_81362
aagaaggaaagactagggacaaaaggtaggacttacggaccaatagtactttcttggccgacgcctaactgctgcccacgctgcacgctcctcggcttccgctgcccaagaggttgccatcaaatttgagcacactagcagcaagggctgtagctacggccctccgtgcgaatggcaagtctacactgctctaggaggcacgcacggcgtgcccaaggtgcattataaaggccgccagggtgactactatgtcatgattatggatatgctggggcctagcttgtgggattcttggaattcattaggccaatccatgtcatcggaaatggtggcctgcattgccgtggagtccatttccatcttggaaagcatgcattctaaaggatatgtgcatggagatgtcaaacctgagaactttcttctgggtcagccttcaacgcctcaagaaaagaaactttatcttgtggatcttggattagcaacaaagtggagagatgctgctagtggacagcatgttggttatgatcaacgtcctgatgcctttagaggaacagtaagatatgctagtgtccatgcacatttaggaagaactgctagcaggagggatgacttggaatcacttgcctatacactagtatttcttcataggggcaggttgccatggcaaggataccagggcgataataaatcatttttggtgtgcaagaggaagatgagtacctcacctgagagcctttgcggcatatgtcctcaacctttcaaacagtttctcgaaactgttgtcaacatgaagtttgatgaggagccaaactattccaaattgatttctttgtttgatagcttaattggaccaaacccttctatcaggcctatcaatactgatggagcccaaaaggtagggcagaagcgtgccaggttgcttaatgatgatgacggccatgtgaaaaagaagattcggttgggtgctccggcaacacagtggatttcagtatacaattcaaggtcacctatgaaacagaggtaccactataatgtggctgacacaaggttagcacagcatgtggagaaaggaaatgaggatggtttgttgataagttcaatatcatcatgtgcaaatctttgggcaatcattatggatgcaggaactggcttcacagctcaagtctatgagctgtctccacactttcttcataaggaatggattatggaacagtgggataaaagtttctacatcagttctgttgctggctccaacaatggaagttctcttgttgtgatgtccaaaggcacaccatatacacagcagtcttacaaagtcagtgattccttcccgtttaaatggataaacaagaagtggaaggaaggttttcacgtgacttcaatggcaacatcaggcagtcgatgggctatagtcatgtcccgcagtgctggattttctgagcaggttgtggaattggacttcctctacccaagcgagggcatccatagacgctgggacaatggctatcgtattaccgctatggctgccacaatggaccaatctgcgctgatcctaagcaagccaaggcgtcgcccaagagatgagacacaagagactctgcggactacacagtttcccagtcaacatgtcaaggagaagtgggctaagaacctctaccttgctgggatatgctatgggcgaaccgtggcttaacatcgtcggctgctgacctagctgttcttgatgtatattttgagtttttgtccctctggtaccagcatcagccacagggcagtgtcttagtccttggaagatgatgaatcctgatgtatgtatctgaacctgattgtaggtcggggtctcgtaagttaatcggggggaaaggcttcttatcagccgggctactcaggtccaataaaaatgagtctgtcatgtgcctcttgcagtgcgctttttacatcatgtcattattggtatcctaggaatttttccaggaattttcaatgggaaaaaatgtatcagaatccatgtaaccaggattccaaaaaggccctgcatatacagcatggagat

SEQ ID NO: 15389 - DNA, 348 bp, Setaria italica
  Peptide Sequence Number=SeqID_81363
tgaagctcaagtgcagtaaaagggcatccaagcagatatagtttgttgtatgcagcacttgcagatagttatgcttcgagagtgaagaacgggcaaagaagcttctgaataatgtatcatcacttctcaaacctggaggctacttttttggcatgactcctgattcatctacaatatggacaaaatatcaaaagaatgttgaggcttcacataacaaaggtctgaagactgttccaaatagcattcgctcggagaattataccattacctttgaagttgaggaagaaaagtatgaatttaaattgtatcctaaatgtacctgaaactttgttcatattgacttcctga

SEQ ID NO: 15390 - DNA, 1021 bp, Setaria italica
  Peptide Sequence Number=SeqID_81364
tttgtattacttgcggagttgatactaaagtggtgtgatgcccaggttggccactacataggaatcgatgcctctgcatcgggtgtcagcgatgcccgtgagctatgggagaacaagaggaaacctttcactgctgagttcatcgagttggatccttctgatgatgattttgaagctcaagtgcaggaaaagggcatccaagcagatatagtttgttgtatgcagcacttgcagttatgcttcgagagtgaagaacgggcaaagaagcttctgaataatgtatcatcacttctcaaacctggaggctacttttttggcatgactcctgattcatctacaatatggacaaaatatcaaaagaatgttgaggcttcacataacaaaggtctgaagactgttccaaatagcattcgctcggagaattataccattacctttgaagttgaggaagaaaagtttcctttcttcgggaaaaagtaccaactcaaatttgcgagtgaagcagtatttgaaaatcactgcctggtccactttcccagccttatgagattagcaagggaggctggacttgaatatgtggagatccagaatttaactgagttttatgatgataacagaatacaatttgctccaatgcttggtggttacagtgcaagttttttggatgctcgtggaaagcttgttactcgttcctatgacattttaggcttgtattcaacttttgtatttcagaagcctgacccagatgcaataccacctattgtaacacccgacttgcatgatactgataatgctcacgaagaggaatggctccgacggcagcaggcatcagcagatgatgggaggcgctcccatacggatgtgcttcccttggatcatgagaaaggcatcctgggtcctggacctgcagatatgaggctttgatggtggtaattcaaatcctgcttgaactcgggtgatgatgcttttagtatttgtttttcctcccactgaggacaatttctggtgtgtgcactaagag

SEQ ID NO: 15391 - DNA, 377 bp, Setaria italica
  Peptide Sequence Number=SeqID_81365
cgtgtccgtagcgagcacgccgcggctggacgacccgtcgccgtaggccagcgcgtagtagcacttctcgctgccgccgccgccggtggtggcgcacgagcccggcgtgccggtggcggccttgagggaggcggcgcacgccgaggcgttgcaccggacggcggcgtaggtggcggagccggcggggtcgaagagcgggtcccgctgcgcgtagcacgaggagcagggcttgcactgcacccacgtgagatcgctgccggtgtccacgatgacggtgaggttggtggcggcggagccggagctgccgccgccgagaccgatggtggtaacgtagttgagagtctggaaccggatgccggaggtcagtgggacctcgg

SEQ ID NO: 15392 - DNA, 360 bp, Setaria italica
  Peptide Sequence Number=SeqID_81366
aggacgcttggacgcgcccgggcggcggcggcgggatcagccgcgtgctccagggcggccgcgtgttcgagaaggccgcggtgaacatctccgtggtctacggagtcatgcctcctgaggcgtaccgcgcggcgaggcccgaggccgccgcggcggctggaggggagaaggatgggccggtgcccttcttcgctgctggtgtcagctcggtcattcatccagtaaacccgtttgctccaacaatgcatttcaactaccggtatttcgaaacagaggcacctgaagatgctcctggtgcacctaggcagtggtggtttggaggtggtactgacctgacgccttcatatatcattgaagagg

SEQ ID NO: 15393 - DNA, 592 bp, Setaria italica
  Peptide Sequence Number=SeqID_81367
tgtggttaattcgtgagacaaatctattaagcctaattaattcgtaattagcacatatttactgtagcatcacatggtcaaatcatgaactaattaggtttaataaattcgtcttgcgaattagccttcatttatgcaattagttttataattaactaatatttaatactctaattagtatctaaatattcgatatgaacagatactaatttagttcctgaaccaaacatgcactcagcgactcttttggggataaatcagcgtggcatcgatgacgtgactcgagagaatccactcgatcacttctttccccctttcttgtcgtcctttttctcttccttcgccggcccaaccgagacaatatcgatcttcccaaacttcttcaacttcttggcgatctcaacggggtccatgtcaccgattacagtcaccttctgctctttgacatcagcgccaatcgaatcgattccgtagatatccgcaacagtttccattgccttctgcttcaccctgtcatcgctcatcgaggagaccttcaagaccaccttccgcggcgccatcctggaggaaggaggacagagactgcttggaa

SEQ ID NO: 15394 - DNA, 394 bp, Setaria italica
  Peptide Sequence Number=SeqID_81368
gacgacgaggaggaggacgccgccgtcgccgtggccttcttcgtcgactggacacggtgctgctggtactgcgggcggttcttggccgccgccgcggcggcgaccttggggctcttcttggacgacgacgcggacacggccatgccgcgctggcttcgtgcgcctggaggggttcttggcgccgacgagagcgacggttgcggtgacggcggcggtggtttcttcttgcgcttgctgccgtggtggtggtggtcatgacgccggctgtcggcgcggtcgccagcggccttgctggccgtggaggccgaggaggaggggagaaggagactggcgagagccatgtatgaaatctttgttctactagtgtgtcctttgtttgcactctcactactac

SEQ ID NO: 15395 - DNA, 484 bp, Setaria italica
  Peptide Sequence Number=SeqID_81369
gtctttcgcatcgctccactccagctagcgtcatcacccatggcgtccgaggccgctgcgtccgccgagcccgcgccgcaggtcgtggacgagtgccggggcgtgctgttcgtgtacagcgacggcacggtggtgcggcgcgcgcagccggggttcgcgacgcccgtccgcgacgacgggtccgtggagtggaaggacgcgacgttcgacgaggccgccgggctggggctccggctctaccggccccgggagcgcggcgggcggagccggctgccggtgttcttctactaccacggcggcgggttctgcatcggatcccgcgcctggcccaactgccagaactactgcctccgcctcgccgcggacctcggcgcgctggtggtcgcccccgactaccgcctggcccccgagcatcgcctccccgccgccatcgatgacggcgccgcggcggtcctgtggctggcggcgcaggggcgcacccccg

SEQ ID NO: 15396 - DNA, 531 bp, Setaria italica
  Peptide Sequence Number=SeqID_81370
tctgttgcgtcaagacgaagcactttaggtcatggaactgaggatacacgcctgaggtcgaatgatgttgttggatcaaattttagtggctgtggcataagctattgctggtcaggagcgtcaaaataccgagaactttattctgatagtgatggtccagagcaacctctcttatctactgatgggactgaggcagcatttcaaagcaatgtaccatacactgagacgccaagatgtttaagccagaaatttcgccctcggtcattcagtgaactgatcggcctaaatgttgttgctcagtccctcttatattcctcttgcaaaggaaaagttgctccaatgtacttgttccatggcccccggggtacagggaagacgtccacagcaaggatttttgccgctgctctaaattgtgtctctcttgaagagcaaaggccatgtgggttctgtaaagagtgtgtcattcttttctctgggaagagtagagatgtgaaagaacttgatgcagacaaaaatggattcgtttaggcg

SEQ ID NO: 15397 - DNA, 584 bp, Setaria italica
  Peptide Sequence Number=SeqID_81371
attggcatatcccacagaggacgccagtcgtctaaggggatgagtgtgcccgcacggttcttgcaggatgctgctgccagcaggtcgcaaagatttgcagatccaggcacaccatacttgccgtatacctctggattggccgcatctccaaggacagcgccggtcaagaaatcactgttaaatggctttgcttcatctccactgaatcggccaatcaggcaatcttcaccaagtaagcttacaggtaatccatcgaggaggatgtcaagtccatcacgggcaagaaactctgtggggtcaggcacttcatcttgggatcatcagggaagaagttcatccggttatggtataaatggtgaagcgaggaggaggtggcatgggggtagtaaggtcgactgtgagcacctattgagaattttgtccaatcggcagttgcagtggcggtgtgtgaatgcacaggctgatgctgcacttgctgcacagaaattgactgcagagaaattcttatctgatgcctggattactacctagggattcgtcgatctaattacttagtttagtacttactttaaatataccgaaac

SEQ ID NO: 15398 - DNA, 378 bp, Setaria italica
  Peptide Sequence Number=SeqID_81372
gaattaacagtacatactgcacccaagtacccaaccatattctggctaatcaggttactgccctttgaacagttgggaagccatgaaaggtttgctatacatgtcgcaatttaggaatgtgaaaatggaaggctatatgaaatattttattccacatagcttgataagaaaaaattaatattcacatggaaatatggcatagcctccaagatcatgcgaattgaaccgagtgctacaataccaagttaaccattggcatgacagttaccgaaaactaacaagtaaattctaacatactgccattaacatctgaaaacgatgtgctccaaatagtagtaattgctgcgtaagtgacagtacagtgtgaatactacatcc

SEQ ID NO: 15399 - DNA, 227 bp, Setaria italica
  Peptide Sequence Number=SeqID_81373
atcctgatcaaggtctgcatcagtgtgccaccaatcatgccgctccaaatgccctgcattattttggaccttatggacagcgattctgcaatggttttcaaaaagcagctacttccattaaacatttgcagaatcgctgtccataaggtccttcattgcaggaggcgcatcaaattccttcagtgaaaccgggggtgcgcgatgtgctcatcacagaaggaatttga

SEQ ID NO: 15400 - DNA, 483 bp, Setaria italica
  Peptide Sequence Number=SeqID_81374
agtagaaccgaggaggcatccaagggggatgcccacgatgtagtagcagccgacattgacataggcgacgaaggcttgccatccacacccaacagctacccccgacaggacgggctggatgccgttaaggatgagagtgaaagccagcagtggcgtcagttgggacactgcccgtgacacgtcctcgccctcggtgaagatgtagctgatgtaatcccggcagattaggatgacgatcgagatgatcaccgacaggatgaacgatagcaccgtcaccaccaagacggagaacgccgccgacttggggttgccggcgccaagctcgttgctcactcttacacttgctgctgcattgaatccaactgagatcatgagcacccaccctgaaattgtcatgcagacagataatgaggccaatgcaaggtcgggatccttgagcaggccggcgatgagcacgaggatctggtagtaccacgtctcgag

SEQ ID NO: 15401 - DNA, 935 bp, Setaria italica
  Peptide Sequence Number=SeqID_81375
ttgcttgtgaattctgaaatttagcacgatctcataggagaaccgagtgaactagtgatcacgacatgttcccgggaaaaaaaaactacgcatcagtacatctctgaactgagtggtctatcattgcagttagcagcggcagaagggatggcaactgaaaatatactgcagactggatcaacttgagctgcatattggttcgtcatccactcctgacatcatcactccttgtctgcgagaagaggctgccttgtgtcgtcccacttatctaatcttttccgcgcttcctcgacctccttgttccagtcagttctcaacgtgatccagatcagtataagtgtttggatcagggtgccccctatcatgcctccccacaatcccttgattccaaagtcaaacttgaatccaagaagcacaccgagtggaaggccgatgaagtagtagcatccaatgttgatgtaggctaccattgcttgccacccacagccaacggccacacctgacaacacgggctggatcccgcagagcagaatggtcccaacgagcaaggggcacaggtcgggctacgggcgcgcgaaacgacctcgccggtggtgaagatgtagctgagcttgtccctgagcaggaaagtgacgagaccggcaattgctgatacgaacgccgacagggccgtgaccatccacgcagagaacgcggcagacctggggttgccggcgcccagttcatttcctactctcacactggcagctgcattgaagcccacagagatcatgaacacccatgactggatcgaagtacagacagtgagcgagtccagcgcgacctgcgggtccggcagcatgccggcgagaaggatgagcacctggaaataccacacctcgagcgccagcatcaccgccgacgcgatggataaaccggcgaaaccaggcaggtca

SEQ ID NO: 15402 - DNA, 928 bp, Setaria italica
  Peptide Sequence Number=SeqID_81376
agtacggttaagtaacatgaaacaggggactcgctagatgcatattctatccataatgtcttgtatttttttaaaaaaattgtccccaataggtgaaaaatacagtgagataaaggatgaactaacctggcagctgcattgaagcccacagagatcatgaacacccatgactggatcgaagtacagacagtaagagagtccagcgcgacctgcgggtccggcagcatgccggcgagaaggatgagcacctggaaataccacacctcgagcgccagcatcaccgccaacgcgatggataaaccggcgaaaccaggcaggtcagcgaaggcagcccaggtaaatccagcccacgtagccctgaaccgagggctccacacaatgtacgcgaactggcccagaacaagaacccaccacgtgaggctgagcgtgagcgaggccccgagcaggccgaggcccagcacgtagacggcgagccagctcagcgccacgtggagcacgaagctggcggcgaggatgtaggcgctgggcgccacgatgctctgcgcctgcaaaaacttctgaatggggaagttggcggcgtaggcgaagatctgcgggatgaggccgtaggcgaactccgcggcggcgccggcgatctccggcgactggccgagcagcaggaggatgggctccgagaaggcgtacatggcggcgagcggcacgccggtggccatgagcagcaccgtcgagcgctgcaggtacacgcccagcatctcgtacttctcggcgccgtacgcctgcccgcacagcgtctccaccgcgctccccatccccagcatgaggccgtaggcgaagacctggatgccgttgttgccgagggaggcggcggcgagctggacgttgccgagctggccgcagacgatctgcgtggtggacgacatgacgatga

SEQ ID NO: 15403 - DNA, 1967 bp, Setaria italica
  Peptide Sequence Number=SeqID_81377
ttttttgagcttaacaggcggccaagcaatcgcatataagcatttctcaacaaatttgtttgagttctcagataggaacatacacaaaataaatgagtaccacaaaattaactagcacttatcaatggttttcaaaaagcagctacttccattaaacatttgcagaatcgctgtccataaggtccttcattgcaggaggcgcatcaaattccttctgtgatgagcacatcgcgcacccccggtttcactgatgacccaataatagaggaccatatccatgcctcattcttttgggttgccaatagaggaaacttcatttcattcttaatctagcaataggggagatttttcttcccacttgtttaatcttttctgcgcttcttccacctctttgacccagttggtcctgaatgtaacccagatcaggatcaaggtctgcatcagtgtgccaccaatcatgccgctccaaatgcccgccgctccgaggtcgaagtagaagccgaggaggcacccgagggggatgccgacgatgtagtagcagccgacgttaacgtacgcgacgaacgcttgccatccgcaccccacggccaccccggagaggacgggctggatgccgttgaggatgagagtgaaagccagcagtggcgtcagttgggacactgcccgtgacacgtcctcgccctcggtgaagatgtagctgatgtagtcccggcagagcaggatgacgacggagatgatcaccgacaggatgaatgacagcaccgtcaccaccaagacagagaacgccgccgacttggggttgccggcgccaagctcattgctcacccggacactggcagctgcattgaacccaaccgagatcatgaacacccaccctgagattgtcatgcagacagagagcgatgccaacgcaagctcggggtccttgaggagtccagcgatgagcacgagtatctggaagtaccaggtctcgaggcagagcatgacggcggatgcgagcgagagcttgaagaagctgggcaggccggagaatgcctgccacgagaaccccgtccacgtgagcctgcaccggcggctggtgacgatgtagacgaactgcgcgacgacgatggcccaccagctgacgctgagcatgagcgaggcgcccaggagccccaggccgagcttgtagacgacgaggtagctgagggcgaggtgggcggcgagcgtggcggcggagatgtaggcgctgggcgccatgatgctctgcgcctgcaggaacttctggatggggaagttggcggcgtacgcgaagatctgcgggacgaggccgtagacgaagacggcggcggcggacgcgatctccggggactcgccgaggaggacgaggatcgggcgggagaaggcgtagaggacggcgagcggaacgcccgtcgccatgagcagcaccgtcgagcgctgcaggtagacgcccagcatgtcgtacttgtgcgcgccgtaggcttgcccgcacagcgtctccaccgcgctccccatgcccagcatgaggccgtaggcgaagacctggatgcccgtgttccccagcgacgcggcggcgagctcgagcgtgccgaggtggccggagaagatctgcgtcgacatggacatgaggtagttgatcatgtacaccaccaccgccggcgccgccagccgcaccagcaggcgcatctccaccagcgtcgccgcggacatccggcggccccacggcagggactcatcgctcaggatgctctccagccgcccgctcaccgcctccaccccgtgcccgctgccggtgtggctggccgtcgccgcggctagcagcgggctctccagcttgctcgccccggcggcgccacccgccatcgtcgccgtcggtcaggcggcgtgggcggattgccgtgtgcgctcgtgggtagaagatgctttgttgcctcgctttggatctagctgtgtgggcgtgggggatt

SEQ ID NO: 15404 - DNA, 991 bp, Setaria italica
  Peptide Sequence Number=SeqID_81378
ttctttcctatatgtgtgcaaagaataccccacaagctcaataagcccaggctctcgtgtctcaactctcaacttcaattcataacgaggataatctgttgctgttgccctcttggcacagcactttcagtacagtatgtatgtggaagctatgtatcatgtatcagtatcactatccatcacgccattgcagcaccatctctgcgttagctgtgtccatcttcctttgtgtggacggggaccgaggacgtacagtacaaaccaactcctccaggcccttcctgcacctccactaagataccaaaaaaacaaccaataagtataaggcagtagtaaccaagctatggacctcactaatctttggccgccttgtttctccaagcagcgatcgaattcggaatgttgtcgaggaggggcttcgggatgctgtcgaagagaggcttcggtatgccgtcgaaaagcgggagaggaagtgtgagggtgaaagcgtctggtttcaagttccacttgctcttcaaccacaccgatgcaatgctgatgctgtctgaatcttggaactccggagtgctcgaagatttcttcacagcttgcaatccatcgccgtacgaaggcatccacgtcgccaaaagatcttgctggctactgttcatatctgctcgactgccaggcttcggcctcatggccaagccctgcccggccctcgccaacaggctaccgccattgtcctcccttgttgtcaactcaacatcggctttctggcgccgccttatgggcttctcagcatcatcggtctccctatttgcatctccattttcaatagagaagctgctagacaagcttctagctttcctatggtgacctttagcgtacgtcgccatttcagtgcctgcattagtcaggttctcctgtggggtaggtgtaaggccatagtatcccatttttgggagggcgacgcgtagtccattctctgctgcgatcggcgtggcttgga

SEQ ID NO: 15405 - DNA, 400 bp, Setaria italica
  Peptide Sequence Number=SeqID_81379
ctgtattgatgttgagcacgcggatgttgcctagcttaagtccgtacacgatgtacgtcctgttcaccgcgatctgcctaccgagcaccagcccaggatccgaggtgtacttggttatgggtgtcacctccagctgcggcggttctgcttcccctggtagccgcgagtccacgtcgtgcactgcccggtcaccaggtcccagcagcctcccgcgcggcatcttactgctgagcatcctcgccggcggcgcggacgacgacgccggaagcgccaccgcgggggccgtcgagaactccgacgagggtggcatggacgccgccgactcgaggtgggtgggcgtggtgttgccgagcagcttgtctaattactaagtaccgtacgtacccccgggttttaagta

SEQ ID NO: 15406 - DNA, 1324 bp, Setaria italica
  misc_feature (333)..(333): n is a, c, g, or t
  Peptide Sequence Number=SeqID_81380
taacagaaacaatataaatcgtgttgctttagtatttactctcaaaaggtcactcatttttcaaaaaatacccgcaattgtcctatttgtgtttgcactcaagcaattgataacccaatttccagctgcatataaaaactaatacggatacctagttttgttgtccaaacaaaattctggaagttataataaaccaatatagcttacaaatatttaaccgattgattaaatatttggacaattgaaatacagaggatttggaaaaaaacgatcatgcttcatgtggaaaccaaaaagaagtttaaatggttctccagtctgcacagtcatacncagatggaaaccagagcttccagcatcagattcagattatccctgctggagaacagaaagattttttgccaggttaccacttcaccagacagctagcaagtattacaataccaagacttgtccaaaaaaagaaaaaaatcaattcaaaatcaatatcaagtcagtttctacccaatttctcaccaaatccatggtaagtgcgtggctactcccaatgcattgtctcaaatcattttctccaaagctaccatgtcatagaaatacaagtacaatatacactccaaaatcatagtgtcttgatgttgtttcttagactcacaggccaattaattgttgttcaatgtcacgtctatgaagatggacccaaaacacgtatcatatgaaacaacaacaccctaatgctattgtgtggtttccagtggtcaggttttgtgcccaagctgttgctcatgtcgcacctaattaatgtgtatcatacttcccattaggagtagccttatacatccatatcaaatgtattaaaaatacttttagcttgctgtcatgtttatacttctatggtggtaagagaaaatgatagtgataggcaggcctcagcatccataacattggtttatctgatgctatacatgcattactggatggcgattatcacaaatacaaaagattcacaacagttaccctgggagtacttatgcatcacagcctcagccagaactgcattgtccttttatcttcagctcaagcacataaataaattgcaacagtaaatgagactaagtaatcctaacaaatgggcacaatcactttgtagatagtctaggagccttaagatactctgtagtgtatcaaacttctggcatttccatttgcataatggaaatggtgtcgagcctcgtctcgaaaagacaatgggcacgatcacccttgtcaggcctgaatgcaggtgtgcctattcttctccacaaagtcacgggttatcaaatttgga

SEQ ID NO: 15407 - DNA, 1408 bp, Setaria italica
  Peptide Sequence Number=SeqID_81381
gtttcacgaaaggtccagcaggttgagcaccggtatggagcccaacccggccggaatctcgccggtgagctggttatggctcaagttcatctgcgacacggcacagagcaacgccatgctctctgggattgccccagagagctggttcgccgacaggtccagctcctgcagcagtggcatcccagcagcaaaccccgctggtatgtcaccggagaagagattgttgctggcatgaaacttttggagcttagccgccgtcgccggaatccgtccagtgaaccggttgttgtctatcgaaagcctcgatatgttccagtacaggttctccggcagggttccgctcagctgtccattgttctgcaagaacagggtcaaaagcttgggcaccgtccacagtgcggccggcacctcaccggacaactcgttatcttggagctgaagccatatgagagtggggcagctggcaagactggacgggattaagccgttaagctggttatcggaggcggtgagcaccaacaaccgtttgttgctgcagattccttccggaattggcccgacaaagttgttgctgtcgatctggatgtctctcagcaacggcgtctgctttccgagctccgccgggagctctccactgaggctgttgtcccacagccacaagaactccaaggacggtagccgggcaatactcgccggtatctcgccggtgagattgttctggtgcaagttcaagtatctcagtttcagcaagcttccaaagctttccgagatggttccactcagctggttcatggacaggtcgacctctaccaattctgttgccccgatcttgccattgatgccaatgtcgccggtgaggttgttggcgaaaagatacaagtactgcagcttttggaggttccaaatcccgggtggtatgtttccggtgaatctgttcgtcgacaggtcgagccactgcatccccggcatctgcgtgacgtaattcgggaattcaccaccgaggctgcaattcgccagccagacagtggttagcttcgtcaagcttttgaacgactccggcagcatgccggcatcgaacggattgctctcgagcttgagcgcctcgaggctaatcaggtcaccgagctccggcgggatcgtgccggtgagctggttctcgttgagagcgaggtacgtcaggttcttgagcttggacaccgccgccggtatcgtgccggtgaagctgttgtggtccaaggcgaggtaagtcaggttgcccccgagccggccgatgtcggccgggagcttcccggcgagccggttgttggagaggtcgatccgcgcgatgccggtgcagttgtagaggaacgccgggaagccgccgccgacgctggtgttggagaggtcgagcgccgtgagggcggtgagc

SEQ ID NO: 15408 - DNA, 2192 bp, Setaria italica
  Peptide Sequence Number=SeqID_81382
tgagaagcttgctaacagctttcgaacctcatagtagcaataaaatggttcaacgttgtttctacctgtagctcacattcatcatttggaggcacctgtatttgaacatcatgcactaaactgacctaggagagtaggaggtattacttgccatttgtatgtataatcattgtgttatttttactttaaatcattgcatacttttgtgcactttttcaagaatgatgtgtcaattcatacatgaactttatctgaattttctatttagagtgggctttgaattctatcacagtagttttagctttatatgaatggcaacttttgtgctaccgctccctgaccacgaccacctacatagagaagcaaaaggggacaacattctacaattagctttgctgcgcctagtttttcctgcttagctatttaccacacatttcctatcccccacctaggttggactggatatttcattgtgaaaataaatgagggccagagccggcgtgtcaggtgcatggctccaaagtgcaatgctatttgtgatgaggcagtaatccggaaactagtcattgcaaggcgcccagaccttgcagaacgctttgagagatttttgctggaatcatatattgaggataacgatacggtgaagtggtgcccaagcgtaccgcattgtggaaatgctatacgtgtcaaaggtgatatttattgtgaggtggaatgcgcatgtggatgccagttttgttttaattgttccttacaagcacactcgccgtgttcctgcatgatgtgggagctctggatcaagaaatgccgtgatgaatcagaaacagtgaattggataacagtaaatactaaaccctgtcccaagtgccacaaacctgtggagaagaatggtggctgcaacctggttgcatgtatttgtggacaagcattctgttggttatgtggtggtgctactggtagagatcatacgtggtcaagtattagtggccacagttgtggccggttcactgatgatcagactaagaagacagagcaagcaaggagagacctctatagatatatgcactaccacaacagatacaaggctcacactgattctcttaagcaggaagcaaagctaaagaatgacatccaggggaagatatccatttctgaaaataaggagtccaagataaaagattactcttgggtgataaatgggttaaataggctattcagatcaaggcgtgttctttcgtattcttatccctttgcattctacatgtttggtgatgagattttcaaggatgagatgactcctgaggaaagagaactgaagcaaaatttatttgaggatcagcagcaacaactagaatttaacgttgaaagactatctggttttcttgagaaggattttcaaaattttactgatgatgaggttatggatacaatgaagcatgtcatcaatctttccaatgtggtagatcggctctgcaagcaaatgtatcagtgcatcgagaatgatttgttatatcctctgcgcacacctcataacatcgctccatacaaatccaagggtcttgatagggcatcagagctcgatattagctgggattctgctgaacaaagttcgcagtcaacaaaacgtattcaggacgaacacaggagccaacatgcatcgactaacctaggaaagcgggctcctgagttgcatggctcgagttctgaaaatagggtgcgacctcacaagcgagagaggcaagatgctaatggtggtggtgcactttttgatctcaatgtgccagctgaagtggcagacaagatctgaaacttcaatacctgatgggtgaaggacattccttggaactgtacagctgacctgagcttattcagctacataaaggaaaattaccgttctttttgctgccttaccaccatagagtatcttgattgcaatttttacgctggtgctaggttcccaagaaatagagtagcttttacatgatatcttgcttatcatgacagggtttgaagccaatgttgatagttgtgataaagctagttctacccctcaaacaagatgagggcattttggaatagaacttcactgtgctttgtgttaacaattccaaacataatgtatgcagcatggtgaaggaactggcttttgactcgaatgtagtacttattttcctaaatgagtggttatggta

SEQ ID NO: 15409 - DNA, 281 bp, Setaria italica
  Peptide Sequence Number=SeqID_81383
gcgggggagggtgcggcgacggcgtggagcgtgcggcgctgctgctgctgctcttgtgctgctgtaggcacggagcggaagatgcgaggaggtcgcggctcttggtggtggtgatctccgttgggcttgtgctgggcttgcgatgctgctgctgccggctgatcatcttgtggtgcgaaggcggagcggaccatcctctcggggtctccgctggccgcggctgccgcgacggagtcctgctgctgctggttggtggcagcaaaagcgtcatcattctgctg

SEQ ID NO: 15410 - DNA, 505 bp, Setaria italica
  Peptide Sequence Number=SeqID_81384
caaggagggagagggcaggaggagggaggaggaagtgcccgggaggatcgccgggaacggcgtgggcaatgcggcctgcctctttacgcggcaggggaggaaaggcaccaatcaggacgccatggtcgtctgggagaacattaatggaagagcagacacagtttttgtggagtttttgatggacacggcccacatggccatatcgtcgcaaggaaagttagagatactctccctttgaagctgtgtgatttgatatatgacgactatggggaaagccctatcagcaattcagatggttcaattctagaagagactttatctccatatgcagatgcagaggacaaatctcccatgtctggacagaaacaagaacatcgggaattcttttgctcaatgaaagattcattccgaaaggcttttcgagtaacagataaagaacttaaattacacagaaatatcgatagcatatgcagtggaagtacagcagttacttaatcaagcaggg

SEQ ID NO: 15411 - DNA, 294 bp, Setaria italica
  Peptide Sequence Number=SeqID_81385
gggtctttgtatgatttgttggaaccccggtccccattggttaccgggctggctggatcaactgctgttgctggggctggcaccgacggtgtaccagagcccggcgtccctgaaggcgaggggctagtgggagtagggatcaaaggatctccagaggtcggcgcagggctagctggagaaggttcgacaggaattccagaaggtggtggtgccggctgagttccaggcttccttggcggccgatgatgccgtggtggaggcggcggcactgccgtcggcggagttggatcagcc

SEQ ID NO: 15412 - DNA, 291 bp, Setaria italica
  Peptide Sequence Number=SeqID_81386
taagaatatcagtaggtgtggttcttatctatgctatagtcatatggtgtaatgtttgagtttgcatattgatttgaagtgcaagtttcttgcactggttggtttaccacctgaagtcaaagtatcatagctttcagataattcttgaaacaacattgagtgcaccttgataacaaatagctcactgagtttagacatgtgccagtatgcgtcagatctgctgtaagcaagaaagatgaaagggggttattatttctagctggacattgagttttttttttcctttgaagc

SEQ ID NO: 15413 - DNA, 290 bp, Setaria italica
  Peptide Sequence Number=SeqID_81387
taagaatagggaaggaaggaagggaagaaagaatattgactgtaaaatacgagatgacgaccttgcttgttgaggattgagctttaaagaaattaatcagagctacaactcaacgatccatcgcctctcttatgttaccatggtagtcaatgggctggaacatagcagccatgccagaacaacccttcagtcttgagccaggacgtagtctctgcctccaccccatggccgctcttgcgccttgggatatcccgatacctcccttggccaaccaacgacttgagaaatgt

SEQ ID NO: 15414 - DNA, 368 bp, Setaria italica
  Peptide Sequence Number=SeqID_81388
tttatacagtttgccaagctcttccatgaggtttggatattttgccaagtcctttatttaattttaagcggtgtaggtctgcacctatcgctgcttgacagcaaattaattcataatccaaaccgtggcatccgtgttagatttctttaagaagtaagttgtgtgattgaatataatagctgtccgacacccatgtgagtatcagagtatgtgacagtctacctaacctaccaatcatcagttggttttgcggcgatcaatggaccagtagtgcagaactgcagattcgttagttctaaggcatcgattctatcctttgtcaagtgctatacccaagctctgctcttctatcgcgccccacctcacat

SEQ ID NO: 15415 - DNA, 374 bp, Setaria italica
  Peptide Sequence Number=SeqID_81389
atgaggtttggatatttgccaagtcctttatttaatttaagcggtgtaggtctgcacctatcgcgtgttgttgtttcccccatggccgccccaagggcctgtagtgtggtacaggccatcgtggtcggtgtacgaaaaatcgatcgaatcgatgataactccactgctaattgtaatgctgtccaaacggtagggtggtattttgatgtcttttgactctcctccatctccaccccatggaccaaatttggacagctcaagcttacgagcgctacctccacatcctccagatggacctgcagtgcactgctggccgttgtggtccaggtaatgtggttttactgtgctatcatgatgaacccctcatctccacg

SEQ ID NO: 15416 - DNA, 387 bp, Setaria italica
  Peptide Sequence Number=SeqID_81390
gtccatgtctttggatgtggattttctgatatctgatatgaaaattttccaatctgttgctctctctactgaaatttattctgaacggtcattctcaccgactcactttgatgctcatggtcaaactggttttccttcttcttgaaatgatataagatgagaatccagagcatcgaagattcgaacattgaaatattgggtgcctgcatgcctactaatgctatctgcactttgtatccaaacagcaaagtccaccggtgaaaaaatatacagctgcatcttgtgcactgtaattaggaaggcacttacaggtgataaataatacaattatgccaaacaaaacctaagttgtcttttttataccccaccgtgccgaagcaagcgttt

SEQ ID NO: 15417 - DNA, 339 bp, Setaria italica
  Peptide Sequence Number=SeqID_81391
tgtcatctcacttggccctctgcgaaccaactggccagcgagcgaactcctccccactcggcggcgccgcttcgttgatggattgggccacccggttccgcatccggaacccgtcgccggctgccgcctcccacttcgcaggcgagaggcggcgcccgggaggcagggcgtccttccgccccatgtcgtcggcggctccggtggaggagccggcggcgtccgaggcgaagcggcggccgtccggtgaatccttcatccggcgccacctcaggaccctcgccccgtaccagcccatcctgcccttcgaggtgctatctgctcggcttgggcgtagaccag

SEQ ID NO: 15418 - DNA, 413 bp, Setaria italica
  Peptide Sequence Number=SeqID_81392
ggttgtggtacggggcccgcccccggaaccccgccgccaccaccgccgccgcccgggggcgcgtgggccggggacccgccggcgccagaggaggacgatgaagccgcagccatcttacgttgacgccgcacgctcgctcgctcgcaccgtatgtatctgccgccggcgtctcgtctcccctccggtgtctgggactcgctctggacttgctagtccccgatcgatgatgatctttgtggccggggacaaaagggccgggagagcaaaactaaacccgcccggactctgctagtggtttcgggcgggccggattgctaggcagagagacctggcctcctgcggttgccccctccccttaggtttcctagtatacttctccccttccataacctcccggtctctccacctcacaa

SEQ ID NO: 15419 - DNA, 225 bp, Setaria italica
  Peptide Sequence Number=SeqID_81393
gacccgggcgccccgccgcgcagcgccgcgggcgtctggagccgttcctcgtccccgccagtgacgaggactcggagacgtcgttcagggtggtctgcgtggtggagtgcaagcctggacagctggtcgccttcgtcttctcgtcggccaccggacaatgggaaagtctgaccgtggacgccggcttgcagccctcttgcaagttctcatggtcctcctacgcct

SEQ ID NO: 15420 - DNA, 324 bp, Setaria italica
  Peptide Sequence Number=SeqID_81394
caagctcatgataaatattagtgaccatttggtgagggagagagatcctgttttttccaacaactgacccaacttagtttaggaaaacatttccaagtggaggagagccacatgcagcccaggtcgttttcatgggttggaaatgataatgtataggctatgtactgttttcatatgttgccagcgaccttactgttattttcaaatgctaacaagtggacaacaaatttatcatcggacccatttattttgtcaagaaactgacaacaaagacaaaactgggaaaccttccatcaaaggcaaagggagaaaattaactggatt

SEQ ID NO: 15421 - DNA, 813 bp, Setaria italica
  Peptide Sequence Number=SeqID_81395
ccttgcaacctcaaaccagttgttcatctgttcagggtgttcagctgcttacattattggagcacttcttccatggcgctctttggttctagtaggattagtaccttgtgctgtcttacttgtggggcttttcttcattccagagtctccaaggtggctggccaacgtagggagagagaaagagtttcatgcttcattacagaagtttaggggaagagattcagacatttctgaagagtctgctgagatcaaaggttatatagaatcaattcacagattacctaaggcaaagattcaagatttatttcagagtaaaaataatttatgcagtcacggtgggtgttagcctgatgatttttcagcaactgggaggaataaatgccttaggcttctatacaagctatatcttttcctctgcagggttttctggaaaacttgggaccaccttgattggcattattcagattccaatcacactgcttggggcccttctcatggataggagtggaagaagagcccttcttttggtatcttcatctggaacatttcttggctgctttctgactgggttatcattctattttaaggcacaaggactgtactcccagttggttcctactttggctctttgtggaatattggtatattacgcagcatactcagttggaatgggaccagttccttgggttatcatgtctgagatattctcaattgacatgaaagcaatagccgggggcttggtaaccctggtcagttggattggttcctttgtggtttcttactcattcaactcccttatggactggaatcctg

SEQ ID NO: 15422 - DNA, 488 bp, Setaria italica
  Peptide Sequence Number=SeqID_81396
ttttggttttgttttctttttgttctatctgtcttgacgattggagcaatgcttggtgctctgactagcggccgcctggcggacatacttggacgaaaaatgaccatgaggtttgcagcagttgtaggcattttggttggcttactgtatattttgccaaggatgctatgatgctctatgccggaagagttctgctgggctactgtaccggagttctttcctatgtggtgcctgtctttatatctgaaatagcaccaaaggatatccgagggggccttgcaacctcaaaccagttgttcatctgttcagggtgttcagctgcttacattattggagcacttcttccatggcgctctttggttctagtaggattagtaccttgtgctgtcttacttgtggggcttttcttcattccagagtctccaaggtggctggtgagacggtaactgactttgcgtgtgatatggtcatgactcgtgatgtgaaag

SEQ ID NO: 15423 - DNA, 291 bp, Setaria italica
  Peptide Sequence Number=SeqID_81397
ccgcgcgtggggcaccatggatctcctcagctgcttcagtgccttctcttcctcaatcttttgtgcgaattcattctcctctctcagccttttgtaagtcttctctttctcctttatcatgttatcgaactctgatctctgaactgctctctcatcaacatgcaacgcaaattgttgaacttcagtgagaggcttccgctctttctctggaagtggtataggatcctctttcagtatgggttgagctttgatgattctcctttgagcctcttcccgctccattctctccct

SEQ ID NO: 15424 - DNA, 970 bp, Setaria italica
  Peptide Sequence Number=SeqID_81398
acaacaaatgagcatggttgcaattctacaatccacctgaatgataccaagaatattaaatatttcaggacaatagttggacttcagggggcacatcaccatcacaagctgtggcataataacctgcaaggccaggaacagagtccttgtgacagtcaacgaacttcaatctgaaagcctcctctccaattacagccaatgaaaacaagttcatattgctattcaacaatccctttgcctgcagggccttcacaaccctatgacgtgggagcagacgctttttcaagctatatccaagcagaataggcctttccagaatgtactgtggctccattccaacctcattgactagaaactcaatcttgcgggtaatattctcttcggagattgataatatacttggcatcttggacattgcagtataaacatcagactcagaaccaccaagaatcctcttcaataacacaagcttggcagcaaccttctctttggaattactggcaaccaaagacaccgcgtacttgaacatacgggaagtgcgaggcaccccaagttcttctgcccgcagcaaaaagtccttcaggcgctccaggctgaacgttaacaaccgcgggttgtttgaacacatctgggcaatatctcgaacaccaaactgacgaaacaacgctatcttaggctcgatcaccctctcaaggctcacctctaggaggctgttgttcctctttactgccaccaggacctgctcaaatgagccgtagaacgagatccagaactggagcttgggaagaacgtcgcagttgcggagagagcgtgagccgaccaggaggaagcgaacgatctgaggaggggatagaccgaggcggtcacggagagcgaggaggcgggggcctacggtcttcaccgaggagtggaggagcagcggatcggcggcgacgacggcggcgaatgtcggacgacgggaagaaggaca

SEQ ID NO: 15425 - DNA, 689 bp, Setaria italica
  Peptide Sequence Number=SeqID_81399
gccataggacaccgcaacagccacaccacaaataattaggagtatccgatatcagaagtttttttttttggaagcggcttccgatatcagaagttagtttgaaatgcctatacaattaccggtacgaattcaaccttatgatttttcagaagttacaacagctccctgaagggcaagggagtgatccgacctgcatgccagctgagaggctgtcagggtcacttgtcaccagtgacacgatcaacagatatcttgcgccatttattcatcatttattcgttcactagtaccagcctcatggctcctgaaacttgatcggtatatgtgccatctgcggctgatgctttctaaccttgacaccagccatcgataacaacttgtgagaggcgacataaacatgagctgagttgtcaatccttttctcgacgaagtagatgacctcagatacgcctgactgaatgataatcttggcacattcattgcatgggaacatggtgacgtataatttctgtccagctgctgaagcatgtatttgtatttagaattgcgttaacttcagcatgaacaacatagctgccaggttagaagaaaatatatacataattcgttagaatttagcatatagcaaagctactggaaacttccttttgagtatagtaaatttcgtcctccctcataatgagaattaa

SEQ ID NO: 15426 - DNA, 165 bp, Setaria italica
  Peptide Sequence Number=SeqID_81400
atcgaccgcaaatgataagcctatgcctgctccagatcccacatttatctttagattgaacacatgaattgttcctttatcactggatacagccaaatactgcaaattatttgagaaagccaagctatatccaggcataggcttatcatttgcggtcgatccccc

SEQ ID NO: 15427 - DNA, 1644 bp, Setaria italica
  Peptide Sequence Number=SeqID_81401
ttttattcaccaaacgaacgacatattattatcagaataataagcttatcaaacagttgattagaaacatcgttaggctactttttattcataaaataaagatgcatgctgacatgttcatctgcaaaagggtgttttaaccctccacagagcatactttggaaccaacaagatatatttacaaataaaaatattagctttcgcttagctctcggatgaacgggagcgcacaaagatactgtacaatcctctggtacaagggagatgaattgatgatgattatgttgctactgttgatccgacggttttaggaaattgtagcactctagctgcagcatttctcctccattaacggggtcaaactggcatctgtagaagcttccatccataccaacaactgccacggtattcttttcgtgtccaaatgcaacaatatactgctcaccctcatggagtctgaattgagcaactgaccactcagagtggaaatatttcggcaacacacccttaatgaaggaaagtggaggacttatatggggaacttcaggatctggagcaggcataggcttatcatttgcggtcgatcccacatttatctttagattgaacacatgaattgttcctttatcactggatacagccaaatactgcaaattatttgagaaagccaagctatatatttctgctctgtcagcacctctccttacttcctgcagaagattgccctcggcagcattgtagattctgactagcgttcccttggtgctagcagtagcaatcagcctcccatcctgcgacaacgcaaagcacgcaacacgggaagtgtgtgcattgataaacttggtcttccttgccccgtagtgttccaccctaacctgccccttctgcacaccagggcaaaccagcacgatcgacccaggctgctgcgacacagcgcagaggcccttggggttgggcgccgtctcaatctggtgcacgagcttgaggtcggcgaagttgtacacgaaaatcttgttctcgaggaccactatgatgcggtcgcggcgcaggcggacgccgcggacgggggagcggaaggagagctccccgatgcagcggctctggtggtcgtcccagatcatgaccttgttgggcgggtagtgggggttatcgccgccgccgacgagcgcaagtatgttgcagcggaagagcatttcgacgacgccgatgccccctcccccgctgccgtccccctcggcggcgaggtcgcggcggaagatctcgcggaaggggtcgcagttgtagatgcggaagcccgacttggtgcccgccgcgaagcagccgtagtcctggttgaaggagatgtggagcaggtccttggccgcggggaacggcctctcggccgcgcccccggaggctgcggggacggaggaggctgccgacgagacggacgaggagtcgtcgctctcgctctcctcgtcgccggacggggtgggctcgatcgaggtggttggggcgggcggcggcggcggcggcgatgatgtatccgcatccggcgtctcctcgtcctcctcctcctgcgacggcggcagcggcgggtcgtcggggacggggttagggttcggtggggccggcgcggcggcggcgggcgacgccatgggcgag

SEQ ID NO: 15428 - DNA, 533 bp, Setaria italica
  Peptide Sequence Number=SeqID_81402
cagcaattttagtcttctcgaatggtgtgaccattttgtcagaaccttttgcaccatcaacttttccagctgcagttgcaagtaggaaatcagtgtacttggttgttgctgcacttggagggatctccttggtaggatcaactccccactccttgaggacggaggcgtggaggttgagctcttggaggatggccttcctgagggcggcgatggtggccctgtcgtcgtcatcgtcggcgcagtcctcggccatctcgtaggcgtgcgcgaaggcgtggaggaagtgcgcgtcctgcgcgatgtagtggcggaaggcgtcgaggtgcaggttgccggcggcgagggagaggaggaagggagtgtatgcggcgaaggcggcctcccgcgtggaggcggcgatccagaagcggcgggccgccgagccctcggcaacaaccgctgccgcgccctcttcagaggatgactacatggcgggtctccctttggttgtcgacgaccaacaggatgaggaggaggaggaggaggacgaggag

SEQ ID NO: 15429 - DNA, 258 bp, Setaria italica
  Peptide Sequence Number=SeqID_81403
gcgcccaccttcaagataagatgggttttcaaacaccgacgcgaattcaagctcaggcaattcctgtcgccatgtctggacagcacatgctagtgaaggctgcaactggcactgggaaaactcttgcgtaccttgcacccattgttcaccttctccagatgagggagcctcgtgtcgatagaactcatggaacttttgcgttggtgctcgtgccaacgcgagagttatgcttacaggtttatgggattgcacagcagc

SEQ ID NO: 15430 - DNA, 1228 bp, Setaria italica
  Peptide Sequence Number=SeqID_81404
tctacctttcttcctagattgagggagcctcgtgtcgatagaactcatggaaatctccgactcagtgtgagtagtatatccagaggaaatcatctgccacatacgaccaattactaagtgattatgacctatctagtaaatctgcatcatgctgtacaatgaagaataaaattctctaccgaccaattcttccctcaacaacccctaatactgatcgacaccactaattctttgatggtagcgttggtgctcgtgccaacgcgagagttatgcttacaggtttatgggattgcacagcagctggttcatcgttttcattggattgtccctgggtatgtcatgggtggtgaaaacagagcaaaagagaaagcaagactgcggaaaggaatatcaattctcattgctacccctggacgccttcttgaccatttgcagcatactgcatcatttgtttattcaaatttgcgctggatagtttttgatgaagctgacagcattcttgaacttggttttgggaaagcagttgaggatattctagaaaacttgggttcaaggaatggtgctcctgatcaaaataaaaacaaaggagagcatatccgaaggcaaaaccttctcttatctgcaactcttaatgagaaggtgaatcggttagctaaaattagtttgaagaacccagtgatgattggccttgatgatcaaaagaagccctcagggaaaaccaacaggctggggaacagtcatacttctctattatctgatgatgatgaggacaggatactggaaaagcgaaatgatatattggaacatgcaggtgcagttgatgatttcaagcttcctgcacaactggtccaaagatacgttaaagtttcatgtggctcgaggcttgcagttcttcttacgattctcaaatctctatttgaaagacaaatctctcaaaaggttgttattttcttgtcaacctgtgactctgttgatttccaccatacagtactcagccagcttgaatggagctctggcccccaacttgatatggataagaagcaaaagtttcttagctgtaaagtgttccgtttgcatggtaatatggagcaggatgatcgcaaaaggtcatttctgggtttggttctgagaaatctgcaattcttgtatctactgatgttgctgctagaggcttggactttccaaagtcaagtacatcatacagtatgattctcctggagaagcttct

SEQ ID NO: 15431 - DNA, 1199 bp, Setaria italica
  misc_feature (1)..(21): n is a, c, g, or t
  Peptide Sequence Number=SeqID_81405
nnnnnnnnnnnnnnnnnnnnnttttttttttttgttaagcaactggaaaaataggagggaataactatagatcaaaacttcgtactagtgttgatagatgaagatatatatacatgtacaaaaaagctagccatatgtacaaggttccaggaaaaacttctgcaactcacatctacaaagctgcaggagctttctgcaacatttttttcagttatctgacaacttataaatctcatccacataatcttcgacatcccaaaggaaggaaccaaatgcaatggcttcaagcagtaatctttttagggaagacgggtcgagtataacagcttcatcattctcttgggtgacttccatgttctctccaaaaagagcccagctgtgcctctcgatgagattagcagcttcacaagagcgtatctttgcacaaagctgcaaggtcttagggtcaaatcccatcatgtaacccttcaagtcatgcgggttgacaactgaacttggtttcgaagaagatgacacctccccagagcctccaacagcttcttcctgctcttgtttatttgtaaattgagcattcagaaattgaattggaggaggaagttcttctgagcgagtgagagtcagctccaaatgatgcctgatgctgacagatttcaggaagtatccatacattattgatgccgaatatatccgaccaaattgcagtcttttaatgcgaagtgttgaacgattgatcttgggaccatttctatgcacccatctgatgatgctggtcaggtgttccctaattagttctagtacctcaggtccatgaatggactcaagatctgtctccctcggtggccataactgcaatcttcggttgctgatgagcttcgacaagtttggtaccatcggaacttcaatcttgaaaaacttataaacaatcagcatgtacataatgtcctcaatagctgtttgacactcttgctccttcagttcagcaatcctcctgtgaaggcagtcctctttagaaccaatactgtgttcccagcggttcaaggtgtcttctctttggttagataattcttgaagttgctttgctgctgcagctagaaaaatgtgtggaaggttctttaacagaccacacaagaaactcccttcccatgtttcgggctcaagtggtgcatccacactttcaaattccgaatcatcaggcattg

SEQ ID NO: 15432 - DNA, 239 bp, Setaria italica
  Peptide Sequence Number=SeqID_81406
cctagctgtaattcatgctcccactgaagatcatggattgaagcattgaccaatgtgagcatctctctaatttgttggaaaactacaaccaacagcaccttcaagctgttgaatccctcatctatctcagtcaacttcccgacatggcatgccgtagagcatgaactgtttgcatcatatttgtgggccaagtcatagcttttgaagacccgtatatcctcggtgagcttattaagctg

SEQ ID NO: 15433 - DNA, 776 bp, Setaria italica
  misc_feature (481)..(481): n is a, c, g, or t
  misc_feature (766)..(766): n is a, c, g, or t
  Peptide Sequence Number=SeqID_81407
cagattacgtcagaagttgcgagcacaacgcaacagatacaacagagagaaagaaacaccttttcatagaaatacaagacatgaggacaaagattaagacttgcaaaggtcgaagagcgagccgccattcaccatgggcactgtgactgagcactgtacttgccggttcctttgagaccaaagtgatacccaccgcccctcgtagctatgcctctctgttgccaccctcaaagcatcaaggggggaggaagccccgatggaaagaggcgctgccacaacatagtggggactaagaatggagtgagcacgccagccacaacatcacttgacacattgatctctcttcaagctagaggcatcacatccgagcccctcatctaccgcaatccaacgtcctttgagggaaggaagcctcaaaggagggatgggcagctactacgaactcactcggcatttgatttgatgacaccatcaaaaaggngcgcagcaacaaagcgaggtgctagaagcgggcacacaacgaaccacgaggaacaaacaacctcacgagacgagaccatgaccacagggagaaggatactgcagctcccgatgatgctaagcggctgaccatgcgaagtaacctccccgcgtatcggacgcgacgctttcgctgcaagatcgttagcaacacgagataatgcacgctccaatggcagaggatatcctggttgggagcaaacttcgcgaaaacaccaggccgtgcgaggtgcagcacggcccccgngcaccgagcg

SEQ ID NO: 15434 - DNA, 188 bp, Setaria italica
  Peptide Sequence Number=SeqID_81408
gttgacattaattggtggtcgcgaccggtagctatgagatgagggagatggcatttctttctgcaattgtaagcactgagcagcaagtcgtgtcgtatgtacatatagtatatctatcaagtattcaagttctgaatttctgaattcaggagcagtcatatacttgctgcaatcttaataactcacca

SEQ ID NO: 15435 - DNA, 865 bp, Setaria italica
  Peptide Sequence Number=SeqID_81409
tgagaaaaccgccaaaaactgaatctacaatttgttctttctccacagggccaatccgcaaccttttctttctatagaggcctcaaaagcgggtaatcttcaaggagctctcgttctgacaatgtgtcgttctcattttgtggagtccataggacctcgactgccagtattttgcttgatggtatgccaccaagattttgcagagctgtcttcaagtcattgctgctatttataacaggtagcttatatactccctcggcagcaaccagtatggttatcacaatgtactcattgctgaagccacttgatctttggctgcctgctttattcctcttgatgctgttcacgttcacaagcgtctcttcatcaaacttgcccctctcctcaattgatagttgattgaaacgtttctccccatcgtccatacttcgtttcacatccactgatgagtaagctgagatacagcaatctggatgccgaagcaatgccaatgttgtctctgtcaacacatagctcaacccagccggggtggatgtatctgctttctcagctatttgatcaagctccttctgaaatgatcgggccatacccagcaagccaacctgtagcttgaggacggtggtcttctgcgtctcggtgagcacgctcccgttgccgggcgaatccgacaggaacccggcgaggtagaggaacgcggcgaagcccatgagggccatgaggaacccggagcccccgaagccgatgccgacggccgggccgacggagacgaagggcgagggcgagtagaagggcgcggaggtgtaccccgcccctgggcgccggcgcgctgtacccgtaggagggcggcgaggatgagcgcgaggag

SEQ ID NO: 15436 - DNA, 624 bp, Setaria italica
  Peptide Sequence Number=SeqID_81410
tccgactcagtgtgagtagtatgaagagacgcttgtgaacgtgaacagcatcaagaggaataaagcaggcagccaaagatcaagtggcttcagcaatgagtacattgtgataaccatactggttgctgccgagggagtatataagctacctgttataaatagcagcaatgacttgaagacagctctgcaaaatcttggtggcataccatcaagcaaaatactggcagtcgaggtcctatggactccacaaaatgagaacgacacattgtcagaacgagagctccttgaagattacccgcttttgaggcctctatagaaagaaaaggttgcggattggccctgtggagaaagaacaaattgtagattcagttttggcggttttctcattaactatagcacagatcttgtatttgtaaaaaaatataattgtaattgacgtcactgttagcaggcaacataaaagttggcatatgtagcccacggcagtgcaaatgagcaactgtacgtcggtagacttgtgcagtgttcctgacacagtcacacgactttgtaaatagattgtcctcaaagaacatgtgagtctgcaaaaaatttgtgtgttgtcttgtgcactgcaggactggg

SEQ ID NO: 15437 - DNA, 794 bp, Setaria italica
  misc_feature (736)..(794): n is a, c, g, or t
  Peptide Sequence Number=SeqID_81411
ctagggacgaagttaggaagaaggagctgaagcttgtattctaccaggtctgatatagctgcattgagtcatgcagttcaaagctactagatcttttttctcaccctgtacctttcacaatttttttcgtagtactagttttaccaaaatgcaagaattgaggcacatggtacttgttcttcttatgaaatcctcttgacttggattgcagtgatagagaatggtgagaactggagtgtaggccagcgtcagcttgtctgtcttggtagggtaattctgaaacggagtaagatccttgttctggatgaagccactgcttcggtggatactgcaactgacaacttgatccagaaaacgcttaggcagcagtttttggagacgacagtcatcaccattgcgcacagaattacttcagttcttgacagtgacatggtgctccttcttaacaacggtgtagccattgagcacgacacgccaaccaaattgctggaggacaagtcgtctctgttctcaaagctcgtttcagaatatacaatgaggtccactgcatacatagatgacgagtgaagattcagtgcttcttttggccactctgtcaaggcaggctgagttgttgaaaatataaaaaatttactagatcgcattacgttcaagaacaaacagggacagtgttaccagaactgacatatactggtcatgattatagtaactttaatttttaagctaaggttgttannnnnnnnnnnnnnnnnnnnnnnnnnnnnnnnnnnnnnnnnnnnnnnnnnnnnnnnnnn

SEQ ID NO: 15438 - DNA, 537 bp, Setaria italica
  Peptide Sequence Number=SeqID_81412
cgcggcggtgcgctggctgcggcaccaggcggccgtggccgccacccgcgccgcggcacctgacgagctctcctggtggcgggcccgctgcggcttcgaccgcgtgttcctcatgggggacagcgcgggcgccaacgtcgccttccacgtcgccgcgcggctgggccagggccacctcggcgcgctgcaccccgtcaccgtcaggggcgccgtcatcgtccagcccttcttcggcggtgaggcccgcaccgcgtcggagaagaccatggcccagccgccgggttccgccctgacgctccccacctccgactgctactggcggctggcgctgccggccggcgccggccgcgaccacccctggtgcaacccgctgtcccgggcggcgccgcgcctggagacgctcccgctgccgcccgtcctcgtctgcgtctcggagcaggacatcctgcgcgaccgcaacctggagctgtgccgggcgatgcgcaaggccggcaagagcgtggagcaggccacgtacggcggcgttgggcacgcgtt

SEQ ID NO: 15439 - DNA, 367 bp, Setaria italica
  misc_feature (358)..(358): n is a, c, g, or t
  Peptide Sequence Number=SeqID_81413
aagaacttcagccaagcagaagctaagagaagtcagagcctcttgatgcccaccatttgttgctgcgggagctgcgaacccgctgaaaccatctgtcccaagaagagttctccggaccactggtgataggaagaagcgggtctggtttcccttctgtacttgtgatcacatcctggcatgcagtagatgcaggttccatggtttcaagctcattcagttcctcctgcatgaatacacgctgagtgttgtcagagtagaccatgctatataaagtcacatcagaacattgcctagtagattcataaaagaaaaaaagggtagaactttgtctcccaacaagtgtcttttgttttttttntttttttta

SEQ ID NO: 15440 - DNA, 277 bp, Setaria italica
  Peptide Sequence Number=SeqID_81414
aatctggatcgcaccctcgctggccattcgcgctccggcagcaggtcggggcagttgtccgttgactctacggacaagcgcggcggtggttggttgattcagcgaagagaatagcgcagcagacctggagggactggagctcctggtcgaggcggctgatggcggcggagaggcggtgcttgccgacgtagccgacgttcctcatccacccccggcggcggcggcgggtgctgctggtgctgcgggtcggtggaaggccgcgcggcgggcctctgcg

SEQ ID NO: 15441 - DNA, 642 bp, Setaria italica
  Peptide Sequence Number=SeqID_81415
cagaaccggtgggaatcttcagactctcaagaatcaggtctgatgtggacacatcgatgttcagtctagttagggattactacatacacaataattttctccgaaaattatcaggtgctctgagagccacgccgcaatggatcgtcgcatcgtaattctgtttgcccaagacactcaacggatgatacatttcaactggtgtaatcttaatctgcacacaactgatgaagatgctttcagctttgcagaagctaagagaagtcagagcctcttgatgcccaccatttgttgctgcgggagctgcgaacccgctgaaaccatctgtcccaagaagagttctccggaccactggtgataggaagaagcgggtctggtttcccttctgtacttgtgatcacatcctggcatgcagtagatgcaggttccatggtttcaagctcattcagttcctcctggagggactggagctcctggtcgaggcggctgatggcggcggagaggcggtgcttgccgacgtagccgacgttcctcatcacccccggcggcggcggcgggtgctgctggtgctgcgggtcggtggaaggccgcgcggcgggcctctgcgcctgcacgtgcctctgaggcggcgctccctcgcccccg

SEQ ID NO: 15442 - DNA, 370 bp, Setaria italica
  Peptide Sequence Number=SeqID_81416
actattttatgggtagtataagtagctgtttgttttattttgtgttgtggagttcataatccagttgtccagtaaagtaatgacatgagcccaggttatttatttttgtggtaattagtcaaacttcaattgtttgaacttgtgcagtgctgtattgtggttgtttttggttgaccatcatattagtgtttgtcaaaaaactaacaaatgtaatggcaccatacgtccatacacaccctcccctgctcccttctttgagcatgaactagactacaacagacgcatgaaaccggattattttgtttggcttttaattgttggtggagcctagtcctgctataacatctcgtgaacagccttgcattgcaga

SEQ ID NO: 15443 - DNA, 725 bp, Setaria italica
  misc_feature (1)..(33): n is a, c, g, or t
  Peptide Sequence Number=SeqID_81417
nnnnnnnnnnnnnnnnnnnnnnnnnnnnnnnnnctcagaaaaataagaaaaagaaaaaaaatgtcatcctctaccttcgctggccttctcctccatggccgcctccactccccttcccctccgtcaaagccgcaacctttcctcgctctccccagcaacccttcccgacccccggcatccgcctccgtttccacccgaccctccccggcacggccgcttctccctcccgccgccgccgcttccggcggggagcgggacaaccgcgtgcaggagctgagggtgcctgattcctggctgacgcccgagggagcggcgcaggaatcggagtggctgagggagacgctgcacaagtggctggacgacgagtactgcccggaggcggcgaacgtggacatcagccgcacggcggcgcggtcgtaccgcgagtccctggcggcggggcggtcggacctcggggagatccttctcaagatggccggcgacctcgagacgctgtcgtacagggacagcttccacggcgccttctccgccgccaacgccgccgtgcgcctcatcacgcagaggatggaggcatcgtccgaagatggcctgtgagctgtaggttcttgctgtggttctgaccgtatggtacttctgaagaacgcttccatccgtttttaatgtatgttaagcattgttcctaaattatttattattgttttatttaagtaccttaaaaaaaaaaa

SEQ ID NO: 15444 - DNA, 399 bp, Setaria italica
  Peptide Sequence Number=SeqID_81418
ccttatttgacactagaagatgactcaattccttgtatgacactagaaaattttccgttgctcacgtgacaccgaggctaacttttatgcctcaattgacacttccatccaatttacctactaacggttttaacagccacttggaaagtcaattttgccccttgggtataggcatcagcatgagttgtctgtattgaaaaggacggagcgtttatctgaagatgtctgctcctttgagttttctttttcagagcacatttcactcgggcagtctagaacatgaatgaaatatccattcgattgtgctagcttcttaatcttttacaatcctgaagccacacgcccacacctgcctcagccgccgagattcgtgccatcctgtttgtcgacactggcggc

SEQ ID NO: 15445 - DNA, 930 bp, Setaria italica
  misc_feature (857)..(857): n is a, c, g, or t
  Peptide Sequence Number=SeqID_81419
ggcgcggcggcggcggcgcggggaggggagggatggaggagaggaggcggaggaggaaggagaaggagaggcggaagaggaaggagaaggaaaaggagagggagaggaggaggaaggagaagaagaagaggaggaaggaggagaagaaggatttggggaagaagggcgccgtgaccaactcgtgggggaagtatggtatcatccgtgaggtcgacatgtggagcaagcgaccagagttcactgcatggttatcagaagtcaagcaggttaatttggaagcattgtcaaactgggaagagaagcaaatgttcaaggcgttcatggaggatcacaacacagccactttcccatcgaaaaaatattataatttagatgcttatcatcgcaaagcaatggagaaagagacaaagaagggtttaaagacctcagtgacagaacgtacaatatttaatgatgaggaacagcgaagattagaattgttgaaggaacgtgaacgacgaaaggaggaagaagtggaagctttaaaacgctctatgcaagctggactggctcaagacatgaaggagcaggcccgtctacgcgaggaaatgaactatcagtacaggctgggcaattttcaggctgcagctgcaatccaaaaaagattggatcctgatgctcctttgcagtagtcggccctgtgcagagcctaattccctgcagttattcctcatggacctgtaggaagagcatgcctagcatattgaactgctgtttgttaccaagttttttatgtagctaattgtatcagcagaattttgaattccagctactctcagtttttcacatgctctaccctgcgtgctggatttttaaangttttgttataggttgtctcacatgctcttgcaagctaccctcgtcgttacttaaacaaaaaaaaaaaaaaaa

SEQ ID NO: 15446 - DNA, 828 bp, Setaria italica
  Peptide Sequence Number=SeqID_81420
tactggccccagtacacccccatcaccaagcgcgccgaccatgacatcatgctcttcaccgtgtccaagagcacagggcacgccggcacgaggatcgggtgggcgttggtgaaggaccgcgacgtcgcgaagaagatgaccaagttcatcgagctcaacaccatcggcgtgtccaaggactcgcagctgcgcgccgccaaggtgctcagggcggtctccgacgcctacgagctcccggaggcgagggaggagcaccgcctgttcgactacgggcgccgcaagatggcggagcgctggagcatgctgcgcgaggccgccgccgcgtcgggcatcttcagcctgcccgacgagacctccggccactgcaacttcgccaaggagacggcatccactaaccctgcgttcgcatggctgcgctgcgacagggaggacgtggaggactgcgcgagcttcctccggggccacaagatcctgacccggagcgggagccagttcggagcggacccgaggtacgtcagggtcagcatgctggacagagacgacgcctacgacatcttcgtgaggcgcctcgcctcgctcaagtgaagtgatcgaggaggacgacgcgtggttcgaccatcgatgccgcacacctccggatgtggcgtcgccgcgtcggcatgcccgtgggagcatgagtagagcagaagtatcagtagagtaggaaagaagcggaagaggagcagcgttttgtttgctcttctgctgtgtgttgtgttgtgttgttggggatgtagcagcatctcgaaaatttcttataaaggtttttcattttttcctccttgacct

SEQ ID NO: 15447 - DNA, 353 bp, Setaria italica
  Peptide Sequence Number=SeqID_81421
ccagcgtaatgcagagttgatcaggcttccagctgactgactacttggaatgttgctggctgcctggctgcatctcttcacagcaaatgtattgcgtgtaaacatgttctctttcttgctacatggttcaactcagggccaaggaaatgcttgctacaaactttgtaacaccatcctcataatcacaggagttgtatgatgaatactacattgacaacaacaactggccgtggctccagggatcaggtgcaggtccggaagatccgaacaacattctgttgttaagatgatatatattcacatgcgagtgagatcatccagtggagaggtcaactatgaagaattcctgtcaa

SEQ ID NO: 15448 - DNA, 574 bp, Setaria italica
  Peptide Sequence Number=SeqID_81422
cgtgatacgattcaaccagaatttgaatcccatctgatcggtccatgggccaaggaaatgcttgctacaaactttgtaacaccatcctcataatcacaggagttgtatgatgaatactacattgacaacaacaactggccgtggctccagggatcaggtgcaggtccggaagatccgaacaacattctgttgttaagatgatatatattcacatgcgagtgagatcatccagtggagaggtcaactatgaagaattcctgtcaaggaaggctttgcttttatgacttgctcataccagggtctgctttgaactcctctactgggaatgcaacgccgcatatgtttttcccacagatttcttgatcccatggaccgatcagatgggattcaaattctggttgaatcgtatcacgctctgaatccggtgacagtgcatccattcttggtttcttgggagaaggctgcgtgctctcagggtactcatctaagcttggaggtgaatgcaaaagcttctgatcctacaagaaagactttagaattagaataccaaccaaagacttttagttagactaca

SEQ ID NO: 15449 - DNA, 730 bp, Setaria italica
  Peptide Sequence Number=SeqID_81423
aataggaaccgaatacaagaatagggaattcaaattctggttgaatcgtatcacgctctgaatccggtgacagtgcatccattcttggtttcttgggagaaggctgcgtgctctcagggtactcatctaagcttggaggtgaatgcaaaagcttctgatcctcagaagctttgattgatccaccaagcttttgttgctcctctatgatcatttgcaggtatcttccttgagcttcaattctcagctgcaattgcctttgaacctgaaaatataacgtgtggtgaaattgatctgaccgaaaagagacttcccaaggaaaattcagattgatattgaagctaaaagaattcacaaactacaaaaaataagaaaataaaataactgacagcaataagtaattgacaactacacagtacagccatgataaggaaacaccctaaggtgtaacttgaaaataataagtaaatgaaccaaaacatcggcttgtagtaagccttagctaagtaggattggctggcaaattagacgatataaaaacaaacgttatgatgtaaattcgctaacatctcaacagacctcaagttgctcgtgtagccgcttctgaacctccatttgcatctttaacgcttcattgatttgtaatcctggtgcagaatccgtgttagagagggaatcactcgaatccttttttcatccttggaaccttcagcaggagattctggtatatact

SEQ ID NO: 15450 - DNA, 1344 bp, Setaria italica
  Peptide Sequence Number=SeqID_81424
acgcaatacatttgctgtgaagaggtgtgtgatgttggttttctatgttgaaccatttccaaggacatgcttgctacaaactttgtaacaccatcctcataatcacaggagttgtatgatgaatactacattgacaacaacaactggccgtggctccagggatcaggtgcaggtccggaagatccgaacaacattctgttgttaagatgatatatattcacatgcgagtgagatcatccagtggagaggtcaactatgaagaattcctgtcaaggaaggctttgcttttatgacttgctcataccagggtctgctttgaactcctctactgggaatgcaacgccgcatatgtttttcccacagatttcttgatcccatggaccgatcagatgggattcaaattctggttgaatcgtatcacgctctgaatccggtgacagtgcatccattcttggtttcttgggagaaggctgcgtgctctcagggtactcatctaagcttggaggtgaatgcaaaagcttctgatcctcagaagctttgattgatccaccaagcttttgttgctcctctatgatcatttgcaggtatcttccttgagcttcaattctcagctgcaattgcctttgaacctcaagttgctcgtgtagccgcttctgaacctccatttgcatctttaacgcttcattgatttgtaatcctggtgcagaatccgtgttagagagggaatcactcgaatccttttttcatccttggaaccttcagcaggagattctggtatatactttgcaaggcgatacttctgcaaatggctctttacatgataaattgtgatccctggtacacccatcacagtgagcacccctttaggtgtagctctatctggtccaccaagctgggcgatggcatccacaaagcgattatggagatctgaggtccatcttagacgttgtttcccacttcctacaggattagcagggttgcttatgttggatccaccaatagctccaatattacttgcatgctcattattctgagccctctgcggagcaaagggcacagaaaaattcttagcatgatacatcatgtgaacacagcagtctcgggaggcgccggggcttccgtcgccgggccgcggggatcaggccggccgggcgcgcgtgctttgggggaaggctgcgtgctcgtgggggcggggaattgaatgccacagcagggccggatgcggattccccaatcggggtcaaaaaggggcggaggagatgggcggggaagcttggggaggtggagggggaggcgcgcgaggggaaagcggctgggcggtggtgtccggcgaaagcgacgcgg

SEQ ID NO: 15451 - DNA, 641 bp, Setaria italica
  Peptide Sequence Number=SeqID_81425
cttctgagctccaagcaggctgatcatctggaagtgcacccggtctgagaacacgcagccttcctccctcattgcctggtatagcgctgcggccttgtcgaattccttcagctttccacaagcattcatcgtggtggcgatcatctccgagtccggcaactggcccaacttcctcatttcatcaaacacctcaaccacattccggtgcctccggttcttcgcgaacaagtccatcatggctctgtgcaccgacgagtccttgatctcgccagcgttggctgcacgacggaacagccatgcggcctcttccacacgaccggcgctcgccaggattctgatggctgtctccttggggatgccctccggttctttcaggtcgtgcagcaaacgcttggcctgggaaacaagcccggcacgctcatacgccaccaccattgtctggtacagcactgggtcgatctccgtgccggcttcccgcagcttctcaaacagcttggcagcacggtcgagcttcccggctttcacccatatggagaggatggtggagtaagtgatggcattgggctggacgccgttggcctgcatgtcctgcaccaagctcccggctttctcgtcctccagcgacttgccgtagatggcta

SEQ ID NO: 15452 - DNA, 920 bp, Setaria italica
  misc_feature (898)..(920): n is a, c, g, or t
  Peptide Sequence Number=SeqID_81426
actcgatctctccccttcccggcgtcggagtcggaggaggccaccgcggggcgatggaccacaacaacctcctggcggcgtggccggtcgtgggcccgggcgtcgccggcgccgtcttcggggccgggtggtggttctgggtggacgccgtcgtctgcagcgccgccgccgtccccttcctccattacctcccagggttcttcgcctcgttcgcggcgctcatgttcaactgcgtcaaccgggaggacatcggcgacggttactattcgccctacgacgactctgagtggagggtgaaactctggcttttcatttcatatgtggtatcttttgtctcattggctggggcagttgggtttcttgttcaagacgcacttacggagacaggaccatctgcatggactggcaccgctggtgtcctacagtgtgtttgtgtgttagtcagtgggctaatctactggacatgccactctgaagattgacttgacaagtgtgtatggccaaggaagatgaggattctaagggcgaatatgacatgagctcggtgaaaattcaatatatattgtaccgtggtccattgctctgcccaagtcccccgaagattggtaccccggcctgtaaatatagtcttcataccatgctgcttagaatgaatgtttcaaggtgttgttttggagctacaaatgataactagttgatattgatacattttgtcccgttgaccaagtttctcctggaaagttcacctgcgttttactcttgtaactcccgtttcagtcattatcccctggtacggtgtatggccaccacttgtatacggcagtcatgtaaacttgcttgtcagttctgatggttgtcttggaaggttgaaaggtgtgacaattaaggtcctatagtnnnnnnnnnnnnnnnnnnnnnnn

SEQ ID NO: 15453 - DNA, 297 bp, Setaria italica
  Peptide Sequence Number=SeqID_81427
caccggcaccggcggcagcgtcaacagaagcggaggtcgaaccggaggaaatctcccgcctttgcgaccgggatcgcccaggagacacaaaaaattcgcttctcggcgagcccgacaaactcaacaggaaacaaaaagagaggaagaaatggaaatatcggccgcggggagaatccggcgaggaacgggggcgctgcgtgagcagagcagcacgggcgaggcgggtgggaggggaggaaggagcggcggagaggaatcggcggagattcctggaggaggaaggagctgcaaatggcg

SEQ ID NO: 15454 - DNA, 722 bp, Setaria italica
  Peptide Sequence Number=SeqID_81428
ggctgatgcacagtccaattcaacaaatagcgatggcggctcatgataaacaatggtaacagtaggagcttcactagattgagcaacaaacagcacggcatgccaaccttcctgttggggccttgggggggcatgttgtctatttgcctcactgaactagaaaacctacattcaacccgttgattcaagttaacacatgaaatcgatggcatagtcagcctgccatggggcggtgttgcctaactaatgattgcaagaccagaatgagctaccacagcaattttgtcagcctactcgtcctcctccgacaatacactccagatcatccagaacaaggacaggaataggagaacgatgagactgactatcttgaaaagacgtcgcttcttctcacgaccaagttgattaaatatctccgtcacatctactaaatgttgccgccgctggtacagcgtataattgtagtacaccattgggacagaaagcaagaacatcgcccaatgcccagataagaggaacaatacgctcagaagtgcttgtaatatgaattctggcataaccactttatttattcgagaggatgaatcaaacgggttgatatagtcaaactcaagatctgccaagcacatcaactggtagatgacgagcacgatgagcgcgacgacgaggaagaacgcggtgagccacacgaagaccatctctgccttctcccaacgacctgg

SEQ ID NO: 15455 - DNA, 307 bp, Setaria italica
  Peptide Sequence Number=SeqID_81429
tcctacctcacagaccggtccaaatccccaacagaaatttacacccaggcccttcgccggagatggcgtcggagctcacataccggggcggcgccgcggcgcccggctccgcctccaacggcggcgagtactccccgaagccctccaagccgctctcctgcctctcccgcgccgcccgctacgccgccgccgagcaccgccccatcttcgccctcgccggcatgctcttcgccgccgccctcttcaccttctcctcctccaccacctccacctcgtccccgtcgtaccccgcagcgtcggccggatt

SEQ ID NO: 15456 - DNA, 316 bp, Setaria italica
  Peptide Sequence Number=SeqID_81430
gcagtgactgggtcaccatcagggtcatgcgcgtgcgcgacagggagcacctgcccgacacgctctcctgggtgaaattctcgcgcatcgcgtggactcgtgacgggctggggttcttctactctcgctttccggctccaagggatggtgaagcactcgaatccgggatcaagactgacgtcaacctcaaccacgaagtctactaccatttcctcggaacggaccagtcgcaggacgtgctgtgctggagagaccctgaccatcccaagtacatctacatccctgaagtcacagaagacggcaagtatgtgattct

SEQ ID NO: 15457 - DNA, 463 bp, Setaria italica
  Peptide Sequence Number=SeqID_81431
cttcgtctccggcgagcaaagcggcggcgaaaagggagggatggggtacctctggcgggtgcggctgtcgtcgttcgctgccggcgcggcgacggcgtcggcagcggggttcttcctcctctacaaggaccacctcctcgctcgcgccaccatcgcccggcaggtggaggatattaaggaagcttctgaaaagcattatgaagccctaaataagaggatatcagcactggaaagcagaaaagaaccaggagctattaaagaggcatcagattagtttaatgagttgggcttatgtatcggttacatccgcccaggtgtttttgattgctgcatgtggtataaactgcagcatttaaagctgtactattgtgttgttggaattctatgaaccctgattttgacttgtgttacacttctgcatggccaagtcaatgccatcttcttgagatggacaaagatcaaa

SEQ ID NO: 15458 - DNA, 1426 bp, Setaria italica
  Peptide Sequence Number=SeqID_81432
aagaagcaagcacacagcacaaatcaagaccaattagtgctgtagctagtgtgctttggcatcagctgcctgagctcgagagatgaagggtgcaatggcggccttggccttggtgcctctcgccgttgcggttctcttctcctccctgccgtcgtcggcggcgtcccctgtgcagtgggggaagctggacccccacttctacgaccactcgtgcccgcaggcgcagcagatcgtggcgtccatcgtggggaaggcgcactaccaggacccccgcatggccgcctccctcctccgcctccacttccacgactgcttcgtcaagggctgcgacgcgtcgctcctgcttgacagcagcgggtcgatcgtgagcgagaagcggtccaaccccaaccgggactcggccaggggcttcgaggtcatcgacgagatcaaggccgccctcgaggctgcctgccccggcaccgtctcctgcgccgacatcctcgccctcagcgcccgcgactccaccgtcatgaccggtgggcccgggtggattgtgcctctggggcgtagggactcacgcggcgccagcgtgcagggctccaacaacgatatcccggcacccaacaacaccctccccaccatcatcaccaagttcaagctccagggcctcgacatcgtcgacctcgtcgcactcctcggtagccacaccatcggcgattcccggtgcacgagcttccggcagcgtctgtacaaccagacgggcaacggcctcccggacttcacactggacgcgtcctacgcagcggcgctgcgcccgcgctgcccccgctcggccggcgaccagaacctcttcttcctcgaccccgtcacgcccttcaagttcgacaaccagtactacaagaacatcctcgcctaccgcggcctgctcgcctccgacgaggtgctcctcaccggcagctccgccaccgccgacctcgtcaagctctacgccgccaaccaggacatcttcttccagcacttcgcgcagtccatggtcaagatgggcaacatctcgccgctcaccggggccgacggcgagatcaggaagcactgcaggagggtcaaccacaaatgaactgatcgcggtttggttcagagacacttgggaaattaaattggccgagtgcttcgatttgcttatttctccagcttttggttgcttggtttgttgattcagtgctctcatcagcttgttgagatttaccatttgttctcttcaactgtgtatgtatttttcttgtccatgtgttgttatttattcccttatggaaatgttgttcttgcattgctagagtaacccatttctattgtaagttggaggtacattattgttggttaaatcagcttgcagccaagaaaatttggtgaattaagtaaatgtttagccatgtactttcgacagccc

SEQ ID NO: 15459 - DNA, 976 bp, Setaria italica
  misc_feature (1)..(25): n is a, c, g, or t
  Peptide Sequence Number=SeqID_81433
nnnnnnnnnnnnnnnnnnnnnnnnngtaagatgaaaaaagcatcactctgaaatgaggcatgcctatatagacatcgtcagttaatatgtatggtgttgtccatgtgataagctcatagacagagggagcacatatgtcaaattcacttactcaaatacagttaagcaaagatttggtacactattgccaattactgaaattcaaagagagtaaatgttgttgtttaacatctatcggccttctagctctgtgaagctcatgccattcaaggacaatgctctgttgtagtttcttccaggttcagcatccctacgcgcataatacacaggtcgcgttggtattgggagctgcgtggttttgttctccagcatggacacaattgctgacatgagcggtctatcatctgaactgtcttgaacacacaaaagtcctatgtggatacaccgtgaaacttcatctaatggacagttctccttaacagatgagtccaccaaatcttctgttttaccatccttccataagttccatgcatatacaataaggttaggaaaatccgtgataagatgaggtgagctgatctttaatccactcacaatctccaaaagtagaacaccaaagctgtaggtgtcagacttgaccgaaaatgcaccttccattgcatattcacgggacatgtaaccatatgtcccgacaaccctgttagtatttgctgggtgctgatcaccgccgaatatcctggccataccaaaatctgatatctttggtatcatctctttgtctaacaagatgttacttgctttgagatctctatgaataattgttagtcttgaatcttgatggaggtaaagaattcctctagctatcccttggattattttataccttgtctgccactgaagctttgtctttcttgcagagtcaaagaggtatttatccaagcttttggttgggcaagtattctattaaacctaacta

SEQ ID NO: 15460 - DNA, 267 bp, Setaria italica
  Peptide Sequence Number=SeqID_81434
tcctccgtgtagttgtaccggttgatgcggaactggcacggccactccccgaacgagtgctcctccagccccaggctcgaggccagcttgccggcgacgtcgacgatcacgccgtgcatccgctccgcgtagctcttcacggtcgccctgaggtgcggcggcgcgtcgaggcgcgcgcagaaggcgtcgacgtcggcgggcgcggcggcgtcgaggagcccgaaggcctcgtagagcgggttggcggcgctgggcgcgacgtagccg

SEQ ID NO: 15461 - DNA, 537 bp, Setaria italica
  Peptide Sequence Number=SeqID_81435
acccggtcgcctcacgttgtgcagcctcccgttgctccaggcctgggtaaacgaacggcatcgatcaaagacatcaagatcgagcacctggagacggcacggatctgccaagaacgaagttcatcataccgtgccgacgtcgccgatgttgatgaggaaggaaccggcgacggggtcgacaggcacgaactcgccggtggcggggtccagcacctcgaggccgccgacgcactcgtcctcctggagcacggtgaggaagcccgagtccggctgcctctgcgcgccggaggagcccaccggcgccttcgtgtagttgtaccggttgatgcggaactggcacggccactccccgaacgagtgctcctccagccccaggctcgaggccagcttgccggcgacgtcgacgatcacgccgtgcatccgctccgcgtagctcttcacggtcgccctgcgccaaagattttttttccattcaaccgggacgagatttctatctaaatcgggagaggggagggcgagaaatgggccgagctagac

SEQ ID NO: 15462 - DNA, 857 bp, Setaria italica
  Peptide Sequence Number=SeqID_81436
atgttcagtgaactctgatgtatgagtagagagggaacaatgcatgcttctgatagactgtcctgttttatgcaatgcattatggacgggggctgaggccctggaactctatatttgtatcccattatgttgtctgtgaagattgaaggcaaatttggtccacaaatgatttttttccctgtagaaaaaggtctctgctgaagcctgtatgaaccatggagatagctgtgctagtgtgctttgtgcgcatggctgatggctccaagtccgtgcgattttcaaatgacacaaggttttattgatgagactcgatagcaattcacacggcaccccaatagccatccttctccccactggtcaatcaagacaacagctcaacgagacaaccgatatgcctataattaacgcctcaacggctcctgatttgcagccccaccaccacgtgcgccacgtcacaccgccagccgcgcgagcgcctcgccggcgcgctcgccggtggacagccggagcctcctgtagtcgtcgtacttgaactccctgtagcggcgcgggtggtcggcgtccacgaacgcctccggcgcgctcaccctgtcgtccttgggcgcgagcaggaacatggcgatggagaagcgcggcaccggcgcgacgcactgcacccggtgcctcacgttgtgcagcctcccgttgctccaggccgtgccgacgtcgccgatgttgatgaggaaggaaccggcgacggggtcgacaggcacgaactcgccggtggcggggtccagcacctcgaggccgccgacgcactcgtcctcctggagcacggtgaggaagcccgagtccgtgtgggtctgcacgccggggaa

SEQ ID NO: 15463 - DNA, 933 bp, Setaria italica
  misc_feature (920)..(933): n is a, c, g, or t
  Peptide Sequence Number=SeqID_81437
cggggcggcgcgacgcgaggcccgtcctgctcgcctcagacggcggcggcgcggggcaggacgacggggtgggccggtcccgcagcctgacggacgacgacctcgaggagctcaagggttgcgccgacctggggttcgggttcagttacgacgagatccccgagctccgcggcacgctcccggcgctcgagctctgctactccatgagccagcgcctcctcgacgacaagcaccaccaggcggactccgcccccgacgccgccttcgccgccgccacgccggcgacgccgcccgtcaccaactggaagatctccagccccggcgacagccccgacgaggtgaaagcgcggctcaagtactgggcgcaggccgtggcgtgcaccgtccgcctctgcagctgaacgccgtctgccggtgacgcgcacggcgagcactacgccgccaggagaaacgatcgccgacgacgaaaaccaaattaaatgaccgatcgatcaaccgagaggccagtatcccgctggacgatgacgggatcagatcgcgagcgcgtcactgctgctgctgtaaagtgatcggagcgcggcgtccccgtccctgctgcatgctgcgacggcgggcgttggcggctgccatgattgcagctggggtgctggggagtttggtggccgacttgcttctcgccgatccagctgagcgacctgcctgctgcctagtgccaactcagcgcccagccactcgatctccaggaaataaactagtatttgtagtaacctatcggaataatgttcagagtaattgattaatgtagtgcctattgggggatcgatcagagtgaataaataagtcgatggatcccaatcttcttgttgccgttcttaatcattagtcgccacagctgtccgcttgatttgctgttgttaaannnnnnnnnnnnnn

SEQ ID NO: 15464 - DNA, 404 bp, Setaria italica
  Peptide Sequence Number=SeqID_81438
tagcatgaaatgaatcgggaaacaagcggagcgcataatctctcctcctttgcctcgataaaggcgtgccttttctattgcagggacaatacctgacagagccttctgcatgtctgtggaaaagtagagagtatatgttgagttgtgaccttctatgggttctacagcgttaccggaagtgtgatcgtgtgattactcccacattgaaggtaacagaggttcttccacatcatctgatgacatcatattctgcacctagcatatgttgcatgtaaattctatttgttatagtttgcacagggctttgaatagcttttcattttgctgtttatctaatagatgtgctctcaatcaattgcaatatatgtacttttgttctacatccacactcatgtttacctgtt

SEQ ID NO: 15465 - DNA, 1359 bp, Setaria italica
  Peptide Sequence Number=SeqID_81439
ctctaataaagacttgcatgacataatcttttatgtatgcatatatggaatctccaccatctgagctctgatcaaatgatgcagttagcgtttcacataccgaaattagccccctgacagagttcacacgtgcttcagcatcaggatcatcaggcttatcctcaattgtgcatgagctacagagcttactcatgacaggcatccatttcaataccaagaatttgtatggtaatattccaagggccagtgcggctcctcgtcttgcagccaaattggggtcatctagaagtgccacatattttgaaatgatatcattggcaatcttttcaccagaagataccagatatgttggaataaaattctttaatgcatcaacagcagcacactgtatttgagaattggggtgcctcaaattctcattaagtgtttctaataaacttttctttatcttctcattcaaagatattccagctatagaaatgcatgaaatgaatcgggaaacagcggagcgcataatctctcctcctttgcctcgataaaggcgtgccttttctattgcagggacaatacctgacagagccttctgcatgtctgtggaaaaggtaaaaccaagttggtacaaccttaaagcaacctcgccagcagctaaagtggctccatggcgagtacacaagtccgatgatagagtgcatggaactaacttttcaagggcatgtccaccgaagtaatccatatcatattgtacaagtaaagaaagggcctgagcagctaactctctcaagcttttctcccagtgagttattttattgcaaagtagctcatctgcaaagggataaagatattccttgtactgagcaacagaaacagcaacattcagataagagtttgatcgggaagccagtgcaaagtagtctgttgtattcacaatatcaatgccatgtggaaaagttccctgtcttccaacattctcttgaaaagcagcagaagcagctcttctgcaattaacctctcgatcgtaacaagcaactgttagaaggtggggagcaagttgttccaaaacagccttcatatcataattggtataagcccgaccaaatgcccaacaaacatatgctgctgcatctcttacgtgtgatccaatgctatgtggacctcttcgtacatcatagtgtaaagcctttattataacaggaataacatcaggaaagctagaaggcagcaataaccctctccgagaaagttcagccaaggccaaacagcctccatgccaggaaccatcaccctccccaggagaaaaaagttgcaagattgatgatataacttcttctgacaatgtaggtgttaaacgtgcagttatcc

SEQ ID NO: 15466 - DNA, 1315 bp, Setaria italica
  Peptide Sequence Number=SeqID_81440
atgtcatgcaagctttatttagagcactcgatgattatgctgtggacaacagaggagatgtgggttcttgggtacgtgaagcagcaatggatgcactagaacggtgcacgttcatcctctgcaggagagatattgttgcattgagaacactaccagcttctggccttgagtctgaactgagtgaaatggaagtaaatgcaagtagtactacacaccggctttttgactctggaattgcacaggatctggttgcaggcattgcaaaacaagcagttgagaaaatagataagatgagagaaatagctatcaagaccctgcagagaattctgtaccaccaggaacacctcatcccatttatacctcgcagggaactgctggaagaaattattcccagcagcacagatttggagtgggcagttcctacagtatcatatccacgattggtgaagcttcttcaggtcagctgctatagcaaggctgtgctctcagggcttgtgattgctacaggtggattgcaggagtctttgaagaaagcttcaacatcagctttagttgggtatcttgaggattcaactatcaatacagattgtgaagggaaaagtagagagtatatgttgagttgtgaccttctatgggttctacagcgttaccggaagtgtgatcgtgtgattactcccacattgaagactattgaggctctcttcagtaaaaaggttttcttgaacagggagggttatagtgagttctacagtggacttgtagattcggtgggatctgagctgaagggatcaaaagatttcacaaagttatgtgcaggcctctcgatccttggatacatttcttcacaatcggatggaacttgcactaaggcattctctcaactcctcacgttcctaggccacagataccccaagatacggaaggctgcagccgaccaggtgtaccttgtgctgctgcaaaatgatgatcttattccatcggaaaatatagataaaacccaggaattacttgcggagacgtgctgggaaggaaacttggaggaagcaaggtgcaaaaggtcacagatcaacgagatggctggtttcaggatcgccacttcactgaaatctgaaaaccaagaaacgagagctgccgtgcagaacgctgtttcaactgatgaaaataaatcttattcatcgttggtcgatttcagtggatactaggatgcaggaactggtcggtggcaatacaattttggtttttatagagccacaagcattgtaccgtttacaaaattttgctttcaaaggtgtttatgaaatttttgctttcaaaa

SEQ ID NO: 15467 - DNA, 363 bp, Setaria italica
  Peptide Sequence Number=SeqID_81441
tctacaaatccacaagtagaggcggtctctctctctctctcatgaggccatggccaagatatatatataactaggactaggtgagctgaggtgagagcttgcctcctccagagaacaaggcaagggagagggacaagcacaccaccaccaagtacgcacactcggattcgcgggcagcaaaggagacgcatcccttttgcctgccttccccggctcctgttcctccgttacccactccatcgacaacaatgatggcctgcgggtctcgaataagtcggagcaacgagatggtcgacgagttcgagaagctggtcatcagaatgaaccctccgagggtctccgtggacaacgactccgacatga

SEQ ID NO: 15468 - DNA, 499 bp, Setaria italica
  Peptide Sequence Number=SeqID_81442
ggggactggtgcttgagatcaatggtaggaggtttgtctagccagacggggtgtaggttagaaaaaacgtcatgatgtgggtcatccgttttagatcctgttgtttacacaacctactgattctatgttagaaagaataaaagataatactaaatgttaatatgaaccccgtttcaatccgatattggcttgagatctatgtgatttccccatatatttgctcctaattacattgcttggaaatgtttatagtaaaaaaaatacccctttccaagccattttatcatatccagctaggagtaacagtttttccttatacatagcatttgtttgcttcatcattaatcaattgtgatgtcaagggatagatgactggactaacaaataacccccttcctttttcagctcagtaccctcccatgcgctacacggacataccggtgctgccagtaactggtggatctggttctggtgataccatggaggtctttcttcgacg

SEQ ID NO: 15469 - DNA, 408 bp, Setaria italica
  Peptide Sequence Number=SeqID_81443
taaagaaattacttattgtattatgtaatactttactgttttgagttgttacacgctacattagaacctaaatacttcagaaaaaataaaattagcaacaacttcgaaagtattaggaactactatacattgaagccacattagagctttccgttatagctgcaagtagtcttggcatcggaggcatatcaagctcctgaagaccctctagaactcgaacaacttcacccattgttggccgatcagactcattatcctggatgcaccagcatgctactttgcaaactctttctgcctcatccaagctgaagtcaccatgtaattctggatccaccaagctctgcacatctccctcgtgaagcttgctgatggcttgcacagggaaataggcaacacagcagctgctgc

SEQ ID NO: 15470 - DNA, 264 bp, Setaria italica
  Peptide Sequence Number=SeqID_81444
ttttgatcttatagtatgattggtgcgacaaacaaagccacccttgaataataagttctggttaaaagggtacccccaggttcattctcacatgttgtggctgttacattttacccatttaaaggtcaatttggaaatgcacatttctggagctattaattgtaagatgcatcaactatgtctcccaccattaatgcttcaacctttctgttaaactaggtgcgccccaagcaatgttccacagctgtgtcaccttcgcagcta

SEQ ID NO: 15471 - DNA, 1033 bp, Setaria italica
  Peptide Sequence Number=SeqID_81445
tatggagaatcttggtgagctcgttaaggaactgggcttgtacatgatagagcttgggattttgatcgcacgagcttgcgacattgttattggtggaggccagttagagcagagcatcactgactttggtactgcaaaggcaaggctcatccactaccactctgagttggataacattattatcagggagaaggagaacagtataaagaagaaatgctcgttaaagaaagtggcagtaaaaccttatcaactgggttctcagagatccggatcaccgtgcccgtgctgcatcaagtcagaagaggggactcccaaaatggcaataaaagataatgatcctagggatacctcggttcagggtcaggctactgaaatttccctgttgaacctatggcaggagtggcactatgactttggaatccttactgttttaacagcaccattattcctaagtggttctgagggagaaaaatgtttggtcaaccaggaataccaccatcctgatgggcacacacacttgcagttatgcaatgggaggaagatattctctgttagatgctctcctgagagcttcattgttcaggttggagaggcagcagacatcttgtccagagggaaactgaaatctacacttcattcgatactgaagagcaatccagtcgtaataatgagacttcgatcaccagtaatggatcaacaggctcttgtgatgaagatgtatgtatgcaagaaattctggaaaaattccccctctatcatcaaggctaagagaagggatgacatttgcagaattttctcggcaaacaacaaaacagtattatggtggcatccaacagaacaattgaagactaacagtacaatggtgagatgcatgtagcagcaatgagttgatgtattgagttgcttgtaagtcaaggcagctcctccccataaatatgaggggagggccaatggattcaatcaagtaggaaaagggcttagtcccatcctaccttttgctaaggtcatctaaaacagccctccagctccccgc

SEQ ID NO: 15472 - DNA, 1876 bp, Setaria italica
  misc_feature (1795)..(1876): n is a, c, g, or t
  Peptide Sequence Number=SeqID_81446
cgcccaccgtccgcctcacgcatatatacgcgcgcgcctgcctgcctctcctgcacgcccctgcctgcccgcccgcctccccacgcgctccactcctcgccccttcctcgccgacgccgccgcggcggctgatcggccggaattcggacgggggcgttcggcgcccgcttccctcgatcggaaggccggcgccgcggggattcagctccgtccggcggcaagggagctcgccgaggtcggagcaggcttcccttttttgatttcacaaagctgacgccattatgatctcaccaaatgaggcttagtatttgtcagttgcaactgtcttgctcctctagctgcatccttgtactagagcatggcgaaactcgcaactcttggtcgtagtgtccttagatttccaaatgaaagcatgaggcttgttatggtaacgattattggagccgtccttggctttttcattggaatttcattcccttctgtcagcataacaaagcttcacttcccagctagttttgtttcatacattgaggacaaaaactctgggctgactacccaagctatactaaatcatgcttggacttctgccagaaatgcaaggggaaacggtaccgaaccaacttcaaacagtagtttaaagatttatgtcccaaccaaccccaagggtgcagagaggctagcaccaggtattgttgtaccagagtctgacttccatctgcgcaggttgtggggagagccaagtgaggacctgcccttcaaaccaaagtaccttgttacctttactgtcggaattgcgcagaaggaaaatataaatagagcagtgaagaagttttctgacaattttgcaattctgttattccactatgatggtcgggtgactgagtgggatgaattcgagtggtcaaagagagccatccatataagtgtcaggaaacaaactaaatggtggtatgccaagagatttctgcatcctgatatcgtgtcagcttatgaatacatattcatctgggatgaggaccttggggtggagcattttaacgcagaggagtacatcaaacttgttaagaagcataatctggaaatctctcagcctggattagagcctgatcggggtttaacatggcagatgaccaaaagaagaggtgaccgtgaggttcacaaggatacagaggagagaccgggctggtgctctgatcctcatcttccaccttgtgccgcatttgttgaaataatggctcctgtcttttctagagatgcatggagatgtgtgtggcatatgattcagaatgacttggttcatggttggggccttgattttgctctcaggaaatgcgtggagcctgctcatgaaaagattggagttgttgattcacagtggatagttcaccaagtggttccttctcttgggaaccagggtcagtcagaaaacgggaaagcgccgtgggaaggggtgagggcgcggtgcaggaaggaatggggcacgttccagacgaggatggcggaggcggagaaggcgtattacaagatgatgggcatcacccctccaaactccacgctcgtgtagctctcgatactacaatggtggtggcggtgctgggtgggctgatgacactgggtaccacttgatatatagaggtatagatggtgagtgcgtttagctgctgatgaggaggtccttgtgtaagtagatgcgtggtgaatttgtgatgggaggcttgtacacgaggatgttatctgatctatatatatatatatataccaaccgattgttctgcagcgaaccaaaaaaaaaaannnnnnnnnnnnnnnnnnnnnnnnnnnnnnnnnnnnnnnnnnnnnnnnnnnnnnnnnnnnnnnnnnnnnnnnnnnnnnnnnn

SEQ ID NO: 15473 - DNA, 296 bp, Setaria italica
  Peptide Sequence Number=SeqID_81447
gatgcttttgtatcattaacaggatactcaagagaggagatattgggctgtaactgcagagtcttaaatggtccagataaatcagcatatttgttctgagcaggcatgcaccgtggaccttctaagttacaggaaagatggaagttcattccgtgatcttctacatgtatctcctatcagagatgcttcaggcaaggtcgcgtttcatatctgggttcaccttgacgtgggcgcaaagcacgactttaacgggttgacccctgaggtatggcagcttggcgctctcactgcaactc

SEQ ID NO: 15474 - DNA, 1017 bp, Setaria italica
  Peptide Sequence Number=SeqID_81448
atgcttacatgatttgttcaccaaaaaaaggaagaactaataggtcaaatcaggacaaatcatattatgcaatcccctgaatgaaggttcagtagccagccatagctaaacaagacaccttaaagtttatctgggtttgccttttttatttgttctatactgtcatattagctcattttgtggcagaataactatacgggcaatttcagctgggtgttgtacttgacctaccattttaatgttttaactcgcagaatatcgaacagacagtaagtgaatcaagttgtgaatatgttgttgctagtttgctgttgcaggactggaggctgaggaaccgtgtgttgctagtgatagcgagaaagagaaggcaaccaatacagctaacagcattgtctctgctctgaaccgctacagcaagctaactagtctagtggtcagcgggaagagatgtgactctgttggcatcccagcactcagttcttcattaaacctatctgtcggtagaatcaaacagagctttgtattgtgagttatttgcatatcttgtcactatttagttgtcttgtcttatttcttgtgttcgaaatatttgatgtctaatccatgcatgtctcattaaaatgatccttttgaactgttcacaggactcactcctgcttgcctgacatgccaataatttatgccagcgatgcttttgtatcattaacaggatactcaagagaggagatattgggctgtaactgcagagtcttaaatggtccaggtactagcttggaggtttttgaggaggtgcggaccaggattatatagcttgtatgaccattccctatcattttgcacacttttttctaatttctattcgaaattggatgtacagataaatcagcatatttgttctgagcaggcatgcaccgtggaccttctaagttacaggaaagatggaagttcattccgtgatcttctacatgtatctcctatcagagatgcttcaggcaaggtcgcgtttcatatctgggt

SEQ ID NO: 15475 - DNA, 673 bp, Setaria italica
  Peptide Sequence Number=SeqID_81449
tgtccgtaggttgtcgtccgggggtcggttgcttcgccgcgtgccgggaggaggccagggtggatgaggatttcccgtgcgcgagccacgcggggaaggtgttcgttgatatggataagagaggtcagtgtgacttgcccctgttagttgcttaattaggcttccattcaactctatttggcagtagtaaagtatggatgattactggtactccatagtggagtactaatgagcaatgagactggagcaaccattaattgcgagtaagttcagttactaaccattaatttcgagtgagttcagttactaaccatttgtgaaatgtgtgttacaaacttgacctacataagactgctcgtggacacgtctttgtttgattggttagtcatttcggccaccataattttagttgcactgatctttcatggggatggtcagtcaagctgctagccgcagtggcacatcactcagaatgcacccttgtttcacttcttgatttgaagtcttttagttatgttatactgctcctgcttttccaaatgtggactatgcgcagttgtaaacacaaatatgtaggtgatagttctccctttggtgatgcttagcctggactgtgtggaggctgctgctggttacaggaatgacttatgttgcttactttaaaacttttctc

SEQ ID NO: 15476 - DNA, 472 bp, Setaria italica
  Peptide Sequence Number=SeqID_81450
cttctatcaggaaagatggaagttcattccgtgatcttctacatgtatctcctatcagagatgcttcaggcaaggttcgcttagatctttctcaggactttcctgaattcctgaaagaagctgttttccagatgaattaaacaattcctgcagaatggttaagttttagagggtctgtgttctttattcatgtttcgatggagctttagagcagaatggattggcagtttgcaatctatcagtcagatatactgcaagagcagtacaattttacgactgacttcatgtatatgcaggtcgcgtttcatatctgggttcaccttgacgtgggcgcaaagcacgactttaacgggttgacccctgaggtatggcagcttggcgctgttggtgcggtgagagttgcagtgagaggcttgtcggcttcgggtagcctgttgagaccttcccaatagcgactcgagtctcctcgcca

SEQ ID NO: 15477 - DNA, 448 bp, Setaria italica
  Peptide Sequence Number=SeqID_81451
acggatagttgttaaaagaggaaaccaaaaatactagggtttgttccgttccatttccggggagccgcccaccgccccccgaacgcccacctccgtgccggccgcccccctcgctctctacctcttcccgctcctcctccccgacgagaggcggcggcggcagcttgggggagtcagctagcggcggcggcggcggctgccccccggcagctccgaggtcacattttgagaactgagggtattcttcgatggcagatgtcagccctcgaacagaaacatcaacagatgatacagatgacaaccatgggcttgagccaggcccaggcgctcttgttgcggcttccgactccagtgacagatccaaggacaaacatgaagatcaaaagacactgcgtcgtcttgctcaaaatcgcgaagctgcaaggaagagtcgattgaggaagaaggc

SEQ ID NO: 15478 - DNA, 1602 bp, Setaria italica
  misc_feature (1568)..(1602): n is a, c, g, or t
  Peptide Sequence Number=SeqID_81452
cttagggtatgtgtatgtcaaactgaatagtggactaatcatgtctagtagcatccaagctacctcaactttagatgttaatattggtattatgtctctacatgtttcatctttagcaagcaggctgtaacaatctgattttgtctgtcaaggtcacattttgagaactgagggtattcttcgatggcagatgtcagccctcgaacagaaacatcaacagatgatacagatgacaaccatgggcttgagccaggcccaggcgctcttgttgcggcttccgactccagtgacagatccaaggacaaacatgaagatcaaaagacactgcgtcgtcttgctcaaaatcgcgaagctgcaaggaagagtcgattgaggaagaaggcatatgtccaacagttggagaatagcaggctgaaacttacccaactagagcaagaattgcaacgagctcgtcagcagggcatttttatatctagctcagttgatcagtcacactccatgagtggaaatggggcattggcctttgatatggagtacgcaaggtggttggaagagcataatcggcaaataagtgaactaagggctggtgttactgctcatgcaagtgatagtgatctccgcagtgttgttgataagatcatgtcacactatgatgagattttcaggctcaaaggaaatgcagccaaggcagatgtttttcatgtattatcaggcatgtggaagacaccggcagagaggtgtttcctgtggctaggaggtttccgaccatctgaggtcctaaagctgctttcgacacagcttgaacctctcactgagcagcagctgtcagggataggcaacctccagcagtcttcacaacaggctgaggatgctctttcacaaggaatggaagcccttcagcagtcattggcagaaaccttggctgggtctctttcgtcttctggatcaacaggaaatgtggcaaactacatgggtcaaatggccatggccatgggaaagcttggaacgcttgagaatttccttcgccaggctgacaacctgcggctgcagaccctacagcagatgcaaaggatcctgaccaccaggcaggcagctcgagcgcttcttgtgataagtgattactcttcacggctccgtgccctgagctctctctggcttgctcggccgaaggaatagcaagagcatgtgatttgactggagtacttttcacagttcggtgttcgatggggatcttatcaggagggttttgacaggactgcaacagacttgattcggaaatatctgcacatactataatccaaatggatggggatgttcatgtagcttagccatatagttaagtgcattggttcatggttcaatgatgtattattaacaactgctgtaaaaattgctcgcttttggtcaccattttacatatctgtatgcccctaatttgcagaggatcaatagaatgcaggtttgtgtttgatcggttggtttttgtttgactcccttagtgggaagaatagcaagagcacaatgctctgacagtaatatctaacaaggtatatggttgtttcactgcnnnnnnnnnnnnnnnnnnnnnnnnnnnnnnnnnnn

SEQ ID NO: 15479 - DNA, 702 bp, Setaria italica
  Peptide Sequence Number=SeqID_81453
agatgttggtgaggaggagaagcttgctgtctgtagcagatgcaatgacggtgcagagcatacgtattgtatgcgggtaatgatggaagatgttccagagagtgagtggttgtgtgaagactgccaaactgcggtagaatctgaaaaaggtgaagaaactagaaaaatctcaggtgaaggttggcacatcaaaagggcagtcatttgaaagggaaatgaacaaacctgccattgctgcgaagagcagaagttcctctgacaatgaactggaggctgagaatgcaggcaacaaagagccagagaagaaggggaatgatatggtcaaaaaaaggatggaagatgatgctgcgattacatccacaattcgggacactatttctgaaactggtggtgcttacatggggcctgactccagaaaaagaatgctatcatcacgcgagagctcatttgggtatgatgctgacaaaggaaagcaacctagtcaagtgggaacttcgttggcgtctaatgctccaaagaatcaggcaccacaacctcgtggtcaacttaccaaatccacttctttcaacaactcaaaggttcccaaagtgaaacagctactgaatgaagttcctcagaagcccaaaagtttcaaggaatcgtggtcttcgaccattaaaaaggaagggccaatcagcatgacaacttaagttcttgtctaaa

SEQ ID NO: 15480 - DNA, 2826 bp, Setaria italica
  misc_feature (27)..(27): n is a, c, g, or t
  misc_feature (2757)..(2757): n is a, c, g, or t
  Peptide Sequence Number=SeqID_81454
cctatcccctgtgtgccttggcagtcncttttagtttttttttgtagttaagtccgaaagcctactcacatttcaaatcaacaatggtacaatctgtacagtgtacatctctttcggtagaaaccaactcgatctaggcagcaagtgtagtttgaatctctgtggtccattggtacacaagatagtaagacaaggggtacaatgtaatcctggctgtatgaggtaaatcaccatgtaaaaactatccgaccgaagggaagaagaaaaaagcatgccattagctcccaaatgaacagaacatatacagagctgcggcattactagtaccatggagtgaacacacacagatgagggcaagaccaggggagggcaatggaacagaatctgttaaacaatgacaattctagtggagctctcacttcgttcattcattcgcctgtgttgctactccggtgcttcgtgtcggtatacagttaagctgaccatatatatattcacagagattgcttcaaaagagctcttcggaattgaatttgttccatgactccttaaggagatcaaagactttctcggcaatatatttctgctgaagagttgcacccttctgttgcaccttatcaggatgaatgcacaaggtcgcctttctgtactgctttttaacagcagcaccagtaatcaaatcggtcaaggatacagcttgccatccacattctggccaaagtatatattgtaaggttgataacaaagcacgcaagttgccctcttttccagcagaccacctcttaatttcaaagtctagtgagtctccaattctatctctctcagcctgctccctctgaacctgcatatctcgttcattcttctcagccagagcttttgccgctcgctcacgggtcctctggtgacgttctagtctagcacgccttctttcttcactctccccctcaacatcttgaaatacatcagatgatgcaggggctccaaataagtcagacaaatcatccccaaaaattgaggctgacggcgcttttcgcacagatgccgaggttgatgctgctctctgtgatccattagcagttcctctaccttgagctccagaaccaaacatagaatccactgttggggttggagccctctgctttggtgcactactggcacgagcatccacaccgaagaatgattcaagatcatcaggtgtgctctgcttttctcttgcggcagcagcagctgctgctgcctgcctttctcgagcctcagcagcagctctttccactgcagctctttcagctctcttccttgcttcttgctgagctctctcagcagcagctctttctgctgcagccctctccctagcagcagcccactccctctccttggcttcagcagcagccctctcctttgcttcagcagcagccctctccttggcttcagttgcaaccctagctgctctttcttttgccgcagctgcagctctctcacgggcttcctgttgagccctttgaacagcagcacgctgtgcacgctgtcgggcctccctttcagcttctgcacgagcttcagccgccgctctctcccgtgcctcttttgtagccctctccactgcttgtcttcctctctctctttctctttgttgttccagctctctctccttttcaagtcttctccgttctctctccatttcctccctcagtttcatttccctttcttgttccaacctttcttgcctatctctctcttcatgatctgatgaacttctttcaaaatcttcatcaaaaacagttttatcataagcaggaggtttgcccatggcaaaaccttccaggtcatctactgaagaaacctctggttgctttggcaaatcagtgtgatggttgtgattttggctcgaccgacgaacatgcccattcacctttccatttgtatttgctccctgtggcttttgtttaagaagaggtggtgatcgggaaggtggcggagcagtagttggttgtgtgaaaaggggaatctcagaaactgtaagccatatatcatcttcagattcagtagatcttggtgactgatcctccgtataattaccatgaatatccgaataccttgcagactgtgacttaggcatgatgttactgaggtcctctatagaagattgacgtgctggatttctatccattgaatggtgtaagggactggaatctcgagctacgcttggtgggttcctgtccttggcatgaccattgatttcagaggtgaacaaagggtctgattttggggcctggtcaaaagcaactggttcctcgaataaactatcatcaggagcagtactatcagcagccttgccttcagaatttgcaggcttatccagatcttccaagggatctgcggatcttcctggggatgtatatgcagaaccagaagcggaagctgtctcaagaacaacaaatgggtcatctgccatgctagctgtcggtttggaagttggaactggtggcttcattttgttatcatcattagccttcctgctcctgggcgggctgctccccgcgaaccccgggatcagatcatcgaacccggcgcccccgcttccctcctcctcctccgcagccaccggcttcctcccgaaccccccgagcaggtcgtcgtcgaccgccaccggcctccccttctcctcggcccgcggcgcgctcccgaaccccccgaggaagtcgtcgtcgtcgtacgcgggcggtggcggcgcggcggagcgggtgccggtcgcgaacncgtcgtcgtacgccggggccgccgccgccgcccgaacacgccgtcgtcgtaccgcgcggaggaggactt

SEQ ID NO: 15481 - DNA, 446 bp, Setaria italica
  Peptide Sequence Number=SeqID_81455
tatgatggcattaaactcttggaaacattttcgaggtttagaacacgtgttgatgtgtctcacttacggcctattgtaccagtaaaggaagatcgtcgtgcttggtggcgttatgctatgcttgctggtctgcgacaaaagaaactatgctactggttctcatgggagagaactaggcacctctgccagcttcgtcgccgttatgttcaattgtatgctaccctgttgcaacaagctcctaatgttgatatttttgaaattcgagagatagagaaaattctagacatgaaggtcataatactttggaggttgttgggacatgccaaggttgagacagtgaaatcaaaggaatcattacacagaaaaggcgcctcgaagaaaagatggtggccttttggatggaactcggctggtttaccttctgaagatgctacacatcaagagcc

SEQ ID NO: 15482 - DNA, 494 bp, Setaria italica
  Peptide Sequence Number=SeqID_81456
cccgccgacccctaccaccgcgccgtcgcccgcttctgggccgcctacgtcgacggcaagttgcacggcgtgatggttgcggcgttgactggggcaacggaggaggagagggcggcggcgacggcggacacgttcgcggcgctggagacgctggagggcgcgttcgcggagtgctccggcgggaaaggattcttcgccggcgacgcgcccgggtacctggacgtcgcgttcggggccttcatcgggtggctgcgcgcgtgggacaggatcacgggcgcagccacccgatgaaggccccgaacgcgacgtccaggtacccgggcgcgtcgccggcgaagaatcctttcccgccggagcactccgcgaacgcgccctccagcgtctccagcgccgcgaacgtgtccgccgtcgccgccgccctctcctcctccgttgccccagtcaacgccgcaaccatcacgccgtgcaacttgccgtcgacgtaggcggcccag

SEQ ID NO: 15483 - DNA, 1110 bp, Setaria italica
  Peptide Sequence Number=SeqID_81457
aaagttaaaccctgtaaatcttgattgacaattagtcaaattacatacacgttcaatgtataaaagttacatgtagattcatattcatagatcttttaatacattgattgattctttatagcaataataagctctgagatatcgcaagaaactgatactaaaatgttatttaaacaaagttttttcccaaattcttgacgatagtttttggaaaaaaaaaagggaacgaggcgagcacacgaacatattactcgatctttgatatgtggtgcagctgcaaccgcgttcacttgcgagctcagttgctcgcacctgcagcggcccgtgcctgcagcaccttggcgaactcggcgatgtgctccggttccgggatgacccccttggcggcgtcgagcgcggcgaagcgctccgcccacgcggcgagcagcgggatccggccggcgtccaggagcgtgacgcccgtgatcctgtcccacgcgcgcagccacccgatgaaggccccgaacgcgacgtccaggtacccgggcgcgtcgccggcgaagaatcctttcccgccggagcactccgcgaacgcgccctccagcgtctccagcgccgcgaacgtgtccgccgtcgccgccgccctctcctcctccgttgccccagtcaacgccgcaaccatcacgccgtgcaacttgccgtcgacgtaggcggcccagaagcgggcgacggcgcggtggtaggggtcggcggggaggagggtaggaccggcggcggggaaggcgtcgtcgaggtactccaggatgaggagggactccggcacgggccggccgccgtggaggaggacggggaccttcttgtggacggggttggaggcgaggagcagctcgctcttgttggtcaggtcctcctccacgttctcatactcgaggcccttgaggtgcagcgccacgcgcacgcggttcgcgaacgggctcggccacgcgcccagcaccttcagctgcccgtccgctccgcccccggctgcggcggccattgttctcgccgtgctcgcggcggcggccactcgatcgtgtgacctgcgtctgctgtgcgcgcgagtggtggcttggcctcgcggttttagcgtcc

SEQ ID NO: 15484 - DNA, 614 bp, Setaria italica
  Peptide Sequence Number=SeqID_81458
taacaaaacggtaaacctacgtacgaattaacaaagacaacaaaatagtaaaacaacacaaattccatcaatcaccatgcatgcacgttgcaagaaaaattgcacgtgtagcaactagcaatgcatgctcctccatcccctggtgccagtgccaccagactacctgatcgtcgtcagcttacgagacgtgcagagcagatctagtaaagggactctatcgtcttgtttagctcttcaagcttcttcatccgcagcctctcgctctcgcttacgagctccatgagcctgttgacgagcgtagccttctcgttgctcttctcgttgtaggcgtcgaggcacatcttgtattccttctcctttctgaggcacgtcttgccgagcggcttgagctgcttgttaaccttgtcgatgcgcttgcggatggcgtcgacctcccggcgcgtggggtcggccatgacctcgagctcctggcggatgaatgccaggcgcttggtctcctcctccacccggcccagcatggagaacaccttgtcccgcacctccagcttcttgcgctcgatctcctcctccttctccttgaacagcgacagcgccgaccgcgacgacgcctgctc

SEQ ID NO: 15485 - DNA, 524 bp, Setaria italica
  Peptide Sequence Number=SeqID_81459
atgctagatcagataggagattgaattggtcaattgaagaagatatcagattggttcgtgcgtggctgctcaattcaattgatccggttgatggaaatgataagaagtctgatcagtattggtctgatggtacttctacatacaacagcaccacgaagtgtgatcgtatgagaaactgcaaccagctaaagctacgttgggagcacattgagaggcttgtcactgaattcaatggttgctatacaagaataactaaagtgcatcggagtggtatgagtgatgaccaaaagatggatcaagcattgcagctgtatgcctctgaacacagtgacaagcctttcacaatgatccatgtatggaggatattacgtcatgagaagaagtggtctgcatatgtcaagaaacttaacaatgagaaggacaagagtgcatcacctaacccaggtcctgtggtggattcgaagatgttccaaaacaaaccaatctgatttgtctcctctctcttccctaatctgttctttcta

SEQ ID NO: 15486 - DNA, 260 bp, Setaria italica
  Peptide Sequence Number=SeqID_81460
tgaagaagcccctgagcgaggtgtcgtcggtgtcgaagcagctgcagctgcagcgcggtgggtcgtcgctgtcgtcgtcgtcgtcgtcgggcggcgggtcgttcagggcgagcatgcagctgaggcggctgtcggggtgctacgagtgccacatggtggtggatcccggcagcggcagcggcagctcgtcgatgagggccaccaccgtgtgcccctgccccgactgcggcgagatcttcgtcaggcaggagagcctgcag

SEQ ID NO: 15487 - DNA, 319 bp, Setaria italica
  Peptide Sequence Number=SeqID_81461
gcacaaccaacccattcgaaacccaacgctcccggatccacctccaaagtccaaaagcgaaacccacgagcgccgcaacggcgaaaccatcggaaccctagatctctctcgcccgagctccagaaccctagatcccgccatgcaccagcccagagcccgctacccgccaggctacggctccggcggcggtggacgtggcggcggaggcggcaacggaggaggaggaggaggaggaggcggtggcggaaatcacaactactacggccgaaacccgcagccgcagccgcagcaccaccaccactaccagcaccagcagccg

SEQ ID NO: 15488 - DNA, 420 bp, Setaria italica
  Peptide Sequence Number=SeqID_81462
tttactcttgttgatgttgctcacttctttattcatgtcttctatactacgtagtagttctgttggatgacatgataaaaaaaaatcaaaatggatggacccaaatagaaacggatacagctctaaaatttgatcagtttatcattcttcagccataagagcgtctctgccaatccttcagttaagctcctaggactatagcccagctccttcttggccttgtcacatgagtatgcccattgatgtctgagacaatccactccagggtagctgatgagtggtggttttccagtgatgcgagcaaccaaaactgaaatccacccatagattgcaagcaaccatagaggtatgtggaatttgggtggctttgtgtttgcaatactcgcagccagatcgaaaatccgcacgaatgacgcgttc

SEQ ID NO: 15489 - DNA, 432 bp, Setaria italica
  Peptide Sequence Number=SeqID_81463
tttgccagtgtgaaatcttctttcagtactgcaaggtcagaatagaatcagtgagaatgataaggcttcaagaaacatatttgatgaaattatcaataaaattgctagtgacgttcctgcaaggaagactactatcacactgattgctacactggcagatgcttgattcggatgaccagcagtagagataagccactaaaacagttaattcaagcgaggcaacaatacaagcaaaacacttcatgatgtaaagactttgcattacatatagctcactatcccacaaggaacactgaatactggagaatagctaaactctgcatataatcagtgcaagtacatgtaccatctaaagcaacagtaattaagaagcaataaacaagttgcagtccaattaagaaatacgagaatctacatgcagtatgtaaacct

SEQ ID NO: 15490 - DNA, 273 bp, Setaria italica
  Peptide Sequence Number=SeqID_81464
gggggttttttgatgtgagagtttgagctgggaacgagcggttgggacagggcaggagtgacatgctaaaatcaggtgctagttttcagggcccacgagcagtgaccgaatcaacacccagctagacgggcgggcgattcactaggcaagtctactcccagaagattcccacggaatccgggggtccactcgcgcgggcggcagccggcaggcggcaccgaagattccgtccgacgtggcatcctcctgtcccaccgccacgcaagcccgacg

SEQ ID NO: 15491 - DNA, 1969 bp, Setaria italica
  Peptide Sequence Number=SeqID_81465
aaggcggtgagcgccaagaagcagaaggcagcgccgccggcgaaggccgtgccgccgcccaaggtggacgccaagaaggccaagaagcagccgccgcccaagaaggccgagagcagcagcagcggctcggaggaggaggaatccgagtccgaagaggaggttaaggtgcaaacaaagaaggcccttcctgccaagactgtcaaacaagagtctagcgatgatggcagcagtgatgagacctctgaatctgatgaggaacctgcaaagaagcctgctgctaaaccatcggccacgattgccaaaaatggttcaaagaaaggcaagcaagagagcagcagcgatgagagtggttctgatgatgagtcgagtgaagatgatgaagcacctgccaagcctaaggctcctgcagtggctgccaaaaaggaagattccagtgaaagtgagtcagagagtgattctgaggatgaggataaaagtaaaactgcaaaagtagctcagcctgccaagagagctgcttctaagatgagtgatgactcagacagtgatgattcagatagtgatgatagcgatgaagagcctccacaaaagaagcagaaggacactgcaccttctgcagctgcaaaagctactgctgcaaagaaagaaaccagcagtgatgatgagagtgacgatgagagtgatgaagacagtgaagaggacgaagaggatgaagagcctgctaaaactccaaagaaggaagcacctgctctcacctctggaaagcaaagtgctaccaaagaacctaaaacgcctatggacacccaaagtcaagcaactggatcaaagaccctttttatggcaaacgtccccttcagagctgaacttgaggatgtgaaagaattttttgaggcggctggcgaggttgttgatgttcgttttcctgtgtatgaagatggcagtcgtaaaggtttttgctatgttgaatttgtttctgccgaagctgccaagaaggcttgtgaagagatgagtggacaagagatgcagggtcgtgctgtaagacttgactttgctcaggaaagaaatgcatacactcctcgcagtggcaacgacactggatctttccagaagccagttaggggtgccagcagctctgtatttatcaggggttttgataaaaatcttgaagaggacaagatccgaagctctcttgaacaacattttggtgagtgcggagagataacaagggtctcaattccaacggattatgagactggtgcagtcaaaggaatagcatacttggacttcaaggaccaggattccatgtcgaaagcccttgagctcagtggctctgacattggtggctatgagctgtttgttgatgaagccaagccaaaaggcgatggccagcgtggtggtggcagatccggaggcagatctggtggcagatttggtgaccggtctggcggcaggcgtggtggtggtggcagattcggtgaccggtccggtggcagggacagcggcggtagatttggccgaggtggtggtggtaggggtggtaaccgcggtggtggccgtggctttggtaacaggccgagctttggagctgctagtgcaggaaagaagacaacctttggtgatgattagagtgaggattgagcatcctcaatcgatgcatcagcgagagaaagacgaaagatctgctgctgctctagtgaaattttgagcaatattttgtttaccttcaaatctgtagtagtcgtgccagtgcttggatgatgttggtgcctttgtccgttacttttggctgaagttaagtgggatatctgtttgggtatacatgtgccgttctctgctatagggaaactgccgcgttattagaattattatcgtattaacatggttttgcaactctgaatggttgcgttggctttgcttgtttgataggttatatagccgcagcacttcgtactttactaaaaaaaaaaaaaaa

SEQ ID NO: 15492 - DNA, 474 bp, Setaria italica
  Peptide Sequence Number=SeqID_81466
cgggcctcgaagctggaagaatttggagtgagtggctccgatgctgagaacgtctgttatctgcgcaatattgtggatgcagataaattagtccgtgtaatgagatcatctcctggtggcaatgctattgtcattggtggtgggtacataggaatggaatgtgcagctgctttagttgccaacaagataaaggttaccatagtcttccctggaaaatactgcatggatcgtctgtttacacaaaaaattgctgaattctacgagaactactatacttcaaaaggagttacttttatcaaaggaactgcagtttcctcactggaggtctcatctgggatggtgaccacagcaatactgcgagacggcaggcccctacctgccgacatggtcgtggtcggcatcggggcgcgcgcgaacaccgcgctcttcgaaggccagctgacattggagaagggcggcatcaaggtgaacggg

SEQ ID NO: 15493 - DNA, 743 bp, Setaria italica
  Peptide Sequence Number=SeqID_81467
acgatgtttcggtggttgcttggatatagatgtcccaatgttggcgtatgagtttgtctccaatggaactttatccaagttccttcacggtgatgatcgtacatcaccaatccccttggatcttcgcctgaagattgctacacaatcagcagacgctcttgcttacttacattcatcaatatctcgcaccactctacacggagatgtcaaatctgccaatatcctgttggatgatcagcacaatgcagatcgcagatttcggagcatcagcacagaagtccatggaggaaagtgagttcatcatgtttgtacaaggacacttggctatcttgaccctgagagctttatcagtcatcagttgacagagaaaagtgatgtctacagtttcggagtagttcttctggagttgatcacaagaaaaagggctatgtttgctgataagttcaacgaaaaaaaatcattgtcttatatctttctcttaatgttccgtcataataagcaccgagttatgatagacactgaaattctagatgaggcagttatggaggtgcttgagaagctggcccaactagcagtgcgctgcctatgcccaagtggagatgacaggccaacaatgaaggaagttgcagagcgcctacaaatgttgaggaggctccacatggacgcaagtagtgattgcgaagacagtcattatgcaaacaaccatggaggatcaccgtcactggttcgggggataggcaagg

SEQ ID NO: 15494 - DNA, 444 bp, Setaria italica
  Peptide Sequence Number=SeqID_81468
cgaatgataaccaagcagtagaccgtgcatatcgtatggggcaaacgaaagacgttattgtatatcaactggtgacttgtgcagctattgaggaacacacgtatcgagaacagatactgaagatcgaaacttcgtttggtattttgggagaacaaccgtgcatgaaatcaatttgtgaaaaggaaggacttgtccttactctgccacccttcgggtttaaattttgcaaaacccatcgagaacttgttcgaatttatggcctcgaaatgaacatagtattatcagatctgggccttcaccacgaggctgtgattgcagcacactatcattctcttctcttctcagtgaaggaagatgaagttgatgactacgaaatggaggtccttgatcccaagcaaggaaagtcaaagtccaaagagattaagaagagggatgaggtgattc

SEQ ID NO: 15495 - DNA, 2403 bp, Setaria italica
  Peptide Sequence Number=SeqID_81469
cgccaagaacgagtggcagtttgcttcagtcagggtcctataggcggtaacaagcatctccattagattgatctgcccctatacgagtcatttattggagttagtgggatcaattccagatttttcaagtttgcaagtagcagtcagacactttttgaccttttcatggtagtcggcatggtgaaggctgcagtggacaccaagcgcacacttatgagcaagaaggataatatccgcaatgcatgtgtcattgctcccagtgaccatgacaaggctattcttatggattcccttatggcagctgctgggactgcaaatgaagctccaagtgatttccgcttgactcgtgcaggttcacagatgcaaaaacccagaaacacttgaagcaagtttttacggaaggaggcctgctctgtacaacatatggtatgttcagtaaaatggaggaggagttggcgttaagtgaggatggcgaaacttgggactatctattcatggatgaaggccaccgtgccaaaaataggcacaagataataatcacaggaactccaatacaaaacaatctcgaggagttccatacgcttatggacatatgtaaaccacttttacttgaagatcatgatagcttccatgtgaaatacattctgccaattaccgggggaagcacagggatgcggagcctcatttaaaaagcaaatatgttcaactttcatctagattggcgaaacttacaaatcctttcattctacggaggactaaagaattgttgaaggctgaaggataactaacttcaaataagtatgagtacaccatatggctccagctaagtccttgccaggtcaactactacagtactcttgtcacaagcgatttgttgaggatacaagggaatgcactcactgcgaccaaaattgcacgggacatatgtagacatccgtgtctcttgatgcaaaattactcaccagaagaaccaacaaatgaaaaggacaatgccgttgcactgaaaataaaaacagtctctttaagatattccctccacatgatttgtgtgaagatgactgtaacatatccagcaaaataaacttcattttgtatcttgcgcacaaactggtgatcgaagaagagcataaggttcttgttttttcacaatcacctcatatgctgaaaatattggagcaagcgcttggaagtgttattgacaaggagaagatcgttcgaatggatggatctacaaagcgacgtgatagaaataggatgagaatggcatttcaatgtcagcagtcgcgtaaggagtcccctaattcagagtcatcagggtcatctatttcaaaatcttcagatttagatttgtccaaggtttgtgaaccttggatctttctaatgacaacaagagtcggcggagtaggcctgaacctcacagccgctactcgtgtgataatagctgacccttcagaaaaccctagcgatgataaccaagcagtagaccgtgcatatcgtatggggcaaacgaaagacgttattgtatatcaactggtgacttgtgcagctattgaggaacacacgtatcgagaacagatactgaagatcgaaacttcgtttggtattttgggagaacaaccgtgcatgaaatcaatttgtgaaaaggtatctcaaacttattttagtctcaagactattcttgggacttgaactgtttactccctttttctcgtttgcataacaggaaggacttgtccttactctgccacccttcgggtttaaattttgcaaaacccatcgagaacttgttcgaatttatggcctcgaaatgaacatagtattatcagatctgggccttcaccacgaggctgtgattgcagcacactatcattctcttctcttctcagtgaaggaagatgaagttgatgactacgaaatggaggtccttgatcccaagcaaggaaagtcaaagtccaaagagattaagaagagggatgaggtgattcaatatataaagatagatctaccaccagaagcactgaaagtaaatcgtataccatacattatcggagaagacacgtagcattttcacattctatcactgtctttaggactaagtgtagcaagagcacactgtcacatcatatcacgatgactctagaagaagcatcattgtttcgggtcactatgcaggagagggcagtgtcacatcaatcaaaagttggtgggcactaagcagcttccattggtggcagtggcagcttcagctgctatggtttcagagagactttggatagggagcagaagtgaaagcggccctcgggtagcaactggatgggcctggagagggagcctgtaaactatttcccacccggacactgtattcttgttgatatgctatggttgcaaacccgtatcatctgt

SEQ ID NO: 15496 - DNA, 550 bp, Setaria italica
  Peptide Sequence Number=SeqID_81470
taaaatactgtgcgggcgattcacgatggaccatgtgaagcgctagtagatttaagtagcgctctgctgcacccataatgtaccaaatatagttgatcccaccacagtctttgggcaaaggaatcatcttgcaatgctgccacccttctgcaccggcaccattatttcgccaaatcttgcaagagaggtcaattgtgctgccaacaagagttaacaacccaagcctgccttcccctgcctccacaaaggcaaatatgttcgaaacgtcattgtttggagggaggtcaatgatggagaatttcatctgacgtgtgtcaagcataagtgcatatccatttgaatcaaccacccagaagaaacagccatgcgcatagcagcgcctgtatccaaaagagctcgagctgtggtaagtgatgagtccccacttctggttggccgaagagaagaagaaggctatgaacttgttttcgaacctcacagtgcagataactctcaatgacgattcctcctcatccttcaatttttcatctttgaccgtacgaccggacta

SEQ ID NO: 15497 - DNA, 662 bp, Setaria italica
  Peptide Sequence Number=SeqID_81471
ccattgtgtttgagaggttccccgagttaaagctagaagggctagaagatcaggtcttgcaatggtgtgtctgccggcttgaggcatggtttgctgcagatgcagatgaaatatccctgaaaaactgggatcaggagcgtgttcttactggtgggcatggactgatggtaaatggatactatcctgttattgaggctcttgctcaaggtcttgacatcaggcttaatcaaaggttttgtttttccaccgatcttttattgttggactgtactcttgccaaacatggcgccaaattatggttgatcagcagaatactactagcaattacagtgttgtgtagaaatcatgatgatgtagtgttctaatataaatgcaccgaataagcatttgatctttattctgtatgtctgaaaggaatgacccaatttaaataaattcgctcactgtaattgaatgatgatcttccagggtcaccaaattacccggcaatacaatggagttaaggtcactactgaagacggtacgaactacttcgccgacgcttgcataatcacagtgccactcggtgtgctcaaggcgaacataatcaagttcgagcctgaactgccgtcttatttggttactttgtttatttttgttttaatttttgtttttattttttt

SEQ ID NO: 15498 - DNA, 2239 bp, Setaria italica
  Peptide Sequence Number=SeqID_81472
aaaaccaaaaccaagagcaaagcgtcgccgcaaacactccatcccgtaaaacacacacgcgccatccagctcaatcaaagccaccgcccaccgacccggagaagggaggaaaaaaatatcttctcttctctccatcggatcgggatccttgactcctcgtgctgccgatcgattgatcgagagggggagatcgtggtgtgtggggggtgacgagattttgccggtttggagccaattaggggtatgagctgttttgcgcaccgccgctgctccgacgccgcccgccgccaggacggcctcctcgtcttcgtcttcttcctctcgattcccatacgtagtattagtaatagtagtaattctaatttaagtagtagtaatctcttgtaaactgcgatcctgttcgcggtttcgtgtacgggcacggagggactttctgttgttgcttgttcctctttccccactcctccttcctcctccttggcggcagcggcagcggcggttatggatcccaatggcctcaaaactggaggccttttgctcccaactattgagaggcggtgcacgacgcctccatccgtcatcgtgatcggcggtggcatctcgggcgttgcagctgctcgtgctctctccaactcttcatttaaggtgactgttctggagtccagagatcgtattggtggacgtgttcatactgattactcatttggatgcccaattgatatgggagcatcatggctgcacggtgtgtgcaatgagaattcactggctccattgatcggatatcttgggctgaggttataccgcaccagcgatgacaactctgttctgtatgatcatgatttagaaagctatgctctctttgataaggatggcaatcaggtcccaaaggagacagttgataaagtaggagaaacatttgaaagaattcttgaagagacggtgaaagtgcgtgatgagcaggaacatgacatgccccttctacaagcaatttccattgtgtttgagaggttccccgagttaaagctagaagggctagaagatcaggtcttgcaatggtgtgtctgccggcttgaggcatggtttgctgcagatgcagatgaaatatccctgaaaaactgggatcaggagcgtgttcttactggtgggcatggactgatggtaaatggatactatcctgttattgaggctcttgctcaaggtcttgacatcaggcttaatcaaagggtcaccaaaattacccggcaatacaatggagttaaggtcactactgaagacggtacgaactacttcgccgacgcttgcataatcacagtgccactcggtgtgctcaaggcgaacataatcaagttcgagcctgaactgcccccatggaagagctctgccatcgcggacctcggtgttggcattgagaacaagatcgccatgcacttcgacagagtcttctggcccaacgtcgaggtgctgggaataactggtccgacgcctaaagcatgtggatacttcctgaacctccacaaggccaccggcaatccggtcctcgtgtacatggctgctggaaggttcgcccaggaagtggagaaactgtccgacaaggaagccgtcgatctggtcgtttctcacctgaagaagatgcttccagatgctactgaacctacgcagtacttggtgtcacgctggggctctgacccgaactctctggggtcctattcgtgcgacctggtcgggaagccggccgacgtctgcgtgaggttctccgctcccgtggagaacctgtacttcgccggtgaggcggccagtgccgaccactcggggtccgtgcacggcgcgtactcgtcgggcctcgccgccgcagaagattgtaggaagcgcctcctgacgctgaagggcgtcccggacctagtacaggtcgcggcgtgggaggaggtggccggagctgtggctcccctgcagatttgcaggacctgagcttggaacatctgcgtctgcgcccgctatgctgtgaaagaatgcggggaagaagccgtatactttttcctagtcggcgcgtgcagatgattgcccagtcttatattattattatgtcgtaataaaaattgtattatcgtaaacgtgttactgtcttgattggaataagttgagcactcggacactgaaactctctatcaaaatcgagtcctatgttaaattaaacaaaaaaaaaaaaaaattaagttaatttaagtaactttagttaagttta

SEQ ID NO: 15499 - DNA, 344 bp, Setaria italica
  Peptide Sequence Number=SeqID_81473
aaccccgccccagatctacaagaaggtcaccgccggcaagctgcccgacgccttctaccgtgtccaagatgacgacgcgcgcaggttcatccggcaggtgccttgtggcagcgtccaagcggccgtccgccgcggagctcttgatggaccctttcctgctcgacggtcatcatcattccacgccttgtgccgtgatgccgccatcgtcgtcattgcccgctgctcctcattcttcgacatgcagcacctccaatgttgacgaggatgcagaacctcctggccccatcaggacggacatgaccatcaccggcaagctgaatgccgaggaggacaccatcttccta

SEQ ID NO: 15500 - DNA, 317 bp, Setaria italica
  Peptide Sequence Number=SeqID_81474
cttagtcaatcagttgcgataacatctctgaatatctgagtattgactctaatagtttagcttactgcttcctgatgctttgtttaagtcaaggtttatcaatttatcatagcctcttaaacataaagagttttcccatcatcatttcagttaaaatattggacacgcactacctttgtggtttgccgcgtgtcggtcagagtcataaacacttcaatagttaatttgttaaactaattttaaatattcttttttttgtcttaccgtaacaacggaatcacgagctgcaacagcgaggatgtcagcgcatgatacca

SEQ ID NO: 15501 - DNA, 529 bp, Setaria italica
  Peptide Sequence Number=SeqID_81475
cttcatttagttctttaacaaggtaaaatatgcataagttaaacacatatctcacaactactatgaacatagttaattatcattagttataggtaacacagaacatcctaaacaccttaagcaagaattaaagcaaggatgaagaacttatataagcaacataatcattagttgttatgttaacatgagagcatacatatgagttatattcaaagcttaaccactgcttatcataacttagcatcatatgtacccctcaaaaacaactattaaaaatatcacatgacttaagtatatgcatctactagaaaattttcattatccaattatatagtaagcatatatatcaattataggtgatgtggcaaacatctcatttggagccaagatttttatggacgatagatgttatcaaaacatagctactgtacaattttcacatgctcaggtggtatagattaattgctatgaaaaaggcaaattgctaatgcacgaaaaacatgtaaaaagcaagataattctaaaagat

SEQ ID NO: 15502 - DNA, 895 bp, Setaria italica
  misc_feature (873)..(895): n is a, c, g, or t
  Peptide Sequence Number=SeqID_81476
cgcagcccagcgcgactcatcgagacgacgcctccgactctcccccgagcagcagcggcggcggcgcaagcctctcctccggcatggggacgcgggaggtgtacgaggagaagctccgcagcggcgcgcatctccaccgcgaccccaccatcaaccccggcctcggctcgccccgctgcccgcgatgcctctccctcctcaaccccaccgcgggagagggggactgggccatcacctccgtcctgcacgacgccaccgccgtggctggttccggcgccggcgcattgctcagtgctgtgcacgggtttaacacagggatcccttttgtccagaaacatgtgaaggggccgaagtggctgcagttgctcgttggggtgccaccactgctgttgttctcaggtgccagtgctgtgtttggtgcatatgcacttccaaggtttgctcagctcactgtgacttcttactatgcggcatcaagcggctctcactatgcggtttcccagatcacccgccaaatcgaaagcgcccatttctcagaatctgacgagaaatctagatgagttgttgccttgttggtagtcagtgtgttccattggtgccatgttcatggtatatatgagtagtagagattactgctgctgttgccttgttgcagtacagtattagtattgctgtgttccagacactgataagtaggatcatatagttttgcttctcatgccacgttaaaattaaagttgtgttggtaaaatcgcattcagctacgaattgtgattgaagagaaccgagatgattatagtaagaatacgcagtgaattgtaaaaagcagtacactatttgcagtcgagaacaacacctgtgcgttactatagnnnnnnnnnnnnnnnnnnnnnnn

SEQ ID NO: 15503 - DNA, 468 bp, Setaria italica
  Peptide Sequence Number=SeqID_81477
tgtgcggaagaaacagtggctagcatcctcgaagatgatatcaagggtgtgttaaagcccccatctgattcgaagaagcatggaaggacaggacttgttgagatcctaaaacaaacaatgttcgctttgtgccattcagtggttgggagaagattgattccaaggaaaagatggcagggcagctgagaaacaagcctagagagaagatcacaacctgggacgagctccagaaagctgcaagcgagtaaaaggctggcactcccagcaattttgtttccatgtgtttgccagcaattttgtttccatgtgtttgtatcaaagggttgcatcaacgagagatgatcctacacttagtaatagagcataacatcagcaaactatggtgctcagtaaaggaaaattactaatagcaattcatttttaacaaaatttaaacaaaataaacaaaaaataaaccaaaaaaaaaaa

SEQ ID NO: 15504 - DNA, 577 bp, Setaria italica
  Peptide Sequence Number=SeqID_81478
ttaaatttagaactaaattaacaaacgaaagactagttcttgcaacttacgacctagacaagaatgaggaggagatgaggaatagtagaatccaaagaagggtttatgagttgctgtccaaagctgcaagtgcacataaggacaacagttacaatgaccaaaaagagcttcattttgtgtttttcaggagacctatcaaattcatcccttcagaaaatggttccacggttggtgctgttcaacttgagaagacagctttaaaaggtgatgaagtaactggtaagcaggtggctgttggaactggtgagtttgaagacctaaaatgtgggtaagtattttggctcgtgcttatgctttcctggttttttacctaaccatataatatttgagatgcatttaatatgctgccttcttcttagtctggtcttgaaaagtattggttacaaatctttgcctgtacaaggtttgcctttcgacaaaaacagaggagttgtgacaaatttgagaggcagagtcctgagcagcgaatcagagacaaccactgtgaatcaggttgtacgtagtcgctagactgagt

SEQ ID NO: 15505 - DNA, 1592 bp, Setaria italica
  Peptide Sequence Number=SeqID_81479
caccatttggcctagttcgttctggagtggctccagatcatccagaaacaaagattgtggtaaatcaattttctcgtgtagctgcaaatggcagctgttcattctttgggaatgtaacactgggaagggatatatctctgtcagagcttcgcaaaacaatatcatgttgttgttcttgcttatggtgcagaaagtgataggtcacttggtattcctggagaggatctgaaaggaattcattcagctcgcgagtttgtctggtggtacaatggacatccagacatgtgcgacttgtctcctgatttgaaaaacacagaatctgcagtcatccttggtcagggaaatgttgctcttgatgttgcacgtattcttttacgctgtaaaactgagttggctactacagatattgctgattatgcgttggatgctctacgtggcagcacaataaggaaggtatacttggttgggcgacggggtcccgtacaagcagcatgcacagcaaaggagttgcgtgaaattttaggtttgaaaaatgttcgtatttgcatcaacgaagctgttcttgcaacttcgcctgcagatgaggaggagatgaggaatagtagaatccaaagaagggtttatgagttgctgtccaaagctgcaagtgcacataaggacaacagttacaatgaccaaaaagagcttcattttgtgtttttcaggagacctatcaaattcatcccttcagaaaatggttccacggttggtgctgttcaacttgagaagacagctttaaaaggtgatgaagtaactggtaagcaggtggctgttggaactggtgagtttgaagacctaaaatgtggtctggtcttgaaaagtattggttacaaatctttgcctgtacaaggtttgcctttcgacaaaaacagaggagttgtgccaaatttgagaggcagagtcctgagcagcgaatcagagacaaccactgtggaatcagggttgtacgtggtaggatggttaaagagaggaccaactgggatcgttgcgacaaatctccactgtgcggaagaaacagtggctagcatcctcgaagatgatatcaagggtgtgctaaggcccccgtctgattcgaagaagcatggaaggacaggacttgttgagatcctaaaacaaaacaatgttcgttttgtgccattcagtggttgggagaagattgattccaaggaaaagatggcagggcagctgagaaacaagcctagagagaagatcacaacctgggacgagctccagaaagctgcaaacgagtaaaaggctggcactccagcaatttgttccatgtgtttgtatcaaaggatcgcatcaatgagagatgatcctacacttagtaataaagcataacatcgcactggagagtaggctcacgtataagccgtaaaggaatagcaattcatttgtgcctttaacttattttccttttcttttgagctgtgggactggtcgttttcttctactatcctggctttcttaaatctggcttatataggacctggagtttttgctctatcatggcagttagggccatttttatgatgtattgtgcagattgtaag

SEQ ID NO: 15506 - DNA, 1613 bp, Setaria italica
  Peptide Sequence Number=SeqID_81480
atctcgtccgtgttcacgaaccgccgcgtccgcgcccgcgcgatcagcagcaccctcggccgcctccggccggccgtcccgttggcagcggcgggccaggcgacgtcgcgcgggagaccgtaggtggtgcgcatgaacttggtgaagtcgagcatggagtagccgttgggcgcgcggcgcgggtcgatgctgaagtcgtcgtggttggtgagcccgacctggacgtggctgaagcagtgcacgcgcgggtcgtggtccaggtcgatcggctcgtagttggagaggctcttgaacaccggaaggtacttgcccagccaccacatctggaagtccgtcaccagcagcagcacctcgccggcgtactgccgcgccgtcaggaacaggggcaggatcacgtcggtgtacgcgtggaagtagttgcccgcgtacccgcggtccgagaacaccagcgccggcacgccgtcgtgacggtccgtgcacgccggcgccggcgcctcgccggacacagaccgcaccgtcagcacgcggatgtggcgcatcgcgttcgggtccgccttgcgcgggtacggcttgatgctccacgactcctcacggaaggttcgctcgtcggcgcccggcggcgccaccagggtgacgctggcgttggcgcccagcacgcggacgtcgccgtcgagctcgcaccagtcgatgcgccggttcgacgtgacgtcgcagagcggcttccactcccgcaccgccggggtctccgaatctgcttgcttaaccactggagcagctggaatctgctgatcagcaacaagagccttgacctcttgtgttgtaggaggaatctgctgaactggagcagggaggacagcaggatcagagtgaaccgtagagggggagccgccattgctgcttgcggtggtggtggtggccgcggcggcggcggagacattgctcttcttggaaggagtcttagcaacagcgtcctgcacttgcagctcctcgtcctcaagaacacctgattcttgcgtgctgttcgcggcttcctctgacgacacgggaggaagaagagcggcagtggcgtcaccgtccttggcaggaacctcatccctgccgcctaccgcggcaggattcgccgccgcgggagacgcaccaccgcgggctgcatcaccgctgtcccccacaaaggtctcatctctcctcgtgtcctccagcggcgcattacggccggaatctggccccgaaggggaagcatcgccgtcgtctttctcgagaacctcggccttgctcccctccttggacagcgcgtccgggtcctgcacgcccaaatctaattgctgcttggaggtgtcggcgccgccgctcaccagcgagccaatcccagccgcgtcttaaaaattagttaagcacgtttgcatgtcagctaatcatggaatgaccaactggtcaagaaactccaaaagaggcaatttttcccaaagaaaaagttagctttagcttcatggagaacacagttcatggtagaccaccctatggaattatgatcgggcgagagccgagaggcctagaaatggagcaatctatcagctatggggatgggatgatgctgcctccgttgctctacaata

SEQ ID NO: 15507 - DNA, 390 bp, Setaria italica
  Peptide Sequence Number=SeqID_81481
gggggaaacgaaagagcatcatcgtggagcgcgaccgtcgccgcaagctcaacgagaagctctacgcgctgcgcagcgtcgtgccaaacatcacaaagatggacaaggcatccatcatcaaggacgcgatcgagtacatccagcagctgcaggcggaggagcggcaggtcctgcaggaggtgcgcgcgttcgagtccgccggcggtggcgcgccgccgccggaggaaggcttcgagcacgacgagggcctcctcctcctgcaggccgagcggacgaagaagatgaagcgggcgcggtcggtgccgtccatcgtcgccgccgcgccgcccccgcccccgccgtggaggtccaggagctgcgcgtgtcggaggtgggcgagcgcttgctggt

SEQ ID NO: 15508 - DNA, 647 bp, Setaria italica
  misc_feature (18)..(18): n is a, c, g, or t
  Peptide Sequence Number=SeqID_81482
ctcttagttttttttttntttttttttttttaaagtaaaaactgcctttttagaaatgctagaaattcaagttctgcgctgctgctgcgccgctgctgtctgcagtagaaccctaactggaaccagagctaatcctaaccagacctaatcgaaactactaaactctaattaacccaaggaactacgacgacgacactaggaagagaaaaaggggggaaattcaggtacggtacaaggctattacggccggaaaaaatgtacagccaccgctgggtggccagcctccttgttgtcagggaggggcagcagctagaacgacgcgacggcaggcgcggcggtggcgaccatgccgctctccttcttgcggcgcatctcgagcaccttgcggtgggagttggagtggatggtgctcacgaaggtggggctgcatgcagggcggtactccgggagcagccgcccggacttgtagcggacgccgcacgcattgcacagcgtcttggcgccctcgggccccgcgcgccactgcggggtcttctgcacgccgcagtggctgcagcggcggtcgcccggcgccggctgcgacgcgaccgcgccggcggcggaggggttgggagggaggtgcttcggcttgcgcccgcgcttcttgg

SEQ ID NO: 15509 - DNA, 1160 bp, Setaria italica
  Peptide Sequence Number=SeqID_81483
tagtttacaatagggaagctaagggatgcaggctccagagatgaactgcgccttgtctatggtgtttctgagcgtacagaaagtgatggtgcggctaatttaattcagaagttgagagctataaactatgctctgggtgaactaggacaatggtgtgcttacaaggttgcacagtcattcttaacagcactacagaatgatgaaagggcaaactatcaggttgatgtcaagttccaagagtcatatttgaaaaaggttgttgatttgttgcactgccagttgactgaaggggctgcaatgaaaagtgagaataatgatgttgaaatgcataatgctgaaaaccacaagccaaatgaccttgaggagggggagctacctgacagtcatgctgtttctgtaggtgaacatgtagatgaagttattggtgctgctgtggctgatgggaaagttactcctagggtgcaggctttgattaaaatacttctcaagtatcagcaaactgaggatttccgtgctatcatatttgtagagcgagtggttacagcattagtcctccctaaggtttttgccgagcttccatcattaggctttatacggtgtgcaagcttgataggccataacaacaaccaagagatgcggtcaggccaaatgcaggatacaattgaaaaatttcgtgatggtcgtgttacgctgctagttgcaactagtgttgcagaggaaggacttgatattcgacagtgcaatgttgtcattcggtttgaccttgcaaagactgttttggcttacatacagtctcgtggtcgtgctagaaagcctggatctgactacatattgatgcttgaaaggggaaatttgtcgcatgaagcgttcttgaaacatgctcggagtagtgaggaggcattgagaaaagaagctattcagagaactgatctcagtcatcttgatggtacttctatgttaagccctgttgatacacctgactctatgtatcaggttgaatccacaggtgctgttgtcagtttgaactctgcagttggactcatacatttttactgctcacagctgccaagtgacagatactcaattcttcgtccggaatttattatgcaaaagcatgagaaaccagagggttcagcagaatattcttgcaagcttcaact

SEQ ID NO: 15510 - DNA, 707 bp, Setaria italica
  misc_feature (11)..(11): n is a, c, g, or t
  Peptide Sequence Number=SeqID_81484
ttttgtcaggngaagatagttttcgtcagcttattcagagagtactgcaaaatttgtcctagatactgtctgtcctgggagcctgacgcaagtaactgggtcaaaatttcaaggttaatattttcacttatttcttctttccaccctgtaggagctaactcttgcaatgcttccttgacttcctttaccaggctgaccagataactgtagtctggcatgtctcctctcatcgagtcctcaaccacatcccagaaagctttctccattgtttccttgacttttgccttgaaatcgccttcaacagtaccagtaccatcagagatgtcagcaaaagagccatggatgccatgaagtatctcattgactatttgttcattttcagttggcattttttctggcactgcacagctcagtgtgagcttgcctcctttgctgctgtcagatggtgatgaggaagacccaaacagacagttgacaactcgatttgtcttttcagcatccatgttagaattctccctaatttcagaaacagtagactgtccgggagaacatgcaactgaaggagatgctatatttgcaactgtagttgcaatggagctcgtgccctcctttgcttgaaagaactttgaccttgtttcggataaagcagattccattctttcaataccagcttcaccacccaggtgttgaatcctctcccttaaaag

SEQ ID NO: 15511 - DNA, 482 bp, Setaria italica
  misc_feature (462)..(462): n is a, c, g, or t
  Peptide Sequence Number=SeqID_81485
caggtgttggctccggcggtttctgctggtcgcagaggctcaggaggcggctcgcggctgtttcctcctgactcggcttgaagaagacgcgccatggaggcgaagcagcgggcgcgccacggcgaggagaggaggccgtcggcggcggccgatggcgaggagtacgacccgtggacggcgtggctctacaagccgcacaccatctcggtgctcctcgtcggcgcctgccttctcatctgggcaagtggagcacttgatcctgaaggcgctgctgctcacagtagcgtgacatcaatcaagaggggtgtctgggctatgattgcagtcttccttgcctactgcacacttcaagcaccttcaacgatacttattaggccccatcctgctgtctggcgcctagtgcatggactggctatcgtttacctcgttgctcttacctttcctgagacacgcaaaaggggntaggcaaggcacacagggga

SEQ ID NO: 15512 - DNA, 2392 bp, Setaria italica
  Peptide Sequence Number=SeqID_81486
tagttgaaaaaggttcacaccatgagcttgtaacggatccagagggagcttacagccagctgatacgcctacaagaagcaagtcatgcttccgagggagcaaactaccagaacaagtcaagcacgaaggatgattcctggatttacgcaggcaaacagacgccaacaaatcaatcagctaccataaggtcacctcagaacaacagcagaaatcactcattgtcagtatcattcagcgtacctcttgaaatcaatgtccaggacagatcatcaaagaatgtagatgaagaaattgagcaggaagtgcctctcagccgcctcgcatcgcttaacaaaccggaaatcccagtgcttattcttggttctattgcttcggctatcagtggagtaatcttcccgatctttgcgatactcctatcaaacgtgatcaaagcattctatgagccgccacttattctgaggaaggatgccgagttttggtcatctatgttcttggtatttggtgcagtgtacttcttgtcacttcctcttggctcataccttttctcagtggctgggtgcaagttgatcagaaggatcagattgatgactttccaaaaggtggttaatatggagattgaatggtttgattacccagagaactcaagtggagcaattggggcaaggctatcggcggatgctgcgaaagttcgggggcttgtgggtgatgcacttcagctggctgtgcagaattcagcaactttaattgctggtttggtaattgctttcatatcgaactggcagctatcacttatcatattggccttgataccgctaattggcctcaacggatggatccagatgaagtttattcagggattcagtgcagatgcaaagttgatgtatgaggaggcaagccaagtagcaaatgacgcggtgagcagcataaggacagtggtctcattttcagctgaagaaaaggtgatggatttgtacaagaaaaaatgcgaaggacccttaagagcagggatcaggacaggaataataaatggtattggttttggggtttccatcttcttgctgtttggagtctatgcagccagcttctatgctggcgcgcggcttgttgaggatgggaaaacaacttttcccaaagttttcatggtatttcttgctctaagtatggcagcaattggggtgtcgcacacaagtaccctcacatcagattcttccaaagcaaaatcagccgtatcctctatatttaccatcatggaccgaaaatcaaggatagatccaggtgacgacgccggggtaaccctagagccgctaagtggtgtcatcgaatttcagcatgtgagattcagatatcctacacggcccgatgttcagattttccaagacctgtgcctgacaattcaatctggaaagactgttgcgcttgttggagagagtggtagtggcaaatcgacggcgatagcattgctgcagagattctatgatcctgatgcaggccatatactcctggatggagtggacatacagaagttccagctgaggtggctgaggcaacagatgggactggtgagtcaagaaccatctctgttcaatgacacgatccgggcaaacatcgcctacggaaaggacgggcaagcgacagaatcagatgttgtggctgctgcacaactggcaaatgctcacaagttcatcagttcattgcatcagggatatgacacaatggttggggagcgtggggctcaactatccggagggcagaagcagcgtgtggccatcgctcgtgccatcgtgaaggaccccaagatcctcctcctcgatgaagcgacgagcgcgctcgacgcggaatccgaacgggtagtgcaggacgctctggacagggtgatggtgaacagaacaacagtcatcgtggcgcaccgcctgtcaacaatacagagtgcagacgtgatcgcggtggtgaagaacggtatgatcatcgagaagggaaggcacgataccttgatcaacgtcgagggcggggcgtacgcgtccctcgtcgcgttgcattcagcagcaccgtcgtagccacattcagttcagaggtgatactgaatctgagataggcgagcaggaccggcagcttaacaaaagttcaggcgccggttcttgttgtcgttgtccaggtcctgatgaaatagatgcaaaggcagacatatatgttaagatgactcccgcatagctaagaaggaaagaagattacaggaataatagtgtcaaaatgtaaatgcagcaaccatgctgtgcccaagttactgatatgaatacagatgttcagtgtaacatgtactgaatgtagatcatactcctagctagcatactctaataacaaagaagcagatgacgattgtgatacgtcttcacct

SEQ ID NO: 15513 - DNA, 2311 bp, Setaria italica
  Peptide Sequence Number=SeqID_81487
ttcggaagcactcctgaaccaagcaagggtgaattgaaaggattacacagaatacaggtcaatttctcacacgagtgcattatttcccccggcaacagagacaccaaagcagcaacgctgcggccgcgactagctgaagtattttctgtacagtgacctggcgatcgccagagcgtcacccgtggccttcacgccgtacagctccttcccggactgccactcgttggaatacgagatccagtccttcctccattcctccagctggaagctccggttctcttgcaggcttctcgtcaagtatgcgaagtattttgacgcccttggaaggtaatagctcttcagcagcccgctccagaacttattggcgtagtcatgcaatttactctgctcggtctccgtgttgtcataccacatcgtcacctgtgttctggcattccactcgtactgctttcgttcactttcagtcatagcaagactttttgcactttccaaccaggggcccagcagaaaattatcatcagcagctagtagtgtatcaatatccgcgatgatttcgagaaatttccttgcgtgagaattcaagccattcgagtctttcttttggtacgagcgcattgcatcaaggtacacttcatttgctagttttgataggcactgcctagttaggtcgacaaggtcgtacctatatgtgatactttttgaaaaatcatttcctgcattgaggaatagttcaagggctttgatggcctcctttgtggaataccatagatgtggatgtggtaggcttccagagacctcacttaagaaaaacctcctatggttactcgaaattgacataccccttcgtttagaaagctgagtgctgaatgaacttggacttatgtccggaaattcaactatgtagtccttattatgatccgcaattccatcagtgcaattgtatattgtatgatacaaatatctccaagctttctctatttcagcatttgcttgaccatatcgcctatttgagtaggtttttaaccaatcctcaacttcaaccttcttattacgaaatgccatttcagacgtaagttcataaacaactggattctgctctattccctccatgcacatgccaacaccaatcattgtcgaattgtaactcgtacgggcatcaatagggccagatgcaattgaatcaagtatgccatacatttcaatattcccaccaaagttgtgtagcaagcaccagatgtatggtacgccgtagaattgagaagacattttccaaatgggcttgacatcagcaaataaatcaaggactatcatcttaccaattggaacagagtgaagtagtgctttcatttgaggttccttccagaacgcagcatctgaatagaataaccaaccctgcattaaccacactgcattcttgttacctcttgacattgcttcataaatagcagaaccaagtgatgaaatatatgctggttcatttgtgggtggggtattctcattgaacgtgtcacagttatagatgttagttacatcgccgtattcttttatttgttgcttgataaaagcctgcccaacttctataaacaatgcatcagacggaccaagaagataagtgcagcaccacctaggatcagcatcaacagtattccagtcaccaagctgggtaatgttagcagatggaaataattttgagaacacagctggaacatttcctgagaacgatggaagaacagggaccatcccaaactcaatcatacgggatagtattttcttttgcagtgccaattgttgatccaaccaattttgtgagagtggtccaccccatccatgcaagttccccattctggcccaagcaaggaaagctggtccaccgaaaaaatcatctaaatctctgtcggtgacattaaaactcttaaaaaccttttgccagatagcctcctgtcccgtaaatgctaaaggcaagttaattccttgaagtgccatccagtcaatttctttctcccatcttttccagtcccaccacacaaaagagtagctagaggtgacgacattctgatagtaattccaaggaacaggacgctcaatcttcacaccctcgcccttcacacgaggcagagacccaggtgaagggaccgacgccaattgtgcgcccccagtcttatcccaagagatatgcacgccgcaccagtatttcaagtaccagtggaggccggaaacgagctcaacacctgtggttccctggatcagaatctccgctccgcctttgcccgaattgtcaacgacgttgcttatcctgaagcagctcgaatta

SEQ ID NO: 15514 - DNA, 406 bp, Setaria italica
  Peptide Sequence Number=SeqID_81488
ttgaggaactggacccggaacctgaaggacgtgaacctggagtaggaaaggtgactgtggaatatggtataggctacagcgaagctccggagcaaatgattgattgtggaggtgtggttccatgtttgctgaaggaaataacttccccagcgaaggcttcaaaggctccaagtaaggtcagtcaggcagagggagctgctgataaaaagaaagaaggttctgcatctaggcctggtgatgcaaagaaaactaagaggaggctgcagccagctgctggtatgatgctcaaggaattcactggtgccgcggaccttgatgtggatacgaaaagggaaggaagaggcaaatcatcatccagcgtggcatccgggagatcagatgagctgattcgacttctgaaaacccc

SEQ ID NO: 15515 - DNA, 613 bp, Setaria italica
  Peptide Sequence Number=SeqID_81489
tttacaagaaagacctaggaagtaccttactggttgaccgaaaggaaaaatagatacagataatattaccaaagtttccgaagaagatgaggcgcagcacaagtttctgaactcagagttgcgaagggtatcgagaagtgaagcaataatgacgaactttgccagggctttatggactgtattaaagcagtataaacacaaagttttggagtccgagaatgctgctgagagcatgaaaaaattgattagagatcaagatatccaaattatggagttgaaaaaggagctggatgttcaaaactctcgttgttcatgcaagaacgttccaatcactgaagacacctctgttgaccaagatgattctgtattgtctggtccagctggtcgaagctttgtttctcaatcaaataaacctgacctgggatcttatgatgctccagtagataatttccatttagtagaagatatctcaaaagaactcagatgccatggtcctgaaaattcttccactgcttgtagcctgaagggaatctgtcagctgtgatacttcgtctatatctttgctagatgaacaagaactgagttccagaggttcttaaggtacaggtacaag

SEQ ID NO: 15516 - DNA, 1402 bp, Setaria italica
  Peptide Sequence Number=SeqID_81490
tgttactcctatgttggcatcttaatattgtataaaaatctgtcagttgtattttttaagccatatcatggcagaagtatatacacatgatattggagcttcctatgatatgatttagtttgttatacacaaaaatcactaataacttcgttccccccctgcagttagtagaagatatctcaaaagaactcagatgccatggtcctgaaaattcttccactgcttgtagcctgaaaggggaatctgtcagctgtgatacttcgtctatatctttgctagatgaacaagaactgagttccagaggtcttaaggtacaggtacaagcgattcataagaaattggattcatctgaaagttttactcagcaaacatctccacacactggtggtgtaacgccttcgtccagtcattcagataatcaatcagatcagaacactgaaagggtcagcctgtccccacagttcactagctgtagcaagaaagctaccatagagcatgttcgagaaaaaaaagctaccatagagcaaagtgaagaagaaacaggagagttaaacaagataacagtagaggatatgcaacatgatatcaatacaagagaagtggagcatcttgattgtctgagctcttctcagaaagtgaactctgacacagaagatgtcagctccagccaatcttccttagagttgccggttgctactcaaaagaaacttgaggaactggacccggaacctgaaagacgtgaacctggagtaggaaaggactgtccggatcctagatatttgttacctaatgcttgcatagcatttgtataggctacagcgaagctccggagcaaatgattgattgtggaggtgtggttccatgtttgctgaaggaaataacttccccagcgaaggcttcaaaggctccaagtaaggtcagtcaggcagagggagctgctgataaaaagaaagaaggttctgcatctaggcctggtgatgcaaagaaaactaagaggaggctgcagccagctgctggtatgatgctcaaggaattcactggtgccgcggaccttgatgtggatacgaaaagggaaggaagaggcaaatcatcatccagcgtggcatccgggagatcagatgagctgattcgacttctgaaaacccgtccagtccgtagagcataatccgggatgcttcatttgtcgcagcagctcgttgcgttgacagttgaagaaacgccatgaatctgtttagtttactactactagtagtagtagtagcatgacgtgaatggagtaatggacatggcagttcggttctcattgtatctatcgatcaatctacctgctttgctttgcgtgttgatttcatcatcaaaccaaccaaccaaccaaccaaccaaccaacaacaacaacaacaa

SEQ ID NO: 15517 - DNA, 514 bp, Setaria italica
  Peptide Sequence Number=SeqID_81491
ccccgcgtgcgcgcaggccgtgagcacgttcaccagcgtgacgtcgtctggcgccacgcccttcctctccatccgggcgaacacctcgacggcgtcctcgccgcgcccgtgcacagcgagcccgccgatcatgcagttccacgtcgtgagccccttcgccggcagggcctcgaacacgcgccgcgcctcctcgacgcacccgcacttgcagtacatgtcgaccaccgcggtcgccagcttgtcatcattccggatctcgctccgcgccacccagcggtgcacctccctcccgcgcgccagagtgccggcgcccgtgcacgccaccgccgccgtcgccgcgacgaacccgttcccctccacgccgcgcgcccgcatctcgtcgaacacctccagcgcgtccaggaaccgcccggccttcacgtacccagacatcatcgcgttccacgatatcaggttccgctccggcatcccgtcgaacacctcccgcgcgaccgtacgaaccagccccagcttg

SEQ ID NO: 15518 - DNA, 629 bp, Setaria italica
  Peptide Sequence Number=SeqID_81492
ccggcgcgctcgtgcgcgtcccgcggcggcgtttcggcccggtcccggcgtggcgcccgccggacttcgtggagcccgaggaggtctggatcctcggcacctcgcacctctccccggagtccgtcgccgacgtcgagcgcgtcctccgcgccgtccagcccgacaacgtcgtcgtcgagctctgccggagcagagctgggattatgtacgtgtccgatgcttccgacgagccgctcttgaagtccaacatgttctctctcggtggcgccaagtttttcggagcagtcaaccgaagcatcaacctgggtggacagagtgctctagctctgcgtttgctcctcgctgttttctcttcaaagatctcttccggcgcgaaccggccattcggagaggagtttcgagcagctaggaaggtgtctgaagatatgggagctcagcttgttcttggggatcgtccaattgaaataactcttgaacgagcatggaaatccctcacctgggatcaaaagacaaatctagtaatttcattgttccgtggaattactgcaacaaccgacacgccggatgggaaaactgctgtcagcccatacgagctatatgagaaactgagcacatcatatccttcactg

SEQ ID NO: 15519 - DNA, 620 bp, Setaria italica
  Peptide Sequence Number=SeqID_81493
tatctcacttctgattctccgtgttacttcctcaggatcatcatgcaagcaatcagtcatatccaaaaaggcttcatcacagctcaaagcctggaccttgctgcaatgtttgtgcaaaattccatagaactgatcagcaacctcctcatatgcatcaaatttatatggaacaatctttaggtgaggacaccgagctttagcatctctaacaaacatgccagcctttatccctggaattcaccatgcaacctatcttcaaatatgttcacataactaaaattacaatttcccattgtaaaatgaaataaaataaaataggagcaccataatttcgtgccggataatttgcagatgatatttctgctgttcctttaggattgtccgaatggcaaactgctaccggtttatcatgcagatctggcacatttctgatgacgacagacacgaaaaagcaatccataggactacaagattaccatatcaatatgaatgattgttttcttattccctgaatgatcagcattcgacttgatgcttttagcttctagtaaatttgagaagcgctttctataccgattcctccatgtcccaatgaagtgcagttcgtagtagttacttta

SEQ ID NO: 15520 - DNA, 274 bp, Setaria italica
  Peptide Sequence Number=SeqID_81494
gttctatttagcgttggatgtctttcaaaaggacgtcaatgattggtttgtttttagtagtagcttcgttctatttgtgccggtctatctcacgagggtgccggccaatagctttcaattccataagccaattttagaaaccaacagcgttctgctttccttaatattacatgcaatttaaggaaataaaaattgtttgtgcttttacatctgaagtgcactcgaattgagccatgcaaactgtaagtacgcacggtgcccccaaggaccattt

SEQ ID NO: 15521 - DNA, 1432 bp, Setaria italica
  Peptide Sequence Number=SeqID_81495
taaatataatgttacagcaaatagttttcacctcttcaaagaaaacggcggagcgtgtatgtatgaagaaatgctgaaatggcacaaaaggaagtaaggaaccggcaccaattattctcttgacaaaaatacattcttgcaacggtggcacaaatcaacatgttcttccggctaggaaacagtgaggagcttatttgcagcataccaatgttaagggatggatgtactgtcaattatgaactcaagtctgcaggggatgtttttgctcgatcagcttcgatcatagctttgatgtagaattcaccagctttgtatgaagatcgaaccattggtccagatgcaacataacggaatcccatttcaacaccaagggcccgatacttctcaaaagcttcaggtgtgacatactcagaaacaggcatgtgacgttttgatggcctcatgtactggccaaatgttataacatcaacaccagcagcccgaactttttccatggtgctaataacctgatccggagtctccccacaacccagcattattgatgtctttgtaagagtaccaggaggagcatactcttttgccatcttcaaaacatctatagattgtttgaaatttgcacgatggtcacggacacttctttgcagctcttccactgtttcaatgttgtgtgcaaaaacatgcaacccagaagttgcaaccttctctacacagcttgggtctccacggaaatcaggtacaagtgcttcaataagcatttctggcttcaaagcctttaacttctgtactgtttcagcaaagtggccactgccctgatcaggtaaatcgtcccggtcaacacttgtgatgactatatattcaaggccccatgaggcaatagcttgagcaacattggaaggctcatcaggatctggtggagggggagttcgagatgtcttgacattacagaatctgcagccgcgcgtgcaggtgtcccccaggatcataatcgtggcggtggcggtgccggtctcgccgccggaccagcactcgccgaggttggggcaccgcgcctcctcgcagacggtgtgcagcttcagctcccgcagcttggccttgatggccgcgtacttggcgccccccggcacggtctccttcatccacttgggcttgggcagcgggcgcttccgcgtccccacctccaccgagtacgtgaagtcccccagcgacggcgcgtccgcctgcagccgcgcgcgcagctccgcgagccgccccgccgatggagggccggacggaggcgagggcacggacgattcaagggtttggaggagcgatggagtggaggagatggagcgggagggggcctgggtcagggcccgtgccagggaggccgcgaggtggcggcggccgtgcatggctgcagcggcggcggccgtggtgcggcggttggtgggac

SEQ ID NO: 15522 - DNA, 3301 bp, Setaria italica
  Peptide Sequence Number=SeqID_81496
aaataaccttaagaacaagaatagacaataggaaagtaggaaagggaaaataattagtcgtgtgtcagactgtgaagatttgtgcagggagaaatactcaagtttaagcacacccagggcccagtaccagtgctgcttcatgacagattgtgatccttgtgaccctgagagagaaagagttgggagatctgagcagacatcaaatagcacagtgtcaaagccatcttcaactgtttcagatgaatcttatggcaagcgtccagcaaaacgcctgaaagctgatgttcccagtcttgtcaatgtcaatcaagcagagagtccaaaagagcaaaagcctgttgtgaatgagaatcatgcatatggtgaaacagtacaatcagaaatcacggaattacctacaaagtcaccttgcagttcgtcaggtgacattaatgctgacaccaataatacgctagaacagggtagtgaagatgtacataacatggatgttgttgcagaagaagaattgcactgtgtaaagggtgacattgagatgaaagactctaagactgttgcattggatcagacagcgaatcaggtcaatttaagttcgaggaggaaaggaggagcttctatactttacgcattaactgccgaggagcttagagatcacctgagtagtctaataaaccagcatacttgtctgagcaaggtgatatctcaagaaatccaattaatcgaaggcttgcctgatcagaatacatgcagtttctgtgggatggagaggcttctttttgaaccacctccgcgattttgtgctctctgtttcaaaataataaattctacagggtgctattatgctgaagttgaaaatggaaaggataaaacttctatttgtagcaaatgccaccatctaagcagttccagagctaaatatgtgaagagattcaattatgctgaaacagatgctgaggctgaatggtgggtccagtgtgacaaatgcaaagcttggcagcatgaaatctgtgctctttttaacagaaagtgtgaaggggcgaaggctgaatatacttgtgcaaaatgtttttgaaagaaaaggatagtggagacattcatgcactggagtcatccactgttcttggagcacaggagttaccaagaactaaactaagtgatcatattgagcagaggctttctgagaggcttgagcaggacaggcaacagagggcaagcgcctcagcaaaaggtgctgaagaggtaccacgagttgaaggtcttgcagttagagtagtatcttcagctgacagagtactgcaagttcaacctcgttttcatgatttttttaaacaagaaaagtatcctggagaatttccatacaaatcaaaggcaattctcttgtttcaaaagattgaaggtgtggatgtttgcctgttcgccatgtatgtacaagagtacggttcagattgcccatcaccaaatcaaaggcatgtttatcttgcatatatcgactctgtcaagtacttcaggcctgaaatcaaatctgcaagtggggaggctctccgtacttttgtctatcatgaaattttgattggttatctggactactgcaagaaacgaggattcgtaagttgttccatatgggcttgcccatctacgaagcgtgatgattatgttttatattgtcatccaacagtacaaaagatgcccaagtcggacaaacttcgaagctggtatcagaacttgatcaagaaggctgttaaggagggtgtagttgtggagcgtaatacactctatgactttttccttcagcctgccaatgaatgcaaggccaatatatcagcagcatgcttgccatactgcgagaacgatttctggcctggagaagcggagaggctccttgagaagaaagatgataaaacctcacagaagcaagagacacaagtaggaaggctcttacgtgttgccaaacgtgatgacagaaaaggaaaccttgaggatattttacttgtgcacaagcttggagaaaggatgcgcaccatgaaagaagacttcatgatgctttgtctgcagcagttttgcaagcactgtcaccaacctattgtatctggcagaagttgggtttgcactagctgtaaaaattttcatctttgtgacaagtgtcatgcagaggagcagaatacagcacagaaggacaggcatccagccacaacaaaacagaagcatgcatttgaaagaatagaggtagaatctcttccagagactgacgatggagatccaataatggaaagcaagtattttgacagcagaatagatttcttgaagcactgtcaagacaatcagttccagtttgataccatccggcgggcaaagcattctacgatgatgattctttattacctacacaattcgacttgttctgcttgccactgtgctgtggatcaatgcttggtgtggcgatgcctagagtgcctaggctgcaccttttgtgatccatgctacaaacaaaatggtgaaagtttgcatattcatgaattaagacagattgatgctagcaaaacaatgcagatgaatgctatacaggactacgttgaaggccttgtgcatgcatcaagatgctttgatccttgcaactgcactcttcaagtttgtttaaccttgaagaaattgttcttccatggcgttcgatgtgatatccgtgcccgcaactggggaggttgcaacaagtgtgtcttcatgtggaaacttctgctatggcactcaaaacattgcaacgacgcaaactgtatggttcccagatgcagggatataaaggcatacatgactgaaaagataaagcttggtggtcctgtgttgtagcaggccagcggatcagaagctggcctcttgtctacactattggatttctccccctcattaacctgtaaaattttgttgatgaaaatgcaatatgtcgctgatggatggaactgcaaggtaaataaggctgcttcattggaactttttgttccgctggttttcccaggcattgacgatagaaaggcaggccagttcgccgagcttctacaatggtcgtggcctatatgtcattgagggaattaccaacgggagcttacattaggcaatctgacattttagtgtccgtatatatcatgtacatataggtggatcaacaggatagatgttctgtttcttcattgcctttcagttttgttccagattgtattgaacaaggccacatttttgtcgagtgtttctgtgctgtggcgataaatccaaattcattgaatgaatgaatgtgtatatttacatctccaaaaaaaaa

SEQ ID NO: 15523 - DNA, 841 bp, Setaria italica
  Peptide Sequence Number=SeqID_81497
ttacgttactttagtctaggttcctaattcgtcttgctgaagagatgaaagctaggagaaccaaggtgatgcgaaggcagtctacctttgtttttcaccatgcttctcatccatggagcaaaaataaagtacttatctggatgctgtgctttctgcgtcaattcaagggctccatcaaaaggtcagactatttggcactgaggttgggctttgtcacatatcacaagctaccacattcatatgacttccacaaatacatggtacggagcatggaagatgattacaatgggactattggtatcagttggccactttgggcgtatgcgatcgtatgcatattggtcaatgttcatggtatcaacatatatttctggttatcctttcttcctgtaattctggtccttctagtgggtactgaacttcagcacgtcgtcgctcagttggctctggaagtcgcagaggcaacagcgccttatgttggcacacaactcaaactgcgcgatgatctcttttggtttggaaaacctcgggtcctctggtggctcatacagttcatttcatttcagaatgcctttgagctggcaacattcttatggtcactgtgggaattgagtgcccaaacatgcttcatgaagcactattacatgattgccatccgcttgatttctgggctgctagttcaattctggtgcagctacagcacactgcatgaagaattatgtattttgtattgtagaagagctggcatctccttatgttcatgatatatttctttgaggggggaaagtcacgagttaacaattcacatcagtttctatgtcaaaactcctttaaaaattac

SEQ ID NO: 15524 - DNA, 994 bp, Setaria italica
  misc_feature (926)..(994): n is a, c, g, or t
  Peptide Sequence Number=SeqID_81498
taaactaattaattaattttcttggtttattccttttctggtcaatgttcatgctggtccttctagtgggtactgaacttcagcacgtcgtcgctcagttggctctggaagtcgcagaggcaacagcgccttatgttggcacacaactcaaactgcgcgatgatctcttttggtttggaaaacctcgggtcctctggtggctcatacagttcatttcatttcagaatgcctttgagctggcaacattcttatggtcactgtgggaattgagtgcccaaacatgcttcatgaagcactattacatgattgccatccgcttgatttctgggctgctagttcaattctggtgcagctacagcacactgcctcttaatgtgatcatttctcagatgggatccaagttcaagaagtcgctggtgtcggagaacgtgagggagtcgctccacagctggtgcaagagggtcaaggacaggaacaggcacaacccgctcttctcacggaacgggaccgtgacgacgaggtccgtgtgttccctcgacaccacctacgagaccgaccacgagacgaacacggtgggcacgctgtcgaggacggtgtcggcgacgtccctggacgacaatctcaccgtgggcaccgtcgacgacgacgacgagccgtccggcatcgagaaagatgtttgacatgctgctgatctcgtaacccccacgttgctagccggagctacacctgtgtattcggaggtaataggatgcagttgagatcctgatttgctgaagaaagagggcacaatcgcgcctctgcagttgagatcctgtatattgtaagagaaatgttgggcgctgttgcccgtcatggcaaccaaatgaatcactgtgtaaaactatattgtgcttcaaagtagaaactgagccgcggcgacacgaacnnnnnnnnnnnnnnnnnnnnnnnnnnnnnnnnnnnnnnnnnnnnnnnnnnnnnnnnnnnnnnnnnnnnn

SEQ ID NO: 15525 - DNA, 910 bp, Setaria italica
  Peptide Sequence Number=SeqID_81499
gcggaggggaggtcgctggcggaaacgcccacatggtcggtggccaccgtcaccacgctcatggtcgccgcatgcttcctcatcgagcgctccctctcgcgcttcgccaagtggctgcgcaagacgaagcggaaggccatgctcgccgcgctcgagaagatccgcgaagagctcatgctgctcggcgtcatctcactgctgctgagccagacgtcgcgcttcatatccgagatctgcgtgccatcctcgctcttcaccagccggttctacatgtgctcggagagcgactacaaggacctcctgcagaacaagggcgccaaccagacggctcttgctaagaccatgtttggtggccagtcgatgcacgtttgcggagagggccacgagccttttgtctcgtatgagggcctcgagcagctgcatcggtttttgttcatccttggtatcactcatgtgttgtacagttttgtaacagtggttctatccatgattaagatatatagctggaggaaatgggaaacgctagcaggtccaatcgctgctgaagagatgaaagctaggagaaccaaggtgatgcgaaggcagtctacctttgtttttcaccatgcttctcatccatggagcaaaaataaagtacttatctggatgctgtgctttctgcgtcaattcaagggctccatcaaaaggtcagactatttggcactgaggttgggctttgtcacatatcacaagctaccacattcatatgacttccacaaatacatggtacggagcatggaagatgattacaatgggactattggtatcagttggccactttgggcgtatgcgttcgtttgcatattggtcaatgttcatggtatcaacatatacttggctctggaagtcgcagaggcaacagcgccttatg

SEQ ID NO: 15526 - DNA, 420 bp, Setaria italica
  Peptide Sequence Number=SeqID_81500
agtagagaactgcacggattcttcaattttcaacgtacccgtacaaaggtcgctgtaagctgttcttttcgtaatcacaaaaaagaaaccgaggaagcacgttgatgggcacagcctcacaagtcaacagtttacaagacctgatactctatgcaacaaaaaaaagaacccgctgcatgtcttcaggggtttacacggtatgccaattcaccggggagattatacatttctaccacacgtgcctgggaagctcttcggtgtattgtaggcttcagaggtaaccttcactcagattccgaaactgatctgaacaggagccatgtctaaacactgcagatcataaagaagggtcccaaacagcctacagaaacgatggaacggatacttctctcatgaatcactgctactagtaattttcgt

SEQ ID NO: 15527 - DNA, 757 bp, Setaria italica
  Peptide Sequence Number=SeqID_81501
tttttttttttttttgggtttagtagagaactgcacggattcttcaattttcaacgtacccgtacaaaggtcgctgtaagctgttcttttcgtaatcacaaaaaaagaaaccgaggaagcacgttgatgggcacagcctcacaagtcaacagtttacaagacctgatactctatgcaaacaaaaaaaagaacccgctgcatgtcttcaggggtttacacggtatgccaattcaccggggagattatacatttctaccacacgtgcctgggaagctcttcggtgtattgtaggcttcagagtattgtaggcttcagaggtaaccttcactcagattccgaaactgatctgaacaggagccatgtctaaacactgcagatcataaagaagggtccaaacagcctacagaaacgatggaacggatacttctctcatgaatcactgcacagaatttcggtgaagagagtgactgcctcctgcaggtacgatgacttgcggtcatcagggactggagcgttcagcatcgtctggaaacatcccatgtgtagattcattgcttcgcctggggcgttcatgaaaagctcacatagctcctctgccatcttcgagtagcatgcccttgattcgacaggtaatttgcttccccatactagtaatgaatcatttaatcggccgaagaaacttttgcatgattcatttttcttctcaagtggatccaaatcatccattgcactttcttcttgcattgagttctttaga

SEQ ID NO: 15528 - DNA, 3264 bp, Setaria italica
  Peptide Sequence Number=SeqID_81502
tttaagttgctaacacaacgcaaccaatgttttcagatttattcgttagttaagatcatgtctgcctgttctcactgccacgttttctaatttctacacatctattgcacccttctttcctctcatcctcgtacaaagcttatacatcattcaacaaaattgtctagctttcaactacttttaatttcctcccccgcgctgtagaggctacatgaaaacgaaaacagctacatgtcttgaggggttaacacctggacctctttggtgcactgtagaggcttcagagactccccttcacccagattccggaccaatctgaatagcagccatgtttaaacactgcagatcattaagaaaggccccagacagctgaatcactgcacagaatttcggtgaagacagacactgcctcctgcaggtacgacgacttgcggtcatcagggactggagcgttcagcatcgtctggaaacatcccatgtgtagattcattgcttcgcctggggcgttcatgaaaagctcacatagctcctctgccatcttcgagtagcatgcccttgattcgacaggtaatttgcttccccatactagtaatgaatcatttaatcggccgaagaaacttttgcatgattcatttttcttctcaagtggatccaaatcatccattgcactttcttcttgcattgagttctttagaatgtagaaatcaatgtatattccggcaccaaggtcccagtcagcaatttcagatttatgattctccaaggcacttgtgatctcccagatctcctgatggtttgatgacagaaacatagtatgagcaacagaggtcatgaaaatagtatgagccttcttccaattgccacaccgaataaaattctccagtgcaccctgacgatctccatagtattcatgataaagagccagagcttcatgcatccattcttctggtataccaagttccacaatgtattgcctttgagcgtcatctttactccatgactcacaatactgtgataaaacttccctgattaacttctcatggatgtatggggcgtcatcaagatatggcatgtgtacaatgacatagatagcccaatggcacttcccaagacaaagtaattgataaacaaaactcaaatccagcaagtgaagatcatctgaactgaaagcaccaatagcttccaaaattgaacgctgatgccatatcatatgatagtccaaggtatcatatgaagatgagaatgcactgaacatagtttttagcagcccaaacttctcatcttgattggcatgaagaagcattaggtaaaaagagatatcaaaacggtcacctggggaccactgaagtgcttcatcaagtggtccttcatctatatatacaggaacaggatagggaactttgccctcagtaaggagatggtgataggaatgaattataatatcaagggatgtatcaggctgtaattgataccacatgatcaaaccaaggtaccttttccagtcgattggtgaatctaggaaagcagcctgtatgttaccagcaagcaactcatataccttcaacctgtcttcctcgatataattaaaatccaggccattcattttccatagatccagttgttgagaaaggtcagatcgatttgacattgatccacctgcctgacttagcaagatagccaaccggacatcaccccttgaggcagcaacttctgcggctgagtccaattgtcgaccagtcaaaagaagaagaataagctccaagtacctggcatcacttaaggaacccacctcgccttgcacccgatggcaaacactgtcctgcaaccaattgctaaagtctgctctcctaaccaaagggagtgcttcaagatctatgttgacagaaccttctttcctgtctaaaaccatgccttcctgaccatcatctcctgtgggctccaactggtttccatttgctctttctgagaacaagaccctaattaactcccagactgtaacttgatgcattaacagcacacgcgaagacatagataaatcactgatttcgagctgcctttcaatgatgtcaatatatgacctgcagatgtctggcaaaaccaaacgatttgccacaactttctgaagctttagtctgaacaagtcagattcagtctccagaaattcatgatcaagactcttgtgtaggtccattggatcagagaagactagttctgctaggtcctccttaatcttgttcttatcatcacgcacaactttgtcacttgcaactttctctatgtgaataaccgaagataggccagttccaggactattgaccagactacctgaatgaacaagcataccatttggtccccaaccaacacgaaacgatctacccattaataaagcagcatccactacacaattagtatacatttttccagcaacaggagtttcttgctcagcttgaagcttaaagcctttaaccttggtcattttcactggaaatcctttgttttgcccagacataagcataccctgagtcgatggaccaagctctgaagaattcatactgtattccaaaagagcgagtggttctttccgagcaggcatagacctcctgccaaccttctgagaagacatgtgcaagggtgagacagaccttaaccttgaacctttaccacttgaagtgggtgaatcaacattcatcctttctctgctaaggtacctctcatcagatgggaacccaaatcctccatatattcatcatcttcctcattgtaaaacatcgccatcctcatttcttgcatctttgcagggtcaagcccaagatgagcaggcaatgaatgtgaaagctcaatttcataaccatttgaaggtggttctctttctcttagttcagcaattggctgcctaacagctgcctcatccatcacagcatcttcttcctcctcgtccacaagcccaaatctactaaaatgatcaacctcaaatttccatttaccattcactggattgaacgagagaaacctagtaccttgctttcttgcacgacacctcagcacctcaacaaggatactgggctccggaagatcctttagattcagcagcaatgacacttccgctgctttatttaggccatgccctacaggcggcttaccagtctcatcctcataaaccaccacataatgcttctcaaacctgacaatatcattcaggtcaatccccctcacaatacaagtagttagacccaaggaaacctaaacctagtaccccgtaaccta

SEQ ID NO: 15529 - DNA, 996 bp, Setaria italica
  Peptide Sequence Number=SeqID_81503
ggttacgatgttgacatccacatcatctacatctttgccagaagaaatgttcacatgcacgctagaattgcaaagctcctgcaaaggtcatcagagagattccatttctccgctatatctgaaaccagggactggtgaatctcaactcttttatctagagagccagggggatgttattcttgttgaagtacaagacaacaatagggttgtcataggccgtgcaaaaattcaagtttcatcagttactgatactcaacaggatgaaatcattaggtggtggcctctatatcttgaggatcaagaatgtgttggcaaaattcagctttgtatgaacttatccatgtcttccaacaattctggatccgaaaagatgctgcaaggtggtccagctgtggataccatcatatatgacatggttttggaagcagcaatgagagctcaaagtttcaatagcaaaatgcttcatatcagtggttcatggaaatggctattggatgagttctctgattactatggagtttcagatgcatatagaaaattaaggtacctgtcttacattatgaatgtggcaataccaacaaaggattgtttggagcttatatatgaacttcttcttcctgtcatgaaagcacgggaagataggactttaacaagacaagagagaagtataatgctagactgtgaagatcggattaagagtctccttgcagctgtgtttgaaaattacaagtcactggacgaacattctgctactggcttgtcagacctatttggccccatatcagattgtgcagcaccagctttggcacctgcagttcagatattcagtgtactaaatgatatactctccaaagaagcacaggacatacttagaagctatttgcagactgctgcagcgaaaaggtgcaggaggcatatgatcgagacagatgaattcttgtcaagcaataacgacagccttcttacagatccgatggctatatctgctgcataccc

SEQ ID NO: 15530 - DNA, 255 bp, Setaria italica
  Peptide Sequence Number=SeqID_81504
atgatatccatagggttttcgttacatgcttctggcaaaatacccacgcagcactttcgttgaatctggcccgtacatctggatgcaatggcagaagtgctatctgaggatttgaatcgtctttaagtgccattccccaccattcatcccatggagtcatactaatgatttcatcaccctttttgttttcatagccggattctgcaacccagagggtgccattctcatctttcaagaaactgcagtgtgcccagc

SEQ ID NO: 15531 - DNA, 795 bp, Setaria italica
  Peptide Sequence Number=SeqID_81505
cctcctcgctgtctatggaggccgggcctaatcgtgacaagatcacaaagtccatttctgatgctttgcaactatcaaagatttatggattttctggaacagaatttggacatgttgtcattatgtttgtgttggctgttaccaccaaactgattgatagcatacttgaggattgtggctttccgtctgggatggaagaggggcaagagagtgtatatgccatcgaagggccacaacctatggacttagatgtcaaaagggtctctacagagaaccaaaatgagcatcgcgaacagttacgcaggaagaacactgccatggccttggatgtattgcatatgatggttgctgatagaaagattcagtcatttctgcgcttgatattcctgaacatgcctgaaaagttcagttctctaagccagaggttgagttctattgaagctcacaaggtggccttggagagactactgccttctggacacaaaattaatgacttgttactagatatccggagagtttgtaatgcaaactatcaaccaaataacaaacgcattgtggatgttcttggtaatatgagatctggtggctccctattgggccaacttactggagctgggagagctgcctgctggataatatttgatatttatgtggaaaatgcaattgacgggaaacatctaagtggtatatcagctattgaggttttaaaagaaatgacgaagacactgcaagtacttaatgaggcaagctggcaggaaacatttaaagctcttggattccgcccttcgtctcgta

SEQ ID NO: 15532 - DNA, 377 bp, Setaria italica
  Peptide Sequence Number=SeqID_81506
caattgcaaacaaactgtttcaagtttatcatgaaggaagctgagttgatgtaccagctgctgcaatgcaagtttgactctaccaacttaatcagctttagcaatcagatccggagatctgcattgaatcttatgatgtacaatgtggataaatctaccgcagtcccagccgctgcagccatggtgggccttgcaagggaggctaagattgcgcattacgtgctggctcgagaggactttgagcattacctagactatgaggtgtgtgatatgattcgagaaggtaccactaaagtttgaccaagctcgagagagaatttgcaagtgatacttctggtcatagtggtgtgcttggagcttctactactcacaaatca

SEQ ID NO: 15533 - DNA, 1923 bp, Setaria italica
  Peptide Sequence Number=SeqID_81507
gggtgctgaggagatggagaatgggaagagtgacttcgtgtgcttgaacagctcgggtgatgaggtgggggatggatctggagttgtgcaagacaaagccatgttggagccgtttggagttccttgtatggtggagatattgcaattcttgtgctccctcttgaacatagcagaagacattgatgtgaacccaaagatgaatccaattgacttcgatgaggacgtaccactctttgctctggggttgattaattcagctattgagttgtcagcttcatctatacacagacaccaaaaggtgatggcttttgtacaggatgaattgttccgcaatctaatgcattttggcttgtcaatgagccccttgatcctgtcgacagtatgcagcattgttttcactctcttttaccatctgcgccatgaacttaagctgcaaatagaggctttcttctcatgtgtgatcctaagattagcacagagtagatatggtgcaagttatcagcagcaagaagttgccctggaggctctagtggatttttgccggcagaaagagtttatggctgagatgtatgcgaacatggactgtgatttgcagtgctccaatatttttgaagagctagctaaccttctgtctaagagtgcatttcctgtgaacagtcctttgtcggccttaaatgtgcttgctttggatggtttggttgctgtcattcaggcaatggcagagcggagtaatagtgcacctcaacatcatgagcaaacagtgccagaaataagtgaatattttcctttctggcagttgaagtgtgagagtggtaatgaccctgatcagtgggttaaatttgttcaccagcaaaaaagcatcaagagaaagctaatggttggtgttgaacatttcaatagggataaaaagaagggttttgagttcctgcaaggtgctcatctcttgcctgtaaaacttgatccacacaatgttgctctgttcttccggtacacacctgggttggacaagaatcttcttggggactacctgggtaatcatgatgatttctccattcgggtccttcatgaatttgctagaacctttgacttcaaggagatgaatttggatgctgctctaaggctcttcttggaaaccttccggctgcctggtgagtcacagaagatacagagaattcttgaggccttttctgagcgatactatgaacaatcaccgcaaatatttgttaatattgatgctgcattggtgttatcatattcagtaatcctgcttaacaccgatcaacacaatgtaagggttaagaagaagatgactgaagaagactttattaggaacaatcgtcgtataaatggaggcaatgatcttccaagggagtttttgtcagagatttattattctatttgccggaatgaaatcagaaccattccagagcaaggagctggttgttctgagatgtctttcagccgctgggttgatctgatatggaagtcaaagagaacatcagcatacattgcttgtgactcctgccctttccttgatcatgacatgttttctatcatggccgagccaacagttgctgcaatatctgtggtttttgacaatgttgagcatgaagaggttcttacaggatgcattgatggttttctgtcggtggcaaaacttgcagcattctatcatcttaatgatgtgctgaacaatctttttgtggcactatgtaagttcacaactttgttgagcagtaccgacattgatgatcctgtaacagcttttggggaggataccaaggctagaatggcaacagaggctgttttcactataacaacggcttatggtgatcatatacgcagtggatggaggaatatagtagattgcattttaaaactctgccttaaatattaggtcccttttctttaccttgttttctt

SEQ ID NO: 15534 - DNA, 2584 bp, Setaria italica
  misc_feature (4)..(4): n is a, c, g, or t
  misc_feature (2529)..(2584): n is a, c, g, or t
  Peptide Sequence Number=SeqID_81508
tgtntagtaattcttcggtctttgggttccgtctagtaaagtattcttattcctattgtcttttaaaccttaattggtctagtatttctagttgtaacttgtcctttacgtcgggtctagcgactgataacaacgcatggttcctcacttcttcgttctgagatgctttcagtcgttgggttgatctgatgtggaggtcaaagagaacatcaatgtatattgcttgtgactcctacccttttcttgatcatgacatgttctctgtcatggcaggaccggcagttgctgctatttctgtagtctttgacaatgttgagcatgaggaagttcttacaggatgcattgatggttttctatcggtggcgaaattggctgcattctatcatcacaatgatgtgctgaatgatctcgttgtggcactatgtaagttcaccactttgttgagctcttcctacattgacgatcctgtaacagcttttggggaggataccaaggctagaatggcaacagaagctgttttcactatagcaactacttatggtgaccacatacgcagtgggtggaggaacatagtcgattgcattttaagattgcataagataggccttcttcctggtcgcctcactggtgatacaactgatgatcaggaagccacttctgattcgttgcccagcaagcttgcttcttcatctgctcctcctcaagttttgccaattaccactccttggaaaagttatggactgatggggaggttcagccaactactgtacttagatgctgaagaaccaaggtcccaaccaactgaggagcaacttgctgctcagaggaatgcttcggagactgtgaagaagtgccaaataggtaccatctttactgagagcaaattcttacaagctgattcgctctcaaatctggcaagagctctcattcaggcagcaggccgacctcagaagatcaccagctcacttgatgatgaaggcatagctgtcttctgcttagagcttctaattactgtcacattaaacaacagagataggattgttcttttgtggcaggatgtttatgagcacataacccatatcgtccagtccacagtgatgccctgcaatctggtagagaaggctgtttttgggctcctacacatctgtcagaggttgcttccttataaggagaacctggtagatgacctactgaggtcacttcagctaattttgaaacttgatgctcgtgtggctgatgcttactgtgagaacatcaccttggaagtaacacgtcttgtcaaggcgaatgcgacccatattaagtcccagatgggctggcgaactattatttccttactctgcatcactgcacgccatcctgatgcttctgatgcagggtttgaagctctggtttttatcatgtcagagggagcacacctctcacctgccaacttcatcctctcagtggaggcgtcaaggcagtttgcagaatctcggcttgggtccgcagaaagatctatccatgctttaaacctaatggcagattcagtgaactgccttacgcggtggtcacgagaggttagagaagctggtggagatgcagacaggatattggaaggaattgctgagatgtggctgcggctagtgcagggtctacgaaaggtgtgcggggatcaaagggaagaagtgaggaaccatgcgttgttatcattgcacagatgtttagtagttgatggaatattggtttcatcttcaacatggttgatggcatttgatattattttccagttgcttgatgagctgttggagattgcgcagagttactcgccaaaggatttcagaaacatggaggtgtcgctcttgcatgctgtaaaactgctatgcaaggtgtttttacaatcacttaaagacctctcagcacagggcagttttggtaagctgtggttggaagtccttgacatgatagagaagttcatgaaagtgaaagtgagagggaggaggactgagaagctacaagaggctatcccagagctacttaagaacatactgatggtgatgaaagctagtgggatcctgtcaaaaacgagcaccagtgaaaacagtttgtcggaagcaacgtggctgcaagttaacaagattgcgccctcacttcgatcagaaatttttcctgacaatgagggtgacagcacaactcaaggtgaagaaaacaaattggatactccagcgcaatctaaccaaagcgctaatcaatagggcattacagattctctcatacaatcaagttagttgagctgcagctgggtctttcaagggaggattacctttcaattttttgttccaaagttatacacaaatgcatggcagtgctgtcagtggacattagggagagtaagctggtatattgtaattttcttagttatatatattattttgttactgacaaggttgcttttgggctttattgttgcaactccaaagttgtatgacatgtatatcgttgcactgatgatatgtgttagccttggggaatccatgcttttggctagtnnnnnnnnnnnnnnnnnnnnnnnnnnnnnnnnnnnnnnnnnnnnnnnnnnnnnnnn

SEQ ID NO: 15535 - DNA, 896 bp, Setaria italica
  Peptide Sequence Number=SeqID_81509
cgaggcgaactggctccacctcaggtcctcagagcaaagctcagagctctctggatttttacgcttgactgtcttgtggcctaaagtaatggtaatggattggctcatgggcctgcctactgtaccttgggcctattttggtaatgcatagtgagcctatatttgactaccaagtatttccctcaaaatgaacaaaataacccatataaaataagaaagatgaacaaaggaaaacgacaatacaaaagagtgtgtacggactaattgatattgatacaacacaaccacaaatttccatgtctcattctacatatacaggccaagactgttgtaaattggacgcaaaatgacgagcagccgaccctgaagaatattcaagcaaaatgttgtacaagaagcctcgtctcggaaacaatgaattgcagtagcatccagctgccgatgctgaaataaggtttgattggtgaatggttcgcgcttcactgcaaactttgttggtgtctccatgtacaagtgccaagtagaagctatatcctgcagtttgccgtgcagtaaacaaattggttaaaatccaaactcactcttccttgcttgcttgtatcgaatgaattgaacatgttacgagctgactgcacaaaaatgcaaagtgatataaactcatccaaatgaaccatccccttcttgctcttgtcaaagctctcacaaacggtgtagaaagcaggtgaatccaatgagaaaccaagtttgattaatgcctcatacacctcctcaagactgagaaatccacgacccctttctagtgtggagaagacactttgcaccttctgaaggaacttgttaagagccagaaactcttcgaagctcattggttgtccgcgaccgaatttcttaaagtt

SEQ ID NO: 15536 - DNA, 1546 bp, Setaria italica
  Peptide Sequence Number=SeqID_81510
tttttttaaaatatacaaaatcttcattctaattccacatcacaatggcgtatctaacgttacaatttgatgactttttttttgacaatactaaaaaaagccagtaacagaaattgagatgaggccatcgaaaccaggcaatgtaccaacactaaaatttgccaattttataaattgagacgagatcatctaaaccaggcaatgcaactgaccaagcatacaaatagcctgatagaacacgactaaggtatgtatatcgaatataatgtcacagtacttgtggccaatactatccgtgcaaacaatacaatcacacaatatgcctagccaactttgctctaaaatcctacactctgatcactcttttgaaaagaactcataggctgtatgatatttatccagtacaacattgtagagtgggtggatcggctccagcaaatttgaatatgggccgagcacctgctgcggtaaggggcatgaatcggaatcagtcatggcactgtactggctaactgagaggccactgaggcagtagcatgagtggtagtgatctctgttctttccaggcttatccctcaaacctccctctagtacctgagcacaaagcaggatgtattgttgcagggcaatgttgtggaacagtgggccaacttggttgctccgttgtacaaaatcatatccaaactttgcataatccacatcagaagaagatttttctgaagtgcacccagatgaagtggtaccacatgcatcatcccatgatggatttttgcaggaatatgatgatttcagttgttcatcaacaatcataactagcttttgtgttaaagcaatggcagctccctgccaaaaggagtagcaaccgtcaaccaatttattagttcttccttgaaatccacattccactccttgacgaaacgccacccagtcgatcaagctaggcaagtcaagtttctctgcctcattaagcaggatcaaagcagccaacccacagaacgtgtacccaccatgagcttcaacatcaggctccccagcaataccaccttcataagtttgacatcttgctatgaaatccccaacaccttttgccagttcaacatcgagaatgttcacaaggctggccaccgatatagcggtatatgaagcccggacatcaatttcaccaccatcatgcattctgaaagcacctgattcatctttcattcgaagcataaacttgtacaggttatccctatttattgatgacagtgctctttcactcccaatagtcacaagcgtgtttacagcagcataagtcgtagctagatgaggcaactgtccaggtccaccaccatatccaccatctttatcctgacaacgagctaagaagtccacgatatcatcctcaagatcatcatcaagtacttcatccaacaaagcaagtgggtgaaccatccagtagcacagccaaggacgattggcatcaagaacatgaaaggctggcccaagatgcctcagcccatgcgtcagatattcgatatgttggtcacgccacagctctagcatg

SEQ ID NO: 15537 - DNA, 109 bp, Setaria italica
  Peptide Sequence Number=SeqID_81511
ctggtggttgattatgtgtctacttttgggagacttagatgctctattatcatgtctcccaaaagtagacacataatcaaccaccagacacatcaatttaaaactaaaa

SEQ ID NO: 15538 - DNA, 600 bp, Setaria italica
  misc_feature (548)..(600): n is a, c, g, or t
  Peptide Sequence Number=SeqID_81512
aaggagcttgagaaggagcccaagttcctgaagaatggtgatgctggtatggtgaagatgattcccaccaagcccatggtggtggagaccttctctgagtaccctcctcttggtcgttttgctgtccgtgacatgaggcaaacggttgctgttggagtcatcaagagcgtggagaagaaggacccaacgggcgccaaggtgaccaaggctgcagccaagaagaagtgatattatagcatctaggcatgccaaaagcagaagtggaatcaaccaccagacacatcatttcttcttttggcatgcctagatgctataatatcacttaagttttgtctatggccattgctgttatctcgtgaactattaatctcagctggcaatgtgtcctcggtctgtatgttgtttacatacagtttttatatttggatttggcaaaacttaaattacctgagattgatgtgctcctgcgattgttcaatgcaagtgcctgggtgtcattaagttttgtttcatctgctgattgaattggcttcggaggttcaaaagtnnnnnnnnnnnnnnnnnnnnnnnnnnnnnnnnnnnnnnnnnnnnnnnnnnnnn

SEQ ID NO: 15539 - DNA, 705 bp, Setaria italica
  Peptide Sequence Number=SeqID_81513
accaagatcgacagacgatccggtaaggagcttgagaaggagcccaagttcctgaagaatggtgatgctggtatggtgaagatgattcccaccaagcccatggtggtggagaccttctctgagtaccctcctcttggtcgttttgctgtccgtgacatgaggcaaacggttgctgttggagtcatcaagagtgtggagaagaaggacccaacaggcgccaaggtgaccaaggctgcagccaagaagaaatgatgtgtctggtggttgattatgtgtctacttttgggagacttagatgctctattatcatgtcttattttttgtccatggccatttctgttatcgtttgaactctttgcaggcaaagtgcgccttggtcaattgtactagtactgttttgttatttcagcctaggcaaaactggaatgcttggacttatttgtgctgttatcgtccatgttcaatccgagtctttatatagctacaagtaaagctttgttttcttactaaaaaaaaacttggtcaccttggcgcctgttgggtccttcttctccacactcttgatgactccaacagcaaccgtttgcctcatgtcacggacagcaaaacgaccaagaggagggtactcagagaaggtctccaccaccatgggcttggtgggaatcatcttcaccataccagcatcaccattcttcaggaacttgg

SEQ ID NO: 15540 - DNA, 669 bp, Setaria italica
  Peptide Sequence Number=SeqID_81514
taattaggttagtaattagtacttaggttaattaggttagtaaagtaattagtaatttaccctaacttaaacacctcccacattgctgtcaagtttgctgagctcattaccaagattgacagacgatctggtaaggagcttgagaaggaacccaagttcctgaagaatggtgatgctggtatggtgaagatgattcccactaagcccatggtggtggagaccttctccgagtaccctcctctgggtcgctttgctgtccgtgacatgaggcagacggtagctgttggagtcatcaagagtgtggagaagaaggaccctaccggcgccaaggttaccaaggctgcagccaagaagaaatgatgtgtctggtggttgattccgcttctgcttttgttatacctagatgcttcaatatcgctgaagttttgtctatggccattgctgttgtcatgtgtgtcatcattctgtttgtcagttcaacacagttttaatattttggattcggcaaaacttaaattacctgagactgatttgtgcccctgtcggtgcttgttaaatgcaagtacttgggttcttcctatcgttgttccgttgattaaatttcgtttctggtatgttctgaggttaaaatcgttgttaacctgatgatgtttcgagatttctgttcct

SEQ ID NO: 15541 - DNA, 893 bp, Setaria italica
  Peptide Sequence Number=SeqID_81515
aaggaaggacgactgccagcttcacctcccaggtcatcatcatgaaccaccctgggcagatcggcaacggctacgccccagtgctggactgccacacctcccacattgctgtcaagtttgctgagctcattaccaagatcgacagacgatccggtaaggagcttgagaaggagcccaagttcctgaagaatggtgatgctggtatggtgaagatgattcccaccaagcccatggtggtggagaccttctctgagtaccctcctcttggtcgttttgctgtccgtgacatgaggcaaacggttgctgttggagtcatcaagagcgtggagaagaaggacccaacgggcgccaaggtgaccaaggctgcagccaagaagaaatgatgtgtctggtggttgattccacttctgcttttggcatgcctagatgctataatatcacttaagttttgtctatggccattgctgttatctcgtgaactattaatctcagctggcaatgtgtcctcggtctgtttgatgtttacatacagtttttatatttggatttggcaaaacttaaattacctgagattgatgtgctcctgcgattgttcaatgcaagtgcctgggtgtcattaagttttgtttaacaaaaaaaaaaaaaaaaaaaaaaactagagaactagattaaatactacaagactaggacaaatagtagtacctacggtactagtttagaatagtttaacaataacaagtttttaataattaggaattaggacaaaaacttaaaattaaccatggtggttgattccacttctgcttttggcatggcctagatgctataatatcacttaagttttgtctatggccattgctgttatctcgtgaactattaaatctcagatgcta

SEQ ID NO: 15542 - DNA, 713 bp, Setaria italica
  misc_feature (682)..(713): n is a, c, g, or t
  Peptide Sequence Number=SeqID_81516
cccgtcgccatcaacatctccgccgcgctcaaggtccgggtccgcaacccggacttcttcgcgctcgactactcccgcctcgacgtcgacatcggctaccgcggcgcgcggctcgggcgggtcacctccggcggcgggcgcgtccgggcccgcgccgtctcgtacgtcgacgccgacctgcagctcgacgggatacgcgtcgtcgaggacgcgatctacctgctcgaggacctcgcgcgggggtccgtgcccttcgacaccgtcgtcgaagtcgagggccacctccacttattgttcctcagcgtccccgtcaaggggagaatatcatgtgtggtgcatgttaatccacacaaccaaaccatagtacatcaggactgctatcctgagtgaaattgctagtggaagctatcccctctggcgaatggatgatttctaaacttcacttggagttgtggttgtaaaaactcgatccattggctttgggtgtacacgtgcgaggaacaacaaaactatactgcctgttgtgaagtcgttggcacgtcatgtaataccgatcagttccctgagaagaaaatgtcgtttcacattggtattccgggtgctgttcctgtttgggtttattggaacattggccacatggatcatctggtagtagtaccatcactgatgactgattcgcgannnnnnnnnnnnnnnnnnnnnnnnnnnnnnnn

SEQ ID NO: 15543 - DNA, 251 bp, Setaria italica
  Peptide Sequence Number=SeqID_81517
ttctttgttgtcctcttgcagccagcgctcgcgcccgcccgcgccatggccgccgcgacagcgtccaccgccgccacgctgctccccgggccggtcgtcggctccgcggcgtccgccccatccacatctcgcaggaggcgcctcctcgccttcaggtgccagtcgaccagcgtcgacaaggagcaggagcagccgcccaagccgaagcagcggaacatgctcgacaacgccagcaacctgctcaccaactt

SEQ ID NO: 15544 - DNA, 270 bp, Setaria italica
  Peptide Sequence Number=SeqID_81518
ccagtggccaccaccactaccgcgaccccgcgccttgcccacacccggccacgcttctgccgcagcgggcggggccgccgatataatggacctcgacgccgacatgatccccacctccccctccgccgactcctcgccctcctcctccgacctcgacaccgagtcgacggggtccttcttccatgaccggagcacgacgctggggacgctgatgggcgtgtcggcgttcggcggcggcgcgcagcagcgtcgcgcggcgagggtgccggc

SEQ ID NO: 15545 - DNA, 433 bp, Setaria italica
  Peptide Sequence Number=SeqID_81519
ccgttctgccaggatgtagcggttcagccccgcgtccgccgacaccaccgtccgctccccgaacaggctcgaccggtatatcttcccgtaccgtgcgacgtgctgctccatgaagcggccgacggaggtggccgggtgggggcggaggtagccgaaggtctcgccgaccaagggccagccggggcgccggggggcaggttcggccgcttcttcttcgtcggccgccaccggtgggcgccgtggcatttggcgacggtggtggtgtagaaggtgaggagggccagcaggatgaaggggaggaagaagaggagctcgctggttatggaggccatcatggcacccacaagttcctactgatctgaggtctctagctttgctgaaatttatttcctgccgcttgccctgccctgcctgatcacctcgcccgcttttg

SEQ ID NO: 15546 - DNA, 201 bp, Setaria italica
  Peptide Sequence Number=SeqID_81520
aacctaccaggaattcatcatcatctgacaaagcagtttcaataacctcaggttgtgctgtgactgctggcttgagatcatcatcaccaattgaccttgtaacctgttagttaaaaccacaccacattcctatgggctatgaatgcaaatttccacataaaatcctcaatcatcatttgtaggaatgcaaactccaacgcc

SEQ ID NO: 15547 - DNA, 869 bp, Setaria italica
  Peptide Sequence Number=SeqID_81521
tgatttataccggcactttattaatacaatataggataatgatttgcctgttccatggttttcaagagaaataaatatcctcgaatgtacacacttcgaatgtactcagctagtatacttatttctatcaaagagattattcgctgcgttctgctttacaacagaaaagggaaaaaagcttttgtatgctcatctatttggctcgtttacaaatgaggtattgcaaaagaataagaaaaaatgcaactgaggcagctatcttgacatgctttgttctttttagcctccacagggtaaaaattatatatgaacacaagaatgaatgtgtagcttcttttcttttgtaccgatgtaaatttaattaaaaagttgtgagctgatagcatgagcaagggttttggacttttggtggtcactcagtatattcgctcggctgtggagaccgggcgaaggaacacaacaatgacagtgatgttgtctttgctgccacgctctgcagcctccgtagccagcctcttagagcacattccaggctcttttaccgtgtccttgattattgacagcacatcctcgttgcttaccacatcccacaggccatcacttgccatcaccaggaattcatcatcatctgacaaagcagtttcaataacctcaggttgtgctgtgactgctggcttgagatcatcatcaccaattgaccttgtaacctgaagagcagctgcacccacacgccacgtatctatctgccattttacttcagttccagcctttgttacgcgttctctttccttcggacagctagcaacatgatccttggtcatgggaaatggtttaccagcacggctcaagattgctcggcaatcaccagc

SEQ ID NO: 15548 - DNA, 736 bp, Setaria italica
  Peptide Sequence Number=SeqID_81522
aaccaagaacaaacggaactaacaaagaattagactacggacaaatcaacgactgctggcttgagatcatcatcaccaattgaccttgtaacctgaagagcagctgcacccacacgccacgtatctatctgccattttacttcagttccagcctttgttacgcgttctctttccttcggacagctagcaacatgatccttggtcatgggaaatggtttaccagcacggctcaagattgctcggcaatcaccagcatttgctacaaaaagcttgttgctcactaccagggctgtcacagctgtgcaaccaggatgccagtcttttcggattatcctttttgacttttggtgaagaattagttcttctctaaatgctatgtcagtccttacaaatgcttctgcaagggcatcggttgggcttgtatcccgaccaaattgcttaagaaatccagggactgcacggacagagaactcagcagctgctgaacctctgtggccatcaaaaattccgaaggcaaaaacatccttttcttcactcacattgggaagcataaaatgggtatcttccatagtttcccttcgaccacatgttgcaaaagagccccaacttaatgttggatgatactctgaggactgattggaagagccagaccaaagattctctgtaagataagatttttctgatctcttaacaaaagctcccttggttgaaccagtttaatgcttcttgataatgg

SEQ ID NO: 15549 - DNA, 495 bp, Setaria italica
  Peptide Sequence Number=SeqID_81523
ccagggactcgccggagaagtgcagcatgcgctcgcgcagcggctgcggggacaggcggtcgatgagccccgtgagatcggggaacgggagcaccaccggtccagggacggagtcgggcgaccagcgctccagcagcgggggctggaagtcccatgaggccgcctccttgccgccggagaggagggggaggcgcgcgcgcgcgatccccgcccagacgttgaggaagtcccagaaggcggtgccgtcggagagcgcgtggttgtaggcgaagccgatgaagacgccgtcggcgagctcggtgacctggacgacgaagaggggcagtggctggctgtcgtggttgactgcgccgtcggaggggaagaaggagtggacgaggcgcgggacgtcggcgtcgggagggatggcgtcggcgacggcgacgccgtccgcgacggcgtggaggatgtcgacgccctggccgtcgcagtcgatggagacggagcagcccgccg

SEQ ID NO: 15550 - DNA, 512 bp, Setaria italica
  Peptide Sequence Number=SeqID_81524
gcagtgtcgcaagagaaagcaatgtgattttgactggatttctccagggtcatctgtttggcacttgttgcagccactagtagctgtctggctgcttggatatcacaatgtgctgccatactgacccattctgtccaagaagcatgcctcatgaagaccacatgtaaaatgggtccaaggtgtcaggatcaatccgatctgcgactccacattgagatatctagcattttaggtgatgtgtctgccttatttaataatctgaatccaatcctcatattgtgctacataaactgacagttgttcgtgccataacacattgtatctgaatgacacacaaggtggttgacagcttcatatcactcttcaattagtggtccattgaattactagcatctcatgtgaattaccagctagttgcctagttgtactcttggatgcccatgtaagaagcagcatggtaatcataagggtggtcatggcacagccctgcatatcattctattgttggtcct

SEQ ID NO: 15551 - DNA, 275 bp, Setaria italica
  Peptide Sequence Number=SeqID_81525
ggtcgagaagccaataggaagcttgatcaagaaccaccccacttaagatgacggtgatgagtggagggtcatagaaggctgctaactggaaaagcttgtcttttgtactcatggaagcttgtgtctatcgtcacggccattcaaaatgcatcattatgctgctgatacttgtgatagccaacctctggattatgtgcagcagcagtacccaaaagcaagttctccctcctggtttcagtggctcggaaatggactacattgataacaatggttaa

SEQ ID NO: 15552 - DNA, 527 bp, Setaria italica
  misc_feature (1)..(40): n is a, c, g, or t
  Peptide Sequence Number=SeqID_81526
nnnnnnnnnnnnnnnnnnnnnnnnnnnnnnnnnnnnnnnngtttgaatcaattgtaaagaggtgtggctatttgtactttccgaggtgtgaagaaatggaatgcaatagagatgaggccaaaagggcaaaggatattgcaaagaagaagtttgaagcgaaggacctgcaaggtgccaggaaattcgctctcaaggctcaggcactctttcccgatcttgaaggcattgctcagatgattgccacctttgagatctatcttgcttcggaggtgaaggttgcaggggagaaggactggtactctatcctttctgttacgacagcagcggatgatgaaacgatcaagaaacagtacaggaagcttgttcttctgctacaccctgacaagaacaagcaagtgggtgctgagggtgcttttcagatggtcaaagaggcatatacagtgctttccgataaaaccaagagagcagtatacgaccaaaagaggaatgtaagggcattccaacagaggaccaaacaagaaggaaca

SEQ ID NO: 15553 - DNA, 1747 bp, Setaria italica
  Peptide Sequence Number=SeqID_81527
gatggtgctactaccaacgtcttgattccataggccatgactatatgaaaggtgatcaccaaagcatcagaaataacctgttaaatccctcttcactatgaaatggtgattcagatctatctacaacagctaaccccagaattacaagccacggttccagtttctttagtaatcctccaaaaaatgcaggtagaacagttaaaacttctgcagcacagtatggcagcgtctactaggcaactgattgaatgtgattttcagtgtcatccttcagacactccatgggtagcttgaagcttaaacaatacatggccttgtttggtgcaacatcacgaaccctatggaatatcggctctgctatcttagcattcaatttattctgtgcttcagatagtattgattcctcagattcagttgatcggatgaaacaataacagtgtatccaaggtagcgatcctgtccagtgtttcttttggacaagaccatcaaaacagtcaaggaactgcagagcagaagctggtagattcatcaggacatgatcaatgtgctcccacggctttgttggtggcggtcctgatccttttactctcttgttgtttctttgttttgtttgactagcatctccatcttggcaatcaggttcaccttcttttgaagtttgttgtcgctttttggcaatagtgcttgccagagaggagtcatttgcactgttttgaccgtcgtctcgtacatcattgtgatttccattcgaagatgaatattcattagcagggacccctcctttaggatagcattcatcagcagcaacttgagagtctgatctagtttctgaaccaggcacactcatcaaacttttcatgaacaccctagcatccatgttataggagaatatatagtcctccaccttgttaatctttgcatttgttcttagataatgaacgctgtctggattcaagtcatttgcatacacaacacatcctttctgagcagccgggatagaaaatggacctatgccagcaaacatgtcacatataacgtctcctttcttgaaaagggaaaccaatctgatgtgctcatgctcaagtcttgaattccagtagaccaaaccataatcaagcctgaatgttgcaccatattgtttaacttcagtaaccatgtcgtttttccctgctaagatctcaaactttgggactctaaattcatttgtaattgtcccaactttattcaccaccgtctgaatccttggataatttttatcatagataacctttgctatgacatctttatatggtagcaagtcatcagatatgttcagatgtgcaacatgaccaattgtctcaaacgaagagggtacctccactccagcagggaggatttgcttcagaatatgatctgcactccagtacgaataaccaagggtcaatgcataaggtacaacatcaacactgcatagttgcttcaatgaatcatgcatctgctgtggcatgtcagacaaatcgggcttcagaatcctctctgacagcacgacgagccggttcttgtcgttctcggggtcctcaacgacaggcttcacccgtggcttgtccagtagataaccggagcggaggaggcgggtgacggcggaagcgagctcgcgggggatgcggagtgcccacagctccagccgctgctcgaacttgctctcgtccagcttctccatggcctctccctctctccctctccctctctctctccccgaagcaggagc

SEQ ID NO: 15554 - DNA, 303 bp, Setaria italica
  Peptide Sequence Number=SeqID_81528
gtccgttgacatctgaatgttgtcgttggcggcgccggcgacggtaatggtgggcggcgggccggcggcgaggagggcggcgtcgagctgcctctcgcggaagatcttgtactcctgcttgacgacgacgccgaggggcatgaggaggaggatgagcagcggcgtggcggcgaggccgtaggcctcgcgggagaaggggacctgcttctgcacgacgatcatgacgaggaggaaggacgcgagcgcgatggagaggtagaggaagcagaagagggtccggctcgtctcctgcccgcgcggcgg

SEQ ID NO: 15555 - DNA, 682 bp, Setaria italica
  Peptide Sequence Number=SeqID_81529
cccttcgagctcaaggtgcttgtggtctgcctcgagcacacatgcaagtgcttggaatctgagacgctggctcttgagaaggaggcgtacccggccttggatgagctgacctccaaggttagcaggctgaacttggagcacgtcaggcacatcaagaaccgattggttgcgctatcagggcgtgtgcagaaggtcagggatgaactcgagcacttgctggatgatgacatggatatgtctgagatgtacctgacagaaaacttgcattccaaggattcaccgagacgttgagcagggtggattcaaataaggatgcacccactgatcatgacgagaaggaggaagaagacagtgacgacgagatagagactggccacgaaagttctgcctatgttaagcctgatattgaagagttggaaatgcttgttgaagcctacttcgtgcagattgatggcacactgaacaaattgtacaatctccgagaatatgtggacgacactgaagattacatcaacataatgctggacgagaagcaaaaccaactgctgcaaatgggcgtcctgctgacgacggcaaccgtagtagttacagcaggcatcgtggttgtgagcttgttcggcatgaatatccacatcgaactcatgaaagatccggagaccgatgaggaggcgagaatgaagaa

SEQ ID NO: 15556 - DNA, 429 bp, Setaria italica
  misc_feature (354)..(429): n is a, c, g, or t
  Peptide Sequence Number=SeqID_81530
ttcccgcgctcgaggcagcgggcggggcgctcgtgggggcggacgagctcgccagggcgatcggagccgtgggcggcgccagcgccgaggactgcgccgccatcgtcgagtgcctggacggagacggagacggcgccatcaccatcgaggagttcaggttcatggccgacctgctctagatcgagcctaggctgctacacctgcgcgtggaagcggaacggtgtctagtttgctgtgtgtgcacgtcgtgttcgtctgtgtattgagatcgaaaataatcaagcaggaggtatctatgcgatgcgagttgtgggtgtatgtttatgcgatgtatctcactatctttaataaacnnnnnnnnnnnnnnnnnnnnnnnnnnnnnnnnnnnnnnnnnnnnnnnnnnnnnnnnnnnnnnnnnnnnnnnnnnnn

SEQ ID NO: 15557 - DNA, 464 bp, Setaria italica
  Peptide Sequence Number=SeqID_81531
tttaatttgtttgttcttaaagtttagggttctaaacttgtattcggttgtaaattcattccaaaatcattcggactcaaccaatatctgtttaaccaaggtcttcaaagatcacaggtcagccctccctgggtacctcgggaagggtatgacatctctgatgttctccataccagtagcaaaaagtatcatcctttcgaaacccaacccaaagccactgtgctttacagaaccaaacctgcggaggtccaagtaccattcatagggttctaaaggcaagccagcatcaagtatcctctgcttgagagcatctagacgttcttcccctttggcttccacccaatcaactcaccaaccttcaaaaatcattccagcacaaaaactgagtgacaaggtaaaaccagcaattcaacaggtcaatatcccactgaccctaataaccacaacttccctccccacaacac

SEQ ID NO: 15558 - DNA, 2124 bp, Setaria italica
  Peptide Sequence Number=SeqID_81532
ttttttttttttttttttcttattaacctaacttaggttaaacttaaactacctaacttttacctttactattgtacttattaaagtaaacttttaaagttgcaagattaatatttcataaccaactaggtaaaacaaaacaaccaactttaccttacatgactataattccttacagtgttaccattaaacttttggctctagttgagcatttaactaacagagacaaaatgttgatcaattgatctccagttgcaaatttagtacactgaaaattacatgacacctccaataaatccaatgtgcaaagtagggcaaactgatcggtgaaatcattccaaaatcactaggaatcaactcgcatctgtttaaccaaggtcttcaaagatcacaggtcagccctccctgggtacctcgggaagggtatgacatctctgatgttctccataccagtagcaaaaagtatcatcctttcgaaacccaacccaaagccactgtgctttacagaaccaaacctgcggaggtccaagtaccattcatagggttctaaaggcaagccagcatcaagtatcctctgcttgagagcatctagacgttcttccctttggcttccaccaatcaactcaccaaccttaggcacaagaacatccattgcagccaccgtcttgtcatcatcattgagcctcatatagaatgccttaattcctttcggatagttatagacaatcactggcttcttaaatatatcctcagtcaaatacctttcatgctcagaggctaaatcaattccccattcgaccttgttatcaaacttcttgtcagtaacatttttcaagagctccacagcctttgtatatgaaatccgcacaaaaggagtagaggaaacaagctctagacgttcaattgcactcttatcataatttttcaccatgaactccatatcttcacggcaatgctcaagcagccacttacaaaggtattgtacatatttttctgcacagttcatatcatcctgcaagtttgcaaaagcgagttctggttcaaccatccagaactctgccaaatggcgtgatgtatgtgagttctctgcccggaatgttggtccaaaggtatacacactactaagagcacatgcgtatgtctcaacctgaagctgtccggacacagtcaaaaaagcttgacgcttgaagaagtcattttcaaaagctattgatccatcatccctgcgtggaatcccaggctttaatttggacctctcctccagcttcgaaacattttcctttgccctatgaagcacatcaacagcagctgatatgtcttgtttgctggcttttgcggctttaagctgtgcaactgcatctcctttctccttgacaagaactttagctgcctcgatttcagaatcagaaggtgcagggttctctttcaattccttctcagttttttcagcctggctaaacaaagttgtcacttggaacatctcaccagcaccctcacagtcacttgtagttattattggtgtatgtacatagagaaacccattctcgtcgaagaacctgtgtgttgcacaggctaactggtgcctaatcctagcaactgctccaatcgtgttggtccgcgagcggagatgaacgacatccctgagtttctcgagcgtgagcttgaccttgcccttgggcagcgggtaagcggcggcgtcgacctcgccgacttcgagaacgcggctgaccttgagctcgacgttctgcttggtaccctccggcggctccttgatatcgccctctacgagcacggaggtgcccgtggcggtgaggcgcgcgagagggtgcacggtggcatcgacgatgacctggagcgtagcagcgcaggagccgtcgctgagctcgaggaaggcgaaggagcccttcccctgctcccggcccgtccggacccatcccccgaccacgacgcgctccccggcccgcgcggcgcccgctgcaaggacgtcgcggatgcgggtgcggacggtggcgggctccagatcgtcgcagagggaggccgcggcgtcggcggccatggagacggggatgttgaggagtgctggcgctctggcctctggggttgtggtggcggcggcggctgaag

SEQ ID NO: 15559 - DNA, 456 bp, Setaria italica
  Peptide Sequence Number=SeqID_81533
acttccttcgttagaaatgtaatttgtttcacctttggttcacaaattaagtagtaagaggaaatggctatggcccctcatttcctccatacttaagttggttgttcttttttaagtatgttgggatggggaggagcttgagagaaagttggagactcatttctttatgagaactgcatcaatatagttagggcacgatagagtgataaggtaagtgtaatatgaagtaggtggaacaacctattttgagtgttcttaaggctaaaccaacctatatatgttgttggagtatataaaatgtccgtattttgtttatttttctgcagtatgacagctgctatgctcatggtgctctctctagatgggcttcagtttgcaaatccaattttacaatttgttctaaggaacattagttgtactttgggaaaacattcttttattggtctgtgcacaagt

SEQ ID NO: 15560 - DNA, 467 bp, Setaria italica
  Peptide Sequence Number=SeqID_81534
agggaggaggattatcagcccccacgcaagatctaaacaacgaacagtactgttccgagaaaagtacagtagcacctactgctcatttcagcacacaaagtgctggagaaactagtatagacgacatttcctcccaaaaggcaacaagcacaccaaaaaactgggcagatgacagcacacctagcaaacagccaccatggttgagcatgtcaacctctgattcaggcgatagaacactaagcaagaatgagaacaacactcttcatgaggatactcgtagtctttctaatgcttactctcaagggttactaaacagattgacacaagcactaaaaaggtcgggagtagacccatctcaagctagtatatctgtagagatcaatatggacaaaagagagcctagtaacatgcacgacaatttgaaggaacaggacaatgaatgtgaagaaacaatccatgtgaccaag

SEQ ID NO: 15561 - DNA, 765 bp, Setaria italica
  Peptide Sequence Number=SeqID_81535
aggtacatacaacaagaagagaggtaattccacacacacacacatgccaaaagaggaagaaaagtaatagcacatgaaggtccatttacccatgatatatcaatgataagatcttttcctctgttcctttttcatggtctcacagaacattagtcaagtccagggaggaggattatcagcccccagcaagatctaaacaacgaacagtactgttccgagaaaagtcagtagcacctactgctcatttcagcacacaaagtgctggagaaactagtatagacgacatttcctcccaaaaggcaacaagcacaccaaaaaactgggcaggtaagttgcctgttttccctttccattgcttaatcacctttcactagcaacagttttgtcaagcctaatgtcttcaaatgcagatgacagcacacctagcaaacagccaccatggttgagcatgtcaacctctgattcaggcgatagaacactaagcaagaatgagaacaacactcttcatgaggatactcgtagtctttctaatgcttactctcaagggtctgtccctaaactagcagttgcttgcagaatgctaatttagctatatctgcaactaactgaagaaaacttttatctgcaacaggttactaaacagattgacacaagcactaaaaaggtcgggagtagacccatctcaagctagtatatctgtagagatcaatatggacaaaagagagcctagtaacatgcacgacaatttgaaggtacatcagcaag

SEQ ID NO: 15562 - DNA, 329 bp, Setaria italica
  Peptide Sequence Number=SeqID_81536
agacgagagcttccatctttctttattgcgccgccccctccattcggcggttctgtcatcggcgccccgatcggctcaatcaatccctctggttggtgctatctgctgcttgctttgctacctgggaatggattctgtcacagagagcctacaaccatgaactctgaatattctggccaaatggggcaaaattcgttacggcctcaagtattctttctctctttcgttatcctcacattttatcttgcccttttgcgaccagcgactgcacaaatcactgcaccatggaagttgatgctctcaaggctatcaggggcagcttgatagat

SEQ ID NO: 15563 - DNA, 261 bp, Setaria italica
  misc_feature (251)..(251): n is a, c, g, or t
  Peptide Sequence Number=SeqID_81537
gggggacatgatgacgccgcacggtgcggacgcctcgaagcggaagagggatggtggcaggcacggctgatggcgccggcctccgcaacgtcggcagcagcgatcagacggcgacaaatccaccttgcggatgctgtatcccgatgaccagtcgtcaaggacgagataaaggtgtcgccgccgcgtctccccggggccgccgtcgccgcctcgcccgacgcgccgccgcttcctcgtcctgggcttttccncgtcgctttt

SEQ ID NO: 15564 - DNA, 618 bp, Setaria italica
  Peptide Sequence Number=SeqID_81538
gatccacagagaccagagaaggttgccaatggcgaagccgaagaaaccccgcgcgtccgccccagatccgcccgcagctgctgcccgcctcccatggcaccccccagcgccgccggtccccacggccctcctcatctccctcgccgccctcctcgtccgcgtgctcgtctccatgggcccctactctggccagggcgcagcgcccaagttcggcgactacgaggcgcagcggcactggatggagctcaccctccacctcccgccctccgactggtaccgcaacacctccgacaacgaccttgcctactggggcctcgactacccgcccctctctgcctaccagagcctcctccacggccgaatcatcaacgcctcactgcccgacgccgtcgcgctccgctcctcccgcggctacgagtccccggaatcgtacgcatccgcttcagtagattgtttgctgcttcttgcgtgcagaaccttgtgttgttagcacctgctgttcttttggttacaataggaagttgctgatgcggtggacggtgctgtcgtcggatcttctggtgttctttcccgcagcattgtggttcgtgtgggcgtacatcaaaggtggaattggta

SEQ ID NO: 15565 - DNA, 484 bp, Setaria italica
  Peptide Sequence Number=SeqID_81539
ctcaggcctcagcccgacccgaagcccggggctccccgccgtttccaactcggcaactcccgatcggctgcctcggcctcgatctagggtttcggcgcccggtctcctacgtcctaccctccccgtgctcaccgtgtccctcgctcgcgttcaactcgccttccggcaaagcggaggcgaaggcgaaggcgaaggcgaaggcgagcgggggcgcttctctgcggcaccacgtgacctatttgaggccgtgcgtccatggcggcgatggggcaggaggaggatgacatcgatcactacgaggtgctctgcctcccatcgggggaggaaggcgcggcgctgaccatcgagcagattgagaaggcctaccggacgcagtcgcggcagcgccaccccgacaagcgccccgacgatcccaacgccaccgccgacttccagcgcctctcgagctcatacaagctactgcgggacgagtccctccgccgcc

SEQ ID NO: 15566 - DNA, 744 bp, Setaria italica
  misc_feature (15)..(15): n is a, c, g, or t
  Peptide Sequence Number=SeqID_81540
aattttcaacaaaanagtttaccatctagaactgtaaaactgacatgtggtttgttcaggaatttatttttgagaaacaccaaaaataagaaatcacagtcgtcttcctcttcgaatgaactttcggagaaggccctagctgacttcagtcagattgttgactactgtgaaagttctagctgccggcgaaaaaagatcattgagagctttggagagaaagtatgagaacaaccatagatttttcagtatgctttctgctttatgttattgcatattatctttaaaatggtgtaggtacaaccaacttttatgccaacgctcatgcgatgcttgcaagcacccaaatctagtgtcctcacgtctggaggaacttcgtcgtgtgcccaactgtcgctttaataaggtctctctggtgtttcaaagctcactagttaatccagcacacttggacactgaattctggaatcgtgaagatggggcaagcatatcaggcgaagacatatcagattctgatggtagaagtgtcgaagcgttgctcccttttcatttcacttttagaagatacctctgattattacttgcatagactggatcacggtagtgcactaatatctgcattctttaatgtagatggaaatgaggtactgagtaatattgccatttcaaagattccatcaaaagccggcctggatgcaaaatttaaagccctggagcgtgctgtaaaattgtctttatttattctaa

SEQ ID NO: 15567 - DNA, 1702 bp, Setaria italica
  Peptide Sequence Number=SeqID_81541
tctcagtctcagcgttacaaggatcttcttgatgacgtttattctgatatatcaaatttactgaagtcaagcggaaacgtttgctcaattatatattgtcttgaacgagcagcttgtgatgatctatgcatgcatttgtcacagcagggtatctcttctgctgcttatcatgctggactaaatagcaaagtgcgaagttctgttcttgatgactggctttcatcgagaactcaagttgttgttgcaactgtagcatttggaatgggtattgatagacaagatgtccgtattgtatgccacttcaacttgcctaagtcaatggaatccttctaccaggagtcaggacgagctggtcgtgatcaacagccttccaggagtgttttgtattacggattagatgaccggaggagaatggaatttattttgagaaacaccaaaaataagaaatcacagtcgtcttcctcttcgaatgaactttcggagaaggccctagctgacttcagtcagattgttgactactgtgaaagttctagctgccggcgaaaaaagatcattgagagctttggagagaaagtacaaccaactttatgccaacgctcatgcgatgcttgcaagcacccaaatctagtgtcctcacgtctggaggaacttcgtcgtgtgcccaactgtcgctttaataaggtctctctggtgtttcaaagctcactagttaatccagcacacttggacactgaattctggaatcgtgaagatgtggcaagcatatcaggcgaagacatatcagattctgatgatggaaatgaggtactgagtaatattgccatttcaaagattccatcaaaagccggcctggatgcaaaatttaaagccctggagcgtgctgaaaatgcttattatcaaggcaaaggtcaaaccaagcagcagggacagggcggtggccttgttgacaagaaaagcatctctcaggcgttaagagatgcatgctgcaaaagattgttgggtgcccttggacaagcaaagctgcgacttgggaatctaccatgcgacgagaccgcctctgccacacacctagaaaaagagtgcttcaaaaagtatgagaaagtgggcaagacattctacaactcacagatcgctgctacagtgcggtggctgtcatctgcaacattcaaccagatgcatgatcgcttccactttctcattgatcaagatacagatcatggggcatcaagctcccccaacatcgtcccagagtcgcctccagcagctactgaggttgtcggtgcaaggccaggagaaaccagtaactacaaaactaacgacaaaccgcagaatattcacgatttggaaaagatgaagcattctgatgagcttgcaaagactgctgcagcttcagctggaaacatggagctccccgcaataccatcgttcagagaattcttgagccaaaagggaaaggatcgtttaaagagttcttcaaattctagtgcggggagccagccttctggtattcgtaggaagtctagtgatctggttgagaggcaagaagccagcaagaagatgaaaccttaagcgcgacttgtctgttgcacttaaggtttcatctggttgagaggcaagaagccagcaagaagatgaaaccttaagcgcgacttgtctgttgcacttatctccttgaaacttgaataaattctagtcctgctgc

SEQ ID NO: 15568 - DNA, 1168 bp, Setaria italica
  Peptide Sequence Number=SeqID_81542
aagacgcaagaatgaacctcgattgatggcatagcaattgggacgtcacgcaacacaaggtcggggtgggcagtttattatccaagagatcgggattcaactgaaccccacacgtccgtgacgtcccaattgaagggagtacttccaattaagggtgcatcggctgcctcagtgcgtaacaagaaagctcctaaagagctcgagaatgtcttgaaccaatattttggatattcgggatttcgaggaaaacagctcgaagctatagaagctgttctatcaggacgagattgcttttgtttgatgccaactggaggtggaaagtcgatgtgttatcagattccggctctagtgaggacaggcattgttcttgttatttcacccttgatagcactgatggagaaccaggttgccagcctgaaaataaggaattccagctgaatttctctcttcaacacagacagctcacactaaacaagcaatacatgaagaccttgattctggtacaccttccttaaagttgctatatgtcactcctgagcttgttgcaacacctggtttcatggcaaagcttaagaagctctaccaccgaggtcttcttggtcttgttgctattgatgaggctcactgtatttcaacttggggccatgatttcagacctagttatcgcaaactttcatcattgaggaagcaattcccagatatccctctgttagctttgacagcaaccgctgtcccgaaagtccagaaagatgtcatatcatcattgtgcctacaaaatccagtaattcttagagcatcatttaatcgacctaatatattctatgaagttcgttacaaggatcttcttgatgacgtttattctgatatatcaaatttactgaagtcaagcggaaacgtttgctcaattatatattgtcttgaacgagcagcttgtgatgatctatgcatgcatttgtcacagcagggtatctcttctgctgcttatcatgctggactaaatagcaaagtgcgaagttctgttcttgatgactggctttcatcgagaactcaagttgttgttgcaactgtagcatttggaatgggtattgatagacaagatgtccgtattgtatagaccaacttacaaacttagacctaaagtacaaataggaaataaccttaacttaaa

SEQ ID NO: 15569 - DNA, 2012 bp, Setaria italica
  Peptide Sequence Number=SeqID_81543
tagctctctctctctggctctgcctctcttatccctctgcctgcctacctctctcgtggcctccccttcctggcggcgctcgactcggcaagcggcgacgcccttcgacacgtctccgccggcgacgagcgccccaccagttggtaggtacgcgcaagattgaagccctgcggttgacttaggagacattacatggcgctggtacagttcagcggcgccttggttcctcagctcggtgaaaagcctcgggtcctacccgcgtcgcctgtggtggcaagggttgcctatgctgctgatgcgagattcctgtcaccaaaaactggtataagaggcagaggtaaacacctggtgtcatctagttatagtttgcattcacagacctcttctgaacggctaaaccatgtaccatcgtcaagatgtcgccagaaaagggggtcgcgttttgttgtcagagctgaagctgatttctattccatacttggtgtctcgagaaatgctagtaaatctgaaatcaagagcgcctatcggaaacttgctaggagctatcatcctgatgtgaacaaagatcctggggctgaacaaaagttcaaggacatcagcaatgcttatgaggttttgtctgatgatgagaagcgatcgatctatgataaatatggagaagcaggtctgaagggtgctggcatgggaacaggagattactcaaacccattcgatctctttgagtcactgtttgaagggtttggtgggatgggtggcatgggcggtggccgtgctgctcggaacagaccaatgcaaggtgatgatgagacctacaatctggtcctcaatttcaaggaagcggtgtttggtgtagagaaagagattgagataaccagactggaaggctgtaacacctgtgatggaagtggtgccaagccgggtacaaagccaacgacatgtaaaacttgtggaggccagggccaggtggtctcctccacaagaacaccacttggaatattccagcaagtgtccacctgcaatacttgtggcggcactggtgaattctccactccttgcaacacctgtgggggtgatggccgagtgcgaaggacaaagaggatcagtctaaaggttcctgctggagtggattctggaagcaggctgagggtccggtctgagggtaatgctggccggagaggaggccctcctggggacctttatgtcttcattgatgttctctctgatcctgttcttaagagagacgggacaaacattctctacacatgcaaggtttcttacattgatgcaatccttgggacaaccgtcaaagtccccactgttgatggaatggttgaccttaagataccctcagggactcagccaggcacaactctggtgatgtccaagaaaggtgtcccacttcttgggaagtccaatgctcgtggagaccagctggtgcgtgtccaggttgagattccaaaacgtctaagcagtgatgagaggaagctgattgaggagcttgcagacctcaataaggctcaaacagccaatagcaggagatgattattgcacaaggttgggtaggacaccttgcctgtgcgataggcaattttgatgcaaactgcagtgatgaaaaactgagttggtagtggtaaacacttctacgaactacatacaacatgagggtgcactggagcaaaatgtgtcatgccatatctgtaacctcgtttttaagccattgaaagttaagtcactgcaagcaaaacaccaaatgaactggacgttttgcaatagttctaggcaagtttattagccattttttattatacggcttttgtattcttgaaaggcttaggctaaatctctgatggtggaaacaggcataatcttaacatttcttgcagaaatgctgcaccaggaaatctgtaagctgtagcacatggaaatgtaactgtagtttttacgattggtgatgcattgggatttattggtttggttttcaactattttatctggacaatactgccaaaaaa

SEQ ID NO: 15570 - DNA, 1423 bp, Setaria italica
  Peptide Sequence Number=SeqID_81544
ggacactattggcaatgtacccacaacctaatatcatttatctgcatacatgataatttgagccaacgatcaattaacgttgatgcctaggaatgatagttatggtaagattgagagtgggtttttgttctatacttaaagctgtgtggagatggagatataccttagccccactgcactcttttgatgcatttctacatgattttgacatgtgaacttgtttggttttatgccaaatgttgtaatatcaatatagacatggcttatctatggtacctgaagtaccatagaactattagaaacatacaaggatcaatttggttcatttcacacatgaagaaaaatataacatcctttatattgtaggtaggatacttaagtacaagcctgattgttaccgggtgatccatacccaaaattacaataatcatattatatatgtgcctacctcaagagatttgtaactttaaacactaaagttttatttgtggagacatcacacctctaactttcacttattatgtcatcatggagagccaattttacgtacgcagcaagaaacacatcatgtagtcaccatgaatccatctttcacaaccttttatttcctctctctagaaatatttttattctttaactggatatatgattcaactgttgcctttagaccatccatgattgtcacggtaggtttgtatcccagttcttcaatagctttgttacaactaaatgtcctattgagtgtcgtatatttaatccttgccggtgtaagaatatgaggttggcacattccatagtggtagaaaaccttgtacccccactctaccaaatagcttatgggcttgatgataagcaaaggtattcttatcttgaatagtcttttgtatccaagttcttcctgaaccatatataaaaagtcccacatattcattggctccatattcgttataaagtaaggcctaaaagtttaaaaaggtaatgataatacatatatagaagtcagactgtcagagtttatcattgatcagttgtaagaacatactttgcctccactagtttttgcaccctccatagtagaaagagtcttatcagcacaaatgtgaccatgtaccacattttcaacatacacaaaatcatcacgattcttcccatcaccaaaaataaactgcagtgatacaaagctggtaagatccgcttacagataggtcctaaaactttgagttagtaattttgttggctttgtattagttatgaaggcttaacaatgcttgttatagccagatataggtatgtcaactttttgttatttctatttatcagtattaggcagtgccatgacacaccctaattatctgcctggctcaagtcatgaacatttgttggaaattgagccactattttgcaggagaataagggcttgttt

SEQ ID NO: 15571 - DNA, 1687 bp, Setaria italica
  Peptide Sequence Number=SeqID_81545
aataaatcttttacacgctatgcacccactcttccaccactacaaaataacactgaaactgagaattggctacatgatgattactacttgattaatgcatctgatgtagtatatagtaaaggtactataatggcacacaacaaatcaagctcaatatttttcatgtgcacattggaatacttcttttcattttctatattaatatgaactttgagatataaatattaaaaggtgcacgtcaagagacaaatgttgacattatttacatttcagttgccgtactttaaatacatgcttgatcattaagaggttacactctatccttaatcaaaactaaattacaatccaccatggctgagcttgcctgccaagatttgcatgtgcaatcgctgaaatttatttattggaaacttcatcacttctgacctttgctagcttatgacattttctgaatatctatttatatctccaacaagaaacatgctatctcagggtgatagccttttctgtctctaatatgaatttgtatttctcaaccgaatatatgatttgactgctatcttcagaccatccataagtgtcacaattggtttgtagccaagttcttcagcagctctgttacaactaaatgttctatgcagtgtcagatacttgatccttgttggcgttagcacttgaggtgggcaaaatccataatggtgtagtagaacattatatgcccactctaccaaatagcttactggcttgatgacaaccaaaggtattcttatcttgaacaatcttttgtatccaagttcttcatgaagcatatatagaaagtcccacatattcattggctccatattcgttataaagtaggctttgcctccactaggttgtgcaccctccatagtagaaagagtcttatcagcacaaatgtgaccatgtaccacattttcaacatacacaaaatcatcacgattcttcccatcgccaataataaagtgtgtttgtccgcaccgatccagagttggtataactatgtcaccaggtccaaaaatgctagcagggcgtatgcaacatgttagaaggtcattaatgccattggccttcataactaacttctctgcttctgcttttgtttgtgcatatgcatcaggaaacttgtctggatatggcagtgattcattcacgttgagaagtccatgaactccatcgaacacaacagcaatagaactggtgtgtataagccttttcaccttgcagatcatacaagcatcaattacattctttgtaccctcggtgttgaccttatagtgaagttgcaagttattcttgctagaatccgcagcagctgtgtggaagacaacatctaccccttcaaaagcttctatgagctggtctaggttgcagacgtccgccgaggcatagacggcgcggccgtcacggagggcatcgccgaggagtccctcgttctcgccggggccgagcacgatatcggcggcgaggtcggtgacccgcacatgccactcaccggagcggagcagcgcggccaccaggtgcctcgccatgaatccccggccgccggtcaccgcgcaccaccgccgcctcgcctcctcctggcggccaccattgttgctgccaccgtcatgcagcgaccccatttagagttctacagcaaacacgcgagagcagggcaattaaagga

SEQ ID NO: 15572 - DNA, 929 bp, Setaria italica
  misc_feature (25)..(25): n is a, c, g, or t
  Peptide Sequence Number=SeqID_81546
gctatgcaaatcttatactttctgngtaccttttggaggcacaagaggcagaaagaggaggacatagctgtttgcgagtgccagtatgatatcttggatccagagagtccatgtggagatcggtgcttgaatttcttgactaacacggagtgcacgcctggctattgccgctgtggtgtgtactgcaaaaaccagcggtttcaaaaatgtcaatatgctaggacaaggctggtaaagactgaaggacgtggatggggtcttgtggcagatgagaatataatggctggtcaatttgttatcgaatactgtggagaagtaatatcatggaaggaggccaaacggagatctcaagcttatgaaacccaaggtttaaaggacgcttatatcatttacctcaatgctgatgagtctattgatgcaacaagaaaagggagtcttgccagatttatcaaccattcatgccaaccgaattgtgagacaaggaaatggaacgtccttggggaagtaagagttggaatatttgcaaagcaagacattccttttggaacggaattattgtatgactacaactttgagtggtttggtggtgtgatggtacggtgcctctgtggagctggcagctgttctggatttcttggggctaaatcacgtggtttccaggaggccacgtacctgtgggaagatgatgatgacaggttttctgttgagaatatccctctttatgattctgctgatgacgaacctacaagcatcaataaggagatcctcctaggaaatgatgggccaattgctccatacgtcaacagcaacacagtacagaacactgagaaccgtgggactgcaagcacaaatgaatttgcaccaactattgctgaacaatttactgcaagctcaaatgaattagcaccgaattggactagtttagtaaa

SEQ ID NO: 15573 - DNA, 352 bp, Setaria italica
  Peptide Sequence Number=SeqID_81547
ggtcaacaagctgcctaagagcccgccacccgcaggcaggcaggaagcggcggggggatggggcaggctattcggaagctcttcgattccttcttctccaccagggagatgcgggttgtgatgcttggtttggatgcagctggtaaaacaacaatattgtacaggctgcacatgggagaggttctttcaacagtccctacagtgggttttaatgtggagaaagttcagtataagaatgtggtattcactgtgtgggatgttggggccaagaaaactcaggtcgctgtggaagatgtatctcagtaattctgatgcactgatctatgtcgttgattctttggacagagaaagg

SEQ ID NO: 15574 - DNA, 573 bp, Setaria italica
  Peptide Sequence Number=SeqID_81548
atcaaatggaatcttctcaggaatgctagattgcatagaaaggctggtttctgatgtgaaaatccaagataaaatccagcgagagctcaacatgtaccggagtgagacagcaggggattttcgtaggcagatggctatccgatccagacgaactttacctcctgctgaatggtggtatacatatggaggagcttgcccaaatttaacacgtctagcggtccgtattcttagtcaaacctgcagcgctagaggatgtgatcgggcgcacattccttttgagcaagttcatgatgaaagattgaatagttttgagcgtcagcgaatgcatgatctcacctttgtacaatacaacctacggctgcagcaaagacaacagcgcaaggtgaaagcatttgatcctgtctcagtggactacgtagacatagttgatgactgggttgtggatacacctgcactgttctctggcccagttgagcaaccaaactggatggagattaatcaatcagtcagccgaatcgcaccaagggaaccaaatgaagatgaatttgaatccttcattgaaggagttgatga

SEQ ID NO: 15575 - DNA, 941 bp, Setaria italica
  Peptide Sequence Number=SeqID_81549
acaaagtaaatacaacaaaacaaactctgagatccatgcagctgcaggaaaaaagctaggtgaaacatttccaacattgttctggtctccatgctctttccagtgcatcgatggcatgcttgaagatttcagtaaggtaggggcaatcagtgagataataagtaatgcaaaggccatcacaggatttttctacaacagcgcatttgcattgaatctaatgaagaagtatctgcatgggaaggatctgctagttcctgcagagactcgcgcttctatgaactttgtcacactgaagaacatgtacggtctgaaggaggctttgcaagccatggtcaactcggatgaatggatacactttttgctgccaaagaaaggagggatcgaagtaagcaatcttgttaatagtttgcagttttggtcctcttgtgctgctgttgttcacatcaccgagccacttgtgcatctccttaagctagttggtagtacaaagaggcctgctatggggtacatttatgctggattgtaccaggccaaagcagcaatcaagaaagagctagtgagtaagaacgactacatggcttattggaatatcatcgactggagatgggacaaccaaacaccacggccacttcattcagctggtttcttcctgaatccactattttttgatggaattcgaggtgatgtatcaaatggaatcttctcaggaatgctagattgcatagaaaggctggtttctgatgtgaaaatccaagataaaatcccctgctgtctcactccggtacatgttgagctctcgctggatcgtcccaggccaaagcagcaatcaagaaagagctagtgagtaagaacgactacatggcttattggaatatcatcgactggagatgggacaaccaaacaccacggccacttcattcagctggattcaggaagaaacc

SEQ ID NO: 15576 - DNA, 396 bp, Setaria italica
  Peptide Sequence Number=SeqID_81550
agagtttttagctgctcctggtactgcagcaccaactgtttcaggctgtccaacctcctgagtccttgcatcaaactctttttggcgctcatgctgtatcgcaacaccgcgcttcagaacagcattttcgcgcagtattattgctagttgctccttcagcatcacattttcctatggacaagtaaaaacataaccacttaggcttcccagcaagcacaggtccaacagatcaaaatgcctagtgatgcatgctatagtaccctgtgcaaattctgcactgcttcaggccctactcgatccatgatggatttttcaaatgcttccaaagccctggaggcacgagctcgtgcatcatctatgtcggaggagctcatcatctctctgacaaatagctca

SEQ ID NO: 15577 - DNA, 463 bp, Setaria italica
  Peptide Sequence Number=SeqID_81551
cttattaatatcatttgcagggggatgctcagtaactacacggccattactgacagtgccttcagctgacaacttaagagctgccgatagaccattctctgatgcaccaacagtagcggataggatagcctcagctgactccaagcgcagctcagtcaaactttttattgcagaatctaaatcatctccagatgcctcaagagctctttcgagcaactggggatccatgtccgggaagagggggagtaggtggtggagcagcgcctccctccggcgagccggggagcagcgagcccgcttggagggatgatggtgatggggaggggacggaggggaggaaggggaaggtataagctcgtcgccgaagatggaggaggacctcttgccgcacactaccgcagacatggtggcccccgccgccgcctcgccgcgccgccgatccgttcgacgtcttcaccaccgc

SEQ ID NO: 15578 - DNA, 1444 bp, Setaria italica
  Peptide Sequence Number=SeqID_81552
gaacaaatagaagcctaagtaatacccaagaaaaagaaagatagaaggtgaactaagacggttggcacacctgatagttagctttagccaatacaaagtacaggcattcgctgctacctcaaataaacactgataatacaaagtgggaaatctggatcaacaggaaataggcatatgctgcaatgttggaaagacaacaaaagatgcctccttgatggcattgcccaaaaatttaggcaacaccaagcaagtggatttttaactgtagcaaacattaatctaacaaagttcttaccagtaatcaaacatgtgaatgcacgactaatatatgctacaaattatttcatgcaactgccttgtaatgaaatccaatcaagataccttgtgtccctgtgctagttcggctagttctctttttttttttttttttttttttggtttattcagattgcagaagtctcttaaacatgaacagttctagctggtaaaacatcctctctctctcaatataaccagtacatcgcttgattcttctgcgttccatattacaatgcatcagttcttacaattccaacccacgcaatgacgcaacccataatgtcacaagcagacagtaagcaccagggtgcaccgccaagcagacagtaatgtcacataccagttcaacctccaagtaaacaggagttccggaccttatgtcgatgcttcgtagctgcgtaagcctgatgattgggtgatttgctggtatatgcaacatttgagctctcggcctaaaggtcctgagtcactatatcacagtagcgatacgtgaatccctctccctcactttaaatacatcatggtgtttattatgagaggtacataagcacaacatttattagaagacatcagggggaaaacgtccaggcatagaattgttctgctgagcttgcttcagatgcactctaagtgcatagttatttatctcgagagtttttagctgctcctggtactgcagcaccaactgtttcaggctgtcaacctcctgagtccttgcatcaaactctttttggcgctcatgctgtatcgcaacaccgcgcttcagaacagcattttcgcgcagtattattgctagttgctccttcagcatcacattttccctgtgcaaattctgcactgcttcaggccctactcgatccatgatggatttttcaaatgcttccaaagccctggaggcacgagctcgtgcatcatctatgtcggaggagctcatcatctctctgacaaatagctcaacccattcagagctatgattatttgtcttattaatatcaattgcagggggatgctcagtaactacacggccattactgacagtgcagctgacaacttaagagtgagattctctgatgactacctagaaaacaagttaggtagactagacaagtaaccaaggaagacaaga

SEQ ID NO: 15579 - DNA, 350 bp, Setaria italica
  Peptide Sequence Number=SeqID_81553
actgacagctagtggtaaccagcaagcaaaggcaagtaggcaacggcatcactgatggtactgaacagtgaacactgagcataacgaacagagcagatatgctcggagcactttaattttgtaacagcattatcagccataccttctgcatgaactggacggagatcatctcgttgccgccgctgcatctgtcgctgctaccgcctccatcttctgaactctggtacctcgcctgctctccatgctgccggccttcttccatggtttccccggttgtgcttcccccgccgtccgctctcctggccatcccccttcccttcctacctcatcgcgatcctcctgaatttctg

SEQ ID NO: 15580 - DNA, 239 bp, Setaria italica
  Peptide Sequence Number=SeqID_81554
acttgctgttcaggattcgttacaagcttgcataatttcatcacaagcttgatctcatcataccttcttattcgctttgtttccatagatttggtgcctcgctcacatgaacctccctctacctcatacaacgattcgctgtcggagtctgactcgctctcaagagcatgatttgccgaagtggttgccctgggactagctgtggcagaaaacatgctagacgtgaccaggtagaagac

SEQ ID NO: 15581 - DNA, 355 bp, Setaria italica
  Peptide Sequence Number=SeqID_81555
aataattacaaaagacttaggacaacaatactttacttagaaattacaagaataataggtagccaagaaccaaaggtacacctaaagccgcaggacattgcgcttcttgctaccatatcctctgccatctttaccttgacccttaaggcttctacatctgatttgaggattctgttgtctgtgactgcagtggtgaactgttggttcgcctctgaaagttgcttgaacagagttgcattttcacctttaagttgttcgacctgattataaggcaacacatcaatggtcaccctaaattcgcatcatcgtatgattaattggaagacctcactgggcaagtggttgtggtacctgt

SEQ ID NO: 15582 - DNA, 283 bp, Setaria italica
  Peptide Sequence Number=SeqID_81556
ggttgcgcggaggcgcgattcgccacctcttcctcgccggcgcatcgccggcgacgagcacccaccaggctccgctcccacggacaacttgagctcaagcggatgagcatgtgtgagaaagatcagaatttgccctggggatacgacctttttcgcgatccttttgctcctcccggcacatcctgatgagacacagttgcattcttctcaactcacatatgatttgtacaacccatcagtaggcatctaccatcccggaagtgctgatgcacatgagcacgag

SEQ ID NO: 15583 - DNA, 631 bp, Setaria italica
  Peptide Sequence Number=SeqID_81557
gcatagcaatctgccttttcttttcccattatcctcgttgctatgaaggaaatgaacttgttgtgagtggctgtgctgtatctgttttctttttctgtgtctctgactccatttccaactgtggtccaataatctgtgtctgctttgtccagcatgtccctaaaattaatggagaaattccatcagtcgatgaagccactatggaccatgaaaggctgacagaaaggtctgtcctttagtttcagttctcagtgaattactactattattatatgcttgctagtgtcaaacttctccttggctctatttgccactaaatgctttttaatcttcaaattttcagaacagactatattacttgcatgtaatgatgttattttgttccatcctttttcatgcaaatgtgtcctgctggagtttttcaaaaaaaattcatttgtcgtcttttaggttgaagttgtatgagctgattgaacacaaagtgaaaggagatggcaactgtcagttccgagcactatcagatcagctttaccaaactccggatcaccatgagtttgtgagagagcagataattaaccagcttaaaactaaccgtgacgcctatgaacggaatagttaccctaattagtaa

SEQ ID NO: 15584 - DNA, 1653 bp, Setaria italica
  Peptide Sequence Number=SeqID_81558
tccataatctgtctcgattttttttctacttaactacacaacttttgtgttttttcctttttcctaatgttctcggtatggtgcaggaagtgctgatgcacatgagcacgagacagtatacatagaaccgtctaattcctcgccaggttccagcggtgacggaaattttgagatggaggaggaagtagggaagaggttttatcccatggtcccagttcctcatgtccctaaaattaatggagaaattccatcagtcgatgaagccactatggaccatgaaaggctgacagaaaggtctgtcctttagtttcagttctcagtgaattactactattattatatgcttgctagtgtcaaacttctccttggctctatttgccactaaatgctttttaatcttcaaattttcagaacagactatattacttgcatgtaatgatgttatttttgttccattcctttttcatgcaaatgtgtcctgctggagtttttcaaaaaaaattcatttgtcgtcttttaggttgaagttgtatgagctgattgaacacaaagtgaaaggagatggcaactgtcaggtagtaccatccattcccacctgaatagttgattttgtttcattttccacctttgtaccgttctattcttaagtgatctctgctctttcttcttctctctcttttcctccttctctcctattttcctcacaaacttctgtactgtggtagactggcagtgaaatttctcagcaagatatggtattaaaccaatatatactaattaattggcgattcccattataaccttcatgcatcacattcacaattctcttatcccatttggaaatataccatccttatatcaattgattctaattgcacacccccaattctgcagttccgagcactatcagatcagctttaccaaactccggatcaccatgagtttgtgagagagcagataattaaccagcttaaaactaaccgtgacgcctatgacggagatggtatgttcccatggcatatgatgattacttggagaaagttgcacgaaacggtgaatggggtgaccatgtgacgttacaggctgctgctgacaagtatggagtaaaaatttttgtgatgacgtcgttcaaggatacctgctacatcgagatccagcctaaggttcagaagtccaacaaagtggtactgctgagcttctgggcggaggtgcactacaactccatatatccccagaatggtgagtagctgtggtatcggcatgcagggtcatcgtcgccaacgtatgcaaccatatgcgtcactagtctctttgtctcaaccatagttagaataatctggaaccccaaacgagctttgttgtatgttgctgaaggtagattatttctgtggtttgcgaacactgcagatgcaccaaggttgcagacgacgaagaagaggagatggtggccgttctcgcagcaccaccaccattgatggcggatggcagagggctcaggcgcatcatcttcatctctctgggactgggatggatgtgggcacggtggagctcgtcatcattgaggatcaggtggtggtcctgggagctaagctatggggggccgtcgtccaaatgatacagggaacggcattatgattaattattcctagtagc

SEQ ID NO: 15585 - DNA, 890 bp, Setaria italica
  Peptide Sequence Number=SeqID_81559
atgaaaggctgacagaaaggttgaaagttagtaatagaagactagattagaaacaacaaagtgaaaggagatggcaactgtcagttccgagcactatcagatcagctttaccaaactccggatcaccatgagtttgtgagagagcagataattaaccagcttaaaactaaccgtgacgcctatgacggatatgttcccatggcatatgatgattacttggagaaagttgcacgaaacggtgaatggggtgaccatgtgacgttacaggctgctgctgacaagtatggagaaaaatttttgtgatgacgtcgttcaaggatacctgctacatcgagatccagcctaaggttcagaagtccaacaaagtggtactgctgagcttctgggcggaggtgcactacaactccatatatccccagaatggtgagtagctgtggtatcggcatgcagggtcatcgtcgccaacatgcaccaaggttgcagacgacgaagaagaggagatggtggccgttctcgcagcaccaccaccattgatggcggatggcagagggctcaggcgcatcatcttcatctctctgggactgggatggatgtgggcacggtggagctcgtcatcattgaggatcaggtggtggtcctgggagctaagctatggggggccgtcgtccaaatgatacagggaacggcattatgattaatatccagagcagagcagagcagagcccgacccgatatagatacatgggatgggatggaatgaatgaaataagcatgagatgaggagtgtcctctggtacatagtcggagtggagggccggtgaaataggacaaactaaaaactacttagtaattaattaagtttaagtaaataaccaaataactaaacaaaa

SEQ ID NO: 15586 - DNA, 2241 bp, Setaria italica
  misc_feature (2174)..(2241): n is a, c, g, or t
  Peptide Sequence Number=SeqID_81560
catatctgggactcatggaggcacacacgcatgttggtgccacggctgaggcagttgctgtgctgcggcagatgcaagctgatggatgtgcgccaacagctgccacttaccgtgtcctgctcgatctctatggaaggcagggacggtttgatggagtgcgcgaactcttccgtgagatgagaactgctgtaccgccagatacggccacatataatgtgctcttccgtgtattcggggatggtggcttcttcaaggaggtggtggagctcttccatgatatgcttcaaactggggtagagcctgatatggtgacctgtgaaaatgtcatggctgcgtgtggtcgcggtggcctccatgaggatgcaagagaagttcttgaatatatgtccagagaaggaatggtgcctactgcggacgcctataccggcctggttgaagctcttggccatgcggctatgtatgaggaagcctacgtcgctttcaacatgatgactgaaatcggtagcttgccaactattgagacctacaatgctcttgcaaatgcatatgctaagggtgggctgttccaggaggctgaggccatcttttctcggatgactaacaatgctggcattcagaaaacaaagattcatttgatgccctcattgaagcatattgccagggtgcacaattggatgatgcagtgaaggcgtacatggagatgcgcaagtccaggtttaatccagatgagcgctcccttgagggggtactcaatgcgtactgcatagcgggggtcatagatgagagcaaagagcagtttgaagaacttcaatctagtgtggctgtgcccagcattattgcctattgcatgatgttgtcactatatgctaggaacgacaggtggactgatgcatatgatctgctggaagaaatgaaaacaaatcgtgctagtagtacgcatcaagtaattgcttccctaatcaaaggggagtacgatgatagctccaactggcaaatggttgaatatgccttggaaaacagtactttggaaggctgtgactatagtatacgattctttaatgctctccttgatgtgctttggtggtttggtcagaaggcccgagctgcgagggttctggatcaagcagtaaaatttgggctctttcctgaattatatcgtgacaccaagctggtctggtcactagatgtacataggatgtcggtaggtggagcactggtggctgtgtcagtatggctcaataagctttatgacagactaaaaggagatgaagatcttccacagttggcatctgttgttgtattgaggggagaaatggagaaaagcacgattacaagaggactgccaactgcaaaagttgtctactcctttctaaatgacacactatcagcatccttccattttccaaaatggaataaggggcgaatcatatgcctgaagtcccaactgaaaaagttgcaatcagccatagattcctcaaatggatctgccacagctggtttcatccccatgacgaactcccatttgccatcacctggttccaagatatatactagggaggcccaggctgataatggcaccggccatttacctgacgaaccattggtagaggaaaaggagtcagagcttcttgcattgtgagtttccaggagctgctacccttcgcattagcaatcgtgatgccatcagtctgaacaggggagttgagatgcagaataacagccatatttttggagtttgggcattcagatcttcatctcagtactatggcacgaccatatgcctatttgcattgtgcagtttgcttcaggaagttcagtatatgcagtggatgtggataccatttcagatccacatggttgcctgaattttgcccgtaaatggtgagcccctagttactgcaagcttgacagacaatgctgaacttccagttgcatttcaggatttagctcgttgtagggaggagaatgaatttatggatgtttctgttagttgctcacttgctctgtataacatccatgtactcctagcgcaactctgtaaaacatgatagcctcgttagcctggtaagggactgttagtgagacatgtcaattgtcgataagttctggatcctgatggaaatagtgcatgtagtgtgattttactcttaaaagggcaattgccacctgaaagnnnnnnnnnnnnnnnnnnnnnnnnnnnnnnnnnnnnnnnnnnnnnnnnnnnnnnnnnnnnnnnnnnnn

SEQ ID NO: 15587 - DNA, 467 bp, Setaria italica
  Peptide Sequence Number=SeqID_81561
cgtccggtttagctgattgatttgatgtttttacatcacgctttctctttactctgcaggttaggagtgcatcaatggtatgcctctcatccggtatacagctaggagctaggacaggttttggattgccacataattctttcagagaagaaagaagtcgcgtctgcgacatatataaagctgcatctaggccaggaacatatagcaggatgactttaggtataagaggcttgttcttaacaaacacccaagaaggaagcatgccatcaccaataacccaagtgactagaccctgaacatcctgcagatttagcgtagagtttaaagcagcctccttaaaaacgacatcaggcttggcgttgcggccatagacgtcgaagtacgcggaggagctgccgccgttcccggagggggtcgacatggtagccgccggcggcgaggcggcggaggttctagggctttgccgc

SEQ ID NO: 15588 - DNA, 1303 bp, Setaria italica
  misc_feature (54)..(54): n is a, c, g, or t
  Peptide Sequence Number=SeqID_81562
tttttttaaacgttaaaaccaatgattacatatgcgaactaagttgtcgtatancgatagattacaagatactaatgctaagctaaacatcaatacatcataatgctttttacagcacaggtactaagaaagctacaaagtacaacaactgaaacaagagcggcaggcagccgagcactggcaccactcactattcactaggctctccatacaccaatttagatcatcacagttccgaaacaccagccaaaagaatcaaataatgccaccttgatgagttagctgccgcaagccctgcatgaagactaacacatcactgtgcgatgcccggcggtcagtgaggccttcgcgcgcccgaatgcccagcggtcagtgaggccttcgcgcacccgaagcgctgggaggatgagcctgaccctgctgctgctcattcgggcccagatagcgccgaagcgcagaactgtaggcattgcctgtcagactccctctcatctgacccgtggggcaccagttctcatccacaggaagctccggtggaagaccgtctgaggacccagcctgaggtgtgctcggagcagtgggtggtacactgggaggctgcagatgcggtggcgcccgctgtagagacggaggatgtatactcggagcagcggatggtacactggaaggctgcagatgcggtggcgcccgctgtagagatggaggagttgctgcccgaggcactgtttgcaatctcggtacctgaatttgctgcatgggaaagtgacggctttggacatccgcttgggttggtttaacatgtgcagctgcagtggtttggcccacggcagcaagagccgtttggttcatggtcattcgtgtgtgtctgagcggatcaacggttggagtctgctgcataggcgtaggtctgtaggtgttcactcctccagcctgtcctggcgatggtcgtgcacccatgaggtgtggcgcaggcagaccaaccacccgactgggctgatggctcgatgtattgcgcatgtcccttgttgactgtagatgcgatgatgcagcaacactgggagttcttggtaacggcccacaaccgttattcattggagcacagtccggattcgtcacttgatgtccttggtaagttgaagaagctggagtagatagtgggataggtggtggacaattgaggatatttggctgcaaccttgctgatgacccaggattctgtggtggcactggcaatgcctggactcctactggctctctccttggatttctaggtatagaaatccttctcacttctgatccaagt

SEQ ID NO: 15589 - DNA, 242 bp, Setaria italica
  Peptide Sequence Number=SeqID_81563
atccttctgttgtctccatgtatcagtacatctttctttgggacgaagatctggaagtagataactttaacccaagaaggtatagtgttacatgaaagcaacctgatgcttcaaacttatcattgcctagcagtaaaaaaaaatacaaacaaggaaagatgtacagaaacgtataattttatcagagtccagtttattggattttttaaatcatggttcaggctgctactaatataaactga

SEQ ID NO: 15590 - DNA, 330 bp, Setaria italica
  Peptide Sequence Number=SeqID_81564
ttttgtgcatgacatcgtaatgctgcgttttcttatgtgaccgctacataactcttgtgttataatctgtaaccaggggagggcagcgggtctcgacatgcgaacaaagatccggagaaaatcacgatctgagcttcgtgatttccagaagcgttgggaccgggccacaagggaagacagaacatgggtcgatccgttttctcgctctcgaagaaaacggaggaatagaaacccacagttgattggcagtcttcatagttacacaatatcccatttggaccattgatttagaatgtatacttgcataattaatgccgtataaaatttcaa

SEQ ID NO: 15591 - DNA, 716 bp, Setaria italica
  Peptide Sequence Number=SeqID_81565
tttgtgcatgacatcgtaatgctgcgttttcttatgtgaccgctacataactcttgtgttataatctgtaaccagtaagggtactaggtaaggaccgttttgttctggatgggttgagggcatggcgccggttttctcaaagtctgcttggcaatgtgtgtggcatcttattcagaatgatcttatccatggatggggcatcgattacaagtttgggtattgtgctcagggtgacaggacaaagaacatcggagtagttgatagtgaatttatagttcatcgaggagtgcagacattaggaggttcgacaacgacaaaggatggcactcgaggcaaaaaagctcagcaactccgtcagaaagatgctcaagtgcaaaagacaagagggagggcagcaggcctcgacatgcgaacaaagatccggagaaaatcacgatctgagcttcgtgatttccagaagcgctgggaccgggccgcaagggaagacagaacatgggtcgatccgtttgctcgctctcgaagaaaacggaggaatagaaacccacagtagattggcagtcttcatagttacacaatatcccatttggaccattgattgagaatgtatacttgcataattgatgctgtataaaatttaaaaaaatgaacgaacggcacggattgtgccacttttaccctaaaaaaaaaaccaaaaaaaccaaaaaaaaacctaagaa

SEQ ID NO: 15592 - DNA, 1006 bp, Setaria italica
  misc_feature (37)..(37): n is a, c, g, or t
  Peptide Sequence Number=SeqID_81566
ctaagaagaactgattcatctgtttcctagatctacnggaaaaaaaagtacaaaaactaagtgccttgcaatataagaatggtaaggagggcgatagctatcctaagatgaaactgcggttgcatctattggtcctgtgcgtgattatcgtgttcctggtttacaacatggctaactttcaacataagcagacatcgttggaagcaaaatctcgaccatttgatacagtgacggtgtttgacagagctgctgtcaaggtgtctcaaaaagctgttgctaggattggatatttgccccatggtatagtggagtctaactccgacatggagttgaagccattgtggctgacgacaagtgcagagtcacagttccagcagaagtctaaacagaacgaccagtttttgattgccattgctgctggtataaatcagaaaaaaactgtggacgctattataaagaagtttcttccagaaaattttacagccatgttgttccattatgatgggaatgtcaacgggtggaatgatctgccgtggagcaaaagtgtgatacatatagctgcttctaaccagacaaaatggtggtttgcaaagaggttcctccatccttctgttgtctccatgtatcagtacatctttctttgggacgaagatctggaagtagataactttaacccaagaagatacttaaatatagttaaatcagaagggctggagatatcacaaccaggtcttgactctaaactttctgaaattcatcaccggataactgttcgtaaaagaacagggagttttcatagaagagttagtcgggctaacaaagaatgttcaagagaaggaccgccttgttctggatgggttgagggcatggcgccggttttctcaaagtctgcttggcaatgtgtgtggcatcttattcagaatgatcttatccacagatggggtcttaactaggtttgcatatttgaacttaccattgtaccacacagtatgaccgttttcctttt

SEQ ID NO: 15593 - DNA, 1088 bp, Setaria italica
  Peptide Sequence Number=SeqID_81567
ggtgatcgacttctacaaacaacgggctgccatccaacctggccgggagccgcaacctgagcttggagattcgggttgaagggcgtcgagatcgccatggcgtcctactgctccgagctccagtaccttgccaacccggtcaccaaccacgtccagagcgccgagcagcacacccaggacgtaaactccctgggcctcatctccgctaggaagacagccgaggcggtggaaatcctcaagctcatgtcctcaacgttcatgatcgcgctgtgccaagccgtcgacctgcgccacctcgaggagaacctgaagagcgccgtcaagaactgcgtgaagacggtggcgctgaaggtgctgaccacgagccccgacggcgagcattgcagcgcccgcttcagcgagaagaccttgctcgcggccatcgaccgcaaggctgtctacagctactgcgatgacccctgcagcgccagctcctcgttaatgatgacgatccgcgccgtgctggtcgaccacgccctggccaacggtgaggccgagaacgaagctcgcgcgcccatattctccaagatcaccaagtttgaagaggagctgcgagaggccctgccaagggagatggagaagacccgggtggccttcgagaccggcaccgcgccgatcggcaacaggatcaaggagagccggtcgtacccgctgtaccgtttcatccgcgaggacctcggcgccgtgtacctgaccggcgagaaactcaaatccgctggtgaggagtgcaacaaggtgttcctggccctcagcgagggcaagctcatcgaccccatgctcgggtgcctcaaggagtggaacggcgagcccctgcccatctgctaagcacgggcgaatgccacgtatagtacgacgaagaggagcagaccaccgtactcgaaaaataaaggaagtagcatttcaggatttggaaggcttcttattgtttgtgacttcgcaaatcttctctgttcgtcctatttgagcttgatacactgattagtataatcgtgtattatgttgaccaatacaacagtgtacgaagctcatactccgtcctgaaaatagtg

SEQ ID NO: 15594 - DNA, 229 bp, Setaria italica
  Peptide Sequence Number=SeqID_81568
agccttattgaagaaaagtagggatgatcttgtagcaaataatgcccctccaagatatgctatcctgcaatggaagatgatgaatggcgcattattactggcagtgatcctaagaacaccccatggtcatatcataatggtggatcttggccaaccctgttgtggcagttcacattggcgtgcataaaaatgggcagaccagaattggctcggaaggccattgctgtgg

SEQ ID NO: 15595 - DNA, 473 bp, Setaria italica
  Peptide Sequence Number=SeqID_81569
cagctcacatggattttaggttcttctctcttggcaacctttgggccatagcatcatctctaactactccaaaacaagctgagggaattcttagccttattgaagaaaagtgggatgatcttgtagcaaatatgcccctcaagatatgctatcctgcaatggaagatgatgaatggcgcattattactggcagtgatcctaagaacacgtaagcatcctgttgaatcaatctttgtcttcctgcatctcttggtttgtgatatttccgttttgtgggtctctatttattttttaagattaaagttctctttcttaaacatcgcatcagttgttgacatctagccattccgtgcatgtgcagcccatggtcatatcataatggtggatcttggccaaccctgttgtggcaggtacgtttggcccactgcaatgtgggcagaccagaattggctcggaaggccattgctgtggct

SEQ ID NO: 15596 - DNA, 590 bp, Setaria italica
  Peptide Sequence Number=SeqID_81570
gccgtgtagctcctgtcgattctggtatgtatctagtgccacataagcagcatataagactttgctttcaaattattgttatcatgcatcttcattctgctattttaaccccatttatttgttggcaggactgtggtggattattttgctgagagcttactgcaagattacaggggacaatgatttgctagaaagagttgatgtgcagacgggaattcaactgatactgagtttgtgtttgtctgatgggttcgacatgttcccaactttactagttacagatggatcatgcatgatagacaggaggatgggaatacatggacatcctcttgaaatccaagtaagtagaacctaattgtttatggctcgattgattagatcctgaaataatggtgtagaatgttattcactaatacaaaaaaaaatgcagccatgtaggaaccaattcttttcttctttgcaggactagtttgatttgacaaaagaaaaatgcttagctagcaggactagtttaatttgacaaaaagaaaaaaaacttagctattctttgtttttcaaacctagatctttttggcatatcagctaaagat

SEQ ID NO: 15597 - DNA, 2617 bp, Setaria italica
  misc_feature (2509)..(2617): n is a, c, g, or t
  Peptide Sequence Number=SeqID_81571
ctgctgcctccccacctaacccagacggtaccagcctttgcaatttcgcagatcaaacctcgccgaccacgtgtttgccaaaagttgcctcttgcctgtattgcccttttgcgcgtagccccctgcaagttcctccgcctccctcacgggcccttcgccggagcttgccatatgaatggtcaaaccccgatggggctcgccgccgccgcagccgcagcagtgaggccgtgcagccggcgcctcctctcgtccgcctccaccgcgacgtcaaagacggcggcgggcaccgcgaccccgctcttccccagattgccccacccgcaccaccccccgtgcggccggcgcctccccttcctggtatctgcggcgtcgcagtcgcaggcctcgcagaccggcccggatgccccgcccacccacatcccctccgacccccgcgccgccgtttccggcaacctccccttcttcgaccgcgtcctcttcccggactcgttcccgcttgagaccccggccgccaaggaggacgaggacgcggcggcggcccatgccgatgaggcggtggcgccggcgcctcccgtgagggaggagacggagactgagagggaggcatggaggctgctgcggagggcggtcgtcagctactgcggcgagccagtggggacggtggcggcggaggaccccgagtgcacggagacgctcaactacgaccaggtcttcatcagggacttcgtgccctctgcactcgccttcctcatgcgcggcgagaccgagatcgtccgcaatttccttctccatactctccaacttcagagctgggagaaaactgttgactgttacagccctgggcaaggattgatgccagccagcttcaagattaggaccgtaccacttgatgagaacaatgaaggatttgaggaggtcttggacccggattttggtgaggcagctatcggccgtgtagctcctgtcgattctggactgtggtggattattttgctgagagcttactgcaagattacaggggacaatgatttgctagaaagagttgatgtgcagacgggaattcaactgatactgagtttgtgtttgtctgatgggttcgacatgttcccaactttactagttacagatggatcatgcatgatagacaggaggatgggaatacatggacatcctcttgaaatccaagctttgttctactctgctttacgatgctcacgagaaatgcttgttgtgaatgatgggtcaaaaaacctcatccgtgccgttaacaacaggctcagtgcattgtcctttcatataagagaatactactgggttgacatgaagaagataaatgagatatacagatacaagacagaagaatactcccatgatgcaactaacaaattcaacatttaccctgagcaaatcccttcctggcttgttgactggattcctgagaaaggaggttaccttattgggaatctgcagccagctcacatggattttaggttcttctctcttggcaacctttgggccatagcatcatctctaactactccaaaacaagctgagggaattcttagccttattgaagaaaagtgggatgatcttgtagcaaatatgcccctcaagatatgctatcctgcaatggaagatgatgaatggcgcattattactggcagtgatcctaagaacaccccatggtcatatcataatggtggatcttggccaaccctgttgtggcagttcacattggcgtgcataaaaatgggcagaccagaattggctcggaaggccattgctgtggctgaggacagactctcagacgacaagtggccggagtactatgatacccggtctggaaggttcattgggaagcaatcaagatcttatcagacatggactattgctggttttctgacttcaaagatgttgctggagaacccagagctggcttctattctgacctgcgatgaggaccttgagctgcttgaaggctgtgcttgttgcctgtctaagaagagggctaggtgctcacgccgtgtggccaagtcacatgctgggtaaaaccccaaagctcatgctgttccttctgccgtggatgcacgatgtatactactgttaggattaaccctgagacggagagactcttcacatgtacattagtataggttatgttagatatccatccattcatttcctcagtggccgctcgatcttttttgctgagctgccactgatgggaactaccctgggtgacaccagtggtcgaaagaagagagcaaaacatattcagagtttgtgctctcatgtacacagaaaaaggaaatctgttcttgttattcgatccacaagctgcccccctttttttggggggtgctgttgaagccctaactttatctcttgtcagttctaaaaatagtgtgttgtaatgcttgcaaacggtgacactgtattccactcgtttcatgaactagagtgctatggatacacatttattccaaaaaattatggttggaattggacnnnnnnnnnnnnnnnnnnnnnnnnnnnnnnnnnnnnnnnnnnnnnnnnnnnnnnnnnnnnnnnnnnnnnnnnnnnnnnnnnnnnnnnnnnnnnnnnnnnnnnnnnnnnn

SEQ ID NO: 15598 - DNA, 546 bp, Setaria italica
  Peptide Sequence Number=SeqID_81572
caaatccacacctcgctgcagaccaactgatcaatcaattgcgccaccgtccatgagcttcctctccggccgcatcgccgccgccaaggaaggcgcgttcttcctccatgagtcgcaggccgccgtcggccgcctcgcggagaagctccccaagtccgctacagcgcccggtgaggcgtcggcgccgccctcccccgacgtgctcccggagatcctccgccactccgtgcccatcaaggggacgccgcccccggccgaaccctccctctccgcgtcctcccgttgggcgctcccaccgggcagcaccgaggccgcgggcgtccaccctgacgcgctcaacccgctccgttcctacgtctcgctgccgcaggccaccttcggccccaaaagatggcagcttccaaatgagcaacctaactacttggcgtcaacagccaatgagaggcgtcgggataggagcccacctcccatggaccctgagaagttgaaggccgtaattgctggatactcacagattagggaaaagacaatttacttagactagac

SEQ ID NO: 15599 - DNA, 853 bp, Setaria italica
  Peptide Sequence Number=SeqID_81573
aggcaagctgccgtggtgggcaacaaacactgaagataacacacaaacttgcccataatactaacttcctgctcagcagaactcgtgccttcatggattaaacaatcaagaaatcatctgcagatcaagaacactagctagccactatcgacaccctatgtaacaagtacatggcatttctgttcgtctgagctgtgtgaggtgagcacttcaagtggcaccggccaaactgtcactggggttctcctccagctgctgcagaggctccaaggtagcgacgatgtcgcgcatcagcggcctagcctttgggttgcggttgaggcaatggtatgccagcatcgccgtcttctgcaccgccttcaccgggtagtcctcggcaagcctcgggtctactatgccaagcaccttcttcttctgcgtcagcaacgggaatgcccagtcggccaacgtctgctccctgaccggccgggacttgtccagcgacttccggcctgtgaggagctccaggagtacaacaccgtagctgtagacatcactcatcgccgtgagatgccctgtcatgatgtactctggtgctgcataaccgtaagtacccattatacgagttgaaacatgggacttgtcaccaactggtccatcttttgcaagcccaaaatcggatagttttgcattatattcctcatctagcaatatgtttgatgtcttaaagtcccgatagatgacaggcttctctgcttcatgcagaaaagcaagtccttttgcagcgccaagcgcaattttcattctgatcgaccattgaagtgggaccattacccttgaaaacagatgggactccacacatcccaggggcatg

SEQ ID NO: 15600 - DNA, 349 bp, Setaria italica
  Peptide Sequence Number=SeqID_81574
aagaaaaataagaaactaaagaaaaaagaaagaacaaggaaacaagtaccaagaaaaaatagacaagaaaagtaatactctgggacgtagtggaagtgccgtgacaagccccaccatccagaagtcaagagaagactggttttatttctcccttagtagtctgatatgaggcgacaatcttggatggagccttgcccagactgagcatttcccattcgtccgtcgaaattcttggcgctggcggtcacaatcatagttatgtatatgacaacaaaattaaccaaagaaacaaaagaaaagaaaattaaaagaaaagaaaagtaaaagaaaactaaaagaaactaaagaa

SEQ ID NO: 15601 - DNA, 279 bp, Setaria italica
  Peptide Sequence Number=SeqID_81575
tgataacttaccttggcttgtggtggttcggaatatttaaccctgcaatagtatacgaccacttgggggagatatactctgctcttgtttttggaagctttgtattctgtatttttctgtacataaagggtcacgtagctccatcttcttctgactctggatcctcagggaatgtgataatcgacttctattggggtatggaactgtaccctcggattggcaagtactttgatatcaaagtcttcacaaactgtcgttttggcatgatgtcctggggac

SEQ ID NO: 15602 - DNA, 1914 bp, Setaria italica
  misc_feature (1)..(62): n is a, c, g, or t
  misc_feature (82)..(82): n is a, c, g, or t
  Peptide Sequence Number=SeqID_81576
nnnnnnnnnnnnnnnnnnnnnnnnnnnnnnnnnnnnnnnnnnnnnnnnnnnnnnnnnnnnnnttttttgttttttttttttnttttttttttttttatcagaaccctaacaaagtattgccatgcacaaaatgttttggtgaaggtaaaatgttgaaaccgtagcaataatagttacatttcatacatcaaaccacactatccaagcgctatcaccagtgccttcttattgttgtgctgccttatgactaattaaaaaatacccctgagaaggcagactgtcgtcctgcactctaattcctctcatagtaggaagaaactgctaaacaaacaacaagagcagctgtcccagtcctgagcacatcaccttcaaggtagatgccaagctgcctacacctaactgcatacaagggaagctaatcgcatcaaagttacacaagatgtagcatatcagtgtgaagattggaagcatctgatgagctaaagagagttgtccagtatcttggatgctcagtacatgccagggatgaccctgtatggtactttgttgcagtacatcttccaatactttccgtactttgatgagcaccgatcatcatccctcttcgctcggtcaaacaataatattgttaaaaagatcacgtagaagtatggcaggaaatgactgaaaagagcaggaacagtccagaaaaatgcagaaagtatctctgggacgtagtggaagtgccgtgacaagccccaccatccagaagtcaagagaagactggttttattttctcccttagtagtctgatatgaggcgacaatcttggatggagccttgccccagactgagcatttcccattcgtccgtcgaaattcttggcgctggcggtcacaatcatagtttatgtatatgcacaaaattccagcaagaagaattgagagtgctagctggggacccaaattcacagggtggtttacaaggtacattccaggagaggtatatatggatggaacccataccaagcatccccagcaaatgtagaaaccagctctatcatgagcaatgtccatggtacaccaatatccagattcccaccaaaagaacttagtgatatagatcaacatcagtgcagtattcacaagcatagaatctgcgactctgccattcatttcatactgctttatgcagtaggttacagcaagaacagcccaggacatcatgccaaaacgacagtttgtgaagactttgatatcaaagtacttgccaatccgagggtacagttccataccccaatagaagtcgattatcacattccctgaggatccagagtcagaagaagatggagctacgtgaccctttatgtacagaaaaatacagaatacaaagcttccaaaaacaagagcagagtatatctcccccaagtggtcgtatactattgcagggttaaatattccgaaccaccacaagccaaggtaagttatcaaagtcactgcatatgcttgtaagccatttgccttgtagatgggcacgttccccgcgggggagatgggaccctcgaaccgcttcccggggagcagcagctgcagcacggcctcgaagagcccgaagccgaagatgatcttccacgcgacgacggtgggcatgggccagatggccttgagcccctccaccacgccgtgctcccggaggtgctcgtaggtcttcaccaccgatccgtccgcgtgcaccatcgtgtaccacaggaggatgacgaagggcgggcagagcgagaggagcgcgagcatggaggagtaggtgaccagcgccgagtgcaccgtggccggcggcacgggcgccgccgcggccgcggcctgcttggcggcggaggccgaggaggagggcttggccttggccatggcctcctcgcgatctcgcgctgcggctgcggtg

SEQ ID NO: 15603 - DNA, 596 bp, Setaria italica
  Peptide Sequence Number=SeqID_81577
cagacatggatcagccccaccatcagagctcccatcacaccatgctcctgggggtgaaccgtccctctgagcggtgcaaaagctcacggtctatcttgtccaggaccttgtcgtccttgggaaacttccgtgcaaatggcgcgccgctcttcaccatcttgttaaaagtccttcattgagaggatcagtggatgctgctttggagggtagtcccaagcgatgtagtgcagatcatggctaactgcagtgccccgaaaatcagcagagttgcagatgacagtttggaaatagccttctggcgaggagatgaagttgacatagtacatcaggaggtttcgtgggagattgtcccaaccccatatacagtactcgaggaaggattttgtgagcattatccaagcagaaccagtatataatttgaaagatgttggcaattctctccgctcagtagtcgtagtaaggtctaaatttttggatagatagagccctgggtccagaacgattggttttgcccttatattaactttccacccagataactgaaagtgctctataaaattagatttctcggcaaagaagagaacacgtgaagtata

SEQ ID NO: 15604 - DNA, 256 bp, Setaria italica
  Peptide Sequence Number=SeqID_81578
acaactgagatcattaaagggacatgcacaaagtctcttatgtgataaactgataacccgttataacagaatcatatcactgctaaagtcatagtaatcagctactccatccatcccaaattataagccgttttggcttttctaggtacatagcttttgctatgcacctagatatacgctactatgtatctaagaaaaggcaaaacgactttttattggaactgagggagtaccaagcataaaaaggcaagctcaa

SEQ ID NO: 15605 - DNA, 981 bp, Setaria italica
  Peptide Sequence Number=SeqID_81579
aggtttttttttttttttttgtgcccaaaagcacgcaagctgctgccatttcattcaaatcaaacgttaactattttacaatgctctacaaaattacaacacgtcaatgctttcctcagccatacaaaaggaaccgatttaaagacggttaggattactcagggcacctgtcgttctagaaatctggtgcagaactaaatcagatcaagctaccttccccttccaataatttacaggccctttacaaaatgaagagatgcaataaaacaaccagcccaggcaacaaggccaatgaacaaaggccctagcgctagtgctcgtgcttcacacgccctttcagtattcctggaataggcggtgagcttggtaaaccaactgtgccattatttggccgccctggatgctgtacctgttgccaataaatatttgacatgcttgagccctcacctccatttgagatcatctcttgagcactgtcatgttgttctcttccacagaacctcaattcttttaagacatacgagtcatcgtgcaactcaaatggggtgctattgaagtcaaaatgcaccaactgcatatcttctgatatctcgacttccacagttgcatgaggacgggtctgtactaggataaatggcaaagccactccaccagaaggtgtgtttcctgaaccatataattgctcatttcgctggatcaggttttgcaggcctacatattggtcttgtagctcctgtaagtaagcacttttcttctcaatcctacctttcagccccacaagctccatcttcaaatcttcaatatcacttatgctagtccgaggcaagcccttccactggatctcctttttatctttagatataatgtccatagccatcagaacatttaaagcgtcataaactcttcgtcgtatatttttctcatcatattgttgtgcattgggattttcaggtatctggtgcctcaatattattattggga

SEQ ID NO: 15606 - DNA, 540 bp, Setaria italica
  misc_feature (324)..(324): n is a, c, g, or t
  Peptide Sequence Number=SeqID_81580
cgtgtcaagagtacagagggtggtgccaagtgtggtcgcgagctgttcaaaccctcaaacaaggattccaagaagagatgcggagctcaatgaaataatttcacaaggagccaccactgtaccttgtaaagttggggaggcaatgttaggagggatagtggaattgcaagaggagaaagtcatggatacggatgagttggtgaagctttgtactcgtactgaagtgagctgcccaggattcaaaaagtttgatttctttgagattgtggatggcacagacaatttttcgacgaaaagaattgttggaagggtggatttggtacngtttacaaggttcagttgaccagtggagtcatggttgccatcaaaagattggatgaaaatgcaacagtatttgatttcaacagtgaattgcaactcgcaagtcttcaacataccaatctagttagctactgggatggtgcgtacatggaaaagaaagggcttctggtgtatgagttcatgcacaatggcagcttagccgtatcatttcgataaaac

SEQ ID NO: 15607 - DNA, 1023 bp, Setaria italica
  Peptide Sequence Number=SeqID_81581
gccgtccgccagcagcgccgccgcacacggccagctgcgagaggtgctttcccgggtggtgacggccgtgacgacctcatcgggcctcatcctcgacacgttcgacgcgctcgaggccgacgagcttgcggcactccggcgcgacctggccgtcccggtgttcgacgtcggcccgctccacaagctctcgccggcggcgtcgagcagcctcctgcggcaggaccgcggctgcctggactggctcgacgggcaacccccggcgtccgtgctctacgtcagcttcggcagcctcgccagcgtgtccgcatccgacctcgtcgagacggcctggggcatcgccaacagcggccgccccttcctttgggtgctccggcctggcctcgtccgcggcgcgccgccgtcctcgatctccctgcccgacggcttcgacgccgcgacgcgcggccggggcgtggtggtcagctgggcgccgcaggaggaggtcctggcgcaccccgccgtcggcggcttctggacgcactgcgggtggaactcgacgctggagggcgtgtgcgccggcgtgccgatgctgtgccggccattcttcgccgatcagatggggaacgccaggtacgtagaccacgtgtggcggaccggcgtcacgatcgacggcgagctccagagggggaaggtggaggcggccatatcgacgctgatgggggcaggcgagcccggtgccgggatgcggcggagggcgctggagctgaagaacagcgcggcggcgagcatcggcgaggccgggtcgtcctccgtcaacgtcgacatgctcgtcagtctgatccagtcgatgtagctgtaggaatttcgtagacaacaggggcaaaaaactaatggccagagctccggcgcagaaaagggattccggttcttgttgtcctatgtatgacgagataagttagtgtcaaattgatggtctgatggagacaacgaaacatggagtattgtacttgtccttgtgtcttttttctaagaaaaaaaaaaaaa

SEQ ID NO: 15608 - DNA, 587 bp, Setaria italica
  Peptide Sequence Number=SeqID_81582
gggagagaaagacggccgaggagatcaccgagaagtacggcctcgagttcggcctctggaaagtgtttagctccaaggaggagggggaggaggggggcgaggggaagaagtcgcggacggaccaggcgaaggagctcctggccaagtacggcggcgcgtacctggccacctccatctcgctctcgctcgtctccttcaccctctgctacctcctcatcagcgccggcgtcgacgtgcaggacctgctcgccaaggttggcatcgcgacgggcgagaccggagggaaggtcgggacattcgcgctggcctacgccgcgcacaaggccgcgtcgccgatcaggtttccgcccacggtggcgctgacgccggtggtggccagctggattggcaagatcaggaagggaggcgactgatgcgccgggccgccggtgaagtacaggcacttcgatgtgcgcccgttttgttcttactactgaatcatgtagtctatatatatatagagtaggggatgccactgaaactagtgctgcttgtgttttgtaaaactcgttaaaaatagcaatgtatcctgaatttcaacttgcaaa

SEQ ID NO: 15609 - DNA, 260 bp, Setaria italica
  Peptide Sequence Number=SeqID_81583
gccctgtcccacttccccggctgaccaaccaataacctcgcgatctaaagattccacggagatctcaagattccgagccagctagtacatgagaaccccgcgatgcacacatctacgaagaaacaaggtagatctgaagcacagatgaaccgaccagcaggtgagcctctcagtccttaccagatgcaggaagcaccgatctggacgaaccccggaggccgagaccaccacacgaacaattcccaagcgaaaacaaacgg

SEQ ID NO: 15610 - DNA, 485 bp, Setaria italica
  Peptide Sequence Number=SeqID_81584
ccggcgtacacacggagccggctcatcgacgccgcggagaagctgttcgaggaaatgcctgagaagaatgtggtttcttggactgcgatggtgtccggttacgcccagaatgggaggcatgagcgggcggtagatacgttcttggagatgtgggagaaggaaggtgtgcggccaaatgagctcacagtgagcagcgtgctgccggcttgtgcggctgttggggcgatggagctggggaggaaggtggagcggtacgcaagggggaagggccttctgaagaacttatatgtggcgaatgcattggtcgagatgtatgccaagtgtgggagcattcgacgagcttggaaggtgttccagggcatcggacagcgaagggatctttgttcttggaactcgatgatcatggcatttgctgtgcatggcctgtggagggaggcactggtcttgtttcataagttgaggatggcaggggttgaaccagtagt

SEQ ID NO: 15611 - DNA, 351 bp, Setaria italica
  Peptide Sequence Number=SeqID_81585
cgagatgcggttcatgcttgcgttgagggggtcgtggttggctcctcgcctcctcgcggatccgtcgtctgggcgcgtagatttggttttttgttcgattcaatccctatgatgctgtctgcttatgttgaacggaatgatgttcgtcgtgtggcggtaggattgcgcttgtttgacatgtttagatgcagaaatcgccgcatctgttgaaaggcgatgaatgggctgggtctcggggctgtttaggggactgtaagataagagatgggcgggtgtcaattggttggaaacagattgcttcttgaataaccgattgcagattctattccattcgcaggcggttcagacagg

SEQ ID NO: 15612 - DNA, 352 bp, Setaria italica
  Peptide Sequence Number=SeqID_81586
cccgaccgccccctgtccctccgcgtcaccgccatccccgccctccactgcccaggctcgctcatgtacctcttccgcggggacctcgggtgcatgctctacacgggggacttccggtgggagctcgggtgcggcaaggcccggcgggcgaagcaggcgcttctcgacgcgctcggcggagataccgtcgatttgctctatctggacaacacctactgccacccgtcgctcaacttcccaccgcgccccgtcgtcgctgagcagatggtcaatattattcgagcacatcctaaccatgaagttatcattggtgttgacactcttgggaaagaagacctcttgcttcacatat

SEQ ID NO: 15613 - DNA, 273 bp, Setaria italica
  Peptide Sequence Number=SeqID_81587
tttaccgttcttacgccggacaccgcgctcttcctcgattcctcctcctgttccgtcgactcggccgccgccggtggagtcgccgccgcacgccgggcgggggatccgtcattagttcttgcaccgatctcttctcgcgtgttggtactcagccatggtttttcttgagtcagagatgtcatggaatgtgttaatctcacctagccagctggaccgcaagggcctcctgctccgcaaggctatcatcgtgcatcttctgggggatgttaaccg

SEQ ID NO: 15614 - DNA, 446 bp, Setaria italica
  misc_feature (413)..(446): n is a, c, g, or t
  Peptide Sequence Number=SeqID_81588
tcccctgtgtgccttgcctatcctctgttgcgtgtctcagccgatgttcatgaacgaccaatcgaagctggagaaggacactgccgtgcgtttcaaggtcatgggattccgctggatggaagctgaccgccagtttcagctccttgctacgatcgctggtgactttcttgggccactgtgaactgcttccacaggctaaatgtggttctgatgtacattgcttgttagacggtggatggatgtgtggatctgatgtgttagagttaactttgtagtcaatagtctgatctgtagtgccgagacatggccaattgtcctgtgacattaatgctttaagcttgatgctgatgccagtgccattgggccccgtgatttacatgcctgtactgtgataaggaaaaaaacaaaaaacnnnnnnnnnnnnnnnnnnnnnnnnnnnnnnnnnn

SEQ ID NO: 15615 - DNA, 836 bp, Setaria italica
  misc_feature (812)..(836): n is a, c, g, or t
  Peptide Sequence Number=SeqID_81589
ctcggtctccctttcctagcggggacgattggacgagcggcggcgcgattcgacacgtctccctcgccgggccctttgccggcgacgagcacccaccaggtactcagccatggtttttcttgaggtagagatgtcatggaatgtgttgatatcccctagccagctggaccgcaagggcctcctgctccgcaaggctatcattgtgcgtcttctggaggatgttaccaacaagagggcttccaaggagcatggctactacgttgccgtcaatcagctgaaggcaatatctgaagggaaagtgcgcgagcttactggagacgttctgttcccagtcacattcacctgcatcacacagaagcctctgaagggcgagatcttggttggatatgtggataggatcctcaagcacggcgtgtttctcaaatctggacctgttgagagcatcttcatggctgagaagtcgatgagcgattacaagtacatcggaggggagaaccctatgttcatgaatgaccactcaaagctggagaaggacaccgccgtgcgtttcaaggtcatgggattccgctggatggaagctgaccgccagtttcagctccttgctacgatcgctggtgactttcttgggccactgtgaactgcttccacaggctaaatgtggttctgatgtacattgcttgttagacggtggatggatgtgtggatctgatgtgttagagttaactttgtagtcaatagtctgatctgtagtgccgagacatggccaattgtccaatggcactggcatcagcatcaagatgctgatgaaaccnnnnnnnnnnnnnnnnnnnnnnnnn

SEQ ID NO: 15616 - DNA, 245 bp, Setaria italica
  Peptide Sequence Number=SeqID_81590
tcatgattgagcattgatatgtatgctagttaaaacaacggattaatgaacaaggacaaagctgattatgcatgccagcataccactaaacccacgcaatacgcagcggctaaatggcccattctttgccttcaggatctctactcgtgaagcaaaagtgccatagtacaagtaactgcagaggtgaacgtcaaggaagatttatatggttaattcatgatttgatagagagaatctcgtaacaa

SEQ ID NO: 15617 - DNA, 860 bp, Setaria italica
  Peptide Sequence Number=SeqID_81591
agaatcctatgtaataatctctggttaaaaccacttttgtggtgtactatgtatttcagcaaagatgcgaccatgttgtacgtagacaacacatgcccaggaagagtatagacccggaaagagactactaaatcatgcatcctgcagggtcatcttcttgggcgcaacagcttcaatagcagtacccagaggccaagcagcctcaatatagtactctccatacttcactctattaatcagagtaatctccttagttggatccaaaccgaagccatctacgagcaacgtgtattggtagagaagatccatgcacgcatatggcagatcaaaggcatttaggatatgcagctttgacttctttgacgctcaacgaacaaaccttctctgcagctactttgaatgccgcggggtggactttgcactgggtgcctcactctcgatgaaaccatacttgggtttgcctttgtcaaagaagaaagatgcaacgatttccagacttaggacctaggaccaagacctacctaaccgtaccttaccgtgtacctaactaacgttggttttcaaattctaagtttagtgccttgattatctcttctctgcacttatcatacactgcgccttcaggtgaggctgttgcatcatattccttcccattgtaggtgtaattaccactaaacccacgcaatacgcagcggctaaatggcccattctttgccttcaggatctctactcgtgaagcaaaagtgccatagtacaagtaactgtgaacatagaggttataatccttccccttgaggtactcctttgtaatgtatggatccttcccatcaggcacagctggggcattgcagcagcattga

SEQ ID NO: 15618 - DNA, 392 bp, Setaria italica
  Peptide Sequence Number=SeqID_81592
tccgcctccgttccacacgaccgttaaaagactagacaagttacttaagtttacaacatggtgcgctcaagtttagtgccttgattatctcttctctgcacttatcatacactgcgccttcaggtgaggctgttgcatcatattccttcccattgtaggtgtaattaccactaaacccacgcaatacgcagcggctaaatggcccattctttgccttcaggatctctactcgtgaagcaaaagtgccatagtacaagtaactgtgaacatagaggttataatccttccccttgaggtaatcctttgtaatgtatggatccttcccatcaggcacagctggggcatttgcaagacaagacaatttagtaagaaaataggacaataaggaacca

SEQ ID NO: 15619 - DNA, 1679 bp, Setaria italica
  Peptide Sequence Number=SeqID_81593
ttttttttttgataaaagtgtcgcctcgtcagctcgactaaaatttcagaaatacatagtacaccacaaaagtggttttaaccagagattattacataggatcaatgccaaatccatgtatatcagcaaagatgcgaccatgttgtacgtagacaacacatgcccaggaagagtatagacccggaaagagactactaaatcatgcatcctgcagggtcatcttcttgggcgcaacagcttcaatagcagtacccagaggccaagcagcctcaatatagtactctccatacttcactctattaatcagagtaatctccttagttggatccaaaccgaagccatctacgagcaacgtgtattggtagagaagatccatgcacgcatatggcagatcaaaggcattaggatatgcagctttgacttctttgacgctcaacgaacaaaccttctctgcagctactttgaatgccgcgggggtggactttgcactgggtgcctcactctcgatgaaaccatactgggttgccttgtcaaagaagaaagatgcaacatagagattgtcctggccagctccaccgcctccgttccacacgccgttaaagctgcagttcttagttttcacatggtgcgctcaagtttagtgccttgattatctcttctctgcacttatcatacactgcgccttcaggtgaggctgttgcatcatattccttcccattgtaggtgtaattaccactaaacccacgcaatacgcagcggctaaatggcccattctttgccttcaggatctctactcgtgaagcaaaagtgccatagtacaagtaactgtgaacatagaggttataatccttccccttgaggtactcctttgtaatgtatggatccttcccatcaggcacagctggggcatttgcagcagcatttgtagaaatggcataggccatttgcactgatccaccccccaaatcaatcacaccaactgtcttagagtagtcccctcctaactttcctaacagataattcagagcaacccataggtaagatccttcttgagttccctcgagaacagtgatccatttgggattgtactgaaatttgctcttggtgtggacaagatcctggaccgcttcaagaatctcctctgctttcttatctccaattaatcttagaccagccgttgccccaagtttaagcggagtgtatttctgaaggctggtagggacaatcttcttagcctgctcaaggagggggagtatggagcttgcagcttcttgaggtcgcccagcatatgagctcagcccgggctttatcttggcgaagaactcgatgtcgtcgcctatcgggacgaggtcgagcttgctgtcgaacttgaagacgtgcacccggctccccgtgctcccggcgtcgaagatgacggcgaacctcgacgctgccgccttctcctcctcctccgctgcggccgactgcccagcggcgacgctgctgccctttcgtccaagaaggacgttactacttgcagaggcggcagaggcaaggtggagtaggagaagaagggcagcaaggccggcgaggcgagccattgccgctgcagcctgcaggtggtctactggtctctcacttcactcgtgactactaagaactctctggagccgaggcgtatggccttttgaaggttaggc

SEQ ID NO: 15620 - DNA, 1346 bp, Setaria italica
  Peptide Sequence Number=SeqID_81594
tggacccaccgcatttatcatattacgagctaatgaaatcggtttattaataaaaaatcgatgatcagatgttcagaattggtgaggaacaacaaatgcctccactcatcggccaaaaaagagcaacgcatcctatctacccattcggtgcaggtgggattccgaaacttgaaaagggaccagtaatcccagccaaggagcaaacttcgtcgacggcaatgcccttcactgcaacagctaacactaaacacgctgcttgctcttatccttgtcagcgagaagaatgtccttccatgcctcgtagaacatccaggtgatgccggaattcggcatgaccttcaggcagcttgcgccccatccgcggtacactcccaggaggccttcctcctggatcacctctgataaggccgcgatcatgttgggcgggcacttgccctgcagggcaccgaccatgagccgcttccttgctacttccagcgggaagctgattgtgcttgcagtaaggcctgaaagtgccccaataagtagtagctcaggacgactcaaagatgatttcttatgtaagcggcagtaagaggtcttcattgtatcatacataaagtagtagcatgtgctgtaaggaagcatgccaatcagtgttggaaagagaccagaatagagaccacctataccctcagtccggtagatcctgctgaaggcaaggctaatggtaggataaacctctcgattgatagtcaaacgatccttgataacttcaagaggatggcacgccaatgttccaactattccagcagcagcaccgccaagagcaaccggagataagaagtggagtggcagctcgattttcagattgccaagctgtatctttgggtatccatcctctttccatttctcttgtgcttctgccatgctccttttgacacactcgaatgttccgagctccactgcttgtgttggaataatgcgaagcatgttgattgtatttcctgcccaaagcccttgccacccattttgtccaatgatctccacaaaactaccaaaaatatgcctagatcctactcctacaaccatccttgtccttatagtctcaagaggagcaagaatagcttttgacatagcaccagctaatgccccactggcaaattctctgaactctctgcgccccaaaatattcctcacggcccccgcgacgtccggcatcccgacgccgatgacctccgcgaccttggcgccgtcgaggccgtcgtccttaggcagcgccatgacgaggagctccttgtatcccgcccccgcccgacccggcgccgggtccggcgaagcccacgctagcgagcgatagcttcccg

SEQ ID NO: 15621 - DNA, 2043 bp, Setaria italica
  Peptide Sequence Number=SeqID_81595
ttaacactcaaacttactttattgtttcgccctaccaggagtacatacaaataaatattcttcctgttacctgtaatatgcagttatgcacacaagcacaagaaaactggctactccaaaacaaaacaaaacaaaaaaacttctatgcatacttctctcacctatgttacacgcctcaatgtatgcacagattgcgccatcccagaacctcagcatcccggcaaggactgggctgacatcatgtcagacaaactggcatctgaatcgccacagtgtctcaggtaggattgctgcaaggactgagctgatgatgcgcctgccgtcacatttgcctccgacgactcaccaccatgccccagctgggactgctgtggtgactgagggaccatggtagacaggcttggccctgattccccacaccgccttaggtatgatccatgctggctggaggctccaagatagtagtagctcgaagatccatacaaagaattggacatataggatgaaccaacatgtacgctaggtgatccatggccaaactgggatacatggggcgatgaataccttatactgattggtggtgacaagtggctgccaacaagggagtgtgtcgacgacaaatgtgagatgcgaggatggggagatgacatgtttgcaaggtcggcgttgcttctgcttgtactgatgccaggagagtttgtgtaagatctaaaggggttgggagactggggggtactagaaacagagtaagcgcgagaaaccgagtgcgacgaaggacgccggcttattggtctgggaggggatgctgccacactcaaccgggatgaagatgactgagaaggtaaccgaacagcagaagaaagtaacggggtggcctctgtagcagcaagttctgatactccactacttgcatcttgcttgcatacaggacagaatgttctccaagaagtcagccacaagtccacacaagctgcatggaacttgtgacggcagggcagcactctaagcttctctccaaaactgtagtcttctaggcaaatggcacacattgacgatgtgcagttatcttcttgcacttttgtgaaaataagacttggcatcgccttaactaactgactgctcattccatggaattctcgagcttccagatttctagggtggtccctccttattcgatgtcttctcacaaagaaacatgtagctaatacagcagacatggcaagtagcgatatgaatgagattgccatgatcacccaggctgagttctcgaatgtaggtagtatccacacctctacatcagtatggcctgaaaacttcttcaacacctctcctgaggcctttgatacgaacacagcatatatatgaataccacttgagcttccagccattgaaaccagaaccccactattttcgttgtcatatacgattgcagctttgaatccagcatcctgcacattttttactttctcatcaaatgcacatccacctcttataaccaacgcaaaaggagacggcaggccctcaactgcattgattgttaatgggctgcaggcatttaaaggttcggcggcataaactatgccattaactcctgacgctttcactcctggagcaaagcttgcctcgatgtcatcaaacgacaaggtcagattattccccattagcacgacattggcagctcccagctgagccattagacagaccatgacacaaagaaagagaaatctactcttcatcttggcaatctccgaagccctagaggaaaagtcagctcttttttatggatcacaagcactgaagcgacgaaacggagaggcagctcaatactttgaaaactccaaatcagtgtctctgagtgcagctaacggctaacacccgctcggtgcctggggagcagccgtggcaatggggacgtcggcttccatgtgacgaggagctgccgtggcgtggtgtatgggcggatcaggcggcggcggccgggcgggaggacagggagggagggagcaacggaaaccgggaggggaggaggggtcaggatgggta

SEQ ID NO: 15622 - DNA, 526 bp, Setaria italica
  Peptide Sequence Number=SeqID_81596
ctgtattcgggattacagagtcgagattattattaggaaacaaacgtccgtgtataatcccgaatacagagtcgagattattattaggaaacaaacaactgataatacacagatatttccttagcagatcttgtttgccttgcactaagaggaatctaaaggactgcaaactcatgccttctggaatttgcatccagtattattgctggaaacctacataaggttgtgcagatagttaatcaagggaatatgtataagttaagaaatctccagtttcaactgccttgtacaggcctatgtatgtcacaatataaaacagaatgtttccggacgaagttgtgtagttcgatacattaggtgtgaaatttttagcactagcagcaatatataatgtgaatagaaaaggttcaacaagtatccaatgcatcatcagctacaatggtgttactagtcatataatattatgaaagttctgtcaaccgaactggtagtaaacttaaataggaaagttgatgctcataatatt

SEQ ID NO: 15623 - DNA, 891 bp, Setaria italica
  Peptide Sequence Number=SeqID_81597
aaacaacgcacagaaatcagatatatcggaaacacaaggatttcagaactcaaaataaattttattgaaataatacacgtcattgtaacagtggcacggtgacacaattccacacaccagtagaaaatccttccttagtcccggttaggaaacccaaaccgaaactaaataagactcaataatgaaaacgaactactcgtggagcaaactaaggtgacatggaaccagcaaatttggtctgtaatcccgaatacagagtcgagattattattaggaaacaaacaactgataatacacagatatttccttagcagatcttgtttgccttgcactaagaggaatctaaaggactgcaaactcatgccttctggaatttgcatccagtattattgctggaaacggttgtagagttcattggagtgtaaaacgcatgtattttgagttctgaaatccttgtgtttccgatatatctgatttctgtgcgtttgatagtacccttagccatagcaagttctccggtccctccaacaatgctccactcaccatttatttgggaagttccagatatttgtagcgtggacccattgaaccttttatccccaaacactaatccaagggaatattgatacacatcaggagtattggctacttgaacacttgtgccctgcatatgaccgacgatatttgcatcgggacctggcccatctgttaccagccacgaaaagacccaggttgtacccattttcgctctgcttataatggtcactccgttagtgtccggtccgtcatacacctccttaatgtatagggtcatcttaagctcactttgaacggaatctattgtgtaagaggccatggctagcgggagtgatgtgttcccagtgagagggg

SEQ ID NO: 15624 - DNA, 481 bp, Setaria italica
  Peptide Sequence Number=SeqID_81598
aattaatttgtgtctaaattattgattatttagaatggaattcaattccatggatccaaacggggcctcatggattttaaatttactacagacgtggatattagaaggtaatagatagattattgggctaaccctagagggtagctatatagatgtcttacatgggcctattgggccataatacacacaatacaccaacatcccccgcagtctgaactaccgacgcagcggagttgcagactggacatgaaaagaaaggcacacacacaagccccccacagacgcaactagccacaggtgatgttgaggctggagcgaaactcggtgaaggcgggtgacgggaggcccttggtgaagatgtcagcaaactgagaggtggtcgggacgtggaggacccgaacatcgccgatggcgacccgatcccggacgtaagttgtaaggttctaatgcttccgtacctatttgttcttttggttccgtt

SEQ ID NO: 15625 - DNA, 2117 bp, Setaria italica
  Peptide Sequence Number=SeqID_81599
acggacaacaacaactaaaagtaaacaagaattttatattcataaacatagatacatgcaccatggacatattcaataacaaaaaaatacccatataaaaatagaaatatacggaatttaacattactcgtatacaatgctaagtgttggaccccaatcacctagttggataccagcaagctgcaaaatttgtgtcattcgtagtggtactgcagtgagttttattcgttaggaagaacagccaaatcagagagtaacttattcgcatgttcttgtcaagaatgctaatgctagggtttctatcatgtttgagattaattggaacatgtgagattgttatgtcaataaataatcagtcaggtgacaatagaaggaaaattcagaagacagtacccaaacctttaattgcaggtggagatggagcacaaaataatctcttttgatcaatcacaagtattagcgatgatagaggaggggatcggcttacacccaaacctcagcacagaagcctttccacccatgcccatgttgtgcaaatcatatttgcatcctgtgaagttgtaggcaggtatgcctcaacgtggagggcctggctggcgatggcgccaaccagggagtggaggcgaggccgctacccggtgacgagtggcggtcagggagcggggaccaggaacgacaaatgtgaccgcggcccagcgagaccttagcgcatgctccaggcgggtgtggcaccgcgtggtgacgatagaaaaacagaaacagcggaaacattttagaaagcatcaatcttttctgctttcacatccctctaacctgcgcagtaggttcattgcgagggaaatgttttcaaaactactggatctttatagtatagattttgacacgctgaaattaaactccaaattgagggtgctctctcactcaccttctaacaaagaagcccatgtccaactctaatcacgaacttcttcttcaaagaagaaactctaatcaacaaccccgtttaatttcccagtgctgttgagacgccattggagcacgtacgaggcacgccgcgacctcatcggctaccccaaaagccaaagagagagaaagacctagagagagatgatgagcacagtggcacagtgtcttcagtctctctcactgccagcgagcaggagtatactgatgtgatgcttttcttgtcgccatgggtgagtaggctcgtcgccattgctgcaccgttgtcctctctgcaggagtactcttttggttgggggctccttttgctctgcggcctccacgtttgtactgctgtctcgagccctcgacgacgacggcggtccagaggactgcatgccctgtcgtttgctcagtgacagccggacaggatcctagcgggatgggattcgatgcgaaatcaaatctgatagtaccttttattatattataatttgaattctaatatgaattcaaatattcttcatttaaattcacaaggggggcctcgggcctgcatgatgagcagtggcggaccgaggatttcagagtagggtatgcccattgcaagaaaatatttagacgaacgacataaaaagttcacaagggaataaataaaacatacatatagttcaaactaaatgtattccataacaaactgtgattataaaacattagaagaaaattacaatttaattttaactttccgatccctcattgcttgataccgattgatgatgtcattatctttgacttgcaaaaaagaactgacgctcaataaaggttaccaaactactataaggtaatagatagattatgggctaaccctagagggtagctatgtagatgtcttacatgggcctattgggccctaatacacatagtacaccaacactcccccgcagtctgaactaccgacgcagcggagttgcagactggacatgaaaagaaaggcacacacacaagcccccccaagacgcaactagccacaggtgatgttgaggctggagcgaaactcggtgaaggcgggtgacgagaggcccttggtgaagatgtcagcaaactgagaggtggtcgggacgtggaggacccgaacatcgccgatggcgacccgatcccggacgaagtgaaggtca

SEQ ID NO: 15626 - DNA, 366 bp, Setaria italica
  Peptide Sequence Number=SeqID_81600
ggttacctctgcctctggatgtagagggagctccggggtggtcgctggtcggcggtggtggcggtcgagacggcgggggagcggaggtggcgaggcggcggtggacccttggttgggcggtggtggcggcggggcgagcaccggcgacgagttattgcgcgagtggtcgagacggcggctgcggatccagcggcgggagccactggagacgggcaaggcggcggtggaggcggggcgaacggcggaggcgagcttggagggccggagcaacagaggagggtggagataggtgggaggagggaggggcggtgggggagggcgggccttgccgacgttggggacgacgccggcgaggcgacagggtgg

SEQ ID NO: 15627 - DNA, 1272 bp, Setaria italica
  Peptide Sequence Number=SeqID_81601
ggctcctctgcgcttccatcattcacaccactggactcgtctcgctggatggctgaaccttggggcctcatcttctagatcagcatccatgttagttgattcctttggggcttcactggcagcatcctggccttcagcattctgccctttctcagggctatcctcaatcacactgtctgcagatgctggagcaggctcctctgcgcttgcatcattcagaaccactggactcggctcgctggctggctcagggttggcggcctcgtcttcaacatcggcacccttgttagttgattcttccagggcttcttcacttcccagagccaccacatcatcgctggctcccttcttgtcagctaattcaccattagattcagcaacaggcaccttatcctctggtttggtcacctccatgctcctagcagagaactcaacctccttctcatcgcccaattcaccaacatctccacccccagaaactacctcctctcccttggtggcttccggttcccgcttctcctcctcggccactgccgactgcccgtcatccgctaccttatccacagcctcggcctccacagcagcacctgcttcctcctgctcctcccgcaatccacccttctcatcaccttccggcgcatcaggggaagccagagaagcatcctcctcccccaattcgccggtctccgacttggactccacggctggcgcgggcgccgccacagcttctccgccgacgtcgtccttctcggcctccgccgcgccctggctcacacctttaacatcctcctccgcctcttccaccttcccgccgtcaccacctcctccggcacccttcgcctcgccgttctcggcctccggacccccaaacccctcaccgtgcccctccaatctcacctcctcctcctctccccgacccgccttgatctccttcgactcggaatattcccgaggctcctcctcgcccgccgctggagccggtttctcgtcctccaggggcggcgcgactggggcggcgtcggtggtgatgtccatggccggctcgactttcttggtcgggtcctcctcagcggccgcctccgccgccaccggggcggggttctcttcttccacgggcgcgactgcggcggcgtcagttgtggtggccatagccgcctcttgctccgccagcacgcaaggaagcaagaaaacagcagcggtaggattcgaggagaagcgggggagggccggggggaggcgtcgagaagacgagaagataaggtgtagggtttt

SEQ ID NO: 15628 - DNA, 934 bp, Setaria italica
  Peptide Sequence Number=SeqID_81602
tgcggcaagggcttccgccgcgacgccaacctccggatgcacatgcgtgcgcacggcgaccgtttcaagaccctcgacgccctctcccgccctggccacggctagccgaagcctcccgccggcgaccgagaggtgcgcttctcctgccccttcgcgggctgcaacaggaaccgcgcgcaccgccgcttccggccgctcaagtcggcggtgtgcgcgcggaaccacttcaggcgcagccactgccccaagctctacgcctgcgagcgctgcgacgggaagaagcgcttcgccgtcctcgctgacctccgcagccacctgcgccactgcggcgaggaggcacagtggcgttgctcttgcggcaccaccttctcacgcaaggacaagctgttcggacatctcgccctcttcgaaggccacactccagctgttaccgagccaaacaaggatgttgcagcaggacctacagagccagttcttgatgcaatggaggaaggaggaatagaagaaggcaattgtgatcgtgaggaggatgaggagggcggctatgatccagagttcttcacggagtggatggaggagctcagagatggtgccagtggctcgaattgggctggaccggcagcagccggacattagcaatgttgggtatttatgattgcttgacgagggacatcagcttacatcaagtgaccaggaggatcaagtgaagaagggcggttgtgaaatgtttcaggagtgttaatcaggctctctctttaccagtgtatgtgtgcgttctgaccagtaacctgtatgatatggtgcgtctgtctttctgctgcctcccttgccattattctcggtcgctttcgtgtaatcctgtgagctgttgctggttaaatggagtacagcggagcaaatggttatgctatgcaagcggtctcctctgtgttat

SEQ ID NO: 15629 - DNA, 331 bp, Setaria italica
  Peptide Sequence Number=SeqID_81603
aaaaacgcccgtccctatcggattgcttcgagcttgcgcattggatctgtgcgctgtgaggtcagccgtcagtgagttggggcttcgttgggggtgagatgaagaggctgcttgctcatgggcggcagttcggctgcccttccagggatttggtggtgggcagatcctctgccctgcctgcactctgcaacagtgttcttcccggctacaggtactattcaaccgagaaacataaacacgatgacacactaggtgaaaatagggagaaaaggcaagatcaactgcagaagagttcctgagagtggccaaggagaagactgacgaggtcact

SEQ ID NO: 15630 - DNA, 277 bp, Setaria italica
  Peptide Sequence Number=SeqID_81604
gtcgtcgtctcgcgaggcgctgatggcagctcgtgctcccaggccaaaacgacgactccagcaccgttgtgcgacccgccgtcgatccgtgcggcgctcggtcgatcccctgcggcgcttaccctccgcgcaggaagatggcgcttcccctttcgttcgcgccaaatccccccataaagccgcttcccaccctccggcggaggtccgcccctgccccctgcccaccggcggcgcgacgagccacgccggcggcatccctcctccacctacaacacac

SEQ ID NO: 15631 - DNA, 270 bp, Setaria italica
  Peptide Sequence Number=SeqID_81605
ccccaatcccacaaggccacaaacgcttccccctcctcctgctgctgctcccaatcttctccgcttccctgctgctctcccggtttgatttccctctcgattctagaaagccgccatggccgcggcggcagcaacgcgccagagccccgccgtgctccctcgtcgccggccctgacaggaaggaagtggccgaagctgctgctcccagttcgcgattttcttcatttgctttgagctgccttcctgattgatacggcgcgcagaggatgg

SEQ ID NO: 15632 - DNA, 621 bp, Setaria italica
  misc_feature (122)..(122): n is a, c, g, or t
  misc_feature (159)..(159): n is a, c, g, or t
  Peptide Sequence Number=SeqID_81606
ataaccaaatggcagctgatctttttctagctttgcttcattcagctctctcgccatgaatgtgcacgggcgatgtagctagtggccacatttcttacacggtgacaagtacatctcgtccncttttctgcaacagtttcttcaggcacgcttctcccnccttttttgtgcttcttaccagaagcacgcaagacagccgatgtgatggtatgagcccatcaagctgctgccgccggcgcaatggcagcgaccaccttgcggagcgcccgagccgtgttgccgtagcacaccttcacgaccgagacgctccggctcgccacggcgtcacccagctcatccatgaagtagaagaaatcgttggcgagaagggtgatctcctccctgcgctcctcgcactcgttatgggcgatcacacggctcaggtcaatgtacaggaaggtggctttgagctggagatccctcctgaccaaatcgcacagatcatcatccagatcagtcaccagatcctcctccatggacagaagctcaagcgcggagctcttgatccgacagacgcatcccctcagctccatcccctgatccattggtgctcctgtgcagtgccctctgctatatcttgca

SEQ ID NO: 15633 - DNA, 2420 bp, Setaria italica
  Peptide Sequence Number=SeqID_81607
tacatacattgcttaattgtgcagctgctagtgttagcttttcatgtacactagtttttctgtaacagagatctgaaatattgcgtttcaaacaggaaaaccatgggttttatctaggttccatctagaatctgtgttgcagattgcaattagattggttggcacacatttctttggttcaaaattgttgctgcacacgtcttggattgtcgtattgcttagtgcacatgtgcatcggtatttctgtaactgagatctgaaatattgcgtttcaacggaagagatctggattttaggttccatatagttaccatcaaagatggcagttagatggtttggcacagatttctttgcttgcgcgattggatctaatctgtttccatttagttagtacctcagtaagtacgacgtgaaaggtgaaacatgatcaatgtgctgttttgggctgtattctgtttttaattcttacaagcttttgtcaaaagatgctgaattactgcaatcaaaacctgttggcacaatgctgaaatcattttgagttttcaaaagaaattgttttaacaaaatgtttaatatcctggccactaaactattagttcatctattgataaagtaacatcttggatcgatcctttggtggccatgagtgtggtgtgatgccatggaaagttaaaaccatgttatatttttactgttacacagttttctttgacaaatagcagttatgattgttatcttttttgtgaaatacattcttgtcataattgattgcacgtgcatgaaatagaagttatgattatcatcttttgctagccattgctttcctaacccatacttgaagtttatgctcactgcagattgtctcctttgttccaggtatgttgacttccctttcctgcttgagttatgattttgttctgttatcaactgcacagatacgaatattagaattttcatacgcagtacatcttctgtaattgattggactacaaacagatatagggttgaactctaccggtcgatggactcagcatgtcaattatactagttgggatatgttactaaaaatgaaaactgaactatagtgtatcggtccaaatattttatatcctgtagagtaactagagattttcagatctgaaatggcaattagatggttttggcggaactgcctttgcctctggtagattgaatgaagtattgttccatttagtctagtgtccgggtagctgtggaacacacttttgtgaattgcaggtgcagactagtatatctcccaaagttttgttaacagatgccgatttaccgttggggatcggtactttggttctgggtcacttcgcttactgtcttcgtaggttgaagtttttgttatgaagacatgcttgctttgtttcttatttgtgcatgatctggcttcgccagctgaagcgagtgcagtacgaagtcgcgaagccaagcctggaacgtattgactgatgacgtactgctcgattcagacgtcaacggagtgaagctggtgcgagtgctatacgaagtcgcgaagccaagcctggaacatattgagtgatgatgtactgctcaattcagacaccaatgaaaagccggtgtgagtgcaacagaggtgacgatccagcatcgccagctgaagcgaagacgtgaagccaagcctggaacgttttgagtgatgatgtaccgctcgattcagactccaacgaagtcaagctggcgcgaggatgtcgaggtctgtcttttaaaagttgacaatggctaagcaaactggtgaacgaattggatgatggaaggactcttgtgggccgcaaacaaagagggagtctcatgcgaatgcgaatatgtaatcatgcgaggagctgtggagtaactgagttattcagacaaggaatggaaatgagatggtttggtggaattatctttgcctcaagtagattgaatcaaaatttgaatcaagtcttgttccatttagtctagtatctagttccatgttaactatggaacatacatttgtgaactgcatgtgcagaatgtattcattttcacaaattttgtttactgatgccgagttactacaatttatgaaaattacaattctgtaaagatcccatggcttgtgcttctcgtatctcacctcctctctgttgctttctcaggtgcctttatatatgcaggggtccatgactctgtagattgtagatggcaccaatggcaagtgttctcagccgagagctgagatccacattttggccctttcttatgaaaattttgtgcttacaagtgaggcctcaccttcttggctaggattagagactttgtaaggagtttgttgctgcactggactatagcaaggttgaaggaacgacttaaaagaagtttgaagcttagcctttgtagctttcattcta

SEQ ID NO: 15634 - DNA, 1593 bp, Setaria italica
  misc_feature (1)..(42): n is a, c, g, or t
  misc_feature (1517)..(1593): n is a, c, g, or t
  Peptide Sequence Number=SeqID_81608
nnnnnnnnnnnnnnnnnnnnnnnnnnnnnnnnnnnnnnnnnnataaaacatactcccagtcccagaaactagagaggagagaggcttctaggctccgagctcgacgacgacacaagccgaagcgtctcgcctgtgcggttgcgagcgtgcgaggggcattagagatggcggcgaagaaggtgctcctgctctgcggcgactacatggaggactacgaggtcatggtcccgttccaagcgctgcaagcgtatggcgtctccgtggatggcgtctgccccggcaagaaggccggcgacgtctgccgcaccgccgtccatcaggggatcggccaccagacatactctgagacaagaggtcataattttgcactgaatgcttcatttgatgaaattggtgctaatggatatgatggattggtaatccctggaggccgtgcaccagaataccttgcaatggatgacaaggtgcttgacttggtcagaaaattctctgatgctaagaaacctatcgcatcagtttgccatggacagttgattttggcagcagcaggagtagttcagaaccgcacctgcacagcatatccagctgttaaaccagttttggttgctgctggtgctaagtgggacgaacctgataccatggcaaaatgttctgttgatggcaatctcatcactgcagcgacttatgattctcatcctgaattcatcagcctatttgtcaaagcacttggaggctctgttgcaggctcagacaagaaaattctgttcctctgtggggactacatggaggattatgaggttatggtcccattccaatcccttcaagctcttggctgccatgtcgatgctgtttgccctgacaagggtgctggggagaagtgcccaacagccattcatgactttgaaggtgatcaaacttacagtgagaagcctggtcatgattttactttgacagcatcatttgaaagtatggatgcttcaagctatgatgcacttgtgattcctgggggaagggctcctgagtatctggctctgaatgataaggtcattagcttggtcaagggcttctcagataaaggaaagccaattgcatcgatctgccatggacagcagattttatccgctgctggagtccttaagggaaagaaatgcacggcgtacccggccgtgaagctgaacgtggtgctcgggggcggaacctggctggagcctgacccgatcgaccgctgcttcaccgacggcaacctcgtgacgggcgcagcttggcctgggcacccggagttcgtcgcccagctcatggctttgctgggcatcaaggtctccttctgaactgaaggatgagagagctccgagcgctcctgggcgcagctgggcaaggtggtgtagcttcgggcctccacacagaactagatgatatactcgatactataccctggtactgttgtattgtcgtcgtttcactcgtttgggcttgacaataaaggccttttctgtcctaatattatgtctcggaaactnnnnnnnnnnnnnnnnnnnnnnnnnnnnnnnnnnnnnnnnnnnnnnnnnnnnnnnnnnnnnnnnnnnnnnnnnnnnn

SEQ ID NO: 15635 - DNA, 242 bp, Setaria italica
  Peptide Sequence Number=SeqID_81609
gtgttctatttgctgaatttccaacagtggaaaccaagggttgttgtgcatagcagcataagtatattgcataaggggcatccgcacatctcaaaatcctacaccctgtgcttggtaacaaaagcccaatgaatcaaatgaaatcagaacagaggtctgaataaattcaggcttcagctgcaacctatcataccacagttgtgaaagatacagaatgaggaagagagctttaccaaagcaag

SEQ ID NO: 15636 - DNA, 261 bp, Setaria italica
  Peptide Sequence Number=SeqID_81610
cacacacgctagctgctagcttcctctgtacgtccgtcctctgctcggttgcttattccgccgccgcaggattcgcgctggttcaccggtccaacgagctgatcaccacccagtcgtacacggtggggctcctccgcccgacggccggcctccggccccctcggatgccttgggtttccggcgaagcctcctccagctatcagccttgggcgtcgtagctgcacaagacacaccaccaagtcagagggtcaggcgtggtat

SEQ ID NO: 15637 - DNA, 925 bp, Setaria italica
  Peptide Sequence Number=SeqID_81611
gcagaagaaagcagagccatacaagaccaataatagctttgcattgaacacagtactagtacattacatggaagcgcagccaatgaagcagggatggtgccggtaagattgttggatgacaggtcaagtgtctgcagcttcgagaggttggcaagggaggctggtatgtcaccgccaatacgattgtcatcaagcttgagaagggcaagcgacgagcagttggaaatctctggtggtatcttgcctgaaagctgattgtagctgaggtcaagctcctccaattcaccaaggcgtgagaggtcactcgggatggagccagtcagctggttgccactgatttcaagcacagtgaggttggaacaattggcgagctcggcaggaagctccccagaaatgcggttgtgcgaggctgagagcacttgaagcgatggcaggtacccatatgttgccgggatcgacccagtgaaagaattgccggagaggttgagatgcctcaggctccaaagactgctgaatccttcaggaacatccccagagaacgagttgtcggcaaacgacacatattgcagctgcggcaagccaaaaagctctgctgggacattgccagagaggttcttctgaccagagaggtcaagaactcgcaggttctgcaggctgccaatggtcgatggaatgcggccagagaaggcattgcggctcaaattcaaactctgaagagcagatagattaccaatggccggagggatctctccggtgaggttgttctcagataggtccaagaacgtcaggtttcccagctggaagagctcaccagaaaggctaccagtgagtctgttcctcggtatggacaatgcctcgagccatgacagattccccaagctcgtaggaatctggccggagaaagagttcccaccgagatagacct

SEQ ID NO: 15638 - DNA, 358 bp, Setaria italica
  Peptide Sequence Number=SeqID_81612
gcgagggacaacaagaagacgcgcatcatcccgcgccacgtgctcctggcgatccgcaacgacgaggagcttgggaagctgctggccggcgtcaccatcgcccacggcggcgttctccccaacatcaacccggtgctgctgcccaagaaggtggcggagaaggcggccagcggcggcgccaaggaggccaagtcgcccaagaagggcgccaagtcccccaagaaggcctagagaggctctccattagtgctatgctgttggatgttcctgtttggtagatcagaagccatgatggcttctgatgtagtgtacttactgtggctttgtgatctgtgcatctagctggaagaagaattca

SEQ ID NO: 15639 - DNA, 422 bp, Setaria italica
  Peptide Sequence Number=SeqID_81613
ctcgatcctcagctgcaggtgcctctggacctcgatctgctcctgcagcttcctctgcacctccctgtgcatccgtgccatgctcctggaagaatcgcagagaccttctttagcaccggctccatcgtcggcggtgaatgcaccatgcaactcggcgacggcgtcctcgtcgtactcgttctccgaggaggatgagcggtcgttggcgccctctccgttgtcgccgggtgaggtggtgatgaggcctcggctcaccgccagccggtacttctggaggtggctcttgaggtggtagagcgtgagctccggcacggccatcgccctcaggaccgacttgggcgtcgccttgtctgcgccgccgagctgggccacggcgagctcgaagcggccgtgcagctggctcgtccacctgagcctcggcc

SEQ ID NO: 15640 - DNA, 508 bp, Setaria italica
  Peptide Sequence Number=SeqID_81614
acaacaacacaccaccacgcatccacactctgcttcgcacagaccagcgcgcgctcttcccaattccgcaaggaccaccggtttgtccctccaatttggcgcggattcgggctcggaggcgcgtgatctctgaattccagcgaggaggtccaattcggtgtcaatttgcgcgaatcctgcctccccgatgctcgatctcgagtgccctggaagtgcattcgcaggattggcctgatcccgccgcgaattttggggatttactggccatctcgccgtgcaagaacaggggaattgggtggcaattggggaggattcgcggcagggggacgctgatccggtggcgagatgattgcggcggtgagccaggtgccggcaggctggggcgaagatgagatgtccgtgctgccgcggcacacaaaggtagtggtcaccggcaacaaccgcactaagtccgtgctcgtgggtttgcatggagtcgtcaagaaggccgtcggcctcggaggatggc

SEQ ID NO: 15641 - DNA, 1061 bp, Setaria italica
  misc_feature (1019)..(1061): n is a, c, g, or t
  Peptide Sequence Number=SeqID_81615
agaaagacggtaccgttacggtaccttaaagtaatagaattaggtactaatttgggtggcaattggggagattcgcgcagggggacgctgatccggtggcgagatgattgcggcggtgagccaggtgccggcaggctggggcgaagatgagatgtccgtgctgccgcggcacacaaaggtagtggtcaccggcaacaaccgcactaagtccgtgctcgtgggtttgcatggagtcgtcaagaaggccgtcggcctcggaggatggcattggctggttcttactaatggcatagaggtgaagctgcaaaggaatgctttaagtgtgattgaacctccgacaggcaatgaggatgatgataaattcgattgtgaaaatatgcaatggaatagttcagatatggcatccgatgacgcacaatcaccaaaggcaatgcggtcaaggagcagacagcataggggattccacagaaaatccctcagccgctcaatgtcatgtgactcccactccaagatgtctgtttcatcttccgcaagagctcacacgaaagttgacctgagcaagctagaactgactgcgctgtggagatattggcgccacttcaatctcgatgcaagtcctaatccgtccagggagcagttgatcgatgctgttcaaaggcacttcatgtcccagcaattggatgagtcacaggtcatcattggctttgttcaagctgcgaagaggctgaagacaactatgaaagtggcctgacagtgaggcctgaacttcaactaacagaatcaagataggatgcagcatgtttgatgaatgttgccgtgctatgtaatatatatgcatgaagtttcttagactcaggtggctaggttaatgcacaactagactatgttagcctcatctgatgtagatatgcagcattctgtctaaagatgtttcaagtttcaacctctagctcagttatttcctgctgactggacgtggattgaaatgacaagtttaaacaagttcttaaagtaaaaannnnnnnnnnnnnnnnnnnnnnnnnnnnnnnnnnnnnnnnnnn

SEQ ID NO: 15642 - DNA, 1513 bp, Setaria italica
  misc_feature (1483)..(1483): n is a, c, g, or t
  Peptide Sequence Number=SeqID_81616
cgacgggggtgctggtgcccgtcctgggccgctcggcgtcggcgctccggcccgacggggacgtcttcttcgccgtcaaggcgttcgcggccggggtcatcctcgccaccggcatggtgcacatcctgcccgccgcgttcgacgcgctcgcgcccccttgcgacgccggcagcggccgcggcaagggcgccgcgttccccttcgccgggctcgtcgccatgtgctccgccatggtcaccatgatggtcgactccgtggccgccggctactaccagcgctcgcacttccggaaggcgcgccccgtcgacgacgccgccgcggctggggcggacgaggaggccgacgccgagcacgccggccacgtgcacgtgcacacgcacgcgacgcacggccatgcccacgggcacgcgcacgaccacggcgggcacggccacggcgggccggcggccggcgcctcgcccgacgacgcctcctccttcgccgtgtcgatcaggcacagggtgatctctcaggttctggagctggggatcctggtgcactcggtgatcatcggcgtgtccctaggcgcgtcgctgaggccgtcgacgatcaggcctcttgttggagctctcagcttccaccagttcttcgaaggcataggcctcggtggctgcattgttcaggcgaagttcaaggttagagcgaccatgatcatggcgaccttcttctcgctcactgctcccatgggcatcgcgctgggaatcgcaatcacctccagctacagcaagcatagtgctaccgcccttgtcgtcgaaggggtcttcaacgctgctgcagcagggattttgatctacatgtccctggtggatctcctagcagcagatttcaataacccgaggctacaaaccaacatgaagcttcagctggcgacatacctcgccctcttcctcggcgcaggactgatgtccttgcttgccaaatgggcctagctaatcgatagacaaatcttcagagctgctgacgaatgtaattctgcgcattactcgtcgctaaagaccccgaacgcagtttatgatcgtcggggtatattttgttgtagcattactgcgcatcaatttcagtagaatctccatcaaccagaattggtgcacatagaggtgtaaagaaggcctgaaagtaaccaagttctagagttgaaggacattgctagacaagtcaaaaagttcaggacaaaatgtgaatcttgaacaatgttgttcttccatgaggatggaccaaaagaagtgcagaatacaaaaatgaagtggtggtggcgaatagttggtctggaaatctggaatgaccttttgtgctagaggtttgtagaagtgggtcgacttccttttggagttaaacggcgatgtacatagttgttagtcaggtccctcctttttgcagggttaaaatccatggaatttatccactgaagaatgagtttagacaaacaaaaaaaaaaaaaaaaaanaaaaaaaaaactaaagaagaactagaaccg

SEQ ID NO: 15643 - DNA, 310 bp, Setaria italica
  Peptide Sequence Number=SeqID_81617
cagtgaatctatctcatcaacaaatatgacagcaggttgacgacaactggccacaccaaaaagtgcccgaactagcttttcaccctcaccaatctgcagcagcaaaaaaatttaagatcactatcaacctccaaacatagcctaccccaacttgcttgggaataaaaggcttttttgttgttgtagcaataccaaaacatgattattattcccctttactattgtgtggggatgctgaagctatgccataccgtggatgtggaactttatttaccttaacctttttttctcgaacctgcaggagagctgc

SEQ ID NO: 15644 - DNA, 1408 bp, Setaria italica
  misc_feature (1)..(66): n is a, c, g, or t
  Peptide Sequence Number=SeqID_81618
nnnnnnnnnnnnnnnnnnnnnnnnnnnnnnnnnnnnnnnnnnnnnnnnnnnnnnnnnnnnnnnnnncttgctacaattcttctctatttaaaatataacttttaaaataatcttaagaatgctaggagctgatattgctgttacaaacacattagcgaaccacatgagcttggggatcggatgtgggtaagctctcatctatataaatttcaacctgaactatttgtagtcgtagataacctacaaccaagcttttcccatcgcagttcacacactttgggccaggagtgttgtggatatcatattatgagtgtagagcactgaagtcctcctgtcgtgatgacttagttttacctgttgatgtcatcctacaaactacattgataggctgccgaattgcttgttccattcttcataagtccccagctcgctggaagaaacggaaggtctgacctcctgcatagcattctcgaaatccttcagcatcacaggtcgcatatcctccttgctgagcttcgtgatttcaacacccctttgaagagcctcccttagtggtcccattgacgcatctttcactaagtttttcatgtcggatcctgagtaaccttctgttaatttgcagatggcacttgtttcttcttcagagagcatgaaaagtccatccttctccaatagattgcgaattatccaagcccgtgcttcttctgaaggaagagggatgtatagacgttttgtgagacgcctgcgcgctgcttcatccagttcctgaggtctgtttgttgctcctataagtaagatttgctcatttccactgtcgaaaccttccatctcaattagaaactgtgttttcaacctcctgcttgattcatgttcaccatctgatttgcgctgagacaacagtgaatctatctcatcaacaaatatgacagcaggttgacgacaactggccacaccaaaaagtgcccgaactagcttttcaccctcaccaatccatttgcttgtcagtgaactagcagatatgtagaaaaatgttgcctttgcttcaccagctattgctttcccaatcatggttttccctgtcccaggaggtccaaacaatagtagaccccttccaggagaccgacagccacggaatatgtcaggacgtagaagtggccatatcaccatctccgtcacacactttttcgcatgttccagaccagctatgtcgttccagcgaacattaggatctctatccattatttcattactgacatgttcaataaggcggggttccagattcctcagcttctcaggaagttcaccatcagggccacatagcatttcaatacatttccttgttgaatcttccattgaatcgtcactttttccagtgacccgtgagattgttgtacctgatcctccatta

SEQ ID NO: 15645 - DNA, 526 bp, Setaria italica
  Peptide Sequence Number=SeqID_81619
ggtacggatccccttgaatccattgactcgggtttgcttgtcattgagaagttttacgaagtctttagctagattatctttgaggtaaatgtcccttagtcacaaattctggcagcaggcttctgtcctgctgtaacaacgttatctggatatcaattttgtgcttctagcatcataatgtagaatccattctgttccatctggaatgcatgttatgagctgaggatgctctttgcacttcacccttcattgtaactcaattgttgcaccaattggactgcactagagcgtaacttctgcattatgtgctaaagtgctaatgtgctatcttttaaacctgtttcagtctctaggcatatggttataccttgttcaaataataggaccaatatgtgggcgctggagatatctgagagtgctgtgtcaaatggaggatcttgagtagaactgtagaagttgaagtacatttagttacctcgcaaatttagggatttaatacttgcttgtaagtgtcctattcagtctt

SEQ ID NO: 15646 - DNA, 1512 bp, Setaria italica
  Peptide Sequence Number=SeqID_81620
ggcttatccacccatctccctcctgctatccccacctcctcctatacccttccacacagcctcaccggggaagtccatgcccctcctccccaccatggcctccccattctccacctccgccgcgagggccctgctcccagcctccacctcccgccctctctccatcgccgccgcagcctcctcagggcgcattccggcgtccaggaaggggctggggttccgccgcggccggttcaccgtctgcaatgtcgccgcccccaccgccgccgagcaggaggcgaaagcgtcgagcgccaaggagagccagcgccccgtgtacccgttcgcggcgatcgtggggcaggacgagatgaagctctgcctgctgctcaacgtcatcgaccccaagatcggcggcgtcatgatcatgggcgacaggggcaccggcaagtccaccaccgtgcgctccctcgtcgacctcctcccgaacatccgcgtcgtcgtcggcgaccccttcaactccgacccggacgacccggaggtcatgggccccgaggtccgcgagcgggtcctccagggggacaccggactccccgtcaccaccgccaagatcaccatggtcgacctgcccctcggcgccaccgaggaccgcgtctgcggcaccatcgacatcgagaaggcgctcaccgagggcgtcaaggccttcgagccgggcctgctcgccaaggccaacagggggatactctacgtcgacgaggtcaatctgttggatgaccatctcgtggatgtgctgctggactctgccgcgtcggggtggaacacggtggagagggagggtatctccatttcccaccctgcccggttcatcctcatcggctccggtaacccggaggaaggggagctccggccgcagctgctggacaggttcgggatgcacgcgcaggttggtaccgtcagggacgcagagctgagggtgaaaatcgtggaagagagggctcgcttcgacagagacccgaaggcgttccgtgactcctacaaagaggagcaggagaagctccaggaccagatctcatccgctcggtctaaccttggtgccgtgcagattgaccatgacctccgtgtcaagatatccaaggtgtgctctgagttgaatgttgatgggctcagaggtgatattgtcacaaatagggctgccaaggcgctggcctcattgaaaggaagggacaaggtcacagtggaggacattgctactgtcattccaaactgcttgaggcatcgactccggaaggatccccttgaatccattgactcgggtttgcttgtcattgagaagttttacgaagtctttagctagattatctttgaggtaaatgtcccttagtcacaaattctggcagcaggcttctgtcctgctgtaacaacgttatctggatatcaattttgtgcttctagcatcataatgtagaatccattctgttcccatctaaacgctctagtgcagtccaattggtgcaacaattgagttacaatgaa

SEQ ID NO: 15647 - DNA, 410 bp, Setaria italica
  Peptide Sequence Number=SeqID_81621
ctggaagtatttcttgtgtcatatttcttgttccgtcccaatcgcttaataagcttttatggtggaatacggtaatttaggaggtgaatgcaggaagagggagttgattctgttgtacaataaaaccctccagcatttctgaatactgtgcttgctttgcttaagtttgtatagcgttgtgcatattcggctgctattctttttaattcttaatttcttgttttgatctcttccatttacctcgttacagcaccatttgtccatttccggtctacttatgctatgtactaatcaaatcaacccctttttggtgtgactaatcatgtaatctaaaagagccaaaatgtgtgatctgtatgcacatgtctgcatttattaagagtatctttctaccttggtgacgatatgct

SEQ ID NO: 15648 - DNA, 371 bp, Setaria italica
  Peptide Sequence Number=SeqID_81622
ttgctgaggttgatctggccggcgccgtcgtagccggcctggctgaactggaaggtcgccgggtcgagcaccttgttcacgtcgtaccggctgccgttggccatgaacacgtgggaggagatgatggggaagcgcttggcgccgtacgcgtcggtccagtaggccacgggcacgatcacgtagacgatgaggaagaagccggccatgatgttggcgatggcgaacgccggcgtcgacagcggcgtgcccaggaacccggcgacggtggcccagtccaggccgaaggagcccacgccgaggccgtacacgcccgagccgatctgctgcgcggtgaccgagttcttccataccaggcacaccagggagatggg

SEQ ID NO: 15649 - DNA, 258 bp, Setaria italica
  Peptide Sequence Number=SeqID_81623
cgaaagccatttttaccgcctcgctacgcggatttgctacaaatgcgcagttttttcacgcaaactgtgcgcgcttgtggtgttttgtcgcagcccgaggacgagctggtgagcttgctgcagaacctggaagacatggacgtcacctacaaggcgctgcaggagactgacatcggccggcatgtgaatggtctgcgcaagcacccctctgccgaagtcaggcgactggtgaagcagctcattaggaagtggaaggaa

SEQ ID NO: 15650 - DNA, 728 bp, Setaria italica
  Peptide Sequence Number=SeqID_81624
tgcaacttgaaggaagtggaaggagatagtggatgactgggtgcgcctgcacaattccggtggtgacggtggctcctcgatcatagctgatggcgactcccctgagaaaatccaaggcaggagccaccaaagccctcgggtaactgttcttgcttagaaattgatccaaaattctgcaccacaagcttgtttagtgattcccctgtttgtgtaaagcttctttttggtaagaagcatcgtgcctggaatattcccctctattattcccctgttagtttaccaacctatcacagctctgaaaagggtgattatccatgcttttctcatgcagagtaaactactactagtagtaacgggcagagccagttgctattagctatagtgacacctctgtattttattagagcatgtacttttacctcctcttcattgacaactctgtaacaatgacaccttcattaattcaaccttccaggtttcagggtttcagtattctcccagtccacagaggcataatggctcaacttcagagagagctaacaacggatttgagccaacaatggatatgaagcgcagggcaagcccagtacccgcgcatcataactccaggcagatgaacaacaaccatcattctactcctatgccatctgctccagctaaagtgactagggaccacaaggacagtcttctggaccttgataggcttgattctgcaaggaagaggctcc

SEQ ID NO: 15651 - DNA, 933 bp, Setaria italica
  Peptide Sequence Number=SeqID_81625
acggacggacggggactaggaacgaaggaaggaacggcgaggaggcggcgccggtctcgcccgaggcggagggtgacgcagcgggagccggtgctgcggaggaggccgaggagctcggcgcgggtgccggcggcgagcccgggctggagagcaagatcgtggccatcagggacttcttggaggaccccgaccagcccgaggacgagctggtgagcttgctgcagaacctggaagacatggacgtcacctacaaggcgctgcaggagactgacatcggccggcatgtgaatggtctgcgcaagcacccctctgccgaagtcaggcgactggtgaagcagctcattaggaagtggaaggagatagtggatgactgggtgcgcctgcacaattccggtggtgacggtggctcctcgatcatagctgatggcgactcccctgagaaaatccaaggcaggagccaccaaagccctcgggtttcagggtttcagtattctcccagtccacagaggcataatggctcaacttcagagagagctaacaacggatttgagccaacaatggatatgaagcgcagggcaagcccagtacccgcgcatcataactccaggcagatgaacaacaaccatcattctactcctatgccatctgctccagctaaagtgactagggaccacaaggacagtcttctggaccttgataggcttgattctgcaaggaagaggctccaggagaattatcaggaagcacaaaatgccaaaaagcagaggacaatccaagtgatggacatcaacgacataccaaagccgaagaacagaaatgctttcatccgcaagaacggcagcggtgggctccctgcaaggcaccgataacgttacctagccttcacctgcttgacgcctcgactcgcgccactcatgcaaaactttttgtcta

SEQ ID NO: 15652 - DNA, 993 bp, Setaria italica
  Peptide Sequence Number=SeqID_81626
ggacacaatcacaccacagggagctgtagagggcggagagcagaggccggcggagccatggcgaccactctctcgttatcttctcccctcttcctcgcagctccggccagagctagagatgtggccttgtgcggagtgccttcagctagtacatcatggagcactgcaaatgctctaagcaagggctacatggttagagtacatgagcgggggaaacagcgacgcatggcaatagtatccgtgattggaagaaagtcaacgactagagaaacagttgtccctgaccccgactataggttaccaattgctatacttgggattgctggtgcttttgcatatgcagacaatcttctagctgctgcacctgtaggactgctgggactgctgcttttgttccagactacaagagtgaggttcgtctttgataatgaggccctggaggtgaaagttggagaccagttgcaggagtcaggtgaaaatgtgtttgttggtggcaagaaccgttggaagtactcaacgttcataaattgggagctatggtggccacaatttcctatcttggtttacttcaaagagagccaaacaaaacctgaggggcagatccacttcttcccagtgatattcaatggccgacaactctatgatgtcatggtggagcgtgctggaccctcaaagacgagcggccctaagtagaagtagtgctgatcttccctcaagatgatgagctgagttccatggcgtgctgctgtggcaccagttgacgctccaggaagcaaaggctccgtgcctttttcgacctacctgatgtgtggtcctatgcattaccttcgagataaaatgaaggatgaatggatgatgtattagctgtagatatattagaaactgatgtaatgcaacatcaactactcatctgaggcaatacattggtgtgtacttggaattatattcagatgctaaccaaaaaaaaaaaaaaacaagaagacctagaccaaa

SEQ ID NO: 15653 - DNA, 940 bp, Setaria italica
  Peptide Sequence Number=SeqID_81627
taattgttcgatatctagtatctcagtgactaaaatcattcaatgtttgaaaaactgttcttaactgttaacttattaaacagtatggatttcagagtagtactaactcacatataaccaggaatcatattcttccgaatgttagtcatgacaagctcagcttgctcggcttgtagctggaaaatccttctaccttcatggtagctgctgctgaatgcggtgcgagaaatgacgtctccagtgaggttctgcagctcaggccaaacgtccagctccaacaaagcgtcggagccgagggattcggaccatctactgaccagctcttcgcagcacgcagaaaacgctggcaacatgcgcttgagcttctcaagatggaatgcaggattgaggatcctcctgtgcttgacccatttctcaccctcatgggtcgccacgccgtcgcccagcatcttggacagcgccgggaacttgagcttctcgaagtggccgaacttgttggacaacacgtccctgcttagctcaggatcgacgatggtcaccttggggttggggccgaaccaggacatgctcatcttgccgtgctcctggacaatgttgtggacgaacggcatgacgcggtgtgcgatatcatggcaccgcagcggcaaaggcttcgaccaggcctccttggccagccggccgtactccttgaggtcgccggtgaggaagcggtaggacgtgccgcggatgccctgagcacgcagcgcccgctcgagccgccgaggccgccaccacatctggtgcagcagcccgccgaccttccacaggagcaccagggccaggagacctccgagcaggatgctccacggcaccgaagccgcagcggcaagcggcgctccaagaaccattgctttgttgacgaccagtgggctgagcgaagacagagtttgtaagctaaaat

SEQ ID NO: 15654 - DNA, 466 bp, Setaria italica
  Peptide Sequence Number=SeqID_81628
taaaaactaattagttaaaaaaacatgtaacaagaagagggagatccatacagaacgtcttaggatattttcagttcatggcctaccatgtgaatgtgataggagaaagaagttgctgctctcagtcacgagaaacagaaatgagggttgagccgcctgtacgctgtccaggctgatgacagagcatgcatggtccaagtttctcataaatacagccgggcatgagctgtgtgtgtatgcaatgcagttcaggaaaccatgtgatgctttcagaggatgagcgcgcagaagttaaggtggttgctgaggaggaacagtgatctggaacagtgatctgtggtgtgttgatgcctactctgatggagaggatggtttctgtctttttagttttgatgagaaagaaatggtgattctgttttcatgtgatgaacaggaaaaggtgactggaaaatgtgattctgtgaca

SEQ ID NO: 15655 - DNA, 1221 bp, Setaria italica
  Peptide Sequence Number=SeqID_81629
gaagctgcaggagaccttcaacgccgcgccgggcacgctccgcctcttcttccacgactgcttcgtcaggggctgcgacgcgtcggtgctgctgtcgggccccgacgacgagcacagcgccggcgccgacacgacgctgtccccggacgcgctggacctcatcacccgcgccaaggccgccgtcgacggcgacgcgcagtgcgccaacaaggtctcctgcgccgacatcctcgccctcgccgcccgcgacgtcgtctcccagacgggcgggccgtactatcaggtggagctggggcggcttgacggcaaggtgggcacgcgcgccgtggtgaagcacagcctccccggcgccggcttcgacctggaccagctcaacaccctcttcgccgccaacggcctcacccagaccgacatgatcgcgctctcaggtgggcacacgatcggcgtgacgcactgcgacaagttcgtgcggcggctgtacccgttcaagggctcccgaggcggcgccggcggtgcggggccgccgatgaacctctacttcctgcggcagatgcggcagacgtgcccgctcaactacagcccgtcggcgttcgcgatgctggacgccgtgacgccgcgcaagttcgacaacggctactaccagacgctgcagcagatgaagggcctgctcgcctccgaccaggtcctcttcgccgaccgccgctcccgcgccaccgtcaactacttcgccgcaaaccagaccgccttcttcgacgccttcgtcgccgccatggccaagctcggccgcgtcggcgtcaagaccggatccgatggcgagatccgccgggtctgcaccaaggtcaactagcactactcgtcacttcgcccgaggttgatctgccttcaccgtacattatacctgggtagtagagggttaagatgaatgtgaatgtccatgtccatgccaagtcggagtccatcgatcacagattcacagtcacagtgtatgaattcgttaatccgccgattctttccttgattgtgtagtaaaaaaacatgtaacaagaagagggagatccatacagaacgtcttaggatattttcagttcatggcctaccatgtgaatgtgataggagaaagaaggtaccatactcactacatcgatgtaaatgctactgtttggtccagttgatcaaagtatatgcccaccttcctttttgaacaaaaaaaattaaaaaaaa

SEQ ID NO: 15656 - DNA, 2182 bp, Setaria italica
  Peptide Sequence Number=SeqID_81630
cccgcggccgccaccagggccatcccgccctacgggaagcgggcgggcttcgtgccgcgccggccggaggacttcggggatggcggcgccttcccggagatccacgtcgctcagtacccgctcggcatgggccgccgcgacgacaagggcggttccaagatcctcgcgctcacggtcgacgcgcacggcagcgtcgctttcgacgccgtcgtcaagcagggcgagaacgccggtaagatcgtctactccaagcacagcgacctcgtgccgaagatcgccacgtccgattcccaggcgccggtcgacggcgacgaggagcagaaggagattgaggagaccacagagcgaacgaaggctgccttggagaaggttgtcaacgtacgcctctcagctgctcagcccaagaatgtgcccacgcatgattctgagtccaagtttatcaagtataagccgtcccagcaatccgcggccttcaattcaggcgcaaaggagaggatcattaggatgtcagagatggcagtggatcctcttgagccgccaaagttcaagcacaagcgggtgcctcgggcgtctgggtcaccacctgtgccggtgatgcactcgccaccacggccagttacagtgaaggatcagcaggattggaagatcccgccatgcatttcgaattggaaaaatccaaaggggtacacaattccacttgataagaggttggcagctgacggaagggggctgcaggaggtgcagattaatgataactttgcaaaactttctgaagcattgtatgtcgcagagcagaaggcgagggaggcagtacagatgcgctccaaggttcagagggaactacagctgaaggagaaggagaggaaggagcaagagctgagggctcttgcccagaaggcacgcatggagaggactggtggcccacctgcaccatcaggtgtgcctactggtggcagcaggggagcggttgaggctatcgatgaagatatggatatggagcaaccacgtgaaccacgtgagcagcgcagggagagtagagaagagagggaagcgaggatcgagcgtgatagaatccgtgaggagcgcagacgcgagagggagcgggagaggaggctagaagccaaggatgctgcaatgggcaagaagagtaagatcacgagagacagagatcgtgacatcagtgagaagattgctctgggtatggcaagcactggtggtgccaaaggtggtgaggtcatgtacgaccagcggctgttcaaccaggacaaggggatggactctgggtttgccactgatgatcagtacaacatctactctaaggggctcttcacagcgcagtccacgatgtctacgttgtacaggcctaagaaagatggtgattctgatgtgtatggtgatgcggatgaacagttggagaaggttatgaagactgagaggttcaagcctgacaagggtttcactggtgcttcagagaggactggcaagcgagacaggcctgtggagttcgataagcaggaggagaatgatcccttcggtctggatcagttcttgactgaggtgaagaagggaaagaaagccgtggagaagattggaggtggaggcaccatgaaggcaagtggtgggtcctcaatgagggatgactatgatggaggatctgggaggtcccgcattaattttgaaagggggcgttaaggtatttgctcttcatgatatttcaatgccatgtaagaaggtgaactcttttgataggaaagggcttcatgtctaagctacagcaggtcatgtccctgccgtactttcagtggttgtgttaaagagtgtactctttagatcctatgatccttatgtatttgtgtatcagttaatgatgggatctatcatcttctttacccatattatgtaagcatacgtctctgttgaactttcaagcggaatgaattttaaatacatcaatcctgccaagcggtaggaactttataaatacataaattatactgcttgtgggatatggaagaactcaacatacctatttgttggtctgtcttggaaggtgaattcatgctgatgctgcgaagattatggcttaacaatttttttgagggttgagatggatctgatgttcatagatgtaccgaataggatttcatcttgggtgttttggtcatctgtaatcatcgagtcg

SEQ ID NO: 15657 - DNA, 500 bp, Setaria italica
  Peptide Sequence Number=SeqID_81631
agataacttggccacgcgggccccaccgctcagctcctccagttcccatcggagttgccgtagccgccggtgaagaagttgtaggcgaaggtgaagttcttgaggcgcggcagctcgcaaatccccggcggtatcgcgccggtgagccggttgtgcgcgacgtccagctgctccagcttcctcatgagggccacctccggcggcagcgggcccgcgagctcgttgaagctgacgtcgagcaccgtgagctcccgcagcaggccgatctccggcgggaagcaggagctgagcccgttgttgatgagcaggatctcgttgagcgtgccggacatgttggcgacgctggccgggaggcatccgccgaagctgttgtgcgcgaggacgacgacggaggccggcgagttgccgaagttgtccgggagctggaagcggaggcggttgtggttgaggaagatggcgtcgagcgggcggtcgaagaggcggggcggcacgggcgccct

SEQ ID NO: 15658 - DNA, 1623 bp, Setaria italica
  misc_feature (26)..(26): n is a, c, g, or t
  Peptide Sequence Number=SeqID_81632
tccatcaccaaccatcgatctccaanccttttttcccatcaccatgacgcaaacagacagaccaatgcaaaaggcaagagcgatggtatatgcaccatataatcttctatatatgcgggtagctatcaatcaagaacactagaaatctaagcacaacaatgactgaccacgtacacctgtgacagtggactctgctgtgtctccatccagcagggcggcgaaggaatgtgaaagtgataacgcctctccgctgaacgaatcatcggtaatgtgagggtggcggcggcgatgcgtatggcatcgggtacactggtggcaggggcccggggtataccggtggcggcggcggcaatggcggaacagggacgaagggcttgcactggaacgcggcgcagtcgaccggcgggagcgagtagaacgctgcgcactgctgcggcgtgcgctgcgcggggcggttgggcaggcagttccgcctgtcgccgtcgggcgggacgacgcgcgcgcaggacggcggctcgccggtgaagtagttgtcggagacggtgaagttcttgagccgcgggagcgcgcagatggcctccgggatggcccccgagaggtggttgtgcgcgacgtcgagctgctccaccttccgcatcccggccacctgctgcggcagcgggccgacgagcgcgttgaagctgacgtcgaagacggtcacctcccggagcagcccgacctcggggggaacgcaggagtcgagcccgttgttgatgaggaggatctcgttgagcgtgccggacatgttcccgaggctggccgggaggcagccgccgaagctgttgtcggcgagcacgatgacagaggccggcgagttgccgaagttgtccgggagcggggagcgcaggcggttgtggttgaggaagatggcgtcgagcgggcggtcgaagagctcccgcgggatggggccctcgaagtcgttgaagcggaggtcgaggaacttgagcgccgggaggtccagcacgacggcggggaacgcgccgacgaggcggttgttgctgaggtcgagctcgacgaggaggcggaggcggcggagcgcggcggggacgaggccgcagaagcggttggagttgaggtgcagcagcgcgaggtcggtgaggaggccgagctccgaggggaggtaccccgcgatgtcgccgtggttgaggtcgatgcccgcgacggcgagctccccggcgccgggctccccctgcggcagcggcgcgcagaagacgcccctgtagctgcagacccccgggcccacccagtcggcggtgaagttgcgggggtcggagaagatggcctgctgcttccacgtctgcagcgcgacgtaggcgtcccgcagccgctggctcgggaacctccacgacgggtccactaccaccgccagctccgcccccgcttgagccgccccctcccccaccgcctcgacggcggtggcgaggcagcagaggacaaacagcagcagcagcaacgccttcctcatcgtctcaccacgcgctcataccaccaaagcgaagccaacaaaggggaaggaagcggaatccggctgaggaacggaggaggcagctcggcgcaagcaatggcgggggggattatggcggc

SEQ ID NO: 15659 - DNA, 417 bp, Setaria italica
  Peptide Sequence Number=SeqID_81633
ttttttttttttttttttgttaatcagggacaacaggggagaaactttgatcactcgaatccatgattactagagagtaacaaatgctagcagtaggcatacaaaacgcaagtttaaccaaaacttagcatgccacgcatgactgtccagtagactccaaaccaacgagaaataacacttgggaattggtatcccagcctagctcaccaagaactgcaccaattatatatacgcacatcgggctatcagagagacataacactcgggatcgaatcgaccgacgccacggccaggctcgcctcgccgtgctctcagaagtagcggcggcagcgcggcggggcctgcaggaaggcgatgaacatcaaggcgacgacggcgacgaaggccagcgcgatgaggatgttctcgtcgacgggg

SEQ ID NO: 15660 - DNA, 292 bp, Setaria italica
  Peptide Sequence Number=SeqID_81634
ggctaataggtacctctgttttttgttgatgactgacagctgactcaaatactattgttcgtcttggcaggcatcaaggtgtggtgtcgaatgtcgtcagtggcatgctgtgtattcaattagataatggcagatctgagaacgtggagctgggaaaacaggccattcgcttgatagctggatcaaagggcaggaagcgatgaagccttcccttactgcagcttaggccatgttctcactcaacacattgccatgaacgcagcagcagagtcttggcagccgctgaagactc

SEQ ID NO: 15661 - DNA, 2548 bp, Setaria italica
  Peptide Sequence Number=SeqID_81635
aatgggaccgagaggatcaaggaaatgcttctgtcaaggttatgtgccgtttatgctatacaggagaaaacgaaggcagcacaaaagctgccaaaatgcttccatgtaagctctgcagcaaaagataccatagacactgtttaaaaagctggggggagaatagagatcttttccactggaactcatgggtctgttcgtcctgccgcaattgtgaggtatgccggcgacctggtgatcccaataagttgatgttctgtaaaaggtgtgatggtgcttatcactgttactgtcagcaaccatcacacaagaatgttaccaatggaccttatttatgtccaaaacatacaaggtgccacagctgtggatctggtgtgccaggtagtggccatagcacaaggtggtttttggggtacacatgttgtgatgcttgtggacgattgtttgtgaaaggaaactactgcccgatttgcttgaaggtttatagagactctgaagtgatacctatggtttgctgcgatgtttgtgaaaagtgggtgcatattgagtgtgatggcatcagcgaggaaaagtaccagcagttccaagctgaccaaaaccttcagtacacatgtgcagcatgtcgtggcgaatgctcccagatcagggacactgaagatgcaattcgggagctttggaagaggagggatgttgtcgatcatgaacttatggttagtttgcgggctgctgctgcactaccttctcttgaagatgtctcaccatcttatccaaactcggatgatgagaaacctggtgcatatgtattgaaaaatgatggtagaaatactctaaagttttcattgaaaagcaacagcagtaagcctccaccagatacacctgagcaagagaagattgttttgaagagctctgggtcgaataagaaggcatccaaaaagaaaggtggtcagggtaataaaacagacgacaggcatgatgacatatttttggagagaaggcatgatgccaaatcatcaaatagccgtttgggagatcaaagtatggatggtaatcatgataggagtccttttaagaatgatagcaattcatatatttcgtcttcaactcgaagttcagaaaagaatttgaaatctccatctatgaaagctgtggcaaacaatgctgatatgatacccaaagtcaagattaaaggcagtaaggtttcaagtttgcattttaaagattctggtgaagaaaatactcccaagaatgatactgggaaaggtacgaagttggttatccatcttggttcacggcacaaaactaggagtggctctcctaagtctgaactgtccaattctcaaagagagcaagatctgggttcaatacatggagggaaaatagatgtcacaagccagatgaaaagctcaaggagtgagataaaagagaaaagtgtaatgaagctagttagagagactgagacacagcaaagaaatagccttttgggagatcttggtacctcaaaaaagcatgcaaccggaaaaaggagcaatgctttaatatcaggaatggaaaatgcaaacgaaactggtacaagaaacagatcatttggacttaaacaatctcattccagtcaggtggatgagaaccagggaactactgctttattttcatctgactcttctgacaacttgaagccatctttgttgaaacttaaatttaagcgtccccatttggagcagctaaacacccaggcatctcagccagaggagctggccacctggacttctcagcaagaggagcagttaaatgttgctaaaggccagagatcaaagaggaagagaccttcaatggagaaggctgatgatttagatggaaagactgcagccaagaggcatctgcagagcactgatgaagttatggatgcaaactggatactgcgcaagttgggcaaggatgcaattggaaagaggattgaggtccatcaagcttctgatggccaatggcatcaaggtgtggtgtcgaatgtcgtcagtggcatgctgtgtattcaattagataatggcagatctgagaacgtggagctgggaaaacaggccattcgcttgatagctggatcaaagggcaggaagcgatgaagccttcccttactgcagcttaggccatgttctcactcaacacattgccatgaacgcagcagcagagtcttggcagccgctgaagactctgcgaccgctgctgttcctggcggattctctgcatcaccacctttgctgactggaggagacatggagcgcaacattgcctgttggggcccatgtttcgctagcctagcatgtaacagactttttagttttcgtgttcgtgctgttcaaagcccattggcttccattagattctagtagggtagggaaaaccggagaggttttagatcaccatggtgcccatggttgtaatagcagcgggtagcgccgtgtcaggattgtcgtgtacatgtaactgtcggatgattttgcgaataattcgttggtgaattaggacgttaaattagttagaaccggtttagttttagaaa

SEQ ID NO: 15662 - DNA, 450 bp, Setaria italica
  Peptide Sequence Number=SeqID_81636
tcttcaccagccggccccgccgccgaatggcgccccctcggcgctgatccgatcccgccccgccgccgacacgacgccccggacgcgagcccgccacatggattccgcacggagctggctccagaagctgcagccgcgggacaaggaccgggaccggggcggcaagccggcggggtcgcccaccggcgggtccgcgaggatgtccgccgcggctggggcgggaaccggggaggaggcgctgtccagcgccaccaagcagaaggtggcggcggccaagcagtacatcgagaaccactacaagacgcagatgaagtcgctccaggagcgcaaggagaggcgttggatgttggagaggaagctagcagatgccgatgtatctgaagaggagcaaaataatatcctgaaagatttagaaaaaaggagacagaatacatgcgcctacgaaggcat

SEQ ID NO: 15663 - DNA, 273 bp, Setaria italica
  Peptide Sequence Number=SeqID_81637
ttctctactgcgggatctgccacaccgaccttcacatcatcaagaaccactggggcaactccatgtaccccgtcgtccccgggtaatccagttcgccgccggatgtcgcaaacgatgcgctgcaaaatttgattagagccaagaacagtaacggattcaaggaacgcccttcgaattaatttccccgttggttggcgcgcgcgcacaggcacgagatcgtcggcgtggtgaccggcgtcggcggcggcgtgacgaggttcaagcccggcgacg

SEQ ID NO: 15664 - DNA, 845 bp, Setaria italica
  Peptide Sequence Number=SeqID_81638
ttttttttttttttttttttagttatcgaatatgaacatatttctgaacatcatagctcggacgtgcaaaacaaccgatcgtgtagttcgttcgtctagcctagtctctcatcgaattggcgaccttgacgagcttgatgcataatgaaatatgaacagcgacgatggcgccttcggcatgaaggtttctttctgaccacaactcttcttcaatctgcaataatctacaagctcgacagcaaaatttgcaagtacaaacagccaccgatgcatcaacaccgcggcgtcgtcacggttctctatcaacaatttgcgccagcgaaacacgcacgcacgctacgacgacgagccggcgggcacggcctcgaagagcttggcgaagtagaactgcgtggagatgaagccccggttggcgacgcgccagccggcctcgcggagcgcgtcctcgatgtcccgctcggcgtgcaggtaggcgcgcgtggccttggacgggcccgggaacagctcgccgacgcgcttgaggaagtcgaagtagagcgtcctgggcgcgaagctgatgagcagccgcttctccgccagcgacgccaggtgcttgatcatggcgcgcgcctcctcccgcgggtagtggatgagcacgtccaggcacaccaccacgtcgtaccgcccctgcaggctctccaggtcgcggacctcgaaccgcggcatgcggaacggggaccccgccggctgcgacgccagcgccaactgcgcctgccgctgcgcctcggagaccatggcggccgagatgtctgaggctagcacgtctgcgccctcggcggcgagcgggatggcgagggaccccgtcc

SEQ ID NO: 15665 - DNA, 535 bp, Setaria italica
  Peptide Sequence Number=SeqID_81639
aaagaaaccgaaaccggtaccagaacgccgccggtgacggatcccagaagcagcgcgattctttcgccgcccagaacgccggcggcggcgcgggcatccggagtttgcctgcggatgagcaggagaccaagacggcaaacgccaccgccttgcccgctgccgacactgaccacgccgcgctggcctcggcattcttcggcgctcagaatggggaaaacatggacatgctcaacatggcattcctcaaaggcatggaggaggccaagaagttcttgcccaccaacaacagcctcctcatggatctcgaggccaactccgggcaatctacagacagcaagccggtcactggctttactgctgcccgagtgaaggaggaggaggtggtggatgggatgttactgtttggaggaggaaccactaatggcaggggccgcaagaaccgctacacccaagaggatttggaggccgagacaggcagaagcagcaagctgatgatgccggaacaggaagaaactggcgccagtgagctgtacag

SEQ ID NO: 15666 - DNA, 292 bp, Setaria italica
  Peptide Sequence Number=SeqID_81640
ttttaggttggtttgggtagtccactagcacccgccgcgcttctgaaatacgagtgaagtggtggtagggagggagggaatctaggatcgcatctctgataccaggatgttagcaatcgaattagagggaagggattgagcggcgttggagaagaagatcaggaagaacaaggaaggttcatatagaacatagttctgagttgttacaacgatgcgctgttcttcgccgcctgttatcctgagtagagcaactcacgcacgcaacaccttacatggccaactccactctgag

SEQ ID NO: 15667 - DNA, 367 bp, Setaria italica
  Peptide Sequence Number=SeqID_81641
cttgaggtttgacttgttattgttgtagtaactctcatacagatcatgtggagcctcaagttactacaacaataacaagtcaaacctcaagttgtatgttagaagagtttttatctctgatgaatttgatgacctccttccgaagtatctcaactttttgaagggtattgttgattcagacacactgcccctaaatgtatcacgagaaatgcttcaacaacatagcagtctgaagaccatcaagaagaaactgatccgcaaagctcttgacatgattaggaaaattgctgaagaagatcctgatgagtacagcaacaaagataagacagatgaaagagaaaaagtgaaaatggaaggagaagaaggg

SEQ ID NO: 15668 - DNA, 814 bp, Setaria italica
  Peptide Sequence Number=SeqID_81642
cagagggaagccgagtcaatctcggcgtcagttgacaggccatgaggaacagcaccaagcttctcctctaccttcggtgggttggccaagtcatcactgctctcctcagcattcacttgtagcttcttagctggatcggggagggtcgtgaggaggaagaggagcagcttggtgctgttcctcatggcctgtcaactgacgccgaggttgcccagagggaatccgagtcaatctctaggaagactctcaggagctcggctgaaaagttccggccgccgtggctagcctgcgccaccgccccgcttccgcccttccgccgccctccgggagccgaaaggtgagtctttttctccgccgttctcgtgttccccctcctttccagtgctcgctaaagttaatcgaacgcatttatcgagtggcgggcaacgcctcccgtccgcatgactccccggtgcgccacggtctttcgctgcctccggtgtgcctggtgagccccggcggcgggcgcttagggagggaggggagaaggagaggcggcatcgcggcctcggttgcgaaggatgggaatagcgtacgggctggggatggtgggtgggaatggatcttgaatgtcaatatgagctcaagtgctcaaaattgaagtgttggcgtccagaaggtaggaattccgtctgttcctccttgggggcagaagctttctatttgattttcttcttatttccaagagtttttaccaatacctaaaccaaaacgcatgtttaattttgtaatctggggtgcgataacttgtagcttccgttcatgtccaaagaag

SEQ ID NO: 15669 - DNA, 1010 bp, Setaria italica
  misc_feature (964)..(1010): n is a, c, g, or t
  Peptide Sequence Number=SeqID_81643
acagtacaggaagaagatcacaagtttgtccaaagtaagccacaagaattttatgaatttgcttggctactgcgaggaagagcatccatttaccagagtgatggtatttgaatatgctccaaatgggacactttttgagcatctccacatcagggaagcagagaagcttgactggatggcacggctcaggatatccatgggcattgcttactgtcttgagcacatgcatcagctgaaaacaccagttgtgcctaggaatttcgactctactacgatataccttacggatgactttgctgcaaaagtctcagatcttgaattttggaatgatgcaaagggacataattcaaccaacgacaacctcacatcatcatcggacctggagagtgttgtgcgcaagtatggcatagtgctgctggaaatattgaccggacgagctccccattctgaggtggatgggccacttgaacactgggcttcacgctacttcgacggccagatgcgtcttgaggagctgattgaccccagcatgggttccttccccgaagacgctgcgcgtgcgctttgcgaggttgtaaggtcctgcattgatccagatccaaagaagagaccacggatggcagaggttgcagctcggatgagagagatcactgcgttggggcctgacggagcgactccgaaggtgtcgccgctgtggtgggcggagcttgagatcatgtcttctgagacctgaagttggcggccagccagatgatattctttaatctgttggttgctgctaatcttgtttcgtggacttgattaggtagagggtggttgagaatttgttctgtgtgcaaaattgcatagggagtggtattgtacatgtaaagaagattaacaatgtaacaggcattacagccaacttgagaaatggaaaagggcgcgtggttttagtttttaaaaaaaaaaaacaaaaaaaaannnnnnnnnnnnnnnnnnnnnnnnnnnnnnnnnnnnnnnnnnnnnnn

SEQ ID NO: 15670 - DNA, 536 bp, Setaria italica
  Peptide Sequence Number=SeqID_81644
gctggaccttcctaagctagccactgtttggcgccgtgattggttgaatgcaaacgaaggatttaacccacttttctataagctggtggttccctcgcccctggactcctcaccagaatcccttgttgctgtgctgatcttggacagtgctaattccagtacagtttgtatttgccagccgccagttgctactgacatatccagagggaggcacatggaaccatctcggtgcctgtttgatgttgctttcttcaatgggaagctatacggagttgcttttggtgacaagctcgttatctttgagattggttatgaccttggctgtaagccgaagatctcagccactgaatgcataatcaactccagggatgatgatttatgggacttgccccaatccttatccaacgagaaggcatacatgtggagggaatacctagttgaatgttgtggtggactgttgaaggttgaacggtttattcacaatgaccatcccgatcgcagaagtctttcctttgagcatgatcgcactgttgcat

SEQ ID NO: 15671 - DNA, 257 bp, Setaria italica
  Peptide Sequence Number=SeqID_81645
ttttcgggtagcatcgcgcaggcggaaccgaagcaggtcgtcgagctcgggctcgggctggaggcgtcgggccaccctttcatctgggttgtgaagaacgccgaccagcacggcgaggacgtgaccgagttcctacgcgagctcgaggggcgcgtcgccgggcgcggcctgctcatcaggggttggcgccgcaggtgctgatcctgtcgcacgcggccgtgggcggcttcgtcacgcactgcggtggaactcgacca

SEQ ID NO: 15672 - DNA, 617 bp, Setaria italica
  Peptide Sequence Number=SeqID_81646
cccgcagcctagagcaatacaaatcaacctctcggcattgtcccatctcatgtaggagcaatgctcataactgtctatggccatcgtagagacagtaatgggcatcttcccaaccgaggtgatattgatggctccaagaatttcagataatggttgctatgccagtggtccatccctccgcaccctaacacgctcaccattgaaatggatgtacttccactttttcaagtatctatcaaggacgtacttctctttttcttcttggccgaaagccacaaatgcttttccaatccgcctagctgtatcctcatctggacgcacccctaattcctccatgtcagcatatacctccaaaactttatctggatgatggtgaatgtcatacatcaagatcatccgagagaacaacctcttgggcactgagcgcgtatgagtctgtataacagtagtccaaatagactcagcttcgtctacccttccatccataaaaagtgccagcagaagtgtgtcatacgttgtccatgtcagcacctggcctttggtcatcaaccacttagttacctggatgattcttaaccattttcttcgccttttcaacatccccagagcttttgctg

SEQ ID NO: 15673 - DNA, 647 bp, Setaria italica
  Peptide Sequence Number=SeqID_81647
atgaaggacggcgcacctgacaacttccacttcgtcgaggactgggtcaggatcggcttcctcgccaagaagaaggtgctgaccaaccatgcctcggttccgttcgatgaccagtgcaccctcttggagaaggaggccgtcaacgtgtccctctacaacctcctgacctacccctgggtgaaggaaggtgtggccaacgggacactcaagctggtcggcggccactacgacttcgtcaacggggtgttctccgtgtgggagaaataagccacccggtttattcatcatacatacataccgaaataatgcatccaatcgatgtgaatgcatgagtacttactacctattttcggccgctacatatatatcagatcggccgatgtgaatgtaataagatatagcattttctaccgctttacgacttctatgtactatatgatgcgtaatttggccgccttgtggtcaaaagacatcagctatgtataagccgttttactaccatggctatgtataatttcataatattttcgtcaagagtttaccttttactaaaacaaaaaaaaggctaaaaaaaaaaaaaaaaaaaaaaaaacttagagacacgcgaccgcgggggggaagtaggacgaaggacacacgagggagta

SEQ ID NO: 15674 - DNA, 299 bp, Setaria italica
  Peptide Sequence Number=SeqID_81648
taggggcttaggctggttgcagcacagccatcaccgatgccaaaggggtaagggatggacacgttaccgcacttgtcggggcaccctggcaatgatatggtaagcccagaagaggtggccggcgctatcactgagaaggcgacgataatcaggaggactaatgcttcttccatggctagaggtttattaaatcttgaaaagcctagtcttctcgaggagtcagctatatagttcgaagccttcctgtggaacaaacaaactggttgaaacaagcaacaaaaggattgactttgaaactc

SEQ ID NO: 15675 - DNA, 315 bp, Setaria italica
  Peptide Sequence Number=SeqID_81649
cgcggcggtggggctgttcgtggcgtgcctcgccgaccaggaccccgacccggcccgaccctacgccgagctctggatgggcacgcacccgtcgggcccctccacgctcctcgacggcggcgcgctcctcagggactggctcgcgcggaaccccgacgcgctcggccccgccgtcgccgcgaggtggggaggcgacctcccattcctcttcaaggtgctgtcggtggccaaggcgctctcgatccaggcgcacccggacaagaagctcgccgaggtgctgcacgcgctgcggccgtccacctacaaggacgacaa

SEQ ID NO: 15676 - DNA, 754 bp, Setaria italica
  Peptide Sequence Number=SeqID_81650
ccgcgtccgcggtcgcgtacgcggaggacagggacggcggggatcgattcgtcatggccgccgaggagaaggtgaccttgcacgactcggaggatgccaggatcattcatgagatggactgcggcaagagggtgctcgcctttgcgcctgcaaagaatggagtcctttacactggaggagaggaccgtggtattactgcctgggatctgtccagcggcaaggtctcctcacgcattgagggtgctcatgcaactcgtgtaaaagggttgtcgttttgataatcggaaggatggatcagagctctccaatctgattgcttctgcttcatccgatggtgtcataaggatatgggatgttcggacaattgggaatggaaagcctactccattggcagtggctaacacaaaagcaaggctaacctgtcttgctgggacatcattgaaatgagtggcagagttcaagtgaggagcagatgatgaagcaaatcattgaagggccgctgtgcttgtaatgtgtagttcagtccacataatggattggtatgagagaactgggatgaaggaaggatttaagctggagatctgtcactcaagcattagctggatgcatttgaaaatgtatagtcgtcgattatacataacatagtttggcttgagcgcgtgaactgaactcaatatgagattgcgtgatttgattgtaccacaagttctgcagtaatgaccatttccaatgttaactgggccatttgcatcaa

SEQ ID NO: 15677 - DNA, 1005 bp, Setaria italica
  Peptide Sequence Number=SeqID_81651
ctccagtataggtgcttcagaagattaggtatcaaagttgatggataatgcacctaaatattatggtgttctgtcgatggcccttagcttgagaacctacaagaagattcggtctgcctatcgagttaggattgagaagaaaatattgttggagtccttaattaggaaagctaaggaagcgtgtgaagcagaacaagtccaagcgtgtgagaagggtaaggtgcacggagagtcagagcaaactcctcaagagcgtgtgatgtttgctaatctctgcaggatgattttacctgtgatctctgcatctaagccaccttatgtgaatgagcttcctctgctgaagggtctcaagagatcctgggactctgcttttgagccaaatgtgctcaataagtgaaagcttatcacttggtgagactgggagtaggaggattgcaagaatttctggagcccagccttcaacttccaaagccattgtgccatataagccttttcctcatgctgtgctgctgaatcagaacattgatgttgataatatggatgatcacaacattaatctgggcatatctacactgcctcctcctttgactgaatctgtagagcaagttgaagttcttgggatagaagctagtcccttaggttcagttggtgatggcaaggatgaagcagaactactttcagctgagcattcagagcagaatatggttaatattatagagaatgaattaggcaaagtgatcaggcgcagtccaaggatcgaatcctgcttatcgcattggagaggtggtgcaaggcgagggagttcactatgcctgaccttttaagcattcatagatttttgtttggtggtcaagccttcgtatattgtagcggcttgaggcttgttggtcagctggacaaaagcagaccagtttctgcgacgacataatctttatgaggttaagttctggagtgatggtggttatacacttctattcccaatagaaaagtgggggtatcgttctg

SEQ ID NO: 15678 - DNA, 1016 bp, Setaria italica
  Peptide Sequence Number=SeqID_81652
caacccatagccgttcgcctcgacatccgctcctcctcctccgcctctaccccgcccgctccactacatcaccaagcgcaggcaggcccccacagcgacggcgccatggagaggcgacggagaagcgtccccttactagtggcggcggtgttcttggcggtggccgcaatgccggcgtaccccggcgaggccgcgacgccgctgcgggaggactactacaggtacagctgcccgaacctggagagcatcgtgcgggcggaggtggccaggaagatcaacgagacggtggtcaccatcccggcgacgctccggcaagtcttccacgactgcatggctgggggttgtgacgccgccgtgctgatagcgtccaagaaaaacgatgcccagaaggacgccgacgacaacgagtccctcgccggcgatggcttcgacacggtcaaccgggtcaagaccgccgtcgagaaggagtgccccggcaaggtctcctgcgccgacatcatgcatcttgccgccagagacgtcgtcttcctggccaaaggcccctactggcacgtcgagctcggccgccgcgacggcctcgtctccaggaagagcgacgtcgccggcaagctgcccgacccggacatgcacgtcaaggatctctcgtcgatgttcgagagcaaaggcttctccccggtcgacctggtcgcgctctcgggcgcgcacaccgtcggcttctcgcactgcacccgcttcctcaaccggctctacgggtacagcagcagcgcgccgacggacccctccttcaaccccgaatacgcggatcagctcaagcaggcgtgcccgcgcaacgtcggcgagaccatcgccgtcaacatggaccccgtgagccccatcacctttgacaacaagtactactccaacctccagtacggactggggctcttcacatccgaccaggtgctctacaccgatgactcgaccaagccgatcgtgaacaagttcgctgcggaccagaaggcgttctttgacgcctt

SEQ ID NO: 15679 - DNA, 505 bp, Setaria italica
  Peptide Sequence Number=SeqID_81653
tcgccggcctgcgcgaagccgaactcgtcggcggcgcgctccatgaggtcccggaacgccggctcctggaggtaccccgtgggcacgacgaaccgccgggactcctccccggcgtacaccgcgaagtagcccttgggcacgccgccctccgccgcggccgccgccggctgctccagcagcgactcccggaggcccgcgtcgtccctcttcgccttcttcttggccgtcggcgacgtcgcggcggccttgcttgaccggaagtagcccatcaccatcatcgtcgatcgccggcgacggtgagtacgtacgtgtgtgtttcttgatcgccggtgagggcggcgcgcggctggaggagggtttagtaggaagtggccgtggcacctggtcgtgggttggtggccgccatggctgctggatgctgcctcccgcgagctcttcttggagttggtggcggccaaccacgaacaaggcgcaggacgtggtctcctctcctctcctcttgttc

SEQ ID NO: 15680 - DNA, 579 bp, Setaria italica
  Peptide Sequence Number=SeqID_81654
ggtgaggactaaaggcatcaaaacttagtgttcaagaatgtgtttatcaatgtatttgatgtctagagtctcgactacataagtggcatattgtacctgagtaccattaagatgtatcctgtcctgcatctgcttccacatacatctatgccctagaagttccttgttttcttagatgcttgacccaattccacgagtttcccttgttgcttcggcaggtaagcaccgggcctggagacgaggttgatgcgggaccgtggcgcggcgaacatccagctgtcgtcatcaagcgatctcacctccctctgcagcgcctccatcacctccgacttcagttcagccacggcctcgtccttgcggtagagcgcgtcgatggaatccgcgacgtcttccgctgcggagacggcacctccgctcgccgccgatacggtcgacctcgccggcgagctcatctacgccctcccctctcgggcccgactgctccggctgtaaggaaccagcggcgcgcctctgagctcgacctcgccgactgggagctgacggattggacgaggaggcgtcggtttgtcgctggcccgg

SEQ ID NO: 15681 - DNA, 446 bp, Setaria italica
  Peptide Sequence Number=SeqID_81655
tacgtaacaatacaaagtaacaaaaaattagaatactaacaaaaataattactagacaatacaatttgcagtatttcaccatctttaatagaatcagaaagctcatcagaggaccagaagtctgggacatactccaagaaattctccactgtcttcagaacatcaagatcactgaaataatgaggcttagtagcaacaacagcaggagactgcccatgctttcctttccactcaagttcttcccagcacatatcacgatttataaatgcaaactgagaaattgccttagcaccctttttatgtgtggattcaccagtaacagcaaaatgaccgaaccactgcattatccgcttcgggtttcctcggaagaactcctccagtatatggccatttttgctagaatagacccagccttcttgggcttcttatcaaaatcatccgcagca

SEQ ID NO: 15682 - DNA, 891 bp, Setaria italica
  Peptide Sequence Number=SeqID_81656
aaagaaaagacaagaagaaagccatcagttgagaggtgccagcttccacgctgtgattcaacactgttctttacattggaagattcaagttcaagcagttcatcaagcttgtcctcatcaaactcgtatctacgccgcttcctcctcctattcttctttctccttttatgactgctcccaacaagatcctcatcatcagtatcaggcatatgtgaaattgagaacgcattgttctgaaccaatgagtactcatcatccttgtgaaattgtattttgttatcagagaacaaagattcacaagaatttcctgatttgcattcttttgataaatcacagaaaattacccaggactgaatgcctatccacttaagtccatcaggaaattctgtctccatgaattccttcatgagagcaaaatgatcggcatcagttaaatgatttacacccttcaaaagctcttccatttgtccccgttcttcatcttgttcttcatcgttcatgaggcgccaaagttgtctacacttggcaatgacacagttcaataagacaagatcatcaagagatatgtgatcacaatgtgctgataaaagaacctcaagccaacagcatgggaatttcaattccttgcactgcaaagtagtattgatgagcttccctaaagattttaagaaatcaagaagcctttgctcgtccagatgaatgagaagatgttgggagagagaggaaaactgctcatccatcaaaaattcttcaactaaatgccatgcatctttgcaattctcctcgtacatcaagtacaaaaattgattccaagaatttctccactgtcttcagaacatcaagatcactgaaataatgaggcttagtagcaacaacagcaggagactgccc

SEQ ID NO: 15683 - DNA, 684 bp, Setaria italica
  Peptide Sequence Number=SeqID_81657
tagttgttgtagtagtggaggctgagttctcccaagattctctactggtcttctcaactggaagaacaccgatcagttacaagggcttgcggaaagagaagcctctgatcacaccagacatcactattatgtctgttggaactgtgattgcatatggtagaaagaagaatgaatccgtgatgttggctgggaggaatatttggacaacaattgggacaggaatatcgttgtcgaggagactgctaaattctctcagctaaagcctcagccagagaggaatcaaggtccccataaggttagcttcttcgttgataagcatggcgctcaggaagtaatagattctctccctcagaagttggagaaacgagggctagatgtgaaaatagtctacagcagtggtgaggccctcgatgttttaccacaaggtgcaggaaaaggacaggctcttgtttatttgttgaatacactcaattcaaatgggaaaccaccaaacaatactcttgtttgtggtgactctggaaatgatgcagaattattcagtgtcccttctgtacatggcatcatggtcagtaatgctcaagaggagctgcttcagtggtatgaaagaaaatgcaaaaagtaatcctaaaataattcatgcgactgagagatgtgctgctggtatcatgcaagctatcggtctaa

SEQ ID NO: 15684 - DNA, 660 bp, Setaria italica
  Peptide Sequence Number=SeqID_81658
aggctcttgtggtaaaacatcgagggcctcaccactgctgtagactattttcacatctagccctcgtttctccaacttctgagggagagaatctattacttcctgagcgccatgcttatcaacgaagaagctaaccttatggggaccttgattcctctctggctgaggctttagctgagagaatttagcagtctcctcgacaacgatattcctgtcccaattgttgtccaaatattcctcccagccaacatcacggatcatctcttcaccatatgcaatcacagttccaacagacataatagtgatgtctggtgtgatcagaggcttctctttccgcaagcccttgtaactgatcggtgttcttccagttgagaagaccagtagagaatcttgggagaactcagcctcccagagcgcctcaaacctaagcaaggacaggttctctcgatcatcatgatcgatcatcgtctggtcaagatcggagacgatcacaaggcgggcagaaccgtcgagcttatccatttggaagaactcagctgaagaagaagcagcaacagaagtgcttttgcctgtacactttcctgagtgcgacggcgggccacagcaatgtgctccttattcttcagctgctattgtcacactgataaagtcttgctttat

SEQ ID NO: 15685 - DNA, 608 bp, Setaria italica
  Peptide Sequence Number=SeqID_81659
gatctccgccacggcgccggcgttcgacagcatcgagatgcccagtcctcaccctgccgcctatctccgccaggtcgctccggatcccgtcgatccgcggcgactgaggcccctctgccgccgctgcctcctcctgctcatccctctcatcggcctcgctcttaactggcggtggcgcgaggaaggaagcgacgccccagaactggcgggtgagggactcggtcagctccgagatgtcgcccttgacgccgcggctcggggtgtccggctgctcgtcggactccccggcgtcagcgctggtggggtcggatgcgcgcggcgggctctggtcgccggaggcggactcggattcatcgtcgtctgagtgggcggaggagagggtggccgcgatggagcgcgcgagccatgacatcgcggcgaggtcgtggtcgtgccgtgcgtgcggactggagcccggtgggcggcggagcactggagaggtgggcggtaggtggagtggagtggcggagaacggggagcgtgacggccggcgtaaaccggaggaaggccgtggaggcggtggcgagggacctggccaagctccgggccatggggctcgtcgcggggac

SEQ ID NO: 15686 - DNA, 831 bp, Setaria italica
  Peptide Sequence Number=SeqID_81660
tgagcccgcccagagtcgtcacttccgaagccaccggagcagctgaaccaccatggcctcgccgtcgctcaagtcccactctcccgtcgccgccgctctgcactccgcaagaagagccgacctccatggccgcggcccggtgaccgtacacataccatcctctttcacttccatgttccaacatttttttcagttttcttgccgtttgttcacgtgtagcggtgctgtttctctgcagctcggcaggttccatgaccgcggcttcaggtccagcaattctaagaggtcggcgaaggtgagcgcgttcccgtcgctggacatggtgccgctgatggcgacgatggtggaccacgtgaacatgtcccgggactacgtggtgaccaagtccatctggcacctaagcgacaccgccctcaagagcgtctacaccttctacgccatgttcacggtctggggcgtctgcttcttcgcgtccatgaacaggatcccttctacgacagcgacacctacaggagccaggggggcgatggaaccgtgcactggtactacgacaaggtaaagcatgcagggagaattaaattaagcctagagtagcctcacggacactagcatgataattcgctgaaatctctcgtgcactgtcgacgagcagcaagaggacctggaggcgtctgcgaggaacgatctgctgagggaggagctgctcgaggagatcgagcagagtgttggagggctcgagggagctggaggaagcaggcagggaggagcaactcacccagtgataagagataggcggatgatgggcatgagttacaaactagctatctgaac

SEQ ID NO: 15687 - DNA, 913 bp, Setaria italica
  misc_feature (794)..(913): n is a, c, g, or t
  Peptide Sequence Number=SeqID_81661
tgagcccgcccagagtcgtcacttccgaagccaccggagcagctgaaccaccatggcctcgccgtcgctcaagtcccactctcccgtcgccgccgctctgcactccgcaagaagagccgacctccatggccgcggcccggtgaccctcggcaggttccatgaccgcggcttcaggtccagcaattctaagaggtcggcgaaggtgagcgcgttcccgtcgctggacatggtgccgctgatggcgacgatggtggaccacgtgaacatgtcccgggactacgtggtgaccaagtccatctggcacctaagcgacaccgccctcaagagcgtctacaccttctacgccatgttcacggtctggggcgtctgcttcttcgcgtccatgaaggatcccttctacgacagcgacacctacaggagccaggggggcgatggaaccgtgcactggtactacgacaagcaagaggacctggaggcgtctgcgaggaacgatctgctgagggaggagctgctcgaggagatcgagcagagggttggagggctcagggagctggaggaagcaggcagggaggagcaactcacccagtgataagagataggcggatgatgggcatgagttacaaactagctatctgaacattgcatgaaaaaataagtccagactctttttaccagctgtgtgctgcttcgcgtttgtatatgctgaaagcctgaaacgccctgaattacagtgtgataccaagatatgtatagttggctggtattactagttaaaaaaaaaaaaaaaaaaaaannnnnnnnnnnnnnnnnnnnnnnnnnnnnnnnnnnnnnnnnnnnnnnnnnnnnnnnnnnnnnnnnnnnnnnnnnnnnnnnnnnnnnnnnnnnnnnnnnnnnnnnnnnnnnnnnnnnnnnn

SEQ ID NO: 15688 - DNA, 384 bp, Setaria italica
  Peptide Sequence Number=SeqID_81662
ttacccgtttgtagtcccgtaccttccttcgtagtcttgtttccgtcgcgttcggccctgtcagccgtgtctatgtcgcggtggaccagaagactgggtcaagcagggggttcggcttcgtcaactttgttcacagagaggacgcggagaaggcgatcagcaagctcaatggttatggttatgataaccttatcctccgcgttgagtgggcgacgccaaggcccaactagttttttcgctgctacctacttactagagttgcatattttcgcaaagaagtgctacattggtatgttgtttggaatagcacttgtgtcatgcgcatatgctgtgtcgtaaaaacagcagcgagtgtaattatccgcgtccaaccaaaattaacac

SEQ ID NO: 15689 - DNA, 1169 bp, Setaria italica
  Peptide Sequence Number=SeqID_81663
acgcaccatggcggcggcggcggcgcagcagaagatccggtggggggagctcgaggaggacgacggcggcgacctcgacttcctcctccctccccgcgtcgtcgtcgggcccgacgagaacggcttcaagaaggtcatcgagtaccgcttcgacgacgacggcaacaaggtcaaggtcaccaccaccacccgcgtccgcaagctcgccaaggcccgcctctcccgcagcgccatcgagcgccgccagtggcccaagttcggcgacgccctcaaggaggacgccggctccaggctcaccatggtctccaccgaggagatcctcctcgagcgcccccgcgcccctgggagcaaagctgatgaaccagctgcatctggtgacccactggctgtggcaagcaagggaggtgctgttctcatggtttgcagaacctgtggcaagaagggcgaccactggacctcaaagtgtccctacaaggaccttgcgccaccgactgaaagtttctcggacaggcctccgacgtccgatggccctcctgctgcaggcggtcctgcgaagggagcatatgttccccctaccttgagaggtggcgctgataggagtggtggagattcgatgcgccgtaggaacgatgagaactcagtccgtgtcaccaacctctcagaggacacccgtgagcccgacctcctcgagctgttccgcgcgttcggccctgtcagccgtgtctatgtcgcggtggaccagaagactgggtcaagcagggggttcggcttcgtcaactttgttcacagagaggacgcggagaaggcgatcagcaagctcaatggttatggttatgataaccttatcctccgcgttgagtgggcgacgccaaggcccaactagttttttcgctgctacctacttactagagttgcatattttcgcaaagaagtgctacattggtatgttgtttggaatagcacttgtgtcatgcgcatatgctgtgtcgtaaaaacctgctgttaagtgttaattttggttggacgcggataattacactcgctgctgttttgttttgctgtctctgctgtctttattcattttgtttggtgctcggtgcagtcagaaaaggtttgaggatgggcaaggaattggtgttcacatgacggtgcccgaatgcattgctttc

SEQ ID NO: 15690 - DNA, 509 bp, Setaria italica
  Peptide Sequence Number=SeqID_81664
taaaggactgtttcgtgatggtactcgcggctgatttcgctcaattacgtgccctgcttggaagccctgaccttctgggcttgtggtagatcgttgatttcatcgtcagttgtcattgatctgatcatcaactgacatgccttgcaacctcgcttgctattggacaggtggtgtggtcgattttttgttgttttcgtcatagtacatataacgagaaagaaacgcataatataaagcattcatggagtcatgtgtcagtttatttggttgtgggaaactaccttccttgtaactgataacggttgatacttggtacagcttcgcaattcttcatagtgtactgtagttattctaattctatcttagagaatagaaaccttagtcctgggggagattattgaatgctgatcgtgcatctcacactttcatgatcatgtttatgaaacccgtctttcattatcgaagggtgctgttctaattagtaagaaaaccctgttgttcagagttag

SEQ ID NO: 15691 - DNA, 1369 bp, Setaria italica
  Peptide Sequence Number=SeqID_81665
acaatctttacaaacttgtaaactttacaggggagagttaccagtggacctgcaaccaaaaggaaaaaacaaacaaacagaaattcttatgctcaacacaatctccgattcacagaacactagatcaacggaaaatttgtacagttccaagctacctcgcctctaatctggtcactgtcacatagttggaggtggcgctccgagtccgggacgactccgtgtccgacgacgtgctcattccagggttcactccgggctcgttgggctcagggagcacggtgttctcgctcgccagcatcgtcaccaccgacgacatcaggggcctgttcctcggctgcgcttcgacgcacagcagggccacctggatgcaccgcagcacctcgctgtagttgaagctgccgtccatcacctcgtcaagtaaatcaacgctccggccttctttccacagcatccatgcatatcggaggaggttgagatcaagctcgacttcgtagaagcctcggttcctcttgccagtgatgatctctagaaccatcacgccgaagctgtagatgtcggacttcatcgaaaacacgccatccatcgcgtattctggagacatgtagccatacgttccaatgacctttttggtatgttcagtggtctgatcacctccaaacattcttgcaataccaaagtctgaaattttggggaccatgtttctgtccagcaacacgttgctagccttcaggtccctatggatgatcctgaacctcgaatcttcgtgcaggtactgtagaccccgcgcaatccccagaatgatatcgaagcgtttctgccaccttagcagcctccgcttcccttcatcaaatatgaaggtgtcgaggctctggttgtgcatgtactcatacaagatcatcctctcgtcctcgtcgatgcagcaaccgagcagcctcacgaggttcctgtgctgaagcttggcgatcagcttcacctcgttcttgaactccaccgccccttgcatcgatctccgggacagcctcttcacggcgacttcttgcccgtcctcaagctttcccatgtaaacagggccaaatccgccctcgccaatcttgttgtgcagagcaaagttatccgtggcggtcaggaccacgtccagatcaaacaacgggaggtcgacgtctttctcggcggatctccagtcctcgtccagcgcggggtgcttcctgaccctgatcgggagcacgtcgtccgccccaccgcccggcgccgacgaacccgtctcgccctgacgtttcctcctcttcctccagacacagcagcagcagcagccgaccgccagcaggaggagcacgccggcgacggccgcgacgacggcgatcaccacgcg

SEQ ID NO: 15692 - DNA, 243 bp, Setaria italica
  Peptide Sequence Number=SeqID_81666
ggtaactttgcccgcttcctctctctctctccctctctcctctcttaccgcacatgcgcttcgggccgcgtcgccacacccaagctagctgtagctgcctgccgacacccgcaatggccgccgcccacgcgccgccgcaccagcgcgcgctcctcctcctcctgctcgccgccgcgcttctggcggcgatgccggccacctgcgccgcggccaggagcaagaagtcgtacagggccatcttca

SEQ ID NO: 15693 - DNA, 1042 bp, Setaria italica
  Peptide Sequence Number=SeqID_81667
tctgcagccactttgttagggtgcggcggttagggggggcggcttgtagctgtcggcgttggggtggttgcggtagcgggccgaggtggcaaagggcgcatgttggtgctgtggtggctagtgacggccgtgtgggtgcccgtggccatggggaaggcatcggcgtggcgacggcacaatggccgtgctgcatgcggcgtcgaagggaaagcacaacagaggagcggctccagcttcagcagtagccggttattgcattgaggccgtcggatttggctgcacgctggccgttgtcgagatttgcggcaagggaaggtgtcggtgggaggtgcaaggacgaccagaggagttacaacctcagcatgcgatgatgcaaggtgtggcacgagggtggcgtgtgatggccgtgatgttggggggtggccgtgcgaggcgcaaccggtgtgtgcaatctgcatccgctgtggcagaaacaaagcagctggcagcactatgcatggtggtgttgcaggaaggttgacgacgccgtggcgatagtggcccatgggtacggtggtgccgggagaggacgacgaagggcgactacagccagcaagtgcgagatgagtttcgtgcgcccatggcgaaggatctgtggtgcttctagatcggttcacggttagtgtgccggtggctatggtgttgtgagcatgccggccttgctgttcgcagcggatcgtggcgcttagccctgcttggcaacgactattgtggtacgggataatgtcggaagacggtgcttacggcaatgacgacgtgttgccaacacagcttgcagcggcctgtggcggatagctcggcatggctggggctagttcggtgcaggacattgtcgaaagatggcgcaagtgacaacaatggtgtgctggcatgatgattgtgctcgtatatgtgaggtgggaaacggtgatgtcgacttgatagtggcggagctcagagatgggatgaacctgtgtcatcagaggcctctaggtgacattgttcgtggtgtagccgagactgg

SEQ ID NO: 15694 - DNA, 241 bp, Setaria italica
  Peptide Sequence Number=SeqID_81668
tcccctgtgtgccttgcctatccccttttgcgtgtctcagggcatgaacatcctcgcggcgtgggcgccaagcgagatgcaccccgagttcgtggacgacgtgagcctgaccttcttcatggagtccggcacctcgatgtcgacgccgcacctgagcggcatcgccgccatcatcaagagcctgcacccgacctggtccccggcggcgatcaagtcggcgatcatgacttcctcgagcacc

SEQ ID NO: 15695 - DNA, 265 bp, Setaria italica
  Peptide Sequence Number=SeqID_81669
acttactacgttacaaccctaggaagaagcgcaagcaatcgggggcgcaccacgacggacacgcccttgggcatgtccaccacggccgtgtacaccgagttcgccctccagggtgaacgagaagcagagcttcaccgtgacggtgcgatggaacgggcagccggccgtcgccggcgccgaggggaacctgaagtgggtgtccaacgagcacgtcgtccggctagtgcgagcccgcagaggtaggcgatgtactcgttggttgccg

SEQ ID NO: 15696 - DNA, 2727 bp, Setaria italica
  Peptide Sequence Number=SeqID_81670
caaatcaattcggcggtagcgagcagtaaggccaaggcagcatccagcaatagcagcagcgaaaactccccttgtcttcctcctcctgtcctggcctcatgaggacccaaaggagccaccttgccttcctcttgctctcgtccttcgcgctgcttgccgtctgctccgcgcaggagcgcaagaactatgtggttcacctcgagccgagagacgacggcagcaccgattcggtggaggagtggcaccggtcgttcttgccggaggccacgctggactcggcgggtgatggcggcccgagaatcatacactcgtacagccacgtgctgtcggggttcgccgcccggctcaccgaggcggaggcggagagcctgaggagcaaggaggggtgcctgcggctctaccccgaggagttcctgccgctggctaccacccactctccggggttcctcggcctccacctcggcaaggacggcttctggagccgctctgggttcggccggggcgtggtgattgggctcctggacaccgggatcctgcccagccacccgtccttcggcgacgccgggctgccgccgccgccaaagaagtggaagggcacctgcgagttccggtcgatcgccggcggaggctgcaacaacaaggtcatcggcgcgcgcgcgttcgggagcgcggccgtcaacaacacggcaccgcccgtcgacgacgcgggccacggcacgcacacggcgagcacggcggcgggcaacttcgtccagaacgccgacgtccgcgggaacgcgcacggcacggcgtccgggatggcgccgcacgcgcacctggccatatacaaggtgtgtgcccggagccgctgctccatcatggacatcatcgccgggctggacgccgccgtcaaggacggcgtggacgtgctctccttctccatcagcgccacagacggcgcgcagttcaactacgacctcatcgccgtcgccacgttcaaggccatggagcacggcatcttcgtcagcgccgccgccggcaatgacggccccgtcgccggcaccatccggaacggcgcgccgtggatgctgacggtggcggccggcaccacggaccgcacgatccgcaccaccgtgaggctcggcaacgggcaggagttcgacggcgagtccctgttccagccccggaacaacaccgccggccgccagctcccgatcgtgttcccgggccgcaacggcgacccggacgcccgcgactgcagcacgctggtggaggcggaggtgcgcggcaaggtggtcctctgcgagagccgctcgatcggcgagcacgtcgagcaggggcagatggtgtcggcgtacggcggcgccggcatgatcctgatgaacaaggcggcggaggggtacaccactttcgccgacgcccacgtgctgcccgcgtcgcacgtgagctacgccgccgggtcaaagatcgcagcctacgtcaagtccacgcccaagcccacggcgaccatcaccttccggggcacggtgatggggtcgtccccggcgccgtccgtcgccttcttctcgtcgcgcgggccgaacaaggcgagcccgggcatcctcaaaccggacatcaccgggcccggcatgaacatcctcgcggcgtgggcgccaagcgagatgcaccccgagttcgtggacgacgtgagcctgaccttcttcatggagtccggcacctcgatgtcgacgccgcacctgagcggcatcgccgccatcatcaagagcctgcacccgacctggtccccggcggcgatcaagtcggcgatcatgacttcctcgagcaccgcggaccacgccggcgtgcccatcaaggacgagcagtaccgccgggcgagcttctactccatgggtgccgggtacgtgaacccgtcccgggccgtcgaccccgggctcgtgtacgacctcggcaccaacgagtacatcgcctacctctgcgggctggggctcggtgacgacggcgtgaaggagataaccgggcgccgcatcgcctgcgccaagctgaaggccatcaccgaggcggagctcaactacccgtcgctggtggtgaagcttctgtcccagccgatcaccgtccgccgcaccgtgaccaacgttgggagggcgaactcggtgtacacggccgtggtggacatgcccaagggcgtgtccgtcgtggtgcgccccccgatgctgcgcttctccagggtgaacgagaagcagagcttcaccgtgacggtgcggtggaacgggcagccggccgtcgccggcgccgaggggaacctgaagtgggtgtccaacgagcacgtcgtccggagcccgatcgtgatcccgccggccaaggccgtcgcgtaggttcatactgtttgatggcgtgatcgtgtcgtgtccaaggttatcagtaattcagtagtagcggtaggttatcatgagtgtgcccggtgtacgtatggcgaaggaagtaggcgatttgttgttgtataggcaagcagggaacggagatcatctgcgacgcagcaagctcagctgcaatggcgttctgtaaaaaaatggcggaaaaaataatcgcttcaaaaatctcccaaatgtctgtgttaaccaaaaaaaaaaaaaaaaagagactgccaaggcataccacacacagggagtagtagacccggtagttaacgttaattaggtaacgtaaaaggtaaaagttaaaggtaaacgtaaattttaagttaaagttaaa

SEQ ID NO: 15697 - DNA, 1331 bp, Setaria italica
  Peptide Sequence Number=SeqID_81671
tccatcatagtattcagtgcccttgattatgaccaggtgagctggaagattaacaccccacgccaacgtgctggtgcataccagtacctgaatcttattgtttgaaaagagttcctcaaccaaggatctgtctctgtcatttaaacctgcatgatgcagacctatgccaaactgcagagtatgcctcaaattactgtcagaaacttgtgaaagaaccatgtctagggaattgtctgccatgctcaggaactgccttggtttttcatctgatgctgcaagctgaatgatatcaagagctgtaagtctagtctgtcgacgtgatgacacaaaaatgagaaccggtttattgggtgaatgagagcatatggctgcataagctggtttgttcatgctattcattctcggacagtagaatttcccaggatatccctggatatgcacttcaagaggtacaggcctcacactaggcttgaaattgaatagaccatcatccgtaacgcccaaccaatcagctaaatcacgggcatttgctaatgctgttgataaaccgacaaaccgaattgaacgttcagtttgtgacgatatgtatctcattcttgatacaatgacctctaggatgggtccacggtcagctcccaaaagatgtatctcatccaatatcatgagccccaccttcataacataacttctgctatgccaacttcgactaatcccatcccatttttctggggtagaaattatgatgtcagctgataatagggccatcaggtctggagtgaagtcaccagtcatctcaaccatcttcttcccaagctgagttacaagacgttttctccaatcattcattcgttctcgcactatagcctttaaaggggcaatgtaaactaccttcatgtctggttgtgtattgaaaagatgaagcattgctagttctgcagaaattgtcttgccacttccagttggagctcccagaagtacattgttatcagtgtgataaagaacatgaaaagactgagtttgtatcggattgaaatgggaaaatctgtacagatcctcatatgttttgttgccaagagcactcagtggaagaggcttcaagtccaaaagttcagtgtgcgtaatttgtgtctgtggcaatgtcagattatgaaaagaaacagtaaagagcgactcagcatgtaaccatgagtctgatatggctcgtatatagtactgtggtggatgaggttcaaatattggtacattaaaagatatctttgaaggtattcctcttgccatcttcttcgttagtgtgaatagctctgagtgataaatggtatcatttttcagaa

SEQ ID NO: 15698 - DNA, 311 bp, Setaria italica
  Peptide Sequence Number=SeqID_81672
tgattcgagctggaaagtagaagacagactccgcattgaaggccacaacccatcaggagcccggccaccggacaacctcctcggagcactctgcgtttctgaaacagcatcacgcaccggcgtcgatgagctggaggatgaggaggacgggctggaaggcgcagacgatggcgacgtcggggcggagatcctggacggggtagtcggccgcgagctgccggaagacagcctcgacggagtcgccggccgccgttcggtggaccggggacctcttcggcctgtcgacccagccggcgtcgggacacgcccga

SEQ ID NO: 15699 - DNA, 303 bp, Setaria italica
  Peptide Sequence Number=SeqID_81673
ggcggatggcgtgcggatgaagggcgtggagggcgctggcgctggcgccggtgacgaggaggagaggaatgaggaggtgcgggaggagctggaactcgggctgtctctggggcggcggggctggcacctcccgccgcggcaggagcccgcgccccgctcgctcaactggacggcggttctgccggagtggaaccccgacgccgccgccgggagctcgcgggctggggaaagggcctcgggcgtaccacctatcccgtctctcgggttccatgacatgttcgggggtatcctagacgaccccgt

SEQ ID NO: 15700 - DNA, 684 bp, Setaria italica
  misc_feature (628)..(684): n is a, c, g, or t
  Peptide Sequence Number=SeqID_81674
ggcggaagtcctcaaggagtgccccggcccagtactacaggtaccatggtgattggaggtcggagacgcaggcagtggtgtcgatgcttgcgttcatgcactggctggagactgacggtctactaatgcacactgatgcccaggagaagctagggttgagctctggggagttttgccttgatgttgaggactatctgacaggattgtgcttcatgtccaatgagtttcctagatttgttgtaaatcgcgtcactgctggagactacgactgcccaagaaaggttctgagcttcttgactgacctgcatgcatcgtttaggatgttgaacctgcgcaatgacttcttgcgtaagaaatttgatgggatgaagtatgatttgaggagggtggaggaggtctactatgacgtgaagatccgaggacttgtacctgcggagccaaaacaagaggcggctcagtcgtagaatcctgggtggtgtttaacgtactatgtggtctggcttttgccatccgtaacgtgttcgtctggaaaatccttgttggaagcatatgcgatggctgaactagttagtaattttgagggcctgactcccatatgtggaacagtggaaaaaaaaaaaaaaaaaannnnnnnnnnnnnnnnnnnnnnnnnnnnnnnnnnnnnnnnnnnnnnnnnnnnnnnnn

SEQ ID NO: 15701 - DNA, 260 bp, Setaria italica
  Peptide Sequence Number=SeqID_81675
cgtgctttgtgccgtagtagttcgtcctcaggccttccttcgcggtgctgtaggtctcccggctatttttatacatccatccaattctctggtgccaatccatgccgttgaactgttcgcccactggctttggaccgaaagatggatcgtctacgagctcaaccccgctaatggcagcattgttgaccaggatgtctagcctcccgaaacgggtcttcaggaactccgctaaccgagcaatgctcgaagcatcggtgacc

SEQ ID NO: 15702 - DNA, 283 bp, Setaria italica
  Peptide Sequence Number=SeqID_81676
gagacgcatctccacctacatccaaaggaagagagagcaacgggccggcggacgagcgcttggtggccagttccgggcgggggttcacatggcggcgtcggcggtggtgttggaaggggaggaggatccggtggtggtccgcgccgtgcagattctcgtcagcctccggtctaggaagctgcgggagcggccggcgtggctcccggtgccaccgggtgaggcctcctcctcctcgcccgggacggcggcgccggaggaggagacggagaggtgggccagacgg

SEQ ID NO: 15703 - DNA, 1130 bp, Setaria italica
  Peptide Sequence Number=SeqID_81677
gatggggcagaaatatttgaatggttgcttggtcacattgattgaaagggaattcttcatgcaagctaaggataaggacatcatcgctcatttccaaagcattgcagaacggaaagttgtcctatagctttccaaatcctgcgcccgccactgagggaggatcgcaattctggacaagactgaacaaggtgaaggattggtacaagtttgggagagtgattgtaattggggatgggaaaagaaccagattttggcagatgtttggagcgggcagtatgcatttaaaatcttataccctcggctttacagaatatgcagcgaagctgatatttcggttgaggagcatgatgtggaagcaccgacttttagaagggattttggagaggcaggggcgagctgcacgaggctctggaaaatgtagagttgaccgatcaaaaatacattgcgtcctggaagctggagaaatatggacgctattccacaagatccctataaagattgattattgatccaggctgtgttgagttgagaattacagacatatggaatactagacttgcattgaaggtcaagattttcttgtggatgctatggaaagacaagattcaaacagctttacagttgaagaagagaaatttggatgggcctattcattgcaaactctctggtaaagtagagggggtcaaccacttagtgtttacctttggtggtttttgtgcggtcctgggtaagagatgcactgggctgggatagtacatccacagggctgaggcaatttgacgaaaagtttaagtggtagtattgtgcattgtaaaagagctccaaactgaaggctgggctgatatcgctccgaaagaactgaaggtggcctgagcttttcaagttctgattctacactgttttttttcttcttctttcaaatctgtacgctgttgggtcactgttttagatgtccctcagacctgcgccttcaatctctcagtttgtaagggtgtcatgagggagcgtgttttttgagtttgcttgttacctggagggggtcgtacctttttttaagtttcctgtacgggtgattttaagctggtgactgcagcaggactaatggctgggctttcaataaaaaaaaaaaa

SEQ ID NO: 15704 - DNA, 2961 bp, Setaria italica
  Peptide Sequence Number=SeqID_81678
ccactggtgattgctattccagtcggccgagccagtgactgcctactgtctactgattgctaatttgctattcctgattgtttctaaaattgaggtttgaaccatgaagaggaagggtagtgccgctactgatttgaggattttcatggcaagggctgctgcaaagaagagacaacctgaaccggagaatgttaatcaatcttgcaatgaaagccaaatgcaactagtgttattccaagggcagagtggtagtaaaacaagcacggtaccacatgaaccagtgagatccaaccagcctccagagaacggtacaacagaagatggtgaatccatacctgtggaagacaatgattctagtgatgaagacaagaatgattatggcattgagcatgatcctggattgagggctccgatctcaagctatgatgtcaatgaccaagattcagttagaagggcatacattgcattggggccatgtcaaccaaagatgaagagggatgcttttccgcaacatgattgtggaggtatgcgtcgcttccaacataagtggtttgctgaatttaagtggattgagtatagtgtggataaagatgctgcattttgctttgtttgctatttgttcaaagataactgcaaatttcctggtggagatgcttttgttgttgaagggtttagaaattggaatatgaaaaagagaattcataggcatgttggtgctatcaatagtgctcatagtgaagctgaagagaaatatagattgttcacgagacctaaggcatcaatccgtgaatctgttgcatcaaacactgcacaattcaaggctaagtatctagctcgcttgacatggtcacttaagtgcataagatttctgttgcgtcaagggttggcttttaggggtcatgatgaaacaaaggattcactcaacaaggggaattttcgggaacttttagcatggctagcaggaaactttgaagaggttaatctggtggtactagagaatgcactacaaaactgtcagatgatagatcacaagatccagaaacaactcattgatgcttgtgctcatgaaacaactaaatttatcattgacgaacttggtgatgagtgttttgcaattcttgctgatgagtcaagtgatgcatacctactggaacaattggctctttgtttgcgttttgtcaataaaaaaggagaaccagttgagcggtttctaggtcttgtccaagttgaagatactacatcattgactcttaaagaagcaattcaatccttgcttatcaaatatcaattgcccctatccaaggtacgtggtcaagggtatgatggagctagtaatatgaagggtcatgttaatggtttgaagaaactaattatggatgagtcaccttctgcttattatgttcattgcttcgcccatcaacttcaactaacacttgtagcagttgctaaggagaatactgattgtgattggttctttgggcaacttgcttatttgttgaatgttctagggatgtcttgtaaaaagatccgcatgcttcgcattgctcaagctgaatacatgattgaagcattgaatttgggtgaaattgaaaccgggcaaggattgaatcaagagatgggcttagcaaggccaggtgatacacgatggggatctcactacagaactgtaatgcatgttatgttcttgtatccttcaatcaagaaagttctctttaggattgggaatgaaagtaaaggggctgaggctaatggagctcaaactatgctcacagtatttaagtcctttgagtttgttttcctgctacacttgatgaatgaaatatttgaatacataaatgacttgtgcaatgctttgcaaaagagggagcaagatatcgtaaatgcaatggatcttctggagttcacaaaggtagaactggatgttttgagacaagattctggatggcaagaatttcttaccaaggtcacttctttttgtgagaagcacaatgttatagttgttgacatgaatgggaagtatattcctatgcaaagatcaaggcaattctacagaggtgccattaattatcaccggtttcatgctgatatgtttttgggtgtcattgataaacaagttcaggagctcaataataggtttgatgaggtaaacacaaatctacttagatgcatggcatcattcagtccagcaaattccttttctgcttttaatgttgagaacttggttaagcttgctgggttctatccacatgactttgaatttcaagaaatacaccagcttcattttcagttgcaccactatatcaatgatgtcagaaatgatgaaaacttcaaaaatttgagaagtctagcagagttgtctatgatgctagttaaacaaggaaaggtttctcggtatgaaattatttataaacttctcaaattggtgcttgttctccctgttgcaactgctggtgttgagagggtcttttctataatgaatttgataaagaacaagagaagaagtaagatggggcagaaatatttgaatggttgcttggtcacattgattgaaagggaattcttcatgcaagctaaggataaggacatcatcgctcatttccaaagcattgcagaacggaaagttgtcctatagcttgtaagttataatctttgttaccattttactgttttagcctctatttatttcacatgttgccactttgatatgttgatcattagtagctggacaatttcaatttctgataaattttattaatcaatgatgctgctaccacttaattattatgtgttataaaactataatttagtctgtcatttttttcctgccatcttcaattttgaatacccatagtccaaatcctgcgcccgccactgagggaggatcgcaattctggacaagactgaacaaggtgaaggattggtacaagtttgggaaagtgattgtaattggggatgggaaaa

SEQ ID NO: 15705 - DNA, 382 bp, Setaria italica
  misc_feature (291)..(291): n is a, c, g, or t
  Peptide Sequence Number=SeqID_81679
tactgattgaagcatcatgaaaagaaacccagtagcagaataaagagaactaagctcctgatgatgaacttctattttcaccggtgctcaaatccagtacttcaagtgatcgaaaaggtggacgttctccaaacttcaacaaatgtgcaacttcatagaccgggcgcagctctaagatggcttgaacgtctaggtatgagtcacatgcgaaacaccaaactgacagatcactgaagctcaaagcaaggcagtgacctgtttcttggtaatggcacaacatatgtttgttgntaaaacgactgcacagcacatctttgcagatcaagcatagccagttttcagcagggtgatgacatctggagcacggagagtcaggcggggg

SEQ ID NO: 15706 - DNA, 321 bp, Setaria italica
  Peptide Sequence Number=SeqID_81680
atataatggccagaagttgataggtctgtacttgtgcaaaaaccagttgcaactaaacttctgaagtaatggccatgaaggctcttccgctgacaccttccaagagctcctcgtttggagctcagcagaccataccgtccttcaggccgagtgctgcaagtcccagatcagttagagcttatgcaaagggagatgaggagggcaacaagcaatccctgtttgggagcatcaccgaggcactggacttctcgcaggttcggtccgagaaggacgccgagctgctgtatgaggccagggagaagaccaaaggtggagggagga

SEQ ID NO: 15707 - DNA, 246 bp, Setaria italica
  Peptide Sequence Number=SeqID_81681
gctactgaaggccgactccaaattggctacgtttcctgaacaaggcacatcggccgcgtatacttggctgtcctgcttgagcaggacgccattgctcaaacactgcatgatatgagcgaagataacaatatctcctactctggaccaagtgggcaaaatgccttgcacgctgcggttcttcgacgtccaggtcttgcgacgaagctgttggaatggaacaactctctcaccacgaaaaaggatagg

SEQ ID NO: 15708 - DNA, 617 bp, Setaria italica
  Peptide Sequence Number=SeqID_81682
ttaatatcatcagattgcacaatatatgccatgaaaaagatcaaacttaggggccgtgactaccccactgcctatggtttttgccaagaaattgagtatctaaataagttgaaagggaagagcaatatcatacagctgattgattatgaggtcactgacaaaagtttgcttctagaaggttccatgtcacccagggatggaacaattaaggatgaccactatatttacatggtcctggagtatggtgaaatcgacttagctcatatggttgctcagaagtggaaggagaggaacaactctaatatgaaaattgatgaaaattggctacgcttttattggcagcaaatgcttgaagctgtcaatacaatacatgatgaacggatagtgcactctgatttgaagcctgccaattttatgcttgtaaggggctcgcttaaacttattgactttggcattgccaaagcaataatgaatgatacaacaaacattcgacgtgatgctcaggtagggacactgaactacatgtcgcctgaagcattcatgtgcgacgataccgactcaggtggtaacattatcaagtgtgggcgcccctctgatatttggtctcttggctgtta

SEQ ID NO: 15709 - DNA, 857 bp, Setaria italica
  Peptide Sequence Number=SeqID_81683
gagagtggaaacaatctattcacatattcatgaccctcaacaatggcttccccaactaaagaagctgcagaaaaccaggccaagcttcttacttacactggatgatacaaaagtacacggaacgcatgcctcaaataacaaaaagtttcttccattgcacaaatcagaagacatactggtataacgtggatctgacaaatctgaaaattatcgggacgtgctaatggctaatagtaagattttccatctcgttcaccacatcatcagctaactcggcctccagagatccaaggcacttctcgaatccttcaagggctgcaaaggcattagcaggtgagccaccaaggtgtcctatttcctgcgcatcccattgatgccaccatacagtctttttacagcgagcttcatctcagatgcatcttgtggtggatatacgcaagccccgagatcattgacctggtcggcaatctccttgcaatggcccagcaatctttccattggctcaactttgtcctcgttagccccattcttgttacctgagctcttgagcaaaccagtaacaaaacgaattgcctctttcactacaaccagcgaatcagacaccacagtgacaatcaacttggcaacagcgatctcctcttcagtgaaatcatcatcatcatccatatcaagatcagataatatctcatctctatcagaacaactcgtggtgtcagcaacaccattggaagacttttcagcagtagcatcaccagaatcactgatagggagttcgttcatctcccggagaacatccttcagacacacacctatttgcgtcatggctcgtcctatggcagtgcagttcgacgtcggca

SEQ ID NO: 15710 - DNA, 444 bp, Setaria italica
  Peptide Sequence Number=SeqID_81684
tccttcaacgctggtggcatccattttatcatgcttggtgcgtacgtcgactacaaccacacaggagctcagtactcatggttggagaaggatttgcagagggttgatcgacgagttaccccttgggttgtggctgcttggcatccaccttggtacaacagctattcctctcactaccaggaattcgagtgcatgaggcaagaaatggaagatctcttgtaccggcatcgtgttgacattgtattctcaggacatgtacatgcatatgaaaggatgaaccgggtgttcaactacacattggacccctgtggcccggtttatattaccattggagatggtgggaacattgagaaaattgacattgatcatgcagatgacgctgggaaatgcccctcaccaggtgataaccatcctgaaattggtggggtttgccatctgaacttt

SEQ ID NO: 15711 - DNA, 724 bp, Setaria italica
  Peptide Sequence Number=SeqID_81685
ctgtcctctcccagcatcgacccgacgcctcgccgcacccgcaccccctcttcctctccgtcggcgacgaagcgatttctccaatccggtgaggggagaggaagtcagtgaattcggtcgctccagccggacgaggagatgccgcggattcctctgatcaagttccccaagcggaatctcaaagccccatccccatccgcaccagcagcgtcgcagcccgcagatcagcacgcgaccctcatgtcccgcttgggggctaaagtagaggcaccaccttctggagagattaaaaattaccgttttagatcagatgtgccatccccaccttctcatactgctgttggaggtccagcttcactccttccgaagcgtaaacccctgactgaagaagagattgaggctatcatgctaggcggctccatctgatatggcctcacatggattggaaatttaggagctatcaataatatcatatacccgaactgaactcgactctaaggggtgttattcaagccatgtccatatggaattcgtttttttgtttcaactgtccctaagtcagctgctgtgacattctgctctaatattcttcacatgtgactgaccaaatcgtgggcatattgaagttggttgtggaaaaagtgttgaccctgaatgattttgcgcatctctaatgagtttgcgccatcataagatctgatgagcatacttattagaaaaaaaa

SEQ ID NO: 15712 - DNA, 274 bp, Setaria italica
  Peptide Sequence Number=SeqID_81686
gcccacaagactccgccgcaggccagccatgcgcccgcttatccgaaccgcgcgttgctgcctcctccgcgcgcgtgttcgcgccatggccacgcttcccatggcttccccagccgccgtcgccgccgccatctcgtcctcttcgtcctcttccagccgccccctcttctcctcaacacggcccaaccgcctcctcctcgcccgcttcttccccgccgcgccggcgccggcgccggccggagcgagggggctccggacgtccgcggccgcggca

SEQ ID NO: 15713 - DNA, 390 bp, Setaria italica
  Peptide Sequence Number=SeqID_81687
aagatgctggcagcatatgttttgtcacctttaactaaatatctagttctaccaatttagctttgttttataataatctttctattggatcgttcaacttttgcagttttgaggtacccaaacacttgtagagcccttttcaataactacactcctgtaaataattctgctgccatctgcaattgatgtatcacccagagcagtatagaaatgtttcactgtaacaaactcaagatgcctcgattgtccttactgtgataactttgcatggcagggtggtttcattctggacatgggtgtccacttcattgcaggactacgaatgcttgtaggttcggaaatcacaagtgtatcatctatctcccgtcatgtggatatgtcttgttcttt

SEQ ID NO: 15714 - DNA, 1074 bp, Setaria italica
  Peptide Sequence Number=SeqID_81688
gcagctgcggcagagcctcttggctttcttggcgggggaggtagagcataaacgagcccaagaaccgaggaggagagcatggcgggggacggcgacggccgcgcggggctccctcggatcgcggtggtcggcgccggcatcttcgcgcgcacgcagtacatccccaggctccgcgagatcgcgcacctcgtcgtcctcaaggccatctggagccgcacccaggaatccgcaaaggcggccgcggagcttgctcgtgactttgcgcctgagatcgagtgcaaatggggtgatgcggggctggaggagatcatgggagacagttcaatcatgggcgttgctgttgttcttgctgggcaagtccaggttgagctttccctaaagatgctcaaggcaggaaagcatgtgattcaagagaaacctgcttctggatcaacaacagaagcagaaaccgcactgtcaatctacaactcatttccaaaccagtttccctataaaccaatttgggctctcggagaaaactacaggtttgaacctgcctttgtggagtctagcaagttgatcaaagatatcggtgatatgatgaacatccaagttatcatcgaagggtcaatgaacagttccaacccatatttcaatagctcctggaggcgaaattttgtgggtggtttcattctggacatgggtgtccacttcattgcaggactacgaatgcttgtaggttcggaaatcacaagtgtatcatctatctcccgtcatgtggatatgtctttgccaccaccagataacatatgttcccttttccagctggaaaatggatgtgctggtgtctttgtatttgcagtaaattcaagatcaccaaagatattatggcgggttgatggaacaaaaggaacaattcaagtagaacgtggagttgatagtgggaaacatggctaccaggtgttattctctggtgaaaatgggcagtgccagaagacattttacccgttctgtggagttaatgaagaactgaagacgtttgtccaggacatgttggcggctagcaaggatggagatcacaaggctgaaccccgg

SEQ ID NO: 15715 - DNA, 844 bp, Setaria italica
  Peptide Sequence Number=SeqID_81689
aaatagaatgagatttgtgaaccaaaatttttcataacttacagatgctcgatgattgatgcagccagctggaaaatggatgtgctggtgtctttgtatttgcagtaaattcaagatcaccaaagatattatggcgggttgatggaacaaaaggaacaattcaagtagaacgtggagttgatagtgggaaacatggctaccaggtgttattctctggtgaaaatgggcagtgccagaagacattttacccgttctgtggagttaatgaagaactgaagacgtttgtccaggacatgttggcggctagcaaggatggagatcacaaggctgaaccccggagttcttatgtcgaaggtgcccgcgatgttgctgtgctcgaagccatgctagaatctagtgtgaagcaaggaaccccggttcaagtgaagagattcccatagatctgaaacatcacaaaggattatgtttcttcaagcgtgacttgtccattggaacagctgagcggtgatagtaaaacgaactttgttccaacttccaaattcataccattgagggtataaaatgcaaaaatgatagacctagaaccaacattctttcattcagatctaccatgtttcaccaggtatttaacctcataaaggtcatgtaccttttcatataagaatcgcatctgctgttcctttttgtttgcttgcttggctgcagcactgaaaggcaggtgacttatttttcactctctggaaatcaagctgaaataaatattttgtattcatgcctgatctgtgatttacacattgagcatttatgttcacgagaaattaaggattgctaccggacataattg

SEQ ID NO: 15716 - DNA, 433 bp, Setaria italica
  Peptide Sequence Number=SeqID_81690
aaagctgggttagcaaattggcatacagaaaaattcttcagatcaatgcgtttcaatagacttgatgctttcttgatttgttcatccgttgcacgtggtgcttcatcagaagtcacatgaacctcttcaggatatcttatatcgtcggagtatggaagatagatcatgtgcatgccaggtggctcaacttgaccagcagaggaagtaacttcttcttgagcaacaagggccacgagttgtggtcgagttggattcccataaaatgcaagcgcaaaccttccaaggcgcaacattgagctatgtaaagcaacaaaaacgcgtgtgcttccaaatatatgctcatcactgggataaataaatgttgatggtcgcaaagttaatagaattaaattaacctttaactaaaaagtaaactaaaaattaaaacctaaaa

SEQ ID NO: 15717 - DNA, 592 bp, Setaria italica
  Peptide Sequence Number=SeqID_81691
atatgactgatcaactgagaaaagaatgatgaaaagcgcagagtaaaacctctttcatttgcaattacaaatgatgtatgtatagaagtgaatacatatgcgctgacccatcctactactacagggacaattacgtggcttgattcagtcagtaacattccattaaagactgaaaggtctttcatatgcaatgatactggggctctacttcaggatccacagatgtgtttccagatgtacaatgatcgtcaaattttccatccgagaactccctgaggttaaaagggtttcaagtcatcatcttcgccttatatcggcggagtatggaagatagatcatgtgcatgccgggcggctcaacttgaccagtataacctcttcttaacctcttcctgtatgtttttacccccaagttcatttggaaagcaggtctatgttagcaaatcacatacaaacaattcgtgtcatcttataaaaatagatttgtataatgatgttttgcggaaccccactcattttgggtttattaatctgacctacaaagatacattcaggtaattagtagaatgaaaaattaaagcaaggtcattttg

SEQ ID NO: 15718 - DNA, 737 bp, Setaria italica
  misc_feature (690)..(690): n is a, c, g, or t
  Peptide Sequence Number=SeqID_81692
tatgggatgcacaagatcttggcctatctattgagctacttccactgagctggcctgatgaggaattcaacatgtcccttttttatgcagatttgattggtctggatggaggtgagataacggagtatctgccatctgctggtgaaaagttggaggatatgactgatcaactgagaaaagaatgatgaaaagcgcagagtaaaacctctttcatttgcaattacaaatgatgtatgtatagaagtgaatacatatgcgctgacccatcctactactacagggacaattacgtggcttgattcagtcagtaacattccattaaagactgaaaggtctttcatatgcaatgatactgggactctacttcaggatccacagatgcgtttccagatgtacaatgacacggtcgtcaaattttccgtccgagaactctctgaggttaaaagggtttcaagtcatcatcttcgccttataggattcaagccattggattgcttgaaggattatcataacttgcgaccatcaacatttatttatcccagtgatgagcatatatttggaagcacacgcgtttttgttgctttacatagctcaatgttgcgccttggaaggtttgcgcttgctattttatgggaatccaactcgaccacaactcgtggcccttgttgctcaagaagaagttacttcctntgctggtcaagttgagccacctggcatgcacatgatctatcttccat

SEQ ID NO: 15719 - DNA, 530 bp, Setaria italica
  Peptide Sequence Number=SeqID_81693
catgaaatacaccgtttctattttatctttctgtgtcatgtttagcatgcacaaatagccaaaatgaaaacaagtacctagccaagccttcttcatcaggcagggtctcatcctttatatctggcatctcatcttcacctaaagttaaaggcctccaaaatcccatagtgtctttgcaaagctgggttagcaaattggcatacagaaaaaattcttcagatctattgaaacgcattgatctgatgctttcttgatttgttcatccgttgcatcgtggtgcttcatcagaagtcatatgaacctcttcaggatatcttatatcggcggagtatggaagatagatcatgtgcatgccgggcggctcaacttgaccagtataacctcttcttgaacaacaagggccagagctgtggtcgagttggattcccataaaaatgcaagcgcaaaaccttgcccacgaaaaaggttaacttgtctttaagagggcctccactagcaaggatttccttgcttagtagcaaaaggttggg

SEQ ID NO: 15720 - DNA, 351 bp, Setaria italica
  Peptide Sequence Number=SeqID_81694
cgcgccgcccgccccaggcgccgcgacgacggcggccggcgcgaaggccgcggcggtgacgccgagccgctcctggaggtggtcgacgaggctgcgggcctcctcgagcgtgagcccggcgatggcgtccccgagctccaggaccttgggggactctgtggcggtggacgcgacagcgacggcgcggcggccccggcgcgggacggcgacggaggacctcgggagcgaggcggagggggacggggaggaggaggggcgggagaggagggtgaaggcggaggagagggtggtggacgccatggggacttgctcggggagctcgggcctcgggagtgagcagcggcggcggga

SEQ ID NO: 15721 - DNA, 585 bp, Setaria italica
  Peptide Sequence Number=SeqID_81695
gctcgactcgtcggccgcagagcagctgcccgtccccgccgcctccggccgaccacgccgccgctgccggcgcgggcgcgcatcggcggcccgtcccttcgcatggacatggcccccgcgtccatctcgtccaacccgcgctcggtagaggaaatctacaaggacttctccgcccgccgcgccggcctcgtccgcgccctcacctccgatgtggacgatttctacagcgcctgcgacccagataaggagaatttgtgcttgtacggcctccccaacgggacctgggcggtggcgccgccagcggaggaggtgccgccggagatgccggagccggcgctgggcatcaacttcgcgcgcgacggcatgcaacgccgcgactggctctcgctcgtcgcagtacactccgactcgtggctgatttccgtcgccttcttcttcggcgcacgcctcaacgccaacgatcggaagcgcttattcagcatggtcagtgatcttccatctgtctttgaagcattctcggacaggaaacatggcagagataggtctggtgttggatagcagcggcaagtccagacactcgtcaaa

SEQ ID NO: 15722 - DNA, 1075 bp, Setaria italica
  Peptide Sequence Number=SeqID_81696
ccccgcgtaccaatactacgtaccaaacccgacgactacggtaagaaggaaaatactaacaaaggacttctccgcccgccgcgccggcctcgtccgcgccctcacctccgatgtggacgatttctacagcgcctgcgacccagataaggagaatttgtgcttgtacggcctccccaacgggacctgggcggtggcgccgccagcggaggaggtgccgccggagatgccggagccggcgctgggcatcaacttcgcgcgcgacggcatgcaacgccgcgactggctctcgctcgtcgcagtacactccgactcgtggctgatttccgtcgcctttcttcttcggcgcacgcctcaacgccaacgatcggaagcgcttattcagcatggtcagtgatcttccatctgtctttgaagcattctcggacaggaaacatggcagagataggtctggtgttgatagcagcggcaagtccagacactcgtcaaagagaggaagcgacgggcacacgaagaattctagagcagcagctccgcctgcaaaggagtatgatgacgacgacgacgaagacgacgaggagcacaccgagaccttctgtggcacctgcggcgggctctacaattcgaacgagttctggatcggctgcgacatctgcgagaggtggttccacggcaagtgcgtgcggatcacccccgcccgagcggaccacataaagcactacaagtgcccggactgcagctcgaagaaaatgaggcagtagaaggccctgccggccggccggcgctcgctgacccccccgtctgatgaagatcgaaaccatactccccattgcaggtagcagatgtgaattcgtttagaacgttgttgtgcgtgcgtggtgttatgttggtggtagggaagaggcaaaattgactgatagatacatgatgctcgttgctcgtttttacaaatggctcgttaactgtcaatgccgtttgccagccgtggctgccgagtcatttctcccttggcactactggtctggactggttctactagtgtttggaaaacgttgttgagcagattggaacgtgacac

SEQ ID NO: 15723 - DNA, 246 bp, Setaria italica
  Peptide Sequence Number=SeqID_81697
cgccaacatgtagatgagcatgagggggaagacgacgaggcccacgaggacgttggcgtacttgggcagcgagttgtggatgagccaccctacaaagctcgtgctcaggaagtacatgttgatgccgatgatcatcagccccagcaaccacgagaacacgatgatgtagatggagttcttgtggggtcccatcttgctgctgctgctgctgaacttgagaagtggaatgagggcaaacggcagctc

SEQ ID NO: 15724 - DNA, 597 bp, Setaria italica
  Peptide Sequence Number=SeqID_81698
atttttttatctacttttgttttccatctttggtctctttgtagatacgagttaaaagtgctgctaaacctgctcaggattttaccctgtgttaaatttcgaagaactccacaaaaaatatagtaaagaaagttaggtggtagttatcgatactcctctggcttgtagcacttgtggtgtgtttttgtttaaccacaatggggagatacattttataaagaagtctgatgatggcaacgtgacacctttgagttatttacctctaatattttttcaagtagtcaaagccacgcaacaatgaagtgacagttaattatacaatattgagatataattttaggctcctgccacagttattgcctgtcttagaagccttaccgatattcttggtataatttggctcacatgaagtttcagtaagtacgaactagaatgtttcctttagagttttcatgattcggatctgtaaaaataaacctacgttctatataatccaaataaacatagatgacataaacatctcgaatctttggtcctgcttatgcttgaagctgttctggtttctagttcttctgcaaagagaaattgaaggtttca

SEQ ID NO: 15725 - DNA, 269 bp, Setaria italica
  Peptide Sequence Number=SeqID_81699
ggcgctcgcgagccgccaccggtggtcggccacgcgaaagagcgcgccccacgcctcgtcggcgactagcggcgatgtcggcggccgccacctcgtgcggcgccccctccccctcttacgcctccggccccggcggcgaggacggggagatcacgtacgtgagctacggcggggagcagcacctgccgctggtgatgtcgctggtggacgcggagctcagcgagccttactccatcttcacctaccgctacttcgtctacctctggccg

SEQ ID NO: 15726 - DNA, 837 bp, Setaria italica
  Peptide Sequence Number=SeqID_81700
cacgaggatcccaagttccaagcacaagccgaaggggcaggaccggaggagaacctcgagcagcgcagccatggcgaagcagggggcgaagaagatgaaggacgagaacaagaagcgcttggacttgctcctgcgcatcatcctcatatccaacgttatttacatagtggtgaggatggcgataatgcattcatccttcacctggaagcattggattggtcttatgttaacatctgctgcatacttttttccatacaagcaacttgccagtatggcaaagccagtttactctgataatggagaattactggatggtggcttcgacttgagcactggtggggtttgcgagtatctgtatgatgtgatctatatcactgtctttgtgcaactgatgtccatcatttctgagaaattttggtggacgtatttagtgattccagcttttgctggatacaagattttcggtcttttgagaggaacatttttcagtggtggttcagagggtgaagttgaagatgagaagacccgaaagaaaagggagaaaatggagaagaaggcatctagggggaagatgattaaaactagggcacgttgatatgccagctagggcctgttgcttgaaggttagattggtttatgatagctgtccgactgaaatccaagctgtttggcgactggtgagtattgtcatgatgataatgctcaactaacagttgctccaaacagctacattatgtagtgcaaatactaactgatctccaacttgttcaatcagtaagaattttatgtgtaatttctgatcctttttgaccctatgtttcatacatcaacattata

SEQ ID NO: 15727 - DNA, 481 bp, Setaria italica
  Peptide Sequence Number=SeqID_81701
tgaggatctaatggtagggaaaattgattgatggatatattatttttcaatcgattgacatctagacagacaattttatatacaaatcagtttaagacgggtcattgaattttcaaaagaaagagaaccacatgtattcattattcatgtattcattattcctgatcgatggtttggtttaccgttctttctgaacaagtgattatccgattttgtttctgtgcaactcttatcatgtcatagagtgatgtcacaagttatgacttcatctgtttgcctaatttcatttctctcaggcactatcccttgctaattggatgctgtatacagatcaagtacgttggattttgctatggcagctgaggaagatgtcaagcagaggcagatcattgaaaatcgtgcgagaaatataagccacaatgtccggtgcactgagtgtggtagccaatcaattgaagattcacaggctgatgttgctatt

SEQ ID NO: 15728 - DNA, 255 bp, Setaria italica
  Peptide Sequence Number=SeqID_81702
cgaacggcgacgcgtcgggcggcgaggggcaacggcggcgcgtcgggcggcgaggggcaacggcggcgcgtcgggcgggcgttcggcaggtggaaggcgacgcatcctgccttgggtgatcgtgcttctgttgccgcgcatccacagagggtagtgggcggtccgccggtgccaggcactatcccttgctaattggatgctgtatacagatcaagtacgttggattttgctatggcagctgaggaagatgtcaag

SEQ ID NO: 15729 - DNA, 295 bp, Setaria italica
  Peptide Sequence Number=SeqID_81703
ggcgacgcatcctgccttgggtgatcgtgcttctgttgccgcgcatccacagagggtagtgggcggtccgccggtgccgcattgcacagatcaagtacgttggatttttctatggcagctgaggaagatgtcaagcagaggcagatcattgaaaatcgtgcgagaaatataagccacaatgtccggtgcactgagtgtggtagccaatcaattgaagattcacaggctgatgttgctattctgcttagaaagctcattcgtgatgaaataaaagcgggaaagagtgataaagaga

SEQ ID NO: 15730 - DNA, 387 bp, Setaria italica
  Peptide Sequence Number=SeqID_81704
cctccaagaaagtggtggtggccaggcaaatgatgtagtgttcatgcacctctcctgcaatatgaagtactcgttttcccatggtagcagcatagaaattaaatgatcaggaggcaaattttagcatggagtttgaatgcatacatgcgacctttgatcacgaatttcagtttagccaaacatttgcaacgtactccatggatctagcaggatttgctgcgttacggaagccacgcatttctacttgctgttgtctgtacttgctgctgcctgctgtttttgtgagcaggatggtctgaagcctgttgatgagttaacaagattatcactcattccactatatagccaaaacagcaagattaccacgtttcactgtcttctaaaaaa

SEQ ID NO: 15731 - DNA, 482 bp, Setaria italica
  Peptide Sequence Number=SeqID_81705
ccgcttacaccgtgacatattccaactctcttcagaagtcctcggttccagacaacctctgcagccctgcagctgattgcttgaaatgatcatcatggaatacctcatatgctttagccagtgtaagagcaacaccaggggcaccgtgacaccagtgcaccaaccgatcagattcattgccttcacttgagggatagttgccactaggaaaccggttcttgatcatgtaccgcagggtgttcttcacatcatcctgctcatccagtttcagttcagtgtgcatgagcacgtgcatgattccagcaagaccatgggcagcaccccagtacttcttcccatgccattcgtacatcagcgggctactccccttgcttgagagctttcttccctccctaatgatgtcctttgccacagaattgatgtgttcaagtgggatcgtcttctcgctgagatgcttattcaagaacaagcaagcccataga

SEQ ID NO: 15732 - DNA, 1081 bp, Setaria italica
  Peptide Sequence Number=SeqID_81706
aaagaggaccggaatacaaaccagccccaaacggccggatggacacaaacgcacacacgcgtcgttgagactgaccccaagagggccacgcgtccaggctgcaggtcttcgccgccgccgtcgaggagcacaccggcgaggggccaccagaggcgccggcgtcacaaaggacccttgaaggcgcttgggaccggtgcggagaagcctcacagaggcttaggttggatgtagagggcggagttgaagagcgtcgccggcgacccaaaggtgaagatgaaaacggcgccgacggagtagaagacgacctctgcagagccgatggtggtgagcggctcaaccagggaggaaaacctgcaaggggcaagcaaaagaggagcacaccgctgcaacggaacgggcggaggcgagggtggagggggcggagacggacacctcccccgcagatccagcgaagcccaaacaacgaggactctcagatccgcaagacggaaaaccaaatccaagggtagactcgccggaactgcagcagggatggaggggagcgggagcaaatccaagcggaagagggcggaggaggagggagagggatctgctctggtgggaaggagagggggatttattttattcggcctcaccttgatactgcagcagctaacagtggcggcgacaacaagaacgccggcgacgacggcgcccgcaacaacagcagcaaggacagtttccggtacgacggccggcacccatccgggcaacacgaaggaaaactactgctaatatacacaggaaaatatcaggttcaatttgtaacatggcaagccacgcgcgaggctaccagagcaagtgagcccgctctgctccgacccatgctcgtcgtagccgcttcgtcccggccctcgccagccgcgacgccggaggtgcagaccatggtgacactaggagtccagcgccgggtgcgcgctgcctgcgagggtcgcatatgcagacgaccatcgcgtcgcccgcggtccgcggacgctcgagcagcggcggcatagcatacgtctcggcaggagatgctggcgtggccacggatgcagtggcc

SEQ ID NO: 15733 - DNA, 981 bp, Setaria italica
  Peptide Sequence Number=SeqID_81707
cttctggcgagtttccgtttcaccgtttcaggtcccatggcggcggcggcggcgcagctgcatggatcggccgcggccgcggcgacctaccgacggactcgagcctactcagttccatcctcatgccggtggctacggacccctctagccgcttccccgaagctttcgatttcttccactgaagttggtatgaagccattaggttttgctgctaaactttcaacaaacgagaacgctcgagttgaagagttaaacttgcaatcagatcagatgaaggaatttgtacaggcagaggggcatgttattccccaaaagaggagtgctaaaattcatgatttttgccttgggattccttttggtggtcttttattttctatgggtcttctaggatacatcttttccagaagcaccataagtcttgtcttgggcgttgcgccagggttcgccactctgctacttggtactctcagtctaaagttttggaggagcggcagatccagtttcctgtttatcttggcccaagcagcaatatctgcttccctggcatggaaatactctcacgcttacttcttgacaaacagactccttccttggggtttctatgcttcactgagcactgcaatgacttgtttctacgggtatgtgctgcttgccggagggaatcccccaccaaagaagctggctgccatcccacagcagtaaaaagagagattcagtctaggatcagcgtggttggcagcatgtagcacaatttttgattatcaaatttgtatattccccaacctgtggttcactgctggctgggtttcttttggctctggtagtctgaaactttgagctaataatgcttcagaggatgatagccctgcctccagtgaacttgctctgttttcttctacatgatgaatgtacgtgataaagataagcttgctgagcttgtacttgagacatttgtttactactcacactgagtcggagaca

SEQ ID NO: 15734 - DNA, 2688 bp, Setaria italica
  Peptide Sequence Number=SeqID_81708
ggggtcttcaaaattaattgattgatcatgtttaaatggaactcatacaaggataatgctcactaaaaagagcacaagagataaaggtgagaaatatcagaaataaaaaagaacagctataaagctgaaagcagtgattgtgattctactaccaatataaatatttacaaacggaaacaggaaaattgtaagttaatctgcattccctctcaagaagtgcatgattccagcatttctgcaccttgaacacatgcagcagaagcagaaaaggcagtgccttaaaagagagtcctctatcaaatcgctaacattgaattccgtcaaggatttgcagcattttccacttcaaacatatccagacggatctttattgtcctttctagttctaccaggccaattcacagccggatagtcagctacctctcaaagctcctgtcaaatctccgaggactcacccttctttggggttctggtgatctgggagcagaaatacgagtccgaaatttatctccagtattatttctgaattgttttacagcaccatcacggtcatatggtttgacagaatgatttccatatctatcagcatattccctttgatcatcaccgttcccatcatgcttatttgccctatcatagccataaggaagtcttccctgtgttgaacggtagaactctccagaccttgatcgtccttgggagtccattacatcaaatctgtcattccgtgaggtaattcttgagggagggcttctccttgaatatcttttattatgatcagaaagatctaccgttgagccgttccttccatcaacccatgttgaagcatgttgggagtaagtgtggtttcttgatggactgtagcgcatagatcgatcatcatatccaggttgtctcttaggtgaagccattctacccattctaactttagccatgtgattaggtggagatctactattcctccgcaaagctgaacctccgtttgcgataatcttccttctgttcctaggtgatgcccagtcatgtggggatcgggaccttgacccagaaggagatctgctgtgagcacgcgaaaggttaagtgatgctctacccgtcgggatgcctcgttgtctattgggcagcgagcaacgaactgaactcaaatttccatctgtactatgatctttctccatttcaggaccatatcgaccagagcggttaccattcgcaccaaagtgccgctccggagatgattccctagcatgtacaggacccctggacatcccacaagctccatccctgtcaattggggaacctcgtccagataaagagcggtatgagccacttgaagtatttctcatccttcttgtcatctgaccagcatttgcagcatcaacagcccttactaaagtgccatcaggtgcaacaacaaaaccattgctctccatctttgcgacagcagcttctgcagcattcctcggaccagatgggccataattataatattcaggtgatttacgccgagcagaacgaggatgttttgaattttccatccactgcccccggttgcctgtttgaatatgccgtgatgcgtcatagatgccatgtgacctatgagagtcaatcggcctttcagctttggagcctgagccataaccatcatcagatctgctcagtccatttctctggggtctgtcaaatgacttttgttgttccactcgttggacatctttatttgatagacctatttttctcaacgactcgtcatctccagcagcatctaatgaactcaaaacacaccggttagatgaatcagccccatcccttggatcatgtcgagagtgcttttgatcttcaggcaacatgtcccaacctgtgttcttcattctgatacttgacagatcatcacctagaccatcattgcacctttcagactggctgactattgcagcagatccaactgctacacggcctgggtttatcccatacatctgggtatcacctctcgaatgaatactttgagcttttccatcagtgacaggtccaccatctaagcagtttgttaaccatgaacgcttagacgagataggtgaaacaggtacatcttcctttcttgactgtgtttcattgtaactagaaacaggaatacccacattctttgcaacagagtcaacagggagaggagcgaggccaggaatggcttctccattcttgtaatctgatacctggtaatgccagttggcaggcttaacttcttcatatccatcacccacccaataacgatcaccagattctctaagttatacatcctcatattgagaatcatcctcctcaacatcaatttttccaaccccagctagattttcactaatacgagatgtgtcagtttcatagcagtgctcagaataaatatttgatgcgaccttcccatgatcattttctcgtgaatctacaatactatcagcatcagtaactcctggtttgtggcattctgaactcgcaacaggaacctgaggagccacacctgaaatgtaaaatgtttctgcactgctactgttggcacaagtaattaaacagtctttagaattaatcactgcatcagtgccatcttcctcatgtacatgagccatatcacaatcagaagaccctgggttgtcccctggatgagtgaggttttctgcatcagtactcttgttgacataaaat

SEQ ID NO: 15735 - DNA, 280 bp, Setaria italica
  Peptide Sequence Number=SeqID_81709
ataaactgagctgcaccttgctcctggagcatatgcaggtgcattggtgcagtgcaggagttgagatccagggcctcatttgagtcactcaaacagtagcccccatattcagatggcacaacgaaagtaagactaccagaactattgctattagtggagctaaatgtactagaactagcattggaatgggaatagaacgcattggaagcttgaataagccacggcaacccttggtcaccttccacacaattggagggaaaggtaccaagcagctgttcca

SEQ ID NO: 15736 - DNA, 359 bp, Setaria italica
  Peptide Sequence Number=SeqID_81710
ccgggagggagccttccaggccgccgcgatggtgggaggcggcaagccgctgggggacagcgtgttcgcgggccacgcggccgccggcgcggcggcgatcagcgcctccaccgtcgccgtgcaccccctcgacacggtcaagaccctcatccagctgggcgcggcggggaagaagcagaagatggggctccgccaggtggtggaccggctcatggccgcctccggccctgcagggttttatagtggcatcggttggtccataatgggaaaacttcctgggttgggagcacgctttgggacctatgaatttttaacagccttctataaagatggaagggaggacaactatgtctattatt

SEQ ID NO: 15737 - DNA, 642 bp, Setaria italica
  Peptide Sequence Number=SeqID_81711
gctctttaaatttatgcatacgtaatagccttgaaatcagtgtgttgtcatcatgctttgtccaaagtgaaaatgcaatccagctagcagttctacggtcaatagatttatctcttgaaacagtcctgttaccgcagtggctgtaaaacacacagcaagctatgcttataaccgcacagttttgtattatagtaagcagctctggctttttctctgccattcgagaaacaagacccaaataccaaaggccaagaaatatgatatggaagaccatcaagaaaattagagaagagatataaattgtgaggaagagggaaagattcatccgcaaatccaagcccattgactgaaaactgggcagatggtatagtgctgccaagaatatccaagcaatataccatcggttgaagttcgaatagtttggtttgatggtcttcctaataaaaggtgatgagaagaaatagaagaagccaattaaacaagcatacatggaccaccatttaaaattcttgtccaatttcattataaggttctgtaagttatctgaggaaatgaagaaaagccaacaagcaaacacagcaatcatgaaatgtcttgagtgctcatgcgggtatggatatctatgagtcaggatgttcctca

SEQ ID NO: 15738 - DNA, 1373 bp, Setaria italica
  Peptide Sequence Number=SeqID_81712
ctccgccgcgcgtacaaatacgcggcgaaacggtcagggccgaaccctaaacccccgccctccgcccccgcgcctcgctccgctcgatcccatggcggccgtgcagaggctcctccgggcagccgcctccggtggcgcggcgacggcggtggccaggaggcgcatggcgtcgctggcgcaggagcaggcgccttccgcggcggcggcgcagaaggggttcccgttcgcggcggagaggatgagggggctcccggcggcggagaggaacgtgcagtgggtgttcctgggctgccccggcgtgggcaagggcacctacgcgagccgcctctcgcgcctcctcggcgtgccccacatcgcaaccggggaccttgttcgtgacgagctcgcctccaccgggccccttgctgcgcagcttgctgaaattgttaatcaggggaaattggtttctgatgagattatcttcaatctattgtccaaaaggctcaagaaaggagaagaccaaggagaatcaggatttattcttgatggttttccacgaacagtaaaacaagcggaaatccttgatggagttacggacatcgatatggtggttaatctaaaactgagggaagatgtcttagtagagaagtgccttggcagaaggatttgcagccagtgtggaaagaacttcaatgtggcctgcattgatgttaagggtgaaaatggattaccagcaatctacatggcaccattattacccccaaataactgcatgtcgaagatgactacccgagctgatgatacggaagaggtggtcagaaaccggcttcggatctataatgacatgtctcaacctgtagaagatttctaccgcgaccaggggaagctcttggaatttgacttgcctggagggatccctgaatcttggccaaagctgctccatgttctaaatcttgaagaccaagaggagttaaagttggctgctgcataggtctcatggagcagaccattgcatactaggaaaaatcgataccgcaaattttttgaataatggaaaagagcaaacttactccataatttagtttcgctgcggaagttattcttttttgtcagaagcgagcttttggtttttgccggcattttgattagccggtactgtgtaacggtaacgttagttgtaagctgttaccattcatgtccggggatctagtttggagtgcatgaagacatgcactccaaactatttatgtccggggatctagtttggagtgcattttgctgctatttataacaaagttgtaatagctgaaacactctttcctgtgtcgcgtggcttgatacataaactttgggtgaccagtttttagatgatgctatctaaagcaacagagaaa

SEQ ID NO: 15739 - DNA, 541 bp, Setaria italica
  Peptide Sequence Number=SeqID_81713
gttgccacagtccattacatccgcatgatgggtcttggtccctcgcaatcctcattgtgcacactcaattctgccaaccacttcatcctaatgatagcatatatatacgcaataaagtgccctaagtaaaccatataagttgctttagctaggagggggctctatagataaagaagagccttctcctggtttcctagagtaaattaatatgaaaaagtaagttaatctttttagactatagggtcaataaagttttgtaccatatggaggcaaggtttcacgtgactacacgagatatcgttttcttccatggatttctctatttcagactttcagtcaccaaatcagcaataggcaacttctaacaaatttataggaggaactgtttaacgcgtagagcgttagtgtaggcaaagaaagacaaacctgccacagacacagcaagacaaagatccttttgcagcctcacggtatttcttctgcatggctgggctctcatttaatatcttcacatagttaaggaaggcttggtgaacctgct

SEQ ID NO: 15740 - DNA, 1309 bp, Setaria italica
  misc_feature (378)..(378): n is a, c, g, or t
  Peptide Sequence Number=SeqID_81714
ttagttccgtttaggttattttaagttcttaaaaggtttggttatttcttacgtttgttattctagtttctagatcctagtaaacctggtaataacctaatctagtttatccgtgatacttcatggttctaagttacaagtgtggcgtctgcactggcctcgacttccttcttgctcctgatcttgcatctcctctttgcttcctcatctaggtagaccaggtcttcgacgaccgcaatgtgcgcatacagcagctcttccaggttgtcaacaggagcagccttcttacctttgccatctctcatctgctggaactcttccttaccgtggtttctgctggagaaatagtcgttgattctcatggcttcctgaaacccngatattgttggctggaacttcaccaggaagacactctgattagcaggtcttccatggctaaccttcaccttctcacgtggtacccctatatctgccagtacgccttcaatttcttccatggacacaacctttgcttcagtatcctttgccttgttcacgattgagctgttatgtatcacaactactggaggccacaacatgagatctcccctcatggcatttacttcctcagatgaaatggagtgatgggctttagatgtgtctggagcaacaagccaattccaccccatcaaaacacagagtgctttgtgaaaccctaagtgttttgtcttcaaccccgctttggatgtatcataagcatgtgatagcaaggcatcaagatctgggaacttcctcgcaacactgccaaagacacagcaagacagagatccttttgcagcctcacggtatttcttctgcatggctgggctctcatttaatatcttcacatagttaaggaaggcttggtgaacctgcttactgaattcgtctgaactttctggtggatctttctgcacaggaagaacatcattctctggagcatcttcatgcttgactccagaaccattaggatcatcttctgacaacttagagaatttatttggcttaataaattcatttttctctgatacatatccaccatggaattgatgaggaccagttttcagtctcttttttgcactcttagtcaatcctcctcttcctcttcctcttccatgcatgaaagttccctggaattgtgagtgggaacttggtctggacagcctctgagacataggaatgtgttttggacgcccatacgtcaaaatgtcagagtaaggagaaataaattgataaaaatcaataaaaaaaaaaaaaaaaaaatgtaacaaagcaagccttgagaaacatt

SEQ ID NO: 15741 - DNA, 1030 bp, Setaria italica
  misc_feature (1)..(132): n is a, c, g, or t
  Peptide Sequence Number=SeqID_81715
nnnnnnnnnnnnnnnnnnnnnnnnnnnnnnnnnnnnnnnnnnnnnnnnnnnnnnnnnnnnnnnnnnnnnnnnnnnnnnnnnnnnnnnnnnnnnnnnnnnnnnnnnnnnnnnnnnnnnnnnnnnnnnnnnnnnttttaacgtttgtcacaaatgaaaaggacttaataacgcaaacatccagtcggtacaatgtatcttagaaccacagattcttcaccgaggcaattctgcctttgccattaaggtctgtaatcctaccattttgccaatggacactcccaaggtttgtttttaccacgtgaagggtcccagtggcaaaaagtcaaaaaccaaaatgcatctgggatttcatcacttgatggcaaaagcagaatttgcgcgctcttacactgcagccacttggttgtacaagcagccgtaggattaagcaaaaggtggatcacgtgatcagttcagatcctagtaaacctggtaataacctaatctagtttatccgtgatacttcatggttctaagttcagtgtggcgtctgcactggcctcgacttccttcttgctcctgatcttgcatctcctctttgcttcctcatctaggtagaccaggtcttcgacgaccgcaatgtgcgcatacagcagctcttccaggttgtcaacaggagcagccttcttacctttgccatctctcatctgctggaactcttccttaccgtggtttctgctggagaaatagtcgttgattctcatggcttcctgaaacccagatattgttggctggaacttcaccaggaagacactctgattagcaggtcttccatggctaaccttcaccttctcacgtggtacccctatatctgccagtacgccttcaatttcttccatggacacaacctttgcttcagtatcctttgccttgttcacgattgagctgttatgtatcacaactactggaggccacaacatgagatctcccctcatggcatttacttcctcagatgaaatggagtgattgggctttagattttttgttttta

SEQ ID NO: 15742 - DNA, 622 bp, Setaria italica
  Peptide Sequence Number=SeqID_81716
gcatcttccatcctcctttcgagactttcagaatgctgggatggtttacggcccctttcttctatatcctccagtagtttctctccaacctgcattctctgtgtcgcatacatagctccagtgagtgtgacataggttgtaatatttggcaaaagacccttagatttcatctctccataaagatctagtgcatcagagatacacttgttgttgcataaaccagtaattaaaacattataactgacaacatcaaccttcagtctacataactccatcaacctcttcaagtgcaaagcatcagcaatcttagattgtttacaaagaccatgcattagagtagtgaaagtagcaatagttggcaccattcctgaacgcatcatactgctaaaaactaatgactgcctcctcaagtttcccgcatctacaaagtcctctaataattgagctgtcagcaacttcagcaggcaccacaccaagagctttcatttcttcttttagcctgaatgctccatcaatctcgccaatccgacattttgcattgaccaatgcaatatagtgtgtatggtttggttgaagccctccttgtaacatctcacgtaaaacctcatgactctggtcgaag

SEQ ID NO: 15743 - DNA, 678 bp, Setaria italica
  misc_feature (1)..(53): n is a, c, g, or t
  Peptide Sequence Number=SeqID_81717
nnnnnnnnnnnnnnnnnnnnnnnnnnnnnnnnnnnnnnnnnnnnnnnnnnnnnaaaaaggaaaaaggtttcaggagcactgccatatcatttagggagaagcatgccagtcattacagagtttgagttacataacaaaagggagctctcagtctcaaaggtaactaacacaaggaaaacgttaagccaccaaaagccctccgaacgcttgctgcctgagagaatccacacgcttgcgatctcctccagtcctgcttgacgtgccctcttcgctgaactcatatccagattcctgctgaccatgccacgagaatcccaattctgagtactggatcgtgccgagggttggccaaacagagccctgaagtggttaagcaggcattttctgtatgcctgtacaacacaaccatcaggcctcaagttgctgaataaatttttttcctcctgccgtttgcctgcacgaagaaaagctttgaacaggcctcttctgctttggtggtcatcagacgtgacttgctttgcccttagtttttcattcgcagtcagcccaagaaactgagccttaagatccctcttcaactgaatttcagattggctgaggtccctgtactcttacaccacatccaaaaatccaaatcagctgcctcgccacacaaattgcatacatcttcattgaaca

SEQ ID NO: 15744 - DNA, 1293 bp, Setaria italica
  misc_feature (1)..(1): n is a, c, g, or t
  Peptide Sequence Number=SeqID_81718
nggttttttcagtccaaggtaccgtccagcgttttgtctgaaatcttaatattctgccttgcttcaactgaatttcagattggctgaggtccctgtactcttacaccacatccaaaaatccaaatcagctgcctcgccacacaaaattgcatacatcttcattgaacattcttgctcccggcccttcagaaattcttcctctcctgaaaacaggctgcagctgcctttaactacaaaattctatttcaacagtaccaatgaattcatacctttgttgcagagccagcttcagagatccaaacaaatgatccaacaaaaaccataagcatttgactaagtgaacgcgtgatggccatccatcttgtaaatcgtatacattggaatgtccatccaaggtcttctcatcgagtgacaggcatttaaaaagctcctggtaattggaacataagattgatactgaatctctgcgaggactacattctcactccaacaagtgaaagcacatgttgagctcgagacaacatttccaccacctgctgtccctgtctgtcgttcagtagcccctgcctgggaccaagagtccaagatgctgttagcctgttaccctccacctgatggcctctgtctatgttctctttagtgagtaagtgcgctccagcttgtatggctatgttcgttcttatgtagtgaatgacaaaccacaggcaaataaagattcaaacatggaaattgcccgtgcgcaagcatatgggatgttcctccccaggtaaattttgtctttctgaattaactgttaaggcaaattgcattaaaatgtcacagtacaaggtatcacagggcataaaccagaaaatgtacccacagttttctaccaaccatattggtcaaatgctaaaattcatttgacttgggtaagttccagcggaatttcaatcactggaagctttctactggcaatacctcaacctccttaacaggcattccctttctgcagtttcttatcatgtttaaccttctaattgcatcttccatcctcctttcgagactttcagaatgcttagatggaataaggcccctttcttgtatatcctccagtagtttctctccaacctgcattctctgtgtcgcatacatagctctagtgagtgtgacataggttgtaatattcggcaaaagacccttagatttcatctcttccagggccccgcctcttccgcggccgagctcccttccacgctgtagcgccggctccgtcctcgcgcgcagctcagcggagcggtgcggacgagtctt

SEQ ID NO: 15745 - DNA, 1164 bp, Setaria italica
  Peptide Sequence Number=SeqID_81719
tttcctgcagtaagagtacaactgtttcgtcttctcttcaacctacatgatttcttctacctatacattgcattacatgacttgtttttcatcatgaaaaaaaatatctccatcttctccatcagatacaaaaacataatcagtcgagactctacaggagatgtgtctgaactgaaacaacaatactggcatagctcacttcatcaaatccaagaacacaaagccattccacaagctatgtagcaccatcgatgccagtaggttgcgagacctcgcaaagacacctcccatcactaccccaagaaatatcaaaggcatcaccctctgtgcattgaagtgtgcgagtgcaaaagctgcagcacttgctaggatcgtcggtgggtagggcatgtaccgtgttagagatgggagaaggaatcctcggaacacaatctcttcccatataggtgcacacacgatgacaacaactgcatacagggccattgccactgggtcacgggccacaatggactgttctacactcgacaccccgacgactggacctggtgacattggaaccaggctgatgtttatgtgagagagcagattgactaacgggaacaacaagcaccccaacactacgtccaaaatccatctgccctttaaattgaactcaaaccagcctggaggaagggggcggaatctaccaaggcattggtgaaggattgcaatcccagcaaggccttctgttatgtctgtcaagaggctatacagtgcttggcccctatgtgtcaatgtttccttgctaaagccagcagcatgggccaagaatggcactatccaggaacccacaaacccaaaaatgtggcaatccataaaatcatgacctgagcaatggtttttccagtccaaggtaccgtccagcgttttgtctgaaatcttaatattctgccttgtaaatttcctttaccttatgcacttgcagtaaccaacccccatcattgaaattcttctcctgatccccatttgaacttcccacctcttcctctttcgcctctacagcactgaagctctctgattgggcaacatacttgaaggcacgatcatcatcagatgtcgttggcacatccggatcatttcttaagcatgagacgtgccacaatctccattacttggctggagccg

SEQ ID NO: 15746 - DNA, 302 bp, Setaria italica
  Peptide Sequence Number=SeqID_81720
ctggtcaaaagccggcgcccatcggcagaaagaaaggaaacgcttcccctttcctttcctcgacactggagacccaaacagatgcatggcggcatttttcttcttcttgattttagtaaaaaaataacccccgagaaaaaaaatccactttttttacatgggcggaaaattgagaatgaacacgcttgcataaacggcacgacacggcagcgcaaagtcgcccgggacacggttcgcccgtcgtcgcctgggctttgcttgtctgcgcggaagggagaaacaaaacaaacaggccacttttg

SEQ ID NO: 15747 - DNA, 367 bp, Setaria italica
  Peptide Sequence Number=SeqID_81721
tccgtcaaaagggtacttctagcttccaatagaaggctactgctgctaaggaagacacagtcatcttttttcttttgtcactaggtccacaatgctatcaaacaacttattttctctagaagtaagattttcagatcgcccaattatgattttctaggagactcatcgtctttccttccctgaaagccgcatgtaacaaatcattgttcttcgttgccatccttctacgaactttgtgttttttagcaggttcatgcaagggatcattgttcttcctctttgtcatgctaaccaaaacacaagagtatcaggtacctccaagggctcaggaatccgccggcggacttgcctactcactcgacgtcaa

SEQ ID NO: 15748 - DNA, 331 bp, Setaria italica
  Peptide Sequence Number=SeqID_81722
atattcagtcagctacctctcctactccagtttctcatgttcgggggggggggggggggagggggaggcacggggcatcaatgagggttacaccctgtccaaggtcccttttactccctataagcaaccccttagggactaaagggcctataagcaaccccttagggactaaagggcctataagcaaagtttagcaacctttagtcaccctgtttggcaatttagggactaaaagggactaaactttagtaaagtttagcaaggggaaaccaaacagtgccttagctatatgggtcctaatttttaatagatttctaaaaaaaaaaaaaaa

SEQ ID NO: 15749 - DNA, 258 bp, Setaria italica
  Peptide Sequence Number=SeqID_81723
ctccctgtctcagcatgccctcccatcaattcttcaaggctccctgctagtccccactgaaagagagaggcaccaatctgcaattcgatagctgctctcttccttgtaggtgctgcattatgggagagagcccaagccttgcacaaatgatctggccaagatcggcagcggcgagcagggttcatcggttcgtctccgaattcctaggcttggagaagagcatcatgcgagaggggcagggagagaccatcaagtacg

SEQ ID NO: 15750 - DNA, 1193 bp, Setaria italica
  Peptide Sequence Number=SeqID_81724
ctcgagctaagctcagcctcagagccactctcgagctgccactgcaccagtcttggcttagaacaagcagcagaaaccaagcagctcctgcagcagcaatggcgaagtctcacaccttgctgctcggcgcactggtcgtgctcgcgcttctggtgagccccattgcttgctcccgcaagctcgccaagcccaacaagcacaggccgagccacaagccggctgtcagggcccgcagcaactacaccgctaccccctcggcctccgacgcctacggctccggcggctggctgtccgctggcgcgacgtactacggcgccccaacggcgacggcagtgacggcggcgcgtgcggctaccagaccgccgtcgggcagcggcccttctcgtcgatgatctccgccggcagcccgtcgctgttcaagggaggcaagggctgtggcgcctgctacgaggttaaatgcgacagcaacccagcgtgctccggccagccggcgaccgtggtcataaccgacgagtgccccggcggcgtctgcctcgccgaggcggcccacttcgacatgagcggcacctccatgggcgccatggcgaagcccggcatggccgacaggcttcgcgctgccggaatcctcaaggtccagtacaagagggtgccgtgcaagtacagcggcgtgaacatcgccttccgggtggaccaaggctccaaccccttctacttcgaggtgctgatcgagttcgaggacggtgatggcgacctcagcgccgtcgacctcatggaagccgggtgcggcacttggaccccgatggtgcagaattggggcgcgctgtggcgctacaactccaacaccggcaaggcgctgagggcgcccttctcgatgcggctcacctccgactccggcaaggtgctcgtcgccaacaacgtcatccccgccggctggacggccggcgccacgtaccgctccttggtgaactactcctgaatgaactgcagcggcggtttcactttcacccccgctgcgcttggccggattattatgcgtggccaagaattgactgcagggtgtggtggttaagaaagaatctcgagtttgcttcgtgtgaaatgtgtgtgcgggtgtctgcgagaggcggtgtcagaggaggaggaggaggaggaggttgaagagagccgtgtccttcacctccctccgacggtct

SEQ ID NO: 15751 - DNA, 293 bp, Setaria italica
  Peptide Sequence Number=SeqID_81725
gttccgcggttttggtcgtttcttggcagctggtagttgggtggacttgagggcgggcggcgttggggtggggtgtccacgccagcctcgtcaaggccgagtcacgcgtccatccgccaccactcgctcgacggacgatgtcgcagttaacgcggctgctcgctggggcctgagcctgaccgcccgggggttggctttacttggccgcgacacgccacgtgctcgccgccgccgccgccggcgctggcccccgtacgcgcgcgtctgcatccgcctttccccgaccctatgca

SEQ ID NO: 15752 - DNA, 781 bp, Setaria italica
  Peptide Sequence Number=SeqID_81726
gtccggggaggaaccgctccggccggaactccgacggcgcgtcccagacctccccgtcgagcccgatgtcgcccacggcgaagttgaccggcgcgccggcgggcacgcggtacccgtccagcgtggtgtcctcgtgcacggcgtgcgggagcaggaagtggcccggcgggtggcgccggagcgcctccagcacgacggccttcaggtacggcatcgcctgcaggtcctcctcccgcacctcgccggcggcggcgccgacgacgccggccacctcgtcccgcagcctgccctgcatctccgggttcttgacgaggttcgccaggacccactgcagcgcggtggccgtggtgtcggtgccggcgctgaggaactcggagcagaggctcacgatctcgccgttggttagcgccctcccgccgtcctcggggatggtgagctttagcagggagtccacgtagcagtccccgtcggcgccggcgtccctcctggcttctatcagcgggaggaagagctcctcctgccgccgccgcagcgagacgagcttctcccaccggcgccggaacacgagcttggtgacggacgggaggaaggagaagacctggaagctgaggaagttggcgaggagctcccgctgcgtggcctcgatgtcccgcacgcgcgcgtcgtcgtcgttcaccacgcggtcgccgccgaagcacatgtacacgaggaggcagaacatggcgtactggaacggctccatcacggggaccggggactccccgccgcggccgtcggagcg

SEQ ID NO: 15753 - DNA, 280 bp, Setaria italica
  Peptide Sequence Number=SeqID_81727
cgccgccgccaccgggtagccacgcacgcgccgctggtgacgggacacagcaacccacggccccgtccaccggaggctttctctcgtcgagcggccgtctctctcgtcctcttccccgcctgtactggttgttgttcttcggtacgcaagatcaatcctacagaaggtgcggacgcagtttctttcgccgaacagattagggtgcttcatctgatccggaaagtccccgtcaagtgcgcccctttggttgagagaaaatacaataaggcttggcttgcgg

SEQ ID NO: 15754 - DNA, 806 bp, Setaria italica
  Peptide Sequence Number=SeqID_81728
gatcctcgtctccatgaacgacgagctctgcaacgctgggctctggtcctcctcctcagtctccgccgcggccgctgccgcggccgccgtagggccccagcaccagcactccgctactccgccgccgccacactctgcggactccgacgctgccgacggtggggcgcgcccggccccggcgggtctctcgacgaggcgaggcaccgttacaagtccgccgtggcggcactccgggcgtccattaccgccgtttcatcctgcgcgcaggacataggggtcaacagaatcagaagctgaccatgctgagatcgagagattggaagagcgtgcatctgctttgagaaaggaaattgaaagcaaaaacaaacaggtaaagctcctcatggatcaactccgggagttaataacagacatatcaatgtggcagagcccttgctcagtgtgaaatgtcaaaggaaagaccaccaggagtggatgtgtgtaggccatattgtgcatgctgatttactgacctcttggagggaaaacagatgggatatgaatggattgcaagtactgcgtttttgccgcagggatttagaagtggaaatgaacatcgatgaagtatggattaagttattgatgcagctaaaatgtatgttgggacacggatgctgttttggatgtaacagtatatatgcatatccagacatatcctttgcaacttctgtggatcttcttgagattagattactgtagccttttacagtagatgtagcatggattttggcttgtcacgtgcagatatgcaatgcaaagtctttcct

SEQ ID NO: 15755 - DNA, 453 bp, Setaria italica
  Peptide Sequence Number=SeqID_81729
gtgattgattacaagcttacattccctggtgggactgctactgccctgatgattaatagcttgcatgggaaagcagaaggtgatcttgcagggaaaaaggtaaattgtcttgtaaagtacatgagcattagttttggctggagcttctttaagtggttctttagtggtgttggtgactcttgtggttttgacaatttcccgacatttgggcttttagcttttcagaatacattttatttcaacttcagtcctagttatgttgggtttggtcttatttccccccatattgtgaactgctcggttttccttgggtcagtcatatcttggtgttttctttggccatttatcagtgcaaaggctggtcattggtacccagataaccttggtaacagtgacttcagaggcctgtatggttataaggttttcatagccatttctatcatacttggagat

SEQ ID NO: 15756 - DNA, 1290 bp, Setaria italica
  Peptide Sequence Number=SeqID_81730
agatctactacccatcaagagatgatccagaagctgtggagctcacgggctctgatattaactgtcttgaccctggaccatttttgtcgtcaccggtgataaactactacatccagaacataaaaaggaacatattgtgcagtgatgattgcagagacaaattctacatatttaacacgtatttttatggaaagcttgaagaagcattgtatcggcggggtgacttctcaaagttgagaagatggtggaaaggtgttaatatattccatagagcatatatcatcttgccgatccatgggatggctcactggagcttggtaatcatttgcatgccagcaaaagagagtatttcaggtccaatcatacttcatctggactccctagggatgcatcacagtaccaagatcttggacacagttgggagataccttgaagaagaatggcggtacttaaagaagaatccttctcctgacacatcagttttggatgcaacatgggaggatcttccaagtaatatacacaaggcaaaagtccaggttccgcaacagaataatgcgtacgactgtggcatcttcatgctttattatattgaaaggtttataagagaggcaccagaaaggttcacgatagataaacttggcatgtttagctgcagttggttcaaccctgaagatgcttctgatttaaggaagagaataagagcgctactgctggaagagtttgaaagtgccaggctggataatgttatgtcagacggagctgcatccgatggctcttctattgaagatagcataaagggtggagaatcggaaggagatgcaccttctgacagttcagaaatggccgtagattttggaaacaccggcaagagcagtgaaggcatcaaggttgcagcctcagaggaggaatgtggagtgtcagcagatgctggtaagagtaacgaaggcatcaagtttgcagaatcagaagaagcaagtggagagtctggagatgctggtatgagtattgaaggcatcaagtttgcaaattcggaagaagcaactggggagtctggagacgctggtaagagtattgaaggatatgttgcagaatcagaagaagaaagtggggactcgggagacgcttggaagagtattgaaggcattaatgcttcagaaccagtagaagcaagtgtagagtttggagatgctggtaagggtattgaagttatcaatgttgcagaatcagatgaagcaagcgtggagcttggacatgctggtaagactaagaaggcatcaaggttgcggcatc

SEQ ID NO: 15757 - DNA, 1022 bp, Setaria italica
  Peptide Sequence Number=SeqID_81731
ttaagaaaaggaaataaataagttagacaagaaatacaagaaagaagaaagtggggactcgggagacgcttggaagagtattgaaggcattaatgcttcagaaccagtagaagcaagtgtagagtttggagatgctggtaagggtattgaagttatcaatgttgcagaatcagatgaagcaagcgtggagcttggacatgctggtaagactaagaaaggcatcaaggttgcggcatcagaagaagcatgcgtggagtgtgtactatccactgataagagtatggagtctgtatcagacgaggaacatactagcagcagcagacgtggtgaaaggactgcaggatgtgctctgtcagagtctgatagcgcaaaagatgaagaaggtaccatgaaagcagattttgacagctcaaaaactgagaaagaaggattgattgcaattgtatcaccggaaagaccgaggttcaacgagggggccactcgtagtcgtagggcaccaattccagatatagttcctgacagcgacagtgacaacgagaccaagatggaggtcttaagagtttacagaagaaaaagtgaactcattaacttggaatagctgacatgaggggccaagcgcggcacttccgttgcgttcccaggaaggtgggaaacaacgccaggtgcccgcactctattttgcggtaaaccaaaaacctagcatgcagtccgggtcatcctcctttgctctcgggccctttgctgggcatgggtgtgggcgtgggagacatgtaaagtgtacaggttaaccatataggtagtatccaggatggaaattgtgggtgttacacattcgaggttggacacccgcaagtggttcatccattccgttctgagatgagctattgaaatactagcaaggttgaggttgttctcttgagcaaaccagcatgtgtattctcctctagcttcgataacatttctctggatttttggttgtagctctcttgctgttgcagtgcgatggcattggtaggtgccga

SEQ ID NO: 15758 - DNA, 445 bp, Setaria italica
  Peptide Sequence Number=SeqID_81732
gggcggcggcgagctggcgccggtgtcgaggttcccgtgccgtccgagtactgggtgtcgtcgcggcagatcatgtgggggccccagtccaggcggctgtcgttggtgccgccctcgaagacgcagtagatgccgcgggagtccttgtagtcggcgcaccggtggttgatgacgatgtccgccaccgcctggacgcccttgccgtggaacgcggcgatcagggatctgagctccgccgccgtcccgtacttggacgcgtccaggtcgtatagacgaccaggcatgtaaccttgggcggacacggagtgcgccggcggcggcagccagacgtgggtgacgccggcggcggcgatgtcgtcgaccttccccatcaggaggttgtaccacccgccgctctgcttccacgactcccagttgaacgcctggaagaggacctggccgagtg

SEQ ID NO: 15759 - DNA, 344 bp, Setaria italica
  Peptide Sequence Number=SeqID_81733
acatttcgcaccgtcatcctcccaaacaatcgtgacgcgtaacttactgcaccgcacttagcgtacatattcaccgctgctgtgccaagctgaagcgtcatttccagccgccgggcaacgacctgcccatgtgcccacttgccgagcgccaagttccctagctcggccgcagcggaaagcatgaccacaaacgttgtctggtcaggctcgaagccagcctctaccatctccgcaaacatcccggcgcaccagtcgtggcgatcgttgtccgcgcaggcagtgagcgcggtgttccacgacaccacggtccggcgaggcatttcgtcgaacacctgcatggcgcc

SEQ ID NO: 15760 - DNA, 269 bp, Setaria italica
  Peptide Sequence Number=SeqID_81734
tgccctgtaacagaaaaggaatagcatttactctttgaagatcttgaacttcgacttttccgaatacttggctgacttttcttatcagatctattatctgatcctcctttgtccaggcaagttggatgagaattagaaatcgatggtcgattgctttgacagaaaccatctaatagctcttttagactgccccaagtagagggttttggtggcctgttcatgccacttcttcccttggcaattttgtttgggaacagacccatggtggt

SEQ ID NO: 15761 - DNA, 1447 bp, Setaria italica
  misc_feature (1443)..(1443): n is a, c, g, or t
  Peptide Sequence Number=SeqID_81735
aacacacccatgcagcacgtggtggtggtggtaaagatgccccatccgttttgcaggcaacatttccaggtaaatcaatagatatggcaccagagttcttgagtccaaattcagtggcaggatcaagattactctgttcattcatatgagatgctgccaaatcacatgagggcaaatttagaagtccatgatcaaaggaactgtcatctgctatatttttcttcttacttttttcttcttatgtggatcccgcgccttacccttctttcctgcgttagcatcctttttcttgcgtcttggtgatttcatactgtcaataccatccattacagaatgactcagtacgctatcgtgttcataaatagcacgatcttgtgtgccaaaagttagggtttcaaaaggactgaactctggaggccccgtgcgaagaattgcctcacatggatcaggagaaattgaattgctagaaagtggccttaagttttgaaccttcacatggagaaatattggtggatcctataacattctttcttttcccttttagatccatccttcttttttgcaacctggctttctgacaatactgatttttcctcactgcattagacctctgtaaagcttgcgcttttccttcaccaacatcattgtctaccatatcttcccttctggtgttctcatcctttctggtgtcctcaagcaaagtggttttagcctgctgctccaagtccatcaatgataataaagcttgttcttttccaaagttggaagttaaaacggatggatgataaccaccaacattcagtgcaccagtatcagttgagttttcatgtagcataacatcatggcttgcagaagcattaccttcagatgtaacagaagccacctccaaaacagaatccggcgaaaatccaacatgcagcatgacgctgccattggcattagtcaaagaaggttcagaagttgaaagcttagcacactctccatggacatctgcagcgcatgtttctttagtagaattcaccagggccatttccaactgctgcgcctcagtctggatacactttgatttcactgtgcgataactggcagtagactctgcagtattgcgtgtactatcataaatattaattgatgtatcagaagacaactttggaatgttttctctgtgactttccaaagaaacatcagtatcatccaaaggtgaaaaggctggttgcccattcaattcactagctgcatgccctgtaacagaaaaggaatagcatttactctttgaagatcttgaacttcgacttttccgaatacttggctgacttttcttatcagatctattatctgatcctacctttagtaccaaggaacaaaagttaaggaaataagaaaagaaaaattaaaaagaaaaaaataaaacgaaaaataaaaggtaaaacgaaaaattaaaanaaaa

SEQ ID NO: 15762 - DNA, 1552 bp, Setaria italica
  Peptide Sequence Number=SeqID_81736
taaggtactaaagtttggtaattagtaagtaaatttaagtaaaattcgtattggttcgtatttgctttgacagaaaccatctaatagctcttttagactgccccaagtagagggttttggtggcctgttcatgccacttcttcccttggcaattttgtttgggaacagacccatggtggtttgatgtaatgagctcacaacatcaacctttttaggtttgcgtgtgccgctgcttgcttggtttgtttgacccggcctctcagaatcttttcttgatgaagcagctctttttggattcctacgtctgctgaatacatttaatgctgccagcttttggtttggtgatcctccatcattagcattgctggcaaaatcaacagaactgtcatcagcacaattacaggcattgagcccttggtccaaatggccagatccgccaacagcagaatcttgatgacccaggcatagagcagatgattccttgccactacaaggttcatcgtcacaaggttggttatacgaagaaacacacaggttttcctctggggattgttcagaggttccatattttagaggggtatgttgcaactctttatcagcacaagggccagaatgctgattctcatcaccataagcctccgtccgaaggccactgtcacacgacatcatatcccctcccagtgaatcacaacccaaattttcaaagccagcactattttcagatgtatcaacagcctgaccaacctgcccatccaaaggaacatcaatggagttcacgtaaacagaaggaactgaagtttcatcaactgggcaggacgctactgcatttatatttgacaagaaaccaaccttttccagctcatgattagcatcagttatcaatggcaggccatcagcaccacatggcaatttctcagagtgatgcttccccgtacctgacaagtacccattgtcatgggctgcttccatccaatctgtccgcaagtcctcttcacttgtgtttaccttccttccagaacaccggccctcatctccaggagcctctttgtgaaatgcactctcacaagaaaacataccacatacttctgaactacaagtcacgtttcccatgcttgacctatgttcaaataattcaccaatctggcaagtcttgccagctaaagaaacagcaggactactacctgaaactgaaggaactgaatcttcatgcaaggtccaagagctatctgcaccaacttttggtgacaaaccatccttttcaagatcatggttagcatttttcttcaaacacgtggcaccaatgctgcatggcaactgctcaatatcacgatttaccaaatctggcaaaccttcattaccactctgtggttcgttgtaacatgttattgaatcctccacaacaccactcaaaacacttctcccacctgccaaaatgccctgctgacatggacctccctctgttgccatgtccaccgtgtcatacatactagcatcaatcaactgagatcctttacctccagcggcacataaaccgtcattctgcacccctcca

SEQ ID NO: 15763 - DNA, 252 bp, Setaria italica
  misc_feature (237)..(237): n is a, c, g, or t
  Peptide Sequence Number=SeqID_81737
caacgggaccgtggtgcgccttgagcgtgtcgaggacaccgatgaccatttcatgcgcgtaccgacgtggctggcacgtagcggtctggaatttcccggaagaacactgggagccggagaaggtcaggatatcttcagctgcgttggctccgtgcttgagattgatcctttctgcatcccaggcccaggatttgaccgtcctgtatgcggttcgtgatcgagctacagcacccccanatccccgaccggatc

SEQ ID NO: 15764 - DNA, 372 bp, Setaria italica
  Peptide Sequence Number=SeqID_81738
accagccaccattgccatggctgcatcgagcgcttcggcctgttcgtcatccaggttgaacgccgccgtaagagccgcgataacttctggagggagagggccctggaacatggtgagatactcctgtagcgcgccgtccaccggctgtagatcatcattcaggaggccaagtttgcggcataagttgtgctgtgcacgttgcattgctggcatcgggcgtctagaagagaggcgtgcactgcgacgtaccgttgacatatcgaagacgcggcgaggacggcgccgctttggtgactccggttgtgcgagcggagctggttcttgccgcggcgtcggcgcgcagtgcaggggcggttctggcctggtgaagag

SEQ ID NO: 15765 - DNA, 349 bp, Setaria italica
  Peptide Sequence Number=SeqID_81739
ggcgtgcatgcgttgacgccgttctgaacgccggccgattaaattggggaatgagcgttgcctcaatccccttagttcgcacgaaaagggccggaagggccacggcttcgtctcagtcgctagcgggaagggcggtggctttgactggatcagttgacacacatgcgcatgaagtaacatagaagctaagaggaacaacagaaagtccggagcttgagcccagccgtgacgtagctgtagctttaagattacaaaccgggcagagacatagtctgtggagtaaacagaaggagtgcagcagcaacacaggctgcccatactgctgaaacttgtagctgacatagagaat

SEQ ID NO: 15766 - DNA, 994 bp, Setaria italica
  misc_feature (1)..(104): n is a, c, g, or t
  Peptide Sequence Number=SeqID_81740
nnnnnnnnnnnnnnnnnnnnnnnnnnnnnnnnnnnnnnnnnnnnnnnnnnnnnnnnnnnnnnnnnnnnnnnnnnnnnnnnnnnnnnnnnnnnnnnnnnnnnnnnttttttttttttttttttttttttaacttttttagtaaagtccggagcttgagcccagccgtgacgtagctgtagctttaagattacaaaccgggcagagacatagtctgtggagtaaacagaaggagtgcagcagcaacacaggctgcccatactgctgaaacttgtagctgacatagagaattaagcggcactaaatgatacaaggcggggcagttaaacagccgccagtggaccttcagcttgcagagcctcaaccgtttcttggatgtcctgtattgcttcaccagccaccattgccatggctgcatcgagcgcttcggcctgttcgtcatccaggttgaacgccgccgtaagagccgcgataacttctggagggagagggccctggaacatggtgagatactcctgtagcgcggcctccaccggcgttgacatatcgaagacgcggcgaggacggcgccgctttggtgactccggttgtgcgagcggagctggttcttgccgcggcgtcggcgcgcagtgcaggggcggttctggcctggtgaagaggaccccgaaggcagatgcagcttgatgttccagtgggagggggacagggtgctcatcggtggtgcggtcgttgtcgtgaggctctggaggccgctgaacttcgtcgccccccgccggtacctgagtaacacggccggggtccccaagcaaggcgtcgactgcctgcccaggggtgtcctgaccggccacctccaaacgcatggtcatcttgcggagttcgtcgtctacctcctttgaaggttggtcgaggttgccactgtagtcgaaccaggcttcatccccggtggcttcgacgatgctggacgccttgcggaagatgtccatgagtggccgtggcg

SEQ ID NO: 15767 - DNA, 511 bp, Setaria italica
  Peptide Sequence Number=SeqID_81741
acatagcctgacatacggcgacgcctccggccggcgagctaactcaccatcgatcgacggatcacttgtagcggctgaagaaggcggcggcctgggcgttcttgtaggcgctgcagccgatgaggtagaggaggaggaggcagacggtggcgacgacgagcgcgatgttggccttgtgccactggtcgcggagcgcctccaggagccccgccttgcaggactcgcactcgtagcagagctgggcggggtcgttgctccacagcccgcagtccgggtccgccgccggccgcgccggagccgtccacaccgtcgggctcacgtagctgaacccgcacaccgacggcggcttgcagcagccggactgtagcggcgagaggtgcgactggtagaactgctcggcgttgacgaaggcggcctgccgcgcgagcttcttgcaggtgtcggagacgacgaggcacgccttgatcttctcccacctccccgggtcgtcggagacgtacccccggagcca

SEQ ID NO: 15768 - DNA, 4185 bp, Setaria italica
  Peptide Sequence Number=SeqID_81742
gggggaggcagtgcagaagtaatcctgtggaagaccttctggaggggcacgagagactgggcgttgtgcactggtacctttgaaggttggtcgaggttgccactgtagtcgaaccaggcttcatccccggtggcttcgacgatgctggacgccttgcggaagatgtccatgagtggccgtggcgtcgccgccggaggatggcgtcgctggaggttaaacatcaactgtgccgcctccgccatggaccccacttggagatcatacaacagcttgaagtcagcctccttgcgggtgtccgcggccagtgatgcgtctccgtccaggttcctccgcctgcccccttggttgccgtggccggcgtggcgacgtcgcggcgagcgggaacgcactcggtgttgaccgccatgagccgtccctctggaaggcctggggtcggcgcgtccccgcctttcaccgtgccagtcgtcgtagtcgtcgtcgtcgtcgtcccgccggccgtgccagtcatggaagtcggggtggtcatccggccgctcccgccggccgtcgccccgatggtcgtggcccctgcgctcatcacgacggggaggcggggggtgctggaatggggtgaaggccggcgtgggttcctggtcaccgtcgcggaccccccagtaccagggcagccgccgcttctccggctcccccaccgccacgtcggggtcgtgcgggtcggtggtgacggcggagtagtcgtggatttcccatagatgcaccaggacccggtgcttgatccctcggtgccaacgctcaggggggacctcattgatctgcaccgatgaggacgagccgtccatagaacgtgtggtaaagacaagccacattaccttggcaatcctactcgggtccgccgtccaggcccacagctcgatgccgcgcgtgtccgacggatgaagcaggttggtgtcgatgcattggagcgcgcagtgccggccgacgaggcgttcgacgatgtccggcagccaagcgtgccgcggcaccccgtcgaggcagatgcggacgcggtagaagagtgccgcgccaagagcaccggtgaggctcctccacggcctgacacaaacttcattgccacggaagttaatgttacctttggcgttgacgtcctcgcagtggcggcggtgctggaagcgcaacaggaacgcctccgggcgatgcctagtgaccgaaacctcgccggggcgcagccggaactcctccaggatggcgtcttcgatgtgtcttgcagtggtacttggggggacacgcatggcccaggtgaccagtgcgttcccctcccagtcccgaagctcgtggtcgatctcgaaggaggtggggatgtgcagcgtgtcgtcactcggcctcagagccgggtctccaacccgtgcggacgccatcttgagagaggccgacggagggcgcggcttcgaacggcgtgggtggcgtcgcggcggggaagcagaccgtgggcgcgggtccgggcggcagaagcgttgcttgtgccccgagcggaagcagcgcaggcaccggatggggtccctgcacgcggaagccttgtggtcgcggcccagacacctgaagcagcgcccttttgtcttctggaggaaagcagaggtcgccgcagaggaaggttgttggttggcgaaaggtgaagaaagctttgaatgtctggcagcacggcctcgctcccgccgcttgcgccggctgacgcgggtccagccaggctcggagccagagtggacgtcgcgtcgaggatggtgctcggggctcgaggacgggggccggcggagggggaggccattactcctctggtggcctgaccggcggggtgtgacgccagggggagatctgtggcggatcctggaggcgaggttccgcggctctggccgcgtagcggcatggtgacgcaggcagctataactgctctggtcgacgctcgggggacgacggggttggcgagggaagtaactgctccttggcgggatggtgatggtggatctgagctggcgtggcgcaggtggttgcggggcaggcggcgggatgaaggcggtcgccccccgccttaccacttccgcgtaggttgggaccggatctggcgtgggcgggacgacgagatcctcccaagatccggcccggcgagtgcgaggcggcgggggaggaggggtttctcgccagtagagaggcgagcagggtaggggcggatgggatcggccggcgggagcaggagtcggaagatccagatctggatcgggggagcgtgattgggaaaaggggggggggctggacgcgagaggcaacgggggtggagcggctcgtggggtatggccaaggacgcggtcagtctgtcggcggaggagcttgggcggcgccgccggggctagcggcgccggcgaggggtggcggagcggcgggatgcgggggcgggggcgggggtgggacattttttgatctacctgaatgcgaggtgatggaaatagagtaacacggaaatacacaattaacaacagttgatctcactcacccatgcaccgtcccatgacccttgtctccgaccatgttacactatctgcaagttagaacgcgtccccaagaaatctctactccctttgcccgaaatgcaatagtaattttgtcttaagaaaactttctaacatcattaacacctgcgataccaaatacatgtttcatagtggatatagtgaaactaatttgatgtgatgtgtgttgatgtatacttctattaatttgcttaaaattagagaaatttgacttgtacaaacacaaggcatctcggagagaatacacaaatcctcagttgcagcgcctttacggcaccggaatttcatatgaattttccgagggaattcttccaagtttgagatggggtttaaccaaggaggctttaaaaggctgataaaacccttaataaagttcaacaaagacacaaaagggcattttcccggccaagaaatcgcccaccacgaaattatgttccggtgtctgtatcagtttctgattcgctccacaaaaagtttaattatagtatggacctacacatggacgcctctttagaccatttggcgtttgcggggtggcgaaaggtgagcaggcccacgccacagtgacggtaaagatgcccatgattaaccgcatccttttctaatccccgtcacaaagtttgccacctgattcctccataccccttctagtagtgctaccatctagcatctctggagggctccagattgagattgattgatcctaataaagcataaaaaataattcctttcctttttccctttttgcttcagttaagtgtcgctaggtaatgtacctaccaatgtatgttcaaagtggcaactcctttcaaatgttggcaaaaaaaaatgcatttgaacaaaactatttctactactagttcacagcttgtactgcattttaatttttaaagtactaataagaaattttcgataaattaatctcatgagctcaatcaacagtaataaggaggtgctggctgcttcggctttgcagcgagcaagcagctgcagcacggctctctgccgcagcagcagctggctctctgccgcagcagcaggtggctgctttgcagccagccgaacggaaaatgtgtggacaggacaggacaggactcgagagtggcagtgagctgaagcaattacctgtagcggcgagaggtgcgactggtagaactgctcggcgttgacgaaggcggcctgccgcgcgagcttcttgcaggtgtcggagacgacgaggcacgccttgatcttctcccacctccccgggtcgtcggagacgtacccccggagccacatggagaagccgtcgaggtggtagtcgtcgtaggcgcggcccaggaccgggtacgcccccgagccccgggtgacggcgaaggcgaagacgaggagcgcgatgaggagcacgatgagcgcggccatggcgaagaggtagaaggcgaggaggcggcggcggttccagtaggcgccgacgaagcccgcgagggcggcgaggaggagcaggccgccgaggatggcgacgggccaccgcgccaggcgcgcgcactcgtccccctgcgccgacgcgaaccagatccccgaggcgatcacgggcaccgcgcagatcagggccagtagcgtcacgcacgccgtg

SEQ ID NO: 15769 - DNA, 590 bp, Setaria italica
  misc_feature (1)..(38): n is a, c, g, or t
  Peptide Sequence Number=SeqID_81743
nnnnnnnnnnnnnnnnnnnnnnnnnnnnnnnnnnnnnngttagccagcaagtagcataatttcaaaaaccttccttgcgatatttacaaccttataagttataacagagcacaactgagcatccgaatttctattaacaacggagataatccccaggcacaacataggccaggatcagaattccatttccatgaagaagccacaacccttttccatttccaggaagagggaagtagggaacaaaccttgcaaggatcaggatcaagtatccatcctcctcaaggaattcacaaatgtatacccttctcttatgtacatcaccacacaaaggagctagtacaatactggaagtataccaagtcaccaccaaggaaaaaaatagcccaccctcttgcccattccccgccaggacgtataccatcccctaccccaattacaaaacaccttactctcaccatttacccaccaccacccccaaattgaatttacaccattacatctccttataccacacaaactatacccccgtcccatcctcccgccacaaaactaagaacttaaatgactacgtccactaacgagcaattagg

SEQ ID NO: 15770 - DNA, 813 bp, Setaria italica
  misc_feature (807)..(807): n is a, c, g, or t
  Peptide Sequence Number=SeqID_81744
actagacctaattgcctctcttgaagcagagaatcagtttggaagggatgcagaattggaggatctagagtgtatgttcaatgacctgtcaattgctgagccagaggaatttgaatcaccagttgtagaagacaagtgttctaggcgattaagctgcacaggcatgactgatagttacaggtctgccagtaggaagggcagatcgcgcagcatggatgcttcatcagattctgttgctactgagttcttggatatgcttggaatagagcatagcccatttgggcaaccctcagatagtgattctgagtcaccaagagagcggctttggaagcagtttgaaaaggaagccctagcatctgggaatgctattcttggtttagactttgatgatggaatggaagaacctacctgtgaggatgttgtggaggatttcgatctctctgcaatgatacatgaggctgagcttgagcttcagaatggaagccaacccatagataccagatttcgagctaagtcgctggaagacgaggaaactgaagccttaatgcgtcagtttgggctaaacgaaaagtccttccaatcttctccacctgaaagtagaagtgggtttggtagccctattgacctcccgcctgagcagcctcctgagctaccaccattggccgaaggtttaggcccatttattcagacaaaagatggaggatttctgcgatcaatgaatccaaccctgttcaaaaatgcgaagaacaactgcagcttggttatgcaggcttcttcaccaattgtgctgccggcagagatggggcnctggga

SEQ ID NO: 15771 - DNA, 460 bp, Setaria italica
  Peptide Sequence Number=SeqID_81745
tacaaccaatagaacctttacggctggttcgtcgccggcgccttcaccatgaccgtcggcctctccatggccgagatctgctcctccttccccacctccggcggactctactactggagcgcacgcctctccggcaagcgctgggcgcccttcgcctcctggatcaccggatggttcaacattgttggacagtgggcggtgaccacgagcgtggactactccctggcgcagctgatccaggtgatcatcctgctgggcaccggcggcaagaacggcggcggctacctggcgtccaagtacgtggtgatcgccttccacgccgccatcctgatcagccacgccgtcctcaacagcctccccatcaccgtgctctccttcttcggccagttcgctgcggcctggaacatgctgggagtcttcgtgctcatgatcgccgtgcccgccgtcgccaccgagaggg

SEQ ID NO: 15772 - DNA, 1331 bp, Setaria italica
  Peptide Sequence Number=SeqID_81746
gactgttgtcagtcacagtcacgttcaatctcatttaaaaccgtgtagccaacatgttctcgtcatgatgttgatgtgtttgattccagcacaactttttagcatctaactttacatgtgttttttcttttgcctgtctgactttcaggttcaacattgttggacagtgggcggtgaccacgagcgtggactactccctggcgcagctgatccaggtgatcatcctgctgggcaccggcggcaagaacggcggcggctacctggcgtccaagtacgtggtgatcgccttccacgccgccatcctgatcagccacgccgtcctcaacagcctccccatcaccgtgctctccttcttcggccagttcgctgcggcctggaacatgctgggagtcttcgtgctcatgatcgccgtgcccgccgtcgccaccgagagggccagcgccgagttcgtcttcacccacttcaacaccgacaacggcgccggcatccgcagcaacttctacatcttcgtcctcgggctgctcatgagccagtacacgctcacaggatacgacgcctccgcgcacatgactgaggagaccaagaacgcggacaagaacggcccgatcggcatcatcagcgcgatcggcatctcgatcgtggtgggctggggatacatcctcggcatcacgttcgcggtgaaggacataccctacctgctgagccctgacaatgacgccggagggtacgccatcgccgaggtgttctacctcgccttcaagagccggtacgggaacggcgtcggcgggatcatctgcctggggatcgtcgccgtcgccatctacttctgcggcatgagctcggtcacgagcaactccagaatggcatacgcgttctcgagagacggcgccatgcccttctcctccgtgtggcacaaggtgaacaagcaagaagtgcccatcaacgccgtctggctctctgtttccgtcgccctctgcatggcgttgccgtcgctgggcagcctggtggcgttccaggcgatggtgtcgatcgcgacgatcgggctgtacatctcgtacgcgctgccgatcctgttccgggtgacgctggcgcgcaagcacttctcgccggggccattcagcctgggccgctacggcgtgctcgtcggctgggtcgccgtgctctgggtggccaccatcaccgtgctcttctcgctgccggtcacgtacccggtgaccaaggacacgctcaactacacccccgtcgccgtcggcgggctcttcttcctcgtgctctcgtcgtgggtgctcagggcaaggcactggttcaagggccccgtcaccaaacctgga

SEQ ID NO: 15773 - DNA, 1164 bp, Setaria italica
  Peptide Sequence Number=SeqID_81747
tgatagtgattcaccgaattatccttatgatcaagcaaaagcactgggaaaagcagaaattgatatggatcgtatttctactggattgccttgtggcagtgaaagctttcttttgatgtttgcccgttggaagaaactagagagagatctctacaatgaaaggaaaaagcgctttgacactacgcaaattcctgatatatatgactctggcaagtatgaccttcttcataactcacatctcaaccttactggcctgagtgatctcttcaaagtttctcagttgcttgctgatggtgtcattccaaatgaatatggaataaatccaaagcagaaactcaaaattggctcaaagatagcacgccgtttactgggaaagatcctaattgacctccataacacgaggcgagaggttactgctgctgctgccgaatctaacacacataatgatacgaaggcagtgtcatctgttaaacggaaagagaggtgttactatgaggaggttaggaatgaatgttttgaaagatctcgctcgaacaagaagtcgattgatctagatgaatcccacaaggaaacaaaatactgcctggatccaaaatatgccaatgtgtttgaacctgagcgacgtgtccgaacaaggctctattttacatcggaatcacatatacactctctaatgaatgtacttcgctattgcaatttggatgaatctctgaacggagaagagagtcttgtctgcagaagttctctagatcgactacttaaaacacgagaactcgactacatgagttacattgtgttgcgtatgtttgaaaatacagaggttaccttttggaacacccaaagaggttccgtatagagatgacatttagtcgcggtgcagatataagttccttggagagtggaggcaaagcatctttgttacctggtgaccacacaatgccaattatggagccagagaggctgcaggaagttggatcatatatcaccttggacaaatttgataaaatgactcgtccattcgcaatgccagctgaagattttcctccagctgctccttctcaacctcttccagtccgcttctgcaaggatgtccaactacaaggaggaaaattgcagcataattcagatatgctgagtggtatatcaaaaagaaagacaaaaaag

SEQ ID NO: 15774 - DNA, 520 bp, Setaria italica
  Peptide Sequence Number=SeqID_81748
ttcttcatctctgcacacggcggggcggaaaatgaattgaagatctgagcaccgacgacatcaaagtatcaactatcaatgcgcactgatcaagaacgtaccgcggaaggggatggatcggggcacagcgagaacgcgggtctccccgccgacgtacttgagcacgccgtcgtgcgggcggggcacgatgcggccgccaaagctgcagaggatcttgatgcggcctccgcctccaccgcgacctccgcccccgccgccgcaggcgcaggtcggcgaaagatgctcgtcgtctgtggtggtgccctcggactccgtcgtcgtcgccgttggcggcgcaccaaccgcgtcttctatctcagccatggtccggtttcaactaatcctcgctcgccggaggcacgcaaacgaagtgataacgaagacctgcgaaagaaccgcagcaccaaatcaccctcgagaacgaatcctaaaagcaacatgctcagagtacccagcaccaggaaaaaaaattcgattttat

SEQ ID NO: 15775 - DNA, 1496 bp, Setaria italica
  Peptide Sequence Number=SeqID_81749
ccgcccggcatggtgtggcacggccaccggcgccgccgcgtactggtgctggtagtggtggaagctgttctgcagcaggccggcgtgcctcggcgagctgctcacgtatcccggcacgccgccgccgtccgccgcgtgctggtgaaggcactgcgccgccgcgtccagggtgccgaggttcggcgtgctccggacgcgctgcatcccttgcccgaaggcggcgggcggctcggcgcccacggcgttggcgcggggggagttgcctgcggagacggcgccgtgcggctgggacgggaacggcgggctcccgtcgggcgaggccggcacggtggcgacgtagcgctccggctggaagtggtggtggtggtggtgctgctgctggtgatggtggtgcgggtggaggcgcgataggccggcgtagcgggtggaggcgggcgcggcgggctgcggcgcgaagacgtagacgcggaagcgcggggacgcggtcggcgagcgcttggcctcgaggcggtcgtactcgtccagcatgtgggccaggtcctcgtcgcaggtgacggagacaagcacgtcgaggtcctcggcgacggagaggagctggtacttgatggccgctacttccgtcttgaacatctcctccaccttcttcttcatctcgcggaaggggatggatcggggcacagcgagaacgcgggtctccccgccgacgtacttgagcacgccgtcgtgcgggcggggcacgatgcggccgccaaagctgcagaggatcttgatgcggcctccgcctccaccgcgacctccgcccccgccgccgcaggcgcaggtcggcgaaagatgctcgtcgtctgtggtggtgccctcggactccgtcgtcgtcgccgttggcggcgcaccaaccgcgtcttctatctcagccatggtccggtttcaactaatcctcgctcgccggaggcacgcaaacgaagtgataacgaagacctgttatcggacgggatggagttcgagaaaccgccgggctgacgatggcctagaagattcggaaaccgaaacaaaggggacgggagggaggtcggactccaaccaacagaggcggcggcggcggcgatacgggcgacgggcgaacggccgccgagggaagttaactttattcctctggtgatgaaaaccgactgatccgccgaccagatcgagccgaacaaaccggcaacaacgagggggaagcgaaggggaaggcgacccccgaggaaacctagaactgactgatcaaccgtcgcctctctctctccaccccggcgggcgtggccggatttagggagggccgacggacgcgccgcgcaggccggggctcctggattcgtgggccagcagccgctcgcctattctcgggggcgtggtggcctggcggggcggggtgtggccgtgtggggcgcttgcgggcgtgagccgctagtctcctccgtgcgcgcggaagaggaggactggaactcgctcgctcgccg

SEQ ID NO: 15776 - DNA, 388 bp, Setaria italica
  Peptide Sequence Number=SeqID_81750
ctgacagcgaagagccgcaagaacctgccaaacattataatagattgggaccagcaggccttgcgttgcattatgcgaatatcatcaatcagatcgataatcttgtaagtgcacatactcttctagagtcttactgaactactttcatgattagaagataatcttctcgaccttcatacatcaaccatattgtgggctatcaatgcaataagtctttaatcaagtcccatttcatgcttcaagactgtcggaaaatgaggactatttttacaaggacactgtagtttatgttataaattggcatcacagcctcccatgagaagacttctcacggcaggctgttacttcataagtttattaactattaaacttaacaaggattgatcaa

SEQ ID NO: 15777 - DNA, 1315 bp, Setaria italica
  Peptide Sequence Number=SeqID_81751
aagcaggaagtgaagggtcagagtaagcatgttaaaaatttgaaaaagaggtcactttggtccaagaatttggaagaggtgatggaaaagcttgtagacattgttcacttcttacatttggagatacataacaccttcggtcgtgctgacagcgaagagccgcaagaacctgccaaacattataatagattgggaccagcaggccttgcgttgcattatgcgaatatcatcaatcagatcgataatcttgtttctcgatcatgtgcaatgcctacaaatgcaagggataccttatatcatggtttgccacctactgtcaaatctgctctccgttctaagctacaatcttttgaactcaaggaggagcttacagctcctcagatcaaagctgaaatggagaaaactctgcgatggcttgtcccttttgctagtaacacaactaaggcataccatggcttcggttgggttggagagtgggcaaatacaggatctgagttaaactgcaagatatcagggcaaatggacacgacccgaatcgagacattgtatcatgctgagaaggagaaggctgatgtgcttatcctggagcttgtcgtgtggcttcatcatcttatatgtaaatcaagaaatggccatggaggtctaaggtctcccatcaaatctcccatgagctcaccaacaaaaaagggtgccacaatcacactgttggaaggcaaaacgaacaattcgtcaccaattctgacacaagaggatcaggatatgctaagggatgttaagtacaggaaatttgtccctggaataagcaaaagtcaagagtttgacacaacgtcaagttacagcaaacagagtaggctgagcaagagcaatagccactctccagccagtggcaacaggaaagacattcttccagttaggaggtcttccatgtttccagttattgacttcgagattgacaggaccaaagctttggatctaatcgacaggcttgatgatctaaaaatataatgagcatcgaagctaactgaaacataaacctgaaatttatgcagtcgtctgctatcttgaaagcgccagcagggatgtaaaaaaatagtatgtatcagcaggccgcccgtcagagactctggtgaggaactaacagtgtcaaattggagctgagaaactggtggtagcaaagatggcatcgtgataggaaaacatgttgtaaaaattatctgtcgtttctacctgtacaagaaatggaaagtccaattttttaaaaagaggggtaaaagtatctagatgttctaaattttcatggccacttggacaagga

SEQ ID NO: 15778 - DNA, 250 bp, Setaria italica
  Peptide Sequence Number=SeqID_81752
gtaccttgtattttgtactttgatttgttgtgacggtgtttcgtcaattatttctttgacaaatatgctcctgccttgctacgtacgggaagtgatgacatgcatagtccacataactctgcttagtttctaactacagctggtctcatactttacatcccctacaaccacagctgcttctcccccagctggccgctgctcgccgtcgcccaggctggtcggccttggcagccacacctccgctggctct

SEQ ID NO: 15779 - DNA, 234 bp, Setaria italica
  Peptide Sequence Number=SeqID_81753
tcaccccggcgtcgacgatggtcccgcggccgcatccgccgtcggcggcagcttcctcggcttcgacgcacctgcggccgagagccggcacgtggtgcccgtcggcaggctccgcggcacccggttcatgagcatcttccgcttcaaggtgtggtggaccacccactgggtcggcgacagcggccgcgacgtggagaacgagacgcagatgatgctgctcgaccgctcagccgg

SEQ ID NO: 15780 - DNA, 655 bp, Setaria italica
  Peptide Sequence Number=SeqID_81754
tgtgtgccttggcagtctcttttctactatatgctattaacttactaacaccgtactattgtcgtggaaaattttatcttgaacacagtgcatcagataacaagttgttcacaaacacaatggatgcaagccaagaaggcaggcacagaagcaagttgcaaacccaagcacaccatgagacacgagcttctttacaggacggggacctctcacgatttccatcacgaccttcacgcttatgactgcacgcaatgtcacaggcgctcgataatgtggtaacatataccgtgtaaatctcacctaataatgtaacaacaccagaccatcagaataatcacagcaaatgaccatagtgaggatttggacaccttcagctgtcaaacctggcgttttgggggtacaagatagcccaaagtgctagacatcagacagtgaaatgttgcaaggactcgggaaggcatgtgtcttgcacaggtcttactcagacccaaagctgatagtgagccctcattaatttccatcatcactatgttcattggccaaagttcatctccgagtatcggcgaggtttattttgacgttgactgggttccccacttgcaacctctgttatttcttgaggtttcaacagagtaagtaggtctatttattttgt

SEQ ID NO: 15781 - DNA, 535 bp, Setaria italica
  Peptide Sequence Number=SeqID_81755
caagttggtataacgtcttcaactacttaggtaggtaggtagactagtttacaataggaaggttaataccaaaacagactatcttaacgaggtctaccatggaagcagaacttgcagcattagatacagccacagttgaggctgattggctacgtgaactcttgatgaacttgcctattgttaagaaacctatgccggcaatacttatgaattgtgacaatcaaacggtgatagtcaaagtgaacaattctaaggacaatatgaagttatcaagacacgttaagagacgtctgaaatctgtcaggaaaatgagaaactccggagtaatatcagtggattacatttcaactgataagaacttggcagatcagttcactaaggggctgtcacgtaatgtgataaacaatgtatcaaaggagatgggtatgagacccatatgagctacaccatgatggtaacccaacctatgttgattcggtagtattcccgttgtaagtttaggttattttcttttgggtttaagttttaactttta

SEQ ID NO: 15782 - DNA, 1323 bp, Setaria italica
  Peptide Sequence Number=SeqID_81756
catgaaagatctgggagaggctgatgtaattctgaatatcaagttgatcaaaggagagaatgggattactctcacgcaatctcattatgtggaaaaggtcttgagccggtttggcttcaaggacagtaagccttctcccacaccttatgatccgagcttgatacttcggaaaaataagagaattggtagagaccaattaagatactctcagattattggatcacttatgtatttagccagtgctactaggcctgacatctcatatgctgtttgcaaactgagccggtttacctctaatccgggagatgatcattggcgtgcgcttgagcgagtcatgcactatttagttggtactatggattacggaattcactactccgggtatcctgcggtactggaaggctatagtgattcaaattggatatctgatgctgatgaactgtatgccacaagtggatacgtcttcactcttggtggtggtgctgtttcatggaggttatccaaacagactatcttaacgaggtctaccatggaagcagaacttgcagcattagatacagccacagttgaggctgattggctacgtgaactcttgatgaacttgcctattgttaagaaacctatgccggcaatacttatgaattgtgacaatcaaacggtgatagtcaaagtgaacaattctaaggacaatatgaagttatcaagacacgttaagagacgtctgaaatctgtcaggaaaatgagaaactccggagtaatatcagtggattacatttcaactgataagaacttggcagatcagttcactaaggggctgtcacgtaatgtgataaacaatgtatcaaaggagatgggtatgagacccatatgagctacaccatgatggtaacccaacctatgtgatcggagatcccgtgaagtaggatctgggaagaacaagccatgggacagcatgagagtatcctactaacccactcgagaaatgatgcaacactctcaaaccactgcatggcaggctggctactgccttaatatattttgttggcttttattagcaaagatgttgccctaaagaacatcttggaaaaatatacctatatgagcccagctgttgtaaggtcgcagtctatgagacttgagtgatctctattaagctcatgaagagaccagggggtacgacctatatgccccacccgcggggtaggctacagtcagccaggtactagtcccgactttgagtgaaacttgtccgcacaaaacttgcaattcaaggtttagtccattgttcaagtggtggatgaatgtagcttgaagctctaggcg

SEQ ID NO: 15783 - DNA, 294 bp, Setaria italica
  misc_feature (271)..(294): n is a, c, g, or t
  Peptide Sequence Number=SeqID_81757
catcaggtttgctgctgctgcatgcacgaagctttgcttccttgtgccgctgataaaatatagtatgtagttgcggtgattatggaactgatgggagcaaagcgagcgatttatgtttgatgtgaagctgttactcttgcacaatgttctctcttgtgtgtaagtgattgattgagatatggaaaaggggagggtagttcattatgaaagacaaaattggagagatgacttgagatcaaatcagattgatgcttcttttttctttaaaacnnnnnnnnnnnnnnnnnnnnnnnn

SEQ ID NO: 15784 - DNA, 1376 bp, Setaria italica
  Peptide Sequence Number=SeqID_81758
tgctaatctatcatgaaaaaggaaggatataatgaaatttgtccctgatcctgagagtgcagagataatatttatcaatacatgtgcaatccgtgacaatgcagagcagaaagtctggcagcggctcaactacttttggtttctgaaaagggaatggaaagccaatgtcgctgaaggaagatcaaaatcactgcggcctcccaagattgctgtccttgggtgcatggcagagcggctgaaggagaaaatactggactctgataagatggttgatgttgtttgtggacctgatgcatatagggatttgcctaggctgctccaggaagtcgattacgggcataagggtatgaatacacttctttcgcttgaggagacttatgctgatatcaccccagtaaggatctctgacaattcagttacagcatttgtgtcaattatgagaggttgcaataacatgtgctcgttctgcatagttcccttcactagaggtagggaaaggtcccgtccggtgtcttctatagtccgagaggttggtgagctgtggaaagcaggtgtgaaggaggtaatgcttcttggtcagaatgtaaacagttataatgacacttctgaagtagaagagttagagcctggcaaaaactggcaacttagcgaaggattttccagcatgtgcaaggtgaagaatatggggttacgttttgctgatctcctggatagattatctttggaataccctgagatgcggttcaggttcacctcaccacacccaaaggatttcccggatgagctactgtatttaatgcgggataggtataacatctgcaatcttattcacttgccagcacaaacaggcagtacaacagtgctggaacggatgcggagaggttatactcgagaagcatacttagagctcgtgcacaaaattcgtaatgtacttcctgatgttgggctaagcagtgatttcataactggcttttgtggagagacagaagatgaacatgctgataccctcagccttttaagggctgttggatatgatatggcttacatgtttgcatatagcatgagagaaaagactcatgctcaccggaattatgaggatgatgtccctgaagatgtcaagcagaggagactcacagaaatgatcaataccttccgcgagaccacaaagaagaactatgattctcaaattggtacagttcagcttgttcttgttgaaggacccaacaagcgtgctcccaaaactgagctgatagggaaaaccgatagggggcataaggtatcatttgccagtgtccctataccacacacatttgaaggagacgacgcacgtaagccggtggttggtgactttgttgaggtgaaaattctgaggtcgt

SEQ ID NO: 15785 - DNA, 594 bp, Setaria italica
  Peptide Sequence Number=SeqID_81759
acgcgcacaggtgccgacaaggcaagagcagcacctcggccgcgcccttgccgcacatcgtgcacatcctcttgtggcttgccgacgacgtcccggcctcttcctcctcgttatcgtcggctccgatgccgccggcaacaccgttctccccgcagcagcacgactcggcgtcgtcggtgcccacgccccggcgtgcctgctgggcgtcgtgcgcttgctgcagctcgccgcggagcgcgttaaccatggcctcgttggactgtgccaggtcgcgccacacctgcgcctctacgcagagacttctaacccgctcctccagcgcccaattgagacgcccaatgcgctgaatctcttcgtccttggcgcgcaggcgcttggccgccgcggcctcaacagcggccaccacctgcctagcgtgccggcaacgctgctcacccatctccacccacatcttcgtggtgtgttgcagcacaaggcggtcgacgtcggccagctgctgctggaagtgcgccgccacgtccgccgcgccaagaccaagcaccggcgtctgtatctggtcggggcgcttccgtttcctgggcgccatcatcacct

SEQ ID NO: 15786 - DNA, 449 bp, Setaria italica
  Peptide Sequence Number=SeqID_81760
tgaaagcttgcgtatagctgtggctaaagattctccagacttgacaaacattcaagcatacaactaacaagttctggcagatgaggtcgaagggcaggaccagcacccttagcaagcttcatcaccaaactaatcgaggctttttgaacacttgaaactttactgagtatgccttcagaaagcaagtatggcagcacaatgatcattgtctcatttgcatcagaagtagaagttagtgacacatcacaaagcctaattgtcaatgagctcacagctcggcacaaactgtcaccagcattcctcacagtttcctttatgtcatccattgcacgaaaggcggttgtccatatttttctcaaatgcttagaaaccttacgatgtcatagtagaggatttgttggttcaatctggatcaaggctttggcgctctcgtgaagcatcctgtcttg

SEQ ID NO: 15787 - DNA, 459 bp, Setaria italica
  Peptide Sequence Number=SeqID_81761
gcaagcgcccgtcgcgcttccgcctccacgcgataaaccccgccgaccgccggcgagccccacggcgtcgcggtgcggccaggatttcgtcgagcccacgccgtcggccgccgacgaggcccgaagccgccgaaccccgacgctccgcgcacccggcctccacgcgacaagccccgcaggccgccgacgaacccccacggcggcgcagccagggtttcctcgagcgagcccacgccgtcggccgccgccgagctccgaagccgccgaacccggacgctcccaacctccggccgtcgtttcctccatccgcagctgtctgtacaccgaggttgatgatcatagtgaagagcctcttttagcatgccaatcatccgcaaaactcaggaagtggtgctgaatatgtcaagttagaaatcaaaccatctgttcaggcaggttaacatgttaagaacaagaaat

SEQ ID NO: 15788 - DNA, 651 bp, Setaria italica
  Peptide Sequence Number=SeqID_81762
atccttcattcaatgagcagtactcatgggatgtgtacgatacagcaaccgtcctgaccattggactgtttgataatggcctggtggaagagtctagttcaggcaagtacaaggatgtcagcattggaaaagtacggatacgcctttccaatctccaacctggccggatctattctcatgggtaccctcttctcatcctacagcctgcaggggtgaagaaattgggtgaactgtacctatcagtaagatttaccacaagatcattagtaaacacggtgcgtatgtatgcatcccccaatctaccaacaatgcactatgaggaccctctttcagtgatcctgaaagacaatttggagctctctgctatccagattgtcacatcccgactgagccggatggaaccacccctaagcaaggaagccgtggaatacatgtttgacgtgcaaagcaacttttggagcttgaggaaaagcagggtcaactggaacagaatcatgtcagtcctctcaatcttcaacacatttttggagattttttttcctatatttgttcatggcagaatcctgcagtcactttgctggcccatgctgttttcctcctagctcttgcgtttcatcagttcatactcccatcagcgctcttatatatctt

SEQ ID NO: 15789 - DNA, 517 bp, Setaria italica
  Peptide Sequence Number=SeqID_81763
ggttctctctgagaagctgcacgcgcctgtgagacaggagtcaagagcgtcctggtgcctaattattattagctcagctgtgagatttcagtcgtgacagcgctactacgagcgatcgagagaggatcatggcgtctcggctgggcctgtacaccggcggcagccggagaagggtcgacggcaggagcggcgggcggtcgtcggtggcctcggcggcggcgaagcagctgctgtcgaggctgaggtccacatggaggagaagcgcggggcggccgaggcggcctgcagtgaagttcgggtacgacctgcagagctactcccagaacttcgacgacggcctcgcctcctccggccactgcaccgctttcagtgattccgccgtgtgtagctagctcagtgcttctcggtcattagctaagctagatagctagatagctggctcgtccagttactgtaaatgactactcgcttttcttctttgtagctggctactgtaaatttgctgccatcagtcagc

SEQ ID NO: 15790 - DNA, 829 bp, Setaria italica
  Peptide Sequence Number=SeqID_81764
gtcaagcaactccaacagtccagggcctgattgtgacaataacagctgcaactgcaccaaataaaagcaacattcccatgctaataaaaaggtaaacgccgcgagaaatcttccaatcatcatccttccatttgtacagcccagtgaacagtgagaaaatgcaggaatgcaaagcaagggaagtaatgctgcaaggaaatcagccttcagaggaacaccatcctctcgtgaatttactactccccagtaagatgcaccacaaaatgatacaagaacagttgcaaagaggccaacacatatagctgatgaaggtgaaaaccggtatgtggcaaaccaagcaacaataggtatcaaccccatggtaagaacagcaattgctgacgataacgcccatccaagatacattgatgttgcatacggagaatagaaactgttcttatcagcatcccagcctttgtagcctaaagcgtctaaaggcttcgctgatactattgcaccaaggccaataactgatgcaatgaaaacagctatgctgatagcaaagagagccctctctttctttcctggagcgtgactaacattttcacgactatcaatctcccttccaggaatccagaaacggtaaccattacggatccatatgggaatagcaaatgagaggcaagccaccataagtggtactgtgagagacaagcccaatataactgatgacttgcttaagaaagagagaaacaaaccaacacatgtactaagcagccacgcaatgaaaccatacttccgcggtttggatgtcatcatcatgtctttagtacgcagagaccaattaatg

SEQ ID NO: 15791 - DNA, 347 bp, Setaria italica
  Peptide Sequence Number=SeqID_81765
aggggggtagtacaatcgaccatctataagaccctcagtgactgccaagctcaagtcggtaattcggtatgtgacccttctgtcactgtctacaaaggctattctctgagtaaagaaactgaggaatatcttgctgcgcgtgggttaaaaaacgctatctattgcatcgatgcagcagatgcaagagatgaattgtttaatgatctggttccctgcccttttcagcaacctgatggatctgtgcagtctacattgaaaaggtcagaggagatggaaactggaccatcaaaccatcaaaaagttgctgaacaggaactgttatctgatagtgatctctcttgtattct

SEQ ID NO: 15792 - DNA, 1396 bp, Setaria italica
  Peptide Sequence Number=SeqID_81766
aaatcaatccaaccttcatcgatttgcccagatttgtaaaccgacataggccattcatcatgaacattctattgtctccactcccctcctgtaaatctgtacagatgcactgttttacccatacaaaagttggctaggaaaaaaatatgggaaaacaggcatgcctagctaatttcatcctaatttctggggggtaaaagcttgagatgtgttcaaaatctgttggatgcaaatggatgttcagcatcaggtgagactgttactggagcctctgcaacttctttatatccgattctacatccaccggaaatttgagtaaatccttcaatttggtaactgctgcatcaaggttattgacgtccaggtatctttcgcttggggacgcaaatagaacctcatttatgtcttcttcaagttgcagcgagtacaggtgttcgaagaccgctctaagccttgaaacaaccatttccctaactgaagatgatcgtgagactaaattgatgataaaaagaccaccctctgaaaggaactcttttgctttctgaaggaaaggatcttcgacaaagttttctggcgggcaagacagcccagagcttaggtcagatgaatcaacatcaatgataagaattttgatcgcattgctgccactgccatttgatacagaatggtttgcagcaacactgtcttcaacgaatttgattccatcccccaaatgcacctttaactgttcatccactgaaaaaccgaaatatttctttgctagctcagctaccaaggggtccaactccacaacctcaatatctacaaaagggagacatccacggagaaacattgggaaacaaccagcaccaaggcctataacagtggtgctgactttttctccagatgtagaagcagcacccagagcagatgcaactaaagaaagcccagatatgataccgctgtgataagagctgccaagaaagctatggtcaactctcagactgttcttggatccttttttgctccttctctttttagatgttgcagatgcatttttattctttttatctgtctcatcactgtgaggatctctaattagcaacgcttcagattgcactaagccagaacttcttccaaaaataaggcgccggaacattttctcaggcatggaaccttggtctccatcagcattttcatagacaacatcttccacaaccattggaccagttaattctgaggtggcctcttgcagaatatctctttgtttcacaccatcaccagccatcatgaacggtataggggcctcctcttcaggatttccaggttctagatccttaacaagtggagactaatccttcttaataatatccatgtcgatatttgcatgtctgctgtccaagaaaaccataattag

SEQ ID NO: 15793 - DNA, 267 bp, Setaria italica
  Peptide Sequence Number=SeqID_81767
tggtgcttatgctggttatcccaattaccaacagcaaccagctgcacagcagccacagcaacaacagtgaagcctgttttgctggggcaagtcattgggttgtcgagacgtattaaagttatttcgaggcgcagttatattgcattctagctcttgtcaatagagagatgggtttcgaaaggctcctgattttgattgcctcatggcatggtttcatctatttataatatattattataaatagatgaaaccatgccatgaggcaat

SEQ ID NO: 15794 - DNA, 792 bp, Setaria italica
  Peptide Sequence Number=SeqID_81768
taagacttttagaataattcgtatgaatcttacaatatgtttccttcacttttttgctttcatttacagtaccaaattctcaaggagctcagtctgagaatgatcctaacaataccactgtgcgttcttaattcttttttctgcaaagcagtcattcgtctttcagttttggttaacttttatctgtatttgtctttagatatttgttggtggccttgaccccaacgttactgaagatgtcctgaaacaagtttttgctccttatggggaagttgtccatgttaagatccctgttgggaaaagatgtggttttgttcagttcgttaccagaccttctgccgagcaagcgctgctgatgctgcaagggaccttaattggtgggcaaaatgttaggctttcgtggggtcgaagcctgtccaacaagcctcagcaggattccaaccaatggggtggggctgctgcttctgctgctgcagcaggatactatggttatgggcaaggctacgaggcctatgggtatcctcaatctcaggaccctaatgcgtttggttatggagctggagcatattctggctatccaaattaccaacagcaaccagtggcgcagcgcagagataataaccttcttggcaccacccttcaagtgagccgcagccttgtccttgtcagtgaagacaccagtggactccacgacatactcggcgccagcctcagcccatgggatctcctcagggttcctgatgccaaagacggtgaccggcttctcgctgaagtagtaagggttctttggta

SEQ ID NO: 15795 - DNA, 711 bp, Setaria italica
  Peptide Sequence Number=SeqID_81769
tggtattacatattacaagagactatttctagggttgtctatttattcctttcggttctaagggttgtctaaaggtttgttctacggtactaaacttaacttatccatcggtgaagggtgcaaaggttgtgactgataagttgacaatgcgttcgaagggttatgggtttgtgaaatttggtgatccaactgagcaagctcgtgcaatgactgaaatgaatggaatgccttgttcgtccaggcctatgcgtattggtcctgcagcaagtaggaagacaacaggagttcaagaaagaggataccaacgggctctattcatataggagccttggaactgacctgagctgtgatgcatttcttgtttaatgcgtggcctcatttagtaccaaattctcaaggagctcagtctgagaatgatcctaacaataccactatatttgttggtggccttgaccccaacgttactgaagatgtcctgaaacaagttttcgccccttatggggaagtggtccatgttaagatccctgttggcaaaagatgtggttttgttcaatatgctaacaggttgactgaatttatgctcaatttcttcaggtttgtcaatatccgcttgattttgtatgttgaagtaatcagttatgttgctgtgcatccagatcttctgccgaggaggcattggtaattctgcaaggtaccttgattggagggcag

SEQ ID NO: 15796 - DNA, 1016 bp, Setaria italica
  Peptide Sequence Number=SeqID_81770
agggttatggttgtgaatttggtgatccaactgagcaagctcgtgcaatgactgaaatgaatggaatgccttgttcgtccaggcctatgcgtattggtcctgcagcaagtaggaagacaacaggagttcaagaaagaggataccaacgggctctattcatataggagccttggaactgacctgagctgtgatgcatttcttgtttaatgcgtggcctcatttagtaccaaattctcaaggagctcagtctgagaatgatcctaacaataccactgtgcgttcttaattctttttctgcaaagcagtcattcgtctttcagttttgggttaacttttatctgtatttgtctttagatattttcactgtctaagatgttaacacaacaactttagtgccatgatagcattcagctatagctggggatattcgtatgaatcttacaatatgtttccttcacttttttgctttcatttacagtccaaattctcaaggagctcagtctgagaatgatcctaacaataccactatatttgttggtggccttgaccccaacgttactgaagatgtcctgaaacaagtttttgctccttatggggaagttgtccatgttaagatccctgttgggaaaagatgtggttttgttcagttcgttaccagaccttctgccgagcaagcgctgctgatgctgcaagggaccttaattggtgggcaaaatgttaggctttcgtggggccgaagcctgtccaacaagcctcagcaggattccaaccaatgggtggggctgctgcttctgctgctgccggtggttactatggtggctatggacaaggctatgaggcttatggtggtgggtatgcacaacctcaggatcctaacatgtatggttatggtgcttatgctggttatcccaattaccaacagcaaccagctgcacagcagccacagcaacaacagtgaagcctgtttttgctggggctaagttctatttgggtttgttcgttagttacgtttattt

SEQ ID NO: 15797 - DNA, 673 bp, Setaria italica
  Peptide Sequence Number=SeqID_81771
gagaactacatctacgggtgcttcgcggccacgggggaggtacaatctgtgaagcttattcgtgacaagcatactggacagcttcagggctatggttttgttgaattcatgacccgtgccaccgctgaaaaagttcttcagacttacaatgggacaatgatgcccaatgttgagttgccattccgattgaactgggccagtgctggtgaaaagcgtgatgacacccctgactacacaatttttggtggtgatttggctgcagatgttacagattacttattacaagagacattcagggttcattatccatcggtgaagggtgcaaaggttgtgactgataagttgacaatgcgttcgaagggttatgggtttgtgaaatttggtgatccaactgagcaagctcgtgcaatgactgaaatgaatggaatgccttgttcgtccacgcctatgcgtattggtcctgcagcaagtaggaagacaacaggagttcaagaaagaggtaagcatggctaatctcatgccccttttgatagtcactgttagcctctacatgttgctgattggtgcccttgaggataccttgttctgttcatgtttgtctttttggttgttttattactttgtgttcaaatcaaagataggcctaggtttcgaccacttctcttacaaaaaa

SEQ ID NO: 15798 - DNA, 518 bp, Setaria italica
  Peptide Sequence Number=SeqID_81772
ttgtcttgggtcttaattgtctagtctaggtattacttattggtttattgggtctaaggcttacgaggcctatgggtatcctcaatctcaggaccctaatgcgtttggttatggagctggagcatatgctggctatccaaattaccaacagcaaccagtggcgcagcagacacagcagcaacagtgagatccaatggctctgccttaccatttcaggtgctgtgatggggatgtgctgagttgtaagatatagagcgtttgatgcatgccttggttaaggccatacgaacatgatttgtagcaccagagttttagcaccttgtatggtgcactgcggttctattccatgatcgagtaagtggtaggaaaaacaatctgttgcgtgtcgccgtatgttttactatcgttaatttacctttgctagctcttgtcatcgcattatttactgttacttgttaattctaagtattctcgttcacggatttgtacttttcttaggttttttaaaaaaaactaaa

SEQ ID NO: 15799 - DNA, 645 bp, Setaria italica
  Peptide Sequence Number=SeqID_81773
tttttttggcagcgggaaacaaacggtacagtgcatataaatagcataacagtagatagcaatacacagtaatatgaataccactagataggagaaacatggagagaaactaagaaagcatgtctgagcatagcaatcgcagtagagcaccacttgttcaaagccataacacagtgcataataatatattataaatagatgaaaccatgccatgaggcaatcaaaatcaggagcctttcgaaaccatctctctattgacaagagctagaatgcaatataactgcgcctcgaaataactttaatacgtctcgacaacccaatgacttgccccagcaaaacaggcttcactgttgttgctgtggctgctgtgcagctggttgctgttggtaattgggataaccagcataagcaccataaccatacatgttaggatcctgagggctgctggggctaatgcagcaggatactatggttatgggcaaggctacgaggcctatgggtatcctcaatctcaggaccctaatgcgtttggttatggagctggagcatatgctggctatccaaattgccaacagcaaccagtggcgcagcagacacagcagcaacagtgagatccaatggctctgccttaccatttcaggtgct

SEQ ID NO: 15800 - DNA, 664 bp, Setaria italica
  Peptide Sequence Number=SeqID_81774
aatagaccaaccgaggctcttcatataggagccttggaactgacttgagctgcaatgcatgtcttgtgtaatgcgtggcctctgttaggtcagtgttaatcgtttatgtcctaaatttgatctcggttccttcgatatctactttatgtcttagttttttcccttcctgccacagtccagtactccagttatttctttctttcttttacgaaatctgttatctgttactcaattaagaacgtttgctttttatttccttcctgccacaatccatttaattccttctgttcttttattaaagctattacttaagtaccgtactactcaaatgttctaagttgagatgcttctgtatagtacttaagcggatggggagcctgcacttactttcatatatgggttcacgttttctacattttcctttccgtaacatttttccggcatatccataaacatcttttaggggaagatttcacattgaaccctttggtaaacttccatttgacgttaccttatcatttcttttcatagatccaatttacttctatgacttctcagtatcaatatcattatcatgtgttcaacaaatgtaccatttttcatgctatgcctatccattggcaatgcttctttgcagaagctttcaggttacttttgaaaggaa

SEQ ID NO: 15801 - DNA, 1277 bp, Setaria italica
  Peptide Sequence Number=SeqID_81775
agcctccgccgcaggggcactacgggcaggcgccgcccccgcagccgtactacgctgcgccgccggcacaagctccggctgcccccgcggcggcggatgaggtgaggacgctctggatcggggacctgcagtactggatggacgagaactacatctacggatgcttcgccaacaccggggaggttcaatctgttaaactcatccgtgacaagaattcagggcagctccagggttatggctttgttgaatttacaagccgtgcagctgcagagcgagttcttcaaacatacaatggacaaatgatgcccaatgttgagttgacattccggctgaactgggccagtgctggtgaaaagcgtgatgatacccctgactatactatttttgttggtgacttggctgcagatgttacagattacatattacaagagacattcagggttcattatccatcggtgaagggtgcaaaggttgtgactgataagttgacaatgcgttcgaagggttatgggtttgtgaaatttggtgatccaactgagcaagctcgtgcaatgactgaaatgaatggaatgccttgttcgtccaggcctatgcgtattggtcctgcagcaagtaggaagacaacaggagttcaagaaagagtaccaaattctcaaggagctcagtctgagaatgatcctaacaataccactatatttgttggtggccttgaccccaacgttactgaagatgtcctgaaacaagtttttgctccttatggggaagttgtccatgttaagatccctgttgggaaaagatgtggttttgttcagttcgttaccagaccttctgccgagcaagcgctgctgatgctgcaagggaccttaattggtgggcaaaatgttaggctttcgtggggtcgaagcctgtccaacaagcctcagcaggattccaaccaatggggtggggctgctgcttctgctgctgccggtggttactatggtggctatggacaaggctatgaggcttatggtggtgggtatgcacaacctcaggatcctaacatgtatggttatggtgcttatgctggttatcccaattaccaacagcaaccagctgcacagcagccacagcaacaacagtgaagcctgttttgctggggcaagtcattgggttgtcgagacgtattaaagttatttcgaggcgcagttatattgcattctagctcttgtcaataaatagatgaaaccatgccatgaggcaatcaaaatcaggagcctttcgaaaccatctctcta

SEQ ID NO: 15802 - DNA, 976 bp, Setaria italica
  misc_feature (957)..(976): n is a, c, g, or t
  Peptide Sequence Number=SeqID_81776
gaatgtaaaattggtagagctcttttaaagtctcctatctctggccttctcatcctatatacatttattgctgtgtggtttgtaggaggattgacctcattccacctctacttgatttctacaaatcagactacttatgagaacttccgataccgctatgaccggaaaacaaatccatacaaccttggagtgggccagaatttcatcgatgtcttattttcaaggatccccagctcaaaaaataatttcagagcaaaagttaaggaggattctgcaaccttcacgtcatccctcagtatgggacgggttctaagtccgcccaagatgagcatagaccttgagatgggcatgaaaaggcaagccgtagacgcagaggacttggaagacttgcacagccagatcggcagtgctatggggctggagagatgtggcactgaacccccgcacattgttggtcgaaagggctgctctgagatttcatcggacatagaggcattcgcagaagagtttgccatggagcgtgggttcagtgagaggaaaaagattgagcgacacacaaatgatgattcataggaagttttgttatcataagcccctctccagccctcagtcaatccctcaacttaggcagcagaagtttgaagatgaaagaaatgtaggacataatggtagcatgaattcgacaggtattgttaagtttattttggctgaaatttccagctgagacttcacttagttgtagtagatgctcattaacaatatatagaaatggcgaatccacatttggtttggacgtttttgtactgctaggtcgtcatcttactgttggtccatgtgttgtattgtatgtgtggtgtggtagtgttgcttctgattttgttgaagctgtaatttctaacatgaacctggctagtgcatttcatcgattgaatctcctgcgcatttgtttgcctaaannnnnnnnnnnnnnnnnnnn

SEQ ID NO: 15803 - DNA, 2117 bp, Setaria italica
  Peptide Sequence Number=SeqID_81777
tccatcacttggggacctgttgaagacgaagtcacaggaagggtgcgggtgctgcttctgtttgggatgatccaacatcaaggagcattcttggatttaagatggatggtttcatgggcacacgagatgaggagacacgcagatttttcaagcattcttcagttcaagtgttgctttgcccacgatctgctggaaaacgacacagctgggtgaaacagcaggaaacgggaaccatttttacccatcatcagaaaacagttattgtggatgctgatgccggcaactatagaagaaagataattgcttttgtcggaggccttgatttatgtggcgggcgatatgatacaccttggcatcctctgtttcgaactcttcagactgtgcacaaggaggattattacaatcccaactttgctacagttgatgctcgtggcccaagggaaccgtggcatgacttgcattctaagatcgatggtccagctgcttatgatgttctacaaaacttccaggagcgttggttaaaaggcggccaaacgccatgggattaaaaagttggctaaatcgtatgatgatgctctgctcagtattgaaagaataccagagattataaacttaagtgatgcagcatattttagcgacaatgatccagagacatggcatgttcaggtgttccggtctattgattcaaactccgccaagggatttccgaaggatccacgagcagcaaccatgaagaatcttgtttgtggaaagaatgtacttattgacatgagcatacatacggcttatgtgcatgctatccgggcagcccaacactatatatatattgagaatcagtacttcatcggttcttcatttaattgggattcaaacaaggatctaggggctaataatttaatacctattgaaattgctcttaaaattgcaaacaagatcaaggcaaatgaaaggttctctgcatatatagtggttcctatgtggcctgagggcaatccgactggtgcagctacacaaagaattctttactggcagaacaaaaccatgcaaatgatgtatgagacaatatatagggccttgaaagaagcaggcctggatgatatgtatgagcctcaggattatttaaacttcttctgtcttggcaaccgtgaagttgctgacagcactagcacttcaaatgcatcaaatacagcaaataatccacaggaacaagctaggaaaaataggagattcatggtctatgtacattcaaaaggcatgattgtggatgatgagtatgtgatcattggatctgctaacatcaaccagaggtccatggaaggaataagagatactgagattgcgatgggagcataccagccacagtatacttgggctaataaggtttctgccccgcgtggacagatttatggctacagaatgtccttgtgggctgagcatattggaggcattgaggaagacttcaaccatccagagagcctggaatgcatgaggcgggtacgatatctcggggaagagaactggaagcagtttgcttctgatgaggtgacagagatgagaggccacctcatgaagtatccagtaagcgttgaccgcaaaggcaaggtgaaacccctgccaggatgcacaacgttccctgatttgggtgggaacatctgtggctcatttatggccatccaggaaaacctcacaatataagttttagttgtgcaataatacaagcgctgatggtttctgaggtaccctggagaacagtaatagatcactaactaatgctatttcttgagagcgtagataggatgcaaattttgcaagaggtataggttgcagacaaataggggaaatgttatcagtgctttcttccccgtcaagttcttttttgccccttttcttgattcatttattacatatatacctagccaatcaatttgttaccccttttttggtcctgtacagaaaaatatttgagagagggttgttcaggaatatgacatttacagtaactaccaagatgtaccatgtaaatctgaaaaattgtccaagtgtaaattgatcctgcagaataatttggagtggtggctattgaattgccttttccctttttcggttatttgtattgt

SEQ ID NO: 15804 - DNA, 350 bp, Setaria italica
  Peptide Sequence Number=SeqID_81778
atctttttgttttgttctcctgagactcagggctatagttggtgatgatttcttcgactagaggtaatctgaaacaggatcaggatcttgacaaagctgtcaaaagctccttttcttattctcctgtaagcgagcttgttcatttgttacactatgtttatattttttgcatgtagtgtgttcatataggaatgcttagtcatgtaacatagttgtaacctgtaacctaattgcttgacatgtagttgagtgcttattatatttttggtggttcacttgtatctaaaaatgatgcttgataaatgagatgcaaaaagaaattgttgtgttggggttacgcataaaaaaaa

SEQ ID NO: 15805 - DNA, 242 bp, Setaria italica
  Peptide Sequence Number=SeqID_81779
ctttcccccgcggccgcacgcatcatcgattgcccgatcgcttgcttgcttgctcgctcgcgctcgcgctgccgctggttgtcgtcgtcgcacgcactgaccagtgactgccacccagcgtccaatccgaaccggggaggggaccaatccagacgagcgtgcgagctgcgcctgcgtgcgcgcgttcgctttccccgaaggaaacgtgagccgagggagcggcaggagagagagagagagag

SEQ ID NO: 15806 - DNA, 307 bp, Setaria italica
  Peptide Sequence Number=SeqID_81780
agggggtgacaatggcttgaggtagtcatatgctggaactcttggaactcgtttttttttctttttgagaaattaatgaaaaaaaatctagcaagcgcatcgtagttctaacaaccgtgcatcaacaaaggttacaaaagatgcaggccggacatggcaaaagtacggccctatatgtatagaaggtgaaccacttggagtgattcagccagttccctaccagactgccaatgggactattcgaatgttgctgcgatcatttgaaacaattggccgtgtctgtatggccgattctgctgatgaaggt

SEQ ID NO: 15807 - DNA, 370 bp, Setaria italica
  Peptide Sequence Number=SeqID_81781
ctgatgaaggtgtgacatggagttatgtccacgagactgagcttcaaacccaaattctggtgagcctaattagctttctgtatgattcagtagctgtttaatgcaacacttttaaggtttttcaagaccatacctggtgacgaccatcagtagatgcttagatgtttcagaaagttataagacatgcttatgagttttgctagctctcacttttcacccctggaaggtattgatggagtttaagtattgtaagggtattggtaagtagtactgcttgcctacaacaccttctgcagaggaacgctcaaaattgcaatctccttgaacgatggtgatacatgggatgaagtaatgacattggaggatacca

SEQ ID NO: 15808 - DNA, 491 bp, Setaria italica
  Peptide Sequence Number=SeqID_81782
catggagttatgtccacgagactgagcttccaaacccaaattctggtattgatggagttaagatgaaggatggaagagtactgcttgcctacaacaccttctgcagaggaacgctcaaaattgcaatctccttgaacgatggtgatacatgggatgaagtaatgacattggaggataccaagggtatggaattttcatatcctgcagtgattcagactatggatgatctcatccatgttacttacacatacaaccggacgcaaattaagcgtgttgttcttcaaccaagtgcgatgatgaaattgtgagtgtgcaactactggagtggagaactgtggctggcaactttatggcactcaaatttatctccacatgtttagtgtgaccattgcttcatattgcctagattatgttcttgtacttctctgctcaattgatatgaaataaatgcttgctgctataacttaattgacattttccaaagtttatgt

SEQ ID NO: 15809 - DNA, 610 bp, Setaria italica
  Peptide Sequence Number=SeqID_81783
aagtaaagttaacaattttgcctttcaacagcttcaggaaactagactttcattgtttatgcgtaataggcttggtgattcatccttggactttatcagtatcctgactgacagcaaggtaaaagttggtttaaagctggaagaaaacacccaaaacattatcaacatgactacaaatgtgatgtccgggtggagcattgtgaaggaagagttattatttcctgctggaggtgcccttttcaaaagttgccatgcttctactattgtacagatcgaggaagacaattttttggttgcatattttggtggatccagtgaaggcgctccagatgttaaaatctggttgcagagatatagtgtcggttcaaactgtccaatatacttaaccttttgttctctgtacctagaagagtagttgttactaggaatgttacatttgtaggatggttgctggcatcctccagtggtggctgatgaacaagatggggtgcccatgtggaatcccgttttgtttcagctcccctcccgtgagctgcttctgttttacaagattggtcaagaagtccagaagtggagtggtgccatgaaaagatcattggatggtggtata

SEQ ID NO: 15810 - DNA, 1487 bp, Setaria italica
  Peptide Sequence Number=SeqID_81784
gatgaggtcattgagtgggatcggctccaggaactggacttattgaggatatcctgactgacagcaaggtaaaagttggtttaaagctggaagaaaacacccaaaacattatcaacatgactacaaatgtgatgtccgggtggagcattgtgaaggaagagttattatttcctgctggaggtgcccttttcaaaagttgccatgcttctactattgtacagatcgaggaagacaattttttggttgcatattttggtggatccagtgaaggcgctccagatgttaaaaatctggttgcagagatatagtgatggttgctggcatcctccagtggtggctgatgaacaagatgggggtgcccatgtggaatcccgttttgtttcagctcccctcccgtgagctgcttctgttttacaagattggtcaagaagtccagaagtggagtggtgccatgaaaagatcattggatggtggtataacctggtcacagagagagcagctacctcctggtatccttggtcctatcaagaacaagcctttcttgcttgaggatggtcgcctgctatgtggatcatcagttgaaagctggaattcttggggtgcatggcttgaggttacaaaagatgctggacggacatggagaaagtatggccctatatatgtggatggacagccacttggggtgattcagccagttccctaccgcactgcaaatgggataattcgtgtgctgctccgatcatttcagacaataggccgtgtctgtatggctgattcctttgatggtggtgtgacatggagttttgtgcgagggactgagcttcccaacccaaattctggtattgatggagtaaagatgaaggatggaagagtggtgcttggctacaacaccttctccagaggaacgctaaaacttgcggtctccttgaacgatggtgattcttggaatgaagtgatgaccttggaggataccagtggtatggagttctcatatcctgcagtgatccagacaatggatggcctcatacatgtgacatacacgtacaaccggacgcagattaagcatgttgttattaaacctagtgccctggtgaagtgagtccgcaactatgggaggattatggattgcaacttccaggaacttaaacttatctttgccaccatgcactagtaactgcagagatcaaattaatccatctgtttgtgtatatgaaaaatgccgtgagattcaagtcaaaaaatgggcatatgatcctgatgagcatatattgtctgtatgaaaaatgttgtcatattgaatttggaggactattgcagcatgtcctccctcctatgccacttctgatggtcatatgcccatgaaacgtgccaaattaagtggcaggcaatcaaccaactgtagtatgatgacaaaccaagcagcatacattcttaactgtaattttcttgttaattttcaaaactacaaaaaaattactacgtaatag

SEQ ID NO: 15811 - DNA, 966 bp, Setaria italica
  misc_feature (922)..(922): n is a, c, g, or t
  Peptide Sequence Number=SeqID_81785
tcaagttcgttcatcttgcctgcagcttaccatcccgtgcggcggcgccatggcgacggccggcggcggcgacctctccgatgaggagaggcgggcgatgcggggcagcaagttcgcgccgcttcctccgcctccttccacctcccgcccccagcccaggatggcacatcccgggggaccactaaccacaaacaaggctgctgccttagcgaaattccttgagagaaaacttcagcaacccgatggcttggattccctgaaccctgaccttgtaaaactggctgtgaaaaatgcaaaggaaaccatgaaagctagcaagggtgaggcttcaacttcaggaagagtagtacgtcatgtgtcatcatttgaggatggctctgaggattctgaagatgaagcagaggtgaaggggatcaaaagaaaaaggaagaataagaaggttaaagcccatcaagatgacgaacaacagagcaagaaaaagaagaaaaagaaaaataaaaagaaaaagggcaaaggttgctgatggttccatgcccccagaaaaagtcaaagaaggaaaatttgaaatcactatgattcgttaactagtattaggaagctacaagcaggcaggccttgtaccccaaaagaaagggggacaagcaatcattccttcctttttgttcccatctgaaccaatgagcattgtaagcttactctgccagtcatatgagcactggacgttccatttgctgcaaagggcagggcttagcaacgatcctctgtgtctgtatgcaagagggtacaatgatacacttacatgggaattcccagattgtacaattgaattcagtggtcaatattgttgtacactgaatagtttcccctgtgctatatcatgatatgcagatgatcatcagcttacccaaaaaaaaaaaaaaanaaaaaaaaaaacaaaaaaaacgtgagacacacaacgagggagta

SEQ ID NO: 15812 - DNA, 279 bp, Setaria italica
  Peptide Sequence Number=SeqID_81786
cggttgatggtgtgggagacggccagcgtcaggctcgccgtcacgtcgctgtgggtcagcgtgtacgtccgcggcagcagcggcagcggcggcggcttggtccccgggtgcgccgcgtgcttgccgccgctctcctcgtccacgcccaggaacagcaccttcagcttcgacgcctcgaagatcgccggaccgaacagcctcgccgtcggcacgacgtaccgcctccgccgcgcgtccctgggccgccgccggaacacgaccacgggcgccggcgccgag

SEQ ID NO: 15813 - DNA, 615 bp, Setaria italica
  Peptide Sequence Number=SeqID_81787
aagtaagaacccacaccgtggcttcctccagttccgggtgccggctgaacaggtcgccgtcgccgtgcacgaacgccttcagaaccacggggagctccttgcggaagatgtagtagcggaggccggcgatgaggtcgagcaggaagtggccgccggagatgtggcagtggacgtgcagcgacatccggccccgcaccttcttccactccgccaccacctcgtcccgctgcagccggttgtaccacccctgcagctgcgcgcggttgatggtgtgggagacggccagcgtcaggctcgccgtcacgtcgctgtgggtcagcgtgtacgtccgcggcagcagcggcagcggcggcggcttggtccccgggtgcgccgcgtgcttgccgccgctctcctcgtccacgcccaggaacagcaccttcagcttcgacgcctcgaagatcgccggaccgaacagcctcgccgtctacacgcagacaggaaacagagcagcagccccctgccgactcatcagctcaaagacgccccaaaaagaatttcctatcaagggagatcgatgggaatcgagcagatcacgtaccggcacgaccgtaccgcctccgccgccgccgtccc

SEQ ID NO: 15814 - DNA, 988 bp, Setaria italica
  Peptide Sequence Number=SeqID_81788
acataccataaagagacacaattaggtgaccatgatcctcttacttctcagaatgggcatcttccagtcagagagaatgactctacagttgacaatgctatgagctccaaatctggtggtactgctgcattgcgcaaattattttcacgtaaattgctcagatcaactcttcttatctggtttgtatggttcgcaaattccttcgcatattatggactagtattgctatcatcacagctgagtgatgctaacagaagatgcacatctggccagaaatctgaactgcaccaaaaaaatgtcaacctttacaaagatgttttcataactagtttagcagagtttccaggcttagtgatttctgccattattgttgattggtttggccggaaagctacaatgtggatcctgttgtttggatgctgtgctttccttggaccactcgctgttcatcagaaagagtcattgacaactgctcttctattcggtgctcgcgcttgtggcatgggtagctctacagttttgtgtttatatgcaccagaggtgtatccaacatcagcgcgctcaacaggtgttggaattgctacggccatcggtaaaattggtggcattgtttgccccattatcgctgtcggcctgctgcggagttgccaccaaatggaagccgttgtggtctttgagctggtgttaggcctcgctggagttgcctgcatcctcttccctgtggagaccaagggccgcgagatgaaatgactgtgtcaaatcaaaacacgttgaggtccaaatgcaccagaattaaagctaccagcgtccaccacttccatcatgattgcagccgagtgctatttctcgcgagtgtatttttcatgttctcgagtgtttttgacactagggagcttcgcagattctggtagtgagaaacatgataatatgatatgataagtatataggtggatatctgacgggcaaatccaggtcgtctgtgtattct

SEQ ID NO: 15815 - DNA, 769 bp, Setaria italica
  Peptide Sequence Number=SeqID_81789
atgaccacgaccaacttagaaaacacctaaaagttttttgcaagaagtacatgttcacgagtttggcctcctttttcatacccagtttcaaattcacctttccgagcagatatcaccagaacaccaatgtcagcttgagatgcaccacttatcatgtttggaacgtaacttttgtggcctggtgcatccaaaattgtgaatcttgttgcttcagtctcaaagtaagctctcccaacttcaacagtcttgccctttgcccgttcttcctcatttgtgtccataatatatgccatgtaccagctctctctgcttttgtcctttgcttccttctcatatttctggattgtccgttcatccacttgtccacttaagaataatatctgacctccagctgtggacttgcctgcatcaacatggccgataaacacaacattcaaatgccgttttctattctgttcctcctctgtttccatttgaaccccgtcatcactagtctgcagctccagagactgaagacttgactgaattccgttgacatcctgggccggaggagctgagaccgcctctccagcatcgtcctcggcggccgcagctgccggagccggagagtgggactccgctggcttctcctcgaaatcgtcgcgcgccgcccagtcgtccgcggcagcttcggcggcggatgcgcgggaggcgatcggcggcgccatctcggcgtcgtgttccatctctcgcggggcggttgctttttctttcccttgttttcccctta

SEQ ID NO: 15816 - DNA, 1499 bp, Setaria italica
  misc_feature (1)..(64): n is a, c, g, or t
  Peptide Sequence Number=SeqID_81790
nnnnnnnnnnnnnnnnnnnnnnnnnnnnnnnnnnnnnnnnnnnnnnnnnnnnnnnnnnnnnnnnaaaaatctcccaacaatatataatttttgcatataccaacttatacttccaaggtggcaatttaacactcgtaaccatcaattcgctgtaaaaactattcacatttcaggtgcaaaatatacctgtcccaaactacgaaagaaggttgttaatagccaacttcatagattgccatgcacaaaaggtgaaggaaaataaaagaacagtgaaatttttccttgagatgaacttgttctccaggttacaacacccttagaccatataagaaccaagttttcttttacctaccgtcgacaaaattggcttaggctttaaacgttgaactcccacttggcggaacagcaacaacctttcctacagctaccgttttaccttctgttcggagtgtaaatcttccgagctgaggaaaatcagagaagttctcgatgcatatcaagttattgacctggatgcagcagacaacaacagctccattcttcacaaaaagaggcttcctctttggctttttcttcttcgggtcagtttctttcttcctcttcagatcaatttcctctataagctctacaatctcacattcctcaactactgagtggatatgcaacaccgccttgtagccagcagtgaaaattgcattgtcaagcaactccagtatctgaagctgagcattaaattcagatacagcactgacaggatttgttatacttgatagcacaaagccaggagtgatgtcctcctcttcaattcctgacaacttgagacggacattctcacctggtgcagcttttctcactttatcctcatcacagtgtatggtaaggactttcacattgaccttgttcggcatcaccaacaagttatcgccctccctaatagttcctgactctatttttcccatcaccacagtgcccatttctttatatttattaatgatgggcacccttactgggcctttgggatcccgtaaagggacttcaatgcaatcaagaacttcaaaaaggcatggaccattccaccagctacaaatgcttttatccatgcgagtcttcatattagttcccaaaagaccagaaattggcaagaagtggacatctttcttgacattgtaccctgaagacttaaggaaaggaatcatcctgccttctatttcatcatatctttctttagaccatccaacagtaggatcatccatcttatttatgaccacgaccaacttagaaacacctaaagtttttgcaagaagtacatgttcacgagtttggcctcctttttcatacccagtttcaaattcacctttccgagcagatatcaccagaacaccaatgttttatttccttcaccttttgtgcatggcaatctatgaagttggctattaacaaccttcaccttttgtgcattggtctaaacttacgtaaagtaaggtttgtttaatttagtt

SEQ ID NO: 15817 - DNA, 224 bp, Setaria italica
  Peptide Sequence Number=SeqID_81791
cactgacagccgaggtccagcgcctgaaactcgcgactgcagagctcggcgattcttgctcgtccaacaatctagcccagcagcttcaactcaatgctcaggaccagatgttccaactgcatcagcagcaggctacgccgatcccgttttaccagctgcagcaggcacagcagaacggcgtagggaagaaccatgaatcgaaggaatgaactctgaggcattcg

SEQ ID NO: 15818 - DNA, 2208 bp, Setaria italica
  Peptide Sequence Number=SeqID_81792
ctttaagaaaatgatagttttacgagatggaatgagcaggaactggtgaaataaaatgattcccaattaagtccagttctggagtgtactggaacagcgaagatactgacaatatcattgaagcatcaagtcgtgatcagttggatcaattcactgttgacccagtggttgcacaagaccagctgtttagtatctttgatttttctccaagctgggcatatgcgggctccaagactagggttctaattaccggtagattcttaaattctgatgaggttcaaagatgcaagtggtcatgtatgtttggagaagttgaagttccagcagagatttcagctgatgggactctcagatgttattctccgtcacacaaacctggcagggttcccttttatgttacatgctccaacagattagcctgcagcgaaatccgagagtttgagttccgaccaagtaattctcaacacattgatggcccaactccacatgatattgcgaacaaaacgtatctccagatgcgtcttgatgacctgttgtctttgggacaagatgagtaccaggcaacagtatctaaccccacaaaggacatgattgatttgagcaagaagataagctcactgatgacagacaatgattcctggtctgagttgctgaagttggctggtgataatgagcttgccactgatgataagcaggatcagttctttgaaaaccgtgtgaaggaaaaattgcatatctggcttgtccacaaagcaggtgatggtggcaagggccccagtgtgttagatgaggaagggcagggtgtgcttcatctggcagcagccctaggatatgattgggcaataaggccaacaatttctgctggtgtgagcataaatttcagagatgctcatggatggactgcactccattgggctgcattttgtggcagagagcgaacagttgttgcacttattgcacttggtgcagctcctggagctttgacagatccaacgccagatttccctacaggaagcacaccagctgatcttgcgtcagctaatggatacaagggaatttctggtttcctggctgaatcttctttaacaagtcatcttcagaccctcaatcttaaggaagccatgtggagcaatgcgccagaaatatcaggtctgcctggtattggagatgttactgaaagaaaactatcaccattggcaggtgaaggtcttctagctggatccatgggagattcactaggtgctgttcgaaatgctacccaagctgctgctcgtatatatcaagttttcaggatgcaatccttccagagaaagcaagtggtacagtatgaggatgacaatggtgcaatatcagatgattgtgccctgtcactcttatctgttaaaccatctaaaccagggcagcttgatcccctacatgctgctgcaactcgaatacaaaacaagtaccgtggatggaagggaagaaaggaattcctgcttattagacagcgcatcatcaagatccaggctcatgtgcgaggtcaccaagtgagaaagcattatcgcaaaatcatttggtctgttggaatagtggagaaggtcatattgcgctggcggcgaagaggggctgggttgcgcggatttcggtctacagaaggtgcagcggagggcactagcagcagcggtagcgatttgatccaaaataaaccagccgaggatgattatgatttcctgcaacaaggaaggaagcagactgaagaaaggctgcagaaagctcttgccagagtgaaatccatggttcagtacccagatgcccgtgatcagtatcagaggattctgaatgtcgtcacaaaaatgcaggaatcccaggctatgcaagagaagatgctcgagtcgtcgaccgatatggatgaaggcttggcgatgagtgatttcgaagagctatggggtgacgacatgccaatgcctgggtatatctaggtcctgagcactggtgtcttgtaaattatacttacctggctgtatttgttagttttaggttttagcttttagcaaatgatgataacccgtagtagtgcttgtttaggttaaccatctttgtatgtatatagtatttttttaattgttagtttggttctggtgttttgttatttagcttagccttttctgtacagtacgtgtatgttgtatgtagaaggcaaatatatttattgtgcactcttttgaa

SEQ ID NO: 15819 - DNA, 450 bp, Setaria italica
  Peptide Sequence Number=SeqID_81793
ggtggtggtggtagcaagctggagtactgctgagtactggcttgccgacagttacctagagctaattaattgctaaaccctagggattaagcggacggagttcattagcgcgcggtggagaggagagaaggaaagcgccctcgatctggcctagacactgatgggggacggggagggggaggagacggcggcgcggggcggggagtcgtcggtgtcgtcgtcgtcgccgtccccgtcaccggcgacgccagcgccggtgccgatgcctgcagcggtcgggttgatgccgatgccagcggccgcggggttcatgccgacggcggaggttggggaggtggaggcgagctggttcttgtggttgtgcatccacaccttgagcacctgccgcttgacgccgatctcgtcgcagaagcgctccagctcgccgtcgtcgttccgctggatgcgcca

SEQ ID NO: 15820 - DNA, 498 bp, Setaria italica
  misc_feature (498)..(498): n is a, c, g, or t
  Peptide Sequence Number=SeqID_81794
ttttttttttaacagacttgcaaacttataataaactatgtaattggtacatattcaacaatctacaaaccatcactgcctgtattcacaagagtgcctccatgtaatacataggatgatcacactaactgctgccctatcacttgacgagtaactgttgcattcaaagtacctactcagtctcacaaagggacaattcgtactttcgtagccataccatactcctctcagagcaggagcacctcttcccacgaagagaacaacggcactaaggggttatgttgttcctcaagaaggttttagagggcagagatggacagctacttgactgcccatccaatcacagtggaggtgaaaatagcattgcacccaagcatttcttcgatgcctcattcatttcagtgtataaactcgacaccatcaaatgatgagggttgcttcaggcctaatcccgtaggatgactgaatccgcaatctccatcagcggctcaaggcacn

SEQ ID NO: 15821 - DNA, 761 bp, Setaria italica
  Peptide Sequence Number=SeqID_81795
accctcgtcaaggtatacttggtgcaaccctcaggatcctgcatatccagcaatgtggggaagtagtgctcctctggatagcatgaatccctgcgctggattagacagggttgcttgaacttcttccaaagccgcatatccctcaccaccatgatggcatgccttcttgcgagcacaaaaaactgcgatccagcacggaactggtcatacggaacctctgggagcatcacgtcatcacctcgggcgtagtacctgtcgtgcagcagcgtggtgtcattatccatgttgtccattatctctatgaagctgcggtggcggttatgaggaccagcagtttcggagaggagggcgttgtagagggtggggaacgggtggagcgggatgcaagactgcgagatgagagcgaagaactggttattggggtcatctaggagcgctgtagcaaggaggcggcgcgcggccgagatgagggtgggggaggcgcgctgcgtggccttggcggggacgaagcggccccggaaggaaggcgtgggcggcagctcaaggacggagtaggggtcagcgtggacgtagaggttgaagaggttcttgtggccgcggaagaacttctcccagagcggtgagaagacgaggtcggagttggtgaggaagaggaaggcgatcttgggtgacgggcggcggcggaagaagtaggaggcggcggaggcgggcgaagcagggtcgccgaagaggaggagaggatggcgcggcggaagagggcg

SEQ ID NO: 15822 - DNA, 728 bp, Setaria italica
  Peptide Sequence Number=SeqID_81796
tttttttttaattagtagtatgccactttattatgaaattgttaagcatacagattactggacaacctaatactctcacattccgtagtatgtacactccatttggagacatttctctcaacacaacacctaaatagaagaagattgattcttttggaaaggccgcagcaagtgcacgtttccgtacctcattcatttcagtgtataaactcgacaccatcaaatgatgagggttgcttcaggcctaatcccgtaggatgactgaatccgcaatctccatcagcggctcaaggcactcgggagaaaacttgcgggcaaacatatatgaatgtgtgttgtttgacttcctcagctccctgatcaggctcgctgatacctctccaggcccgtacatgtgtgggtggcctgccactgaatctgtccaatttaccctcgtcaaggtatacttggtgcaaccctcaggatcctgcatatccagcaatgtggggaagtagtgctcctctggatagcatgaatccctgcgctggattagacagggttgcttgaacttcttccaaagccgcatatccctcaccaccatgatggcatgccttcttgcgagcacaaaaactgcgatccagcacggaactggtcatacggaacctctgggagcatcacgtcatcacctcgggcgtagtaccggagaaatggcttccctccacaaatggcgagcgaatggcgcccgcgcc

SEQ ID NO: 15823 - DNA, 1070 bp, Setaria italica
  Peptide Sequence Number=SeqID_81797
tcagacgtacggcaaaaagggtacgtagagattatttagaaactatgagaattttttgtcacttgcaactgatgctaatccacaagaagaaacctaaataaacacaagaattacaaatggaggtccaagctaacactctccttttggcccaattcatacctacctagcttctccggcgacgtggacgagcacgacgagagcgagggagacgaggacagcaagctcatcaccgccttctcgtccttgcacgccgcctccccgcccggcccgaccaggatggccgccgtgtcagcgccgtgccggccggtcatgccgaaattctccatgggcgtcggcggcatcctccatagccccggcaccgggctgccgttaatcggctgcgacatggagcctggccctccgccgtagggacccggcgggctggcgctggtccacatcgggtagtgcgccggcggtggtggcggcagcggcgccggctggtcgaaacggccgaggtggtggtggtagttgaagaggccgtacatgtggccggggacgtagcggtgcatggcgagggaggcctggaggtgggcccgcttggcgtgctggcgctcgcgcttgtgcgcgttctggtgcccgcccagcgcctgcgacgtcgggaagttgcggcagcagtagtggcactcgaacttcctctcggccgcggcggaggcgccgacgctctgcttggcgttgctctcggacgacgtgaccgtgctgccgttggccgcgtccggggagtcggcggcggcggcggcctcctgcttggcctgcgcctgatggtcgttggagaactcgcagccgaacagccggatggtgtcccgcggcgccggcgccggcggggccggccggatgaacggcagctgcgagaaggagtcgacgctgcgcacctcctgcggcttcgccatggccggctgctggctagctgccccccaagaattccacctagctcgagcgagatggctccgtcgtaggttgtgaggcgacaagcttcgatgtgttggtgtgtgtgtgtgagagagagagagctcaagaatttggctacgagttgg

SEQ ID NO: 15824 - DNA, 686 bp, Setaria italica
  Peptide Sequence Number=SeqID_81798
acacagaaattcagaacataaagcaaattcttggtttgcagcatggaaagcagtatgatagcaccaaaggcttgagatacggccatctcatgataatgacagatcaggaccatgatggttcccacatcaaagggttgttgatcaacttcattcattctttctggccatctcttcttaaagttccatctttcttggttgagttcatcactccaattatcaaggcaactaagaaaaatgagaccaaatcattttacacaatgccagagtatgaagactggaaaaggaatttaggagcaagtgcaagttcatggaccataaaatactataaggggttgggaacaagcacatccaaagaaggcaaagattactttacaaatattgaccaacacaagaaggattttgtctgggtagatgatcaagatggcaatgaaatcgagttagcattcagcaaaaaaaggattgctgataggaaagagtggcttacaaactttcagcctggaacttaccttgaccaacgtgagaaagaaatcaagtaccgtgatttcatcaataaagagctgattctcttctcattggcggacctgcagcgatcaattccttcgatggtagatggttttaaaccaggtcagaggaagattctgttttgctcattcaagaggaaccttgttaaggaaccaaggttgctc

SEQ ID NO: 15825 - DNA, 444 bp, Setaria italica
  Peptide Sequence Number=SeqID_81799
atctgcacacaaacaaatctagtaattaggaaatcaagaatttcagtgaagaaattttattgacttgcaactgaaacagcatgaaaaaggaacatgtgaagtaaaaatttgttaatctaaagaattcaaaatttgctgaagaatgatgggctacaaacatctgattcggcaatgattggctcagcttattacatcagcacttgttttcttaaattgactagtaacactaagcctatgtgttttcttcaactgatagttgtttctacttcaggagtagataagttctttaacaggtactaatttaaggccttgtgtgcaccagaattatagcagcgcttctttgctttgttctaaatcaaactgaactcatgtatgatttctgctcagattttagttaattttggttctactttgtattctaggttaaaattattacttaattta

SEQ ID NO: 15826 - DNA, 446 bp, Setaria italica
  Peptide Sequence Number=SeqID_81800
tagcggcggcggcagctgctacgacggcgggcagtcactacaggatggacggcctcggcagcaacatcgccgtcgtctcggcgttcaacggcgccagcgacaatggcgagtggtggtggcgggcgccgggcgccgccgcggcggcggccgacgaggtgcagcggctgcagcgtcaggtcggcggcttcgacgacgaggacgagctctgggcaaccctcggcgacatgctgtcggtgaacctggcctcgtaggaagcaggccagggtcacccagtcactagtagccaggcagcccgccaggccgttggtggccggtggggtccggcgcgcgcgcgagcaccagggggcgggtgagaggtcgggtcggggggtggcgtcgttgaccctcgttcccttgtgtatgcagtatgcatgattgattgccttgtaactttttagccagaaaca

SEQ ID NO: 15827 - DNA, 1822 bp, Setaria italica
  Peptide Sequence Number=SeqID_81801
tttttaagaactagaaatagttaaagttaattagacaattttactaaaataaccaataattctgtttaatcaggtaaaaatttacctgataactggaatgaggtttcgtgcttgggatcagcatgcacaaaatgtaaaacattactatttacaccatgttcatctgaaatcagagatcaaactagaactccagttccaaaattgcatgcccaacacctatatttcaaagaaagccacttggccacaagagggaactgccaaaatcacaagtacaggcaaaaaacaatatgtacattttatttggatcaggtaaagtcacatctgctcctcgggttcctatggggataaaaaggttagccagggtcagccaaaacaaacttgcctgccttttattcagcctcagctaggtcatccagctctacagggagcagttgcgtgccttgggaattatgggaatgcataccatgctcaagtcggattacaagaacattgcattagcttccacattctgttctggaatatatggggaatgaccaggccatgaggctgcaagtgtgcgcttgattactctgctaatccactttgagcaatccattcatgcgcaccgtggaatctctctttgccagtacttgcaaggatggatccaattcaatctctcctatagctaaagcttaaaacagttgcctttcatttggatacaaggggaaaaagataatggccacaatcaaatgtctttaaactggttcactatcatccatagtaaccagcagccatagcctctgatggacatgctacagcatccttcttttagtatggatcttctgtactgcccacactctggaccatttgcccatgcacactgaaggaagttatgtctttgaatcatatccatggtgtccatccctcatacatattgcataaattgtcgatacttgttgcttgtttaagaagatagtcaacttgctcggaaatgttcaaggacctggtaccatctatatcctttccatgtaacttatgctccacttgcttcaggatggacagagcaaaaggatttttacctctagttactcgaatcaaagaatcagcataggatttaggatcactgttgttgcattcttgtcctctaacttgtttggaggctgcactgctatcctcactttcaattcttccctccaccaaatgggtttcaacctcatgaatattgctagcatgtgtcaatgcgacattacttgatatagactgattatcactactatctctagtttcctggtcagtagcaccaggaccttctatttcagccctaacatccataagagcatctattttctctaagttgtcagaagaactaatctgggtcaaccctgtggtacatccagagctgctagtatatgagtgctctggaggtgaaatccaacatccatcttgcaaagatacggctgtattcatttctaaatccgcagactcacattccacgcttccagaagagcctctatccttctcagttgatgaatcgctttgcaaaagatccgtcgagggtatatcctgggatctcacagattccctttctcctggaacttctagagccttgtgaagattcgcagcatgaagacttgaaagctgtccaagcttcataaccacggaatatagtccctccacattctcagtaagcggacccaccagaggttctatatttttgcaagcttccctaattttaatgttataagattggaataatgcctttccatgaatataaaggggcgatactggcattgttcttctccctttcctttgtaaattgcttcagacataatagttacatcag

SEQ ID NO: 15828 - DNA, 806 bp, Setaria italica
  misc_feature (740)..(740): n is a, c, g, or t
  Peptide Sequence Number=SeqID_81802
aagacaagacaagacaagcaagcagcatgaacaagccgccggcgtacgggcatggcgacagcccctactgctgcttccaccccagggaggtggtcgtcggcgtctgcgcccactgcctcaaggaccgcctcctcctcctcctcaataaggatcccaccacccagcagcagcaaggccagctccggcgcaggaggaccagcagcagcagcatctccctccccaaggtcttcgcgctcggctcctccttcctccagcgcctcgactcccggcaccaccgccccgaccacgacgacgcagctcactccgacggcaccacctccgccgcaagcctcgagaattctttcatctccatcaagttcgaggacaacggcaaggcgacgtgggacagccacaccaaggcagaggcagctcccccggcgccggtgaggtcttcgtcttcctcgacgtccgtcctggtggtggagcacgccaagcgcggcggcgtcacccggtggcgcaagcaggtggtggggcggctgctgcagctggcccgctggaagaggtccgcagccgccctggacggaaagaaggcggcgggggatcgctccaaggccaggggcagaggctggatccggagcctcacgcggaggcgcgccgaccgcccgtggtcgtgagtcagctacctgctgcttctgcatccatgatctgcaatgcaagcagccttgcatcgatgatctgcaatgcaatcagctactctttanatgtatcggaagatgttatactctactcacaacatgcatgcatatatgtactaaacgagaaggggg

SEQ ID NO: 15829 - DNA, 737 bp, Setaria italica
  Peptide Sequence Number=SeqID_81803
gcatatctatcacccgtttgagcagctatctcttcctacgtctctatatatcaacataagttgcgttcctttgccttccaagttccaaactttgagcagagcttcctatgaaatggcagagccttgcaatgtaccatctcacgatgagagctgcgatgaacgaggtggggattactctgagtctgcttccttctcgggtgcatctagcgagtccttgtgctcatcagcttcaaatctgtctgatgacgcaacatcatccccacctcttcatccctctgaaccgtcatcagcatcttcgagcatgttgcagctggataccgaggatccactgtacgagttgtccactctgctagcccagcttccaatcaggtgcgtatatttgccctcttcacaaacttcacttcaattgtcaagcattcaaatttgcttacacataattcaattcccacaggaaagggctgtccaaatactaccaaggaaagtcccaatcattcacatcaatatctgatgctacatgtgttcaagaccaagagcgtccaaaaaggtgataactaagaggccctcgaatgcttcagttgctaaagtaatgtcaagaactagcaacaccagccactcgtacagcaggtctaaaccatctgcacaccagaacaagagatacacaaatgacatattgatctgtaacaaagtgagacctaggaacaaataagaactaggatgccaagccttcacttcccatt

SEQ ID NO: 15830 - DNA, 776 bp, Setaria italica
  Peptide Sequence Number=SeqID_81804
ccgggtttacagaatcgtgtaaatggattgttcgtttgtatgtgaagtatttttccaatttagagatgatgtgcggcctaaaaatgcagccatgaattttaatacaaactattcattcacaagcaacagcaagctacaggagatccttgtgctgagatgacgatgatggccttgcggtttcagttgctccagagatccctagacgactgaggatccactgctgaaaatactggagctcttcatcaaccattgaatgtccaagggttggataagccttgaattcgcaggtcatgccaagctcttccaaaaatgcacacccagcatgccccgcttcaaatagtaccagtccatcagccattccatgaaaccataataccggtgtctttctagcttcaggcgaaaccttgtcagcgaatgatttactcagtggaactgaaccactgaaaacaacacaaccacctagagtttttgggaagagtagaacacttgctatggctagagcacctccttggctcaacccacaaacaaatatgtctgacggacttgttccggaagctatttctttgtctaacaattcatgcacataatcaacagctttaaggacttctttctcatctctaacagttttcgcggttataggaacctccgagatgccgaaccaagccgtgatcaccgtatcaccgtagcaggcgatggggaccgtgggcgcggtagggaaggacagtcggacggaggaggcgagctccggcgcggcgaagtagggcgcgacctgggcg

SEQ ID NO: 15831 - DNA, 405 bp, Setaria italica
  Peptide Sequence Number=SeqID_81805
taagtattctttcgtacgagatcctcgtcaacgccgccgacaacaagcagcgggacccccggatggattcgctcaaggtcgagatcgacgtcgagggctgctgcgtctccgtatacaacaacggcgacgggatccccgtcgaggtccaccaggaggagggcgtctacgtgccggagctgattttcggccatctcctcaccagcagcaactacaacgacaacgagaagaagaccaccggcgggcggaacggatacggcgccaagctcaccaatatcttttccacggagttcgtcatcgagaccgccgatgggcgtcgccagaagaagtacaagcaggttttctcagaaaacatggggaagaagtcagagccccagattacgaagtgcaagcagggggagaactgga

SEQ ID NO: 15832 - DNA, 319 bp, Setaria italica
  Peptide Sequence Number=SeqID_81806
ccgaggccaggtgcattgaccgtccgaaggccatctcttttagggaccagatactggttgttctgatcctgctgtttctgttctacgtcttctggcgctgagtgcatccggcgtccctttgcaaatgcccgagatagctaagttttacagaacagctttcttggccctaactgcctgcccttctccatgggttgattgtggagattggggaaacactgcatggactgcggtgatcacaggtggtttcagtgttttgtttgattcgtcttccttttcttctttttttcccttgaagaaccttaaaaaatgacagggagtt

SEQ ID NO: 15833 - DNA, 234 bp, Setaria italica
  Peptide Sequence Number=SeqID_81807
tgccgcgcaggcgctctgctcctcggaatcttgacgagcagctggattgcaaccacgacagcgatcagtgctgcaatgccaatcaccagaatatggttcatgcaagtggaggagtcgaatagttccttccatgcgcaggaggccgcagcagcctgcttggagcaaatcgggctcccgcacaagtccaccatccaagtacttgttcgggaacccatgtgtgcagtgcaatccctg

SEQ ID NO: 15834 - DNA, 256 bp, Setaria italica
  Peptide Sequence Number=SeqID_81808
aggtgccccaggtcggccagctgcatggacacggccggctccgagctccccaggaagcggctgacgagctccgacgccttcgtcttgggcgacggcgtccggctggtggcggccggcacctccaccacctcgccgctgaacaccgccaacatcttcacacacctaatcaacctaccaaaaagaacctagggatcctactaaaacctaaccccttcctgataataatcaatcaaggtagcataagcttcctcctccc

SEQ ID NO: 15835 - DNA, 323 bp, Setaria italica
  Peptide Sequence Number=SeqID_81809
taataggaggaagaactacaggatgatctatcaaatcctcttgcatggaataagtgaatccatcctaggatcttgcgaaatccaggcgaaaaaggatactactttttcagttgatcagctgatggagcttccttgggcggaggagggcctggttggtgtgggagtaggcgaggtgccccaggtcggccagctgcatggacacggccggctccgagctccccaggaagcggctgacgagctccgacgccttcgtcttgggcgacggcgtccggctgccggccgccaccagctccgccggcacctccaccacctcgccgctgaac

SEQ ID NO: 15836 - DNA, 303 bp, Setaria italica
  Peptide Sequence Number=SeqID_81810
acaccaccatgtacagagtctcgcaatgccccgcatccctcgacacgagcatctccacctaaaattacagtgctgtgaggactgtagagccttccaccttgaaagttgcaccacagatttcttcttcgtttgcaggaacagcagtcaccttgttcttggggttctcatagcacttcaagcctccaagagcattagagtagaagcaacctgcaggcagcatgccaacatgagattagtgaaaatgatcaatcaagaagggcttttaatcttcagaatatagtcagcagtggttggaacattttc

SEQ ID NO: 15837 - DNA, 628 bp, Setaria italica
  Peptide Sequence Number=SeqID_81811
acgagatcttctgcctgttcgagggggtgctggacaacctggggcggctgagccagcagtacgggctgtccaagggcgccaacgaggtggtcctcgtcatcgaggcctacaagacgctccgggaccgggcgccatacccggccagcttcatgctctcccagctcaccggcagctatgccttcgttctcttcgacaagtccaccaactccgtgctcgtcgcatccgatcccgagggcaaggtgccgctcttctgggggatcactgcagatggctgcgtcgccttctctgacgacattgacatgctcaaaggatcatgtggcaagtcacttgcacctttcccacaaggttgcttctacttcaagcctccaagagcgttagagtagaagcaaccttgtgggaaaggtgcaagtgacttgccacatgatcctttgagcatgtcaatgtcgtcagagaaggcgacgcagccatctgcagtgatcccccagaagagcggcaccttgccctcgggatcggatgcgacgagcacggagttggtggacttgtcgaagagcacgaaggcgtagctgccggtgagctgggagagcatgaagcttggtccgggttattggtcgtcccggttcccggtagt

SEQ ID NO: 15838 - DNA, 452 bp, Setaria italica
  Peptide Sequence Number=SeqID_81812
ggcattttaaacttagtcttaaacgccttcacctcaataaaataaaataaaacgccgcttactccataatacaatattctacagaatctgaccgaaacataatgttccttgttgtgagtgccccgatttgatactactataccagtactgtactccatactgcacaactgactgatgcagctctgacgaactacatgaaactgaattcttcttcaagacataacaaaccatttttttttaccttgaaagttgcaccacagatttcttcttcgtttgcaggaacagcagtcaccttgttcttggggttctcatagcacttcaagcctccaagagcgttagagtagaagcaacctgcagacagcatgatgggattagtgaaaatgactaattacgaagactctttgaatgttgtacagagagcttaataatcttcagaatgtatacagcagtgg

SEQ ID NO: 15839 - DNA, 626 bp, Setaria italica
  Peptide Sequence Number=SeqID_81813
aaaggtgcaagtgacttgccacatgatccttgagcatgtcaatgtcgtcagagaaggcgacgcagccatctgcagtgatcccccagaagagcggcaccttgccctcgggatcctgagagcagagaacacatcggaaaaataagctatccacccattgtcctaaaccaagtcaccattgacggatagaaattagaaacagcagctaggactatgagtaggcaacatacggatgcgacgagcacggagttggtggacttgtcgaagagaacgaaggcatagctgccggtgagctgggagagcatgaagctggccgggtatggcgcccggtcccggagcgtcttgtaggcctcgatgacgaggaccacctcgttggcgcccttggacagcccgtactgctggctcagccgccccaggttgtccagcaccccctcgaacaggcagaagatctcgtcctttgccgcgaacgaccttgggcggaggagggcctggttggtgtgggagtaggcgaggtgcccgaggtcggccagctgcatggacacggccggctccgagctccccaggaagcggctgacgagctccgtcgcccaagaccagggcgtcggagctcgtcagccggccgccaccag

SEQ ID NO: 15840 - DNA, 882 bp, Setaria italica
  Peptide Sequence Number=SeqID_81814
atttcctggctaatttttgtggctgacgattgtgaattcagaagaagataaaccaaggtggttggtaggttggtcctacagctacagttacacgaatggatcaggaaacagtattcattattgcccactttctttcagaaaagcagtaagaagaaaaacctttttccaattattgagacacaggatgggtactactagataatacagatccgaatcttttgatgaatccgctaataaccgaatttagctgcctaattagtttgccaagctctctcgcgtgtgatatcatgtcaccaacatcactgccgttcagacttgagtaactgaaaaacagaacagagcaactgactctgtttgttataggaggaagaactacaggatgatctatcaaatcctcttgcatggaataagtgaatccatcctaggatcttgcgaaatccaggcgaaaaaggatactactttttcagttgatcagctgatggagcttcctagaaggaaaaagagaagagaagagaagagaatcctccatccatccatgtccatgtccatgacactaggctactaccagagcatgtatgtaccttgggcggaggagggcctggttggtgtgggagtaggcgaggtgccccaggtcggccagctgcatggacacggccggctccgagctccccaggaagcggctgacgagctccgacgccttcgtcttgggcgacggcgtccggctgccggccgccaccagctccgccggcacctccaccacctcgccgctgaacaccgccaacatcttcacacacctaatcaacctaccaaaaagaacctagggatcctactaaaacctaaccccttcctgataataatcaatcaaggtagcataagcttcct

SEQ ID NO: 15841 - DNA, 817 bp, Setaria italica
  Peptide Sequence Number=SeqID_81815
tacaacatcagtagttccctgctcttcagttgtgcttttctgctcactggaattttaacctctgaatctgcaatgccttttctcctaaaaggaatccttaaatgccccttactccacagtacaatattctgcagagtctgaccccaacgttccttgttgtgagtgcccgattgatgctatagtatcccatgatcgaaacagcccttgaaagttgcaccacagatttcttcttcgtttgcaggaacagcagtcaccttgttcttggggttctcatagcacttcaagcctccaagagcattagagtagaagcaaccttgtgggaaaggtgcaagtgacttgccacatgatcctttgagcatgtcaatgtcgtcagagaaggcgacgcagccatctgcagtgatcccccagaagagcggcaccttgccctgggaatacggaatagacgacgagcacggagttggtggacttgtcgaagagcacgaaggcgtagctgccggtgagctgggagagcatgaagctggccgggtatggcgcccggtcccggagcgtcttgtaggcctcgatgacgaggaccacctcgttggcgcccttggacagcccgtactgctggctcagccgccccaggttgtccagcaccccctcgaacaggcagaagatctcgtcctttgccgcgaacgaccttgggacggaaggaagggacctggttggtgtgggagtaggcgaggtgccccaggtcggccagctgcatggacacggccggctccgagctccccaggaagcggctgacgagctccgacgccttcgtcttgggcgacgg

SEQ ID NO: 15842 - DNA, 917 bp, Setaria italica
  Peptide Sequence Number=SeqID_81816
tttttttttgctgcagatacacaacttcatccatgcaacactaatcgattatagcagcacccggtctcaactctcaagttccatgcaagttgagcaactagggatacagcagatacacacacaaccaacaacactgatgaagttcttgccacgttggcagcacttctccttttataggagccattatattacaccaccatgtacagagtctcgcaatgccccgcatccctcgacacgagcatctccacctaaaattacagtgctgtgaggactgtagagccttccacctgcagagagggttcatgtgggttaatagatcatcatccggagaaaattgttgccagattttcaggtaaaaatctgaaaggaaaacaatccaatcaaagtaacaacatcaggtagttcccctgctcttcagttgtgcttttctgctcactggaattttaacctctgaatctgcaatgccttttctcctaaaaggaatccttaaatgccccttactccacagtacaatattctgcagagtctgaccccaacgttccttgttgtgagtgcccgattgatgctatagtatcccatgatcgaaacagccctgatgaacaagtactgtagactgaattcttcttcaagacataacaaaccattttttttaccttgaaagttgcaccacagatttcttcttcgtttgcaggaacagcagtcaccttgttcttggggttctcatagcacttcaagcctccaagagcattagagtagaagcaaccttgtgggaaaggtgcaagtgacttgccacatgatcctttgagcatgtcaatgtcgtcagagaaggcgacgcagccatctgcagtgactcccccagaagagcggcaccttgccctcgggatcggatgcgacgagcacggagttggtggacttgt

SEQ ID NO: 15843 - DNA, 3190 bp, Setaria italica
  Peptide Sequence Number=SeqID_81817
tcgtacttctagttgacgttattgttttttttttttttttggagaagtaaaagcttcattatttgctgcagatacacacaacttcattcatgcaacactgatcgattagcagcacctggtctcaactctcaagttccatgcaagttgaacaactagggatacagcacatacacacacaaccaacaacactgatgaacatggagttcttgccgcgttggcagtacttctcttctttacgggagccattatgttacaccaccatgtacagagttttgcaatgccccgcatccacacgaacatctccacctaaaattacagtgctgtgaggactgtagagccttccacctgcagagaggttcatgtgggttaatatagcatcatccggagaaaattgttaccagagtttcagataaaaaaactgaaaggaaaaacaacccaatcaaagtagcaacatcatgcagttcccctgttcttcagttatgtttttctgctcgctggcattttaaacttagtcttaaacgccttcacctcaataaaataaaataaaacgccgcttactccataatacaatattctacagaatctgaccgaaacataatgttccttgttgtgagtgccccgatttgatactactataccagtactgtactccatactgcacaactgactgatgcagctctgacgaactacatgaaactgaattcttcttcaagacataacaaaccattttttttaccttgaaagttgcaccacagatttcttcttcgtttgcaggaacagcagtcaccttgttcttggggttctcatagcacttcaagcctccaagagcgttagagtagaagcaaccttgtgggaaaggtgcaagtgacttgccacatgatcctttgagcatgtcaatgtcgtcagagaaggcgacgcagccatctgcagtgatcccccagaagagcggcaccttgccctcgggatcggatgcgacgagcacggagttggtggacttgtcgaagagaacgaaggcatagctgccggtgagctgggagagcatgaagctggccgggtatggcgcccggtcccggagcgtcttgtaggcctcgatgacgaggaccacctcggttggcgcccttggacagcccgtactgctggctcagccgccccaggttgtccagcaccccctcgaacaggcagaagatctcgtcctttgccgcgaacgacctgaccaatacaagtttacttcgtcacttgttagcaaccactggaaggtgaatgcatctaactatctaagcatcttcattgtactacgctgctgctatggccaaaacaatgaaaattaggaccaaagagagtcagaaaagtttaactatattcttgaatgactgaaggacatgatccttcagacctccagagttcagattaattaggtgcacctaacatcgagaattggaacacttaagcttgttcttaacaaaaggaaaaacatggataatgcttaaaagaaaaatagctaagatgtgaagtgatgattgaaagaaaaggccaaacagaatggagtaaaggagtggaattccttggatgctacttcttcagggaatgcgcctagtactgaaaggataagagcacagggcaatcaggccccacaaatcatagccctgacagaccatctgggggtgcatcttcagatctgtgggcagcaaagccggattaccattagactaccaagcgcctctgcctctattatgaactgaaccatgtgaacatttagctctgcacaactaaaataaagggaacaaatcatacttgctccatatcgtcacggttcttgagtcctattttttttaaaaagattatttatccagtagatcgcacaggcttgtcgctttcattaaacgatagttgggtcattgatctttcagtagccgcctatcggagaatatgaggctccatcgtttgttggcaggtcagctgatgacacctttgtctgtggaaggtgccatgacgttgacgtccaaattgtgcacaccctacgtgtgggaagtgaaggcctccttcattagtttctccctttttttttggaaaacaaggtctccttttttataaataaatataaatggtatttacacgtccacgtcaaaacatatacatccagacgcaacttcttatcgtttcttctttcctatgtgatcatcaccgaccgtttgacgttggtacccttagaaatggacgcatgcttatttataggtcctctgtttatttgctacttcctccgttccaatttataggtcgttttagtttttctaggtgcatagttttatatatgtttatgtctacatacaaagtaaataaatattatgaatttagaaaagctaaaatgatctataatttgaaacggaggaagtagtctacatggtttttttaattcctgacagaaaaaatgcctccgcgtacgttccggcctacttgtttttaaatttttttgaaagaaacataaattaaggggaataaacgaactaggaggaacaaacaagaaataggcatgtaaaatttacattactaatgacaactcattggacgtacatctacactgcagaccaacttagttattgtcagtttctgaacaaactatacataaaaaactcggataacagcctgaaaatcccactggcttaatgggcagccgcaaatctctgtgccctgtcatttcctggctaatcttttgtggctgacgattatggattcagaagacgataaaccaagtagggttggtaggtcctacagctacacaaatggatcaggaaacagtattaattattgcccactttctttcagaaaagcagcatgtctccgatatgaagaaaaaaaaaactttcgaattattgacacacaagatgggccctagataatacagattcgaattatttagctgcctaattagtttgccaggctcgctcttcgtgtgacatcatgtcagcagcactagtgctgttcagacttgagtaactgaaaaacagaacagagcaactgactctgtttgttctaggaagaactacaggctgatctacgcaaatcaccttgaatgaataagtgaatccatcctaggatcttgcgaaacacaggagaaaaaggatactacttttcagtctgtcagctgatggagcttcctagaaggggaaaaaaacagagaagagaatccccatcc

SEQ ID NO: 15844 - DNA, 1164 bp, Setaria italica
  Peptide Sequence Number=SeqID_81818
tttttttttcctttgcagaagatggattaatgcgtagctaacgataacaatgaaaacggagaagtaaaagcttcaatatttgctgcagatacacaacttcatccatgcaacactaatcgattatagcagcacccggtctcaactctcaagttccatgcaagttgagcaactagggatacagcagatacacacacaaccaacaacactgatgaagttcttgccacgttggcagcacttctccttttataggagccattatattacaccaccatgtacagagtctcgcaatgccccgccatccctcgacacgagcatctccacctaaaattacagtgctgtgaggactgtagagccttccaccttgaaagttgcaccacagatttcttcttcgtttgcaggaacagcagtcaccttgttcttggggttctcatagcacttcaagcctccaagagcattagagtagaagcaaccttgtgggaaaggtgcaagtgacttgccacatgatcctttgagcatgtcaatgtcgtcagagaaggcgacgcagccatctgcagtgatcccccagaagagcggcaccttgccctcgggatcggatgcgacgagcacggagttggtggacttgtcgaagagcacgaaggcgtagctgccggtgagctgggagagcatgaagctggccgggtatggcgcccggtcccggagcgtcttgtaggcctcgatgacgaggaccacctcgttggcgcccttggacagcccgtactgctggctcagccgccccaggttgtccagcaccccctcgaacaggcagaagatctcgtcctttgccgcgaacgaccttgggcggaggagggcctggttggtgtgggagtaggcgaggtgccccaggtcggccagctgcatggacacggccggctccgagctccccaggaagcggctgacgagctccgacgccttcgtcttgggcgacggcgtccggctgccggccgccaccagctccgccggcacctccaccacctcgccgctgaacaccgccaacatcttcacacacctaatcaacctaccaaaaagaacctagggatcctactaaaactaaccccttcctgataataatcaatcaaggtagcataagcttcctcctcccacactccttggatggagcggtggagg

SEQ ID NO: 15845 - DNA, 1802 bp, Setaria italica
  Peptide Sequence Number=SeqID_81819
ccagtggcgaggcgactggcgaggcgtcgtcggagcggacacccttgaattcccccgcctccgactcgcctcgctcgcccctttcgtcctccgggtccggggtggtcggcctctccgtcgcaagaggctgtcgccggcacacgatggcggcggctccggctcccccagcggtcgcggcgtccagagcggcgcgggtggggctgctgtacgacgagcggatgtgcgcgcacgcgacgcccgacggggaggagcacccggagaaccccgagcggctgcgcgccatctggcggaagctcagcgccgagggcgtcgcgtccaggtgtgtggtccttaaggcgaaggaagctgaggacaagtatatagcttctgttcacagccagaaccatataaagctgatgaaggaaattagctcgaagaaatatgattccagcagaaacaagattgccaggaaatacaattccatttacttcaacaagggttcctcagagtctgctgttcttgcagctggttctgtcatagaggttgctgagaaagttgctgctggtgagttaagttctgctattgccctagtcagacctccaggccaccatgcagaacatgatgaggcaatgggattttgcctcttcaacaatgtggcagttgcagctaattatctcttaaatgagaggcctgatttgggtatcaagaagatactgattgtcgattgggatgttcaccatggaaatggaacacagaaaatgttttacaatgatcctcgtgtattgttcttttcagttcacagatttgattatggaagcttctatcctgctgaaggggatgcttctcactgtttcatcggagaagaagctggtaaagggtataacattaatgttccctgggagcatgggaagtgtggtgatgctgattatattgctgcatgggaccatgtattgcttcctgtcactgaagcttttgatcctgatataatattggtatcggctgggttcgatgcagcactgggtgatcctctcggtggttgctgcatcacaccaaatggatatgccctgctactaacaaagctattaggatttgctaaaggaaggatagtgatggcccttgaaggaggttataaccttaggtccatagcaaattcagtttctgcttgtgcaaaagttctcttgggagacaaattcacgttcagctctccagagatgcagccatttgaatctacatggagagttatacaagcggtacgcaatgaattgaaaacatgctggcctgttttgagtagcaagctgccagagaatttatcattgaggattaagccttcaccaagtgagctctacgcttcctctgattctgagcctgacagtgaagatgttgatgagctctctggtgctgtttcatcagtcaatgttattcaatttgctgatgatgctataagtgaacacctctcaaaaatgaaacttgatgaagacaaccttgcagtgaagactgcctcaagttgctcaacagcagaacatcatccaactgattcagtacaagtagataaaggtgtatctgtggtactgtccaaaagaatatctgatttatctcttgcttggcgatcagatttatcaagaatttatgtctggtatgccagctttggttcaaacatgtggaagccaaggtttctatgctatattcaaggggggaaggttgagggtatgagtataccatgttgcggatcacgtgacacgagctcaccaaaaggaatcatgtggaagattgtgcctcataggttgcttttcggtagatcctctaccccttgttggggtactggg

SEQ ID NO: 15846 - DNA, 991 bp, Setaria italica
  Peptide Sequence Number=SeqID_81820
aatttaatactacttagacttaggacgaatacaagaatttaatcaagaatttatgtctggtatgccagctttggttcaaacatgtggaagccaaggtttctatgctatattcaaagggggaaggttgagggtatgagtataccatgttgcggatcacgtgacacgagctcaccaaaaggaatcatgtggaagattgtgcctcataggttgcttttcggtagatcctctaccccttgttggggtactggtggtgttgctttcctcaaccctgagataaactacaatgagaagtcttatgtctgcatgtacaaaataacgctggagcagttcaatgatatcttgtttcaagagaatcgtctagtgctggaggatgggacagatggaaatgttgtgtatcctgactctcctttgattggttcatctgaagtggagtttatgtctacaaataaagctattcatcttgaacctatcaaggatagctggtactccaatgtactttatcttggggacgaggatgaacttccaattcttactatgacgtgcccctcatcagatattgagcggtacaaatctggtgagctacctctagcacctccgtcaaagacctacgccgccactctgataaagggactagtggaaggggagcaactggatgctgacggagctgccagctacatcaatgctgctgctgcaagagggttgtgatttgtgaaggctgcttcaacgtgtgcttgtacagccggtagggagtagtaaggataatatattttgctagcgtgtgatgacatcgatttaggaccaggagtgatgtccaggcttcattctccgcgaatggagattctgaatcccctttttttttttaatacgcaggagagctgcgtatctctgtattaagaagaaattgttcgttacgacacgggctaaaccgggcacgtgcacacggacacattacacctaaggtgtttacaacctgaagagaaaaaaacacgaa

SEQ ID NO: 15847 - DNA, 488 bp, Setaria italica
  Peptide Sequence Number=SeqID_81821
ctagcccaccaccatattccgacagagaggacagagagaggaatggcgagctctcagtgctgcgaaaacccgccggcgctggacccggccggcggggcggggaaggtcgtggacagcttcggcgggctcaaggcgtacgtcgccggcgccgaggactccaaggccgccgtcgtcctcatcgccgacgtcttcggtacttgattgcttcctttccatgccccccgtcgaatccggctcgctccccggatctttcgcttgggatcgtgacgagtaacaagtgttggtcctcctcctcttgcagggttcgaagcgccgaatctgaggaagatagccgacaaggttgctttatcaggatactttgttgtggtgccagatttctttcatggggatgcttacatacctgagaatgagaagcccatacatgagtggctaaagtcgcatgctccggaaaaaagggtttgaagatgcaaaaaccagttattgctgct

SEQ ID NO: 15848 - DNA, 1174 bp, Setaria italica
  Peptide Sequence Number=SeqID_81822
ccgccggccggccggccggccgggccccctccgctcgttccccacgcaatttggaatctcgaatcgccgctcagcgctcgccatccctcgatggaaaaacccacgcgatcacggcactctctctacgtgtcccccatttataccatcccccgtccgttgttcccgtctcgtcccttctgctgcgcccatctttgcctcagcccaccaccatattccgacagagaggacagagagaggaatggcgagctctcagtgctgcgagaacccgccggcgctggacccggccggcggggcggggaaggtcgtggacagcttcggcgggctcaaggcgtacgtcgccggcgccgaggactccaaggccgccgtcgtcctcatcgccgacgtcttcgggttcgaagcgccgaatctgaggaagatagccgacaaggttgctttatcaggatactttgttgtggtgccagatttctttcatggggatgcttacatacctgagaatgagaagcccatacatgagtggctaaagtcgcatgctccggaaaaagggtttgaagatgcaaaaccagttattgctgctctaaaggagcagggagtgtctgctattggagctgcaggttattgctggggtgcgaaggttgttgtggagttgtcaaaagctcaggagatccaggctgctgtactgttgcacccttcgtttgttagcgttgatgatatgaaagaggtcaagtgccctatttctatactgggagctgaggttgacaaaatgtccccaccagaattagtcaagcaattcgagcaggtcctttctgcgaaatcaggggttggtcactttgtcaaggttttccctggtgtgtctcatggatggagcgtgcggtacagccacgatgatgcagctgccgtgaaaagtgctgaggaagccctggcggacatgatcgattggtttaacaagaacctgaaatgaactctgcagttccatcccgccttgtaataaagcacatcccagtgcgctcattgttcgagcattgtgggcttatctgttgttttagggcttgcgccgtcggataattggaagtctcagtctttatgcccgtacacattcgctgtagactggttgtgctgaatccgtaataaaacgaggtaaatcaagacggcgatatgcgtccataaaaaaaaaaaa

SEQ ID NO: 15849 - DNA, 241 bp, Setaria italica
  Peptide Sequence Number=SeqID_81823
gggccgccgggaacctctcgccttcgctggcgccgccggctctcagcaccagcagcaccggaacgcggcggcggccacccgcgcggcacgccgccgctgccgcggtacgaggagcccaaacgccggcaccagcttcgcttttcccgtacaggcgcgttgcgaaaagctcccccgcatgcctttggtctgaaaagcctccgtatgcggcatcccctgctcggcacatctctcggcgaagcat

SEQ ID NO: 15850 - DNA, 906 bp, Setaria italica
  Peptide Sequence Number=SeqID_81824
ctccccatgagctgcttcccgctgccgtacttcttcgccttggccagcccgccgccgacgaagctgacgccgttgcgctccagcgccgccatcacctcctccgccaccgccgcgccctccgccacccgcgcctgctgcagctccacgctcccatctgacatggactgcggcgaggcgaggccggagaggaggtggcggccgctggagccgttcacggacggcgagtgcgagggcggcggcatggaggcggcccggcccagcgccctcctcccggcgggcccgccgcgccgggacgccgccacgtggtcagcgaggatgcgcttgacgtcggcgaggatgcggagctgctcgatgagcgcgtcgccgcgcgccagcagctctccctcctgcgacgcgtagaacttgttcaccttctccagctcctcgtccgcctgctccaaaaactcctgctcatgcttgtccgtggctcgcacgagctcccctgaatccgactccaagctctcctcctcgccctctggtgaagccgccgtgctcctggcgaagcgggcggtgagggcgcggacggggtcaaggaccgagaagccatagccggcggtggtcgtgccaccggcgaggagcggcggcggcgggccggcgtcgcggcgggcgaccttgatcctcttgatgagcttcttgaggcacttgtagtcgacgaaggcggccttccactcggggatgatgctggcctcgtactcccgcgagaacttcaccatcctccgcaaccgcctgccggcaccgccgtatatgtagtatactacctgaccggaggtatgtcaatttacatgcggatcggatcggatcggatcggagctaggggacagggacagggcaggggtggtggcggaagcaaccctgcttatatagatg

SEQ ID NO: 15851 - DNA, 589 bp, Setaria italica
  Peptide Sequence Number=SeqID_81825
atcaagctctcgccatatcatacaataccttctgccgaacaactaaaaaagaatgaaatattgcaagtggcacaacgccacatcccatgatactaatgaatgcaaaatcttcagacagcagatacagtcggtcattgagcaaggcagactcaaatttgaagtaccgacaaaatcggccaagccgatgaagatcgaccagcacccctttcccaccaacatggttgatacggggaagaactcactccaaacaaaggtgctgacgtccgaatcggctaaaaagagtggtgccgtagaccctagaaatcaagcaatgcctgaggacgtcaaagggaagcggcggatggaggacgaagacggtgaatcagaagagccacgcattacttcccagttcctgctccagaagtatcagcgtcaacatgaacgctcaaggtcccgggaagaagcgatgcgacggcacgaagatcactggaggtgcccattcttcatccactgttgggaaagcaacctcaggctactttcggcagataattgcccagaatgcaatggcccgtatcgtggtaatcggccatttaacaggtcccgctccaga

SEQ ID NO: 15852 - DNA, 670 bp, Setaria italica
  misc_feature (639)..(670): n is a, c, g, or t
  Peptide Sequence Number=SeqID_81826
acttctgggtgctggggtacggcgacggcgtgtacgagcacgagagggactcggggaagctgaacacggcgaacccgccgctgcggaacacggtggtgctgttcccgcacgggtggacggtgctccggttcgtggcggacaaccccggggtgtgggcgttccactgccacatcgagccgcacctccacttggggatgggcgtcatcttcgccgaagggatggagaagctccgggagctcaacgtgcccagggaggccgtcacgtgcggcgcggccaagagcgtggcggcgctgccgctcgctccggccgtcgcgccgtcgccgccgtaaacgtgacgtggagagatttggttgttgctggtctctccgatcgatcctcgcatgcccgttccggtacactagtacaatgcagtagtgcacagaaatggcagtacagtgtgcgcgtatgtattgtattagtgttgttgttgtagttgttgagaacctatgcttttggttgccgtggtaagaagtgtgctgttggagtgaacagtaaaggcactcggtatgtaacgatataatgttgttaagattgtttgacaatattgtcacatgggaatcaggacagcttgatgcagaacaaaaaaaaaaaaaaaaaaannnnnnnnnnnnnnnnnnnnnnnnnnnnnnnn

SEQ ID NO: 15853 - DNA, 991 bp, Setaria italica
  misc_feature (960)..(991): n is a, c, g, or t
  Peptide Sequence Number=SeqID_81827
ggcgtgaccccggagaccccggcctgggacaacgtgacgcgcagcaaggagttcacgtaccggatcaaggcccgggccggcaccgcccggccgccggcggccgtggaccgtcgcatcaccatgctcaacacgcagaacaggttcaaggggcacatcaagtgggccatcaaccacgtgaccctctcgctcccggcgaccccctacctgggcgcctacttctacggcatcgaggacgtggcgttcgacgccaccgccgagtcgccggacacctacgaccggagctacgacatcgagaagccgccggacgcgcaggcgccagaggccatggccccgacgacggccagcgatcgggtgttccggatcgcgagcggcgccgtcgtcgacgtcgtgctccagaacgcgaacgcgctggaggccggcgtcagcgaggtgcacccatggcacctccacgggcacgacttctgggtgctggggtacggcgacggcgtgtacgagcacgagagggactcggggaagctgaacacggcgaacccgccgctgcggaacacggtggtgctgttcccgcacgggtggacggtgctccggttcgtggcggacaaccccggggtgtgggcgttccactgccacatcgagccgcacctccacttggggatgggcgtcatcttcgccgaagccatggagccgcgtcggcaaggtgcctaaaggaggccgtgtcgtgcggcgccacggccagcgcgctcatgaacggcgaccacctgtgatcgccgtgcgggagcacggtgcgcggcgtgctcgcaggatgcgtcgcgctcgctcatggacgcgtgtatcggtgtatgttgttcgatctcatgccgttatttagaattctttgatgttttttctgttagggttattgagatgggatcatgtaatgtagtctactagttagtgcaagtgagatttatctctgattgaacnnnnnnnnnnnnnnnnnnnnnnnnnnnnnnnn

SEQ ID NO: 15854 - DNA, 2208 bp, Setaria italica
  Peptide Sequence Number=SeqID_81828
ttcttagttctttagttctcagctagctctcaaaccttcttagagccaagatggccaatccctgtggccctctagcagtgcatctgctcatctgtatcgctttgatgctgtttgcccaccaagttgctccagctccggtgactcgacgcttcaagtgggacgttgagtacatcatgtgggcgccggactgccagcagagcgtgatgatcgggatcaacggtaagttccccgggccgacgatcaccgcaaacgccggcgacgtgatcagcgtcgaggtgacgaacaacctgcacactgaggggatcgtcatccactggcatggaattaaacagatcgggacaccatgggctgatgggaccgcgtcgatttcccagtgccccatcgagtcaggggggaacttcacctacgagttcctagttgacaagccgggaactttcttctaccacggccacttcgggatgcagagggcggcggggctctacggctcgctcatcgtgaacgccacggacaagcagccggagcccttcgccgccgattacgacggcgagcacagcatgcttctcagcgactggtaccacgagaacgtctacgcgcaggcggccgggctcgacggcaaggacaagcactggcagtgggtcggcgagccccagacgttgctcatcaacgggaggggccagttcgggtgctctctggggatcacccgtgaccgcagggcctgcgacaggaggaagaaggacgcgttctgcccggagggcgacaagagcgagcggtgcgagatgatccggagaagcgagtgcgggcccttctgcgagggcaccaagtgctcgccggtggccttcgacgtcgagccggggaagacgtacaggctcaggatcgccagcaccacctccctctccgctctcaacgtgcaggtccaaggtcacaagctcacggtggtggaagcggacggcaacttcgtggagccgttcgaggtcaccgacatcgacatctactccggcgagagctactccgtgctcctcaagacggaccagcgaccatcatcctactggatctccgtgggcgtgagagggcgaagacccaagacgcagccggccctggccatcctaaactacaccaacagcaaacccgacagctggccgtcgggcgtgaccccggagaccccggcctgggacaacgtgacgcgcagcaaggagttcacgtaccggatcaaggcccgggccggcaccgcccggccgccggcggccgtggaccgtcgcatcaccatgctcaacacgcagaacaggttcaaggggcacatcaagtgggccatcaaccacgtgaccctctcgctcccggcgacgccgtacctgggcgccctgaagctggggctcaagaacacgctcacggcggcgccgccgccggagacgttcagccgcgggtacgacgtaaccctgccgccggcgaacccgaacacgacggtggggggcaacgtgtacgtgctggcgcacaacgccaccgtggacgtggtgctccagaacgccaacgcgctggcgcgcaacgtcagcgaggtgcacccgtggcacctccacgggcacgacttctgggtgctcggctacggcgaggggccctaccgcggggacgcctccgacgaggcgcggctcaacctgcgcgacccgccgctgcggaacacggcggtgatcttcccgtacggttggacggcgatccggttcgtggcggacaacccgggcgtgtgggcgttccactgccacatcgagccccacctgcacatgggcatgggcgtcgtcttcgccgaggccgtggaccgcgtcggcaaggtgcctaaggaggccgtgtcgtgcggcgccacggccagcgcgctcatgaacggcgaccacctgtgatcgccgtgcgggagcacggtgcgcggcgtgctcgcaggatgcgtcgcgctcgctcatggacgcgtgtatcggtgtatgttgttcgatctcatgccgttatttagaattctttgatgtttttcttgttagggttattgagatgggatcatgtaatgtagtctactagttagtgcaagtgagatttatctctgattgcattggatgattggcatattgtagaatggtttggttggacaagaaggctcagttcaagcctcaaagtgcggggattgaccattgacggacgacgcatcccggtgatattactagtagtctagtgctaggcgca

SEQ ID NO: 15855 - DNA, 695 bp, Setaria italica
  Peptide Sequence Number=SeqID_81829
tagaattgtgaatgaatggtatcttcctgcctttgccacattggctgtctctggtgcaagtgattggttggatggctttttagcaaggaagatgggcatcaattctgtcttcggatcatatttggaccctctggctgacaaggttttgattggctgtgttgctgtagccatggttcaaaaagagctcttacatccgggtcttgttggtctggttgttatgagagacttgctccttgtgggtggtgctttctacaaacgggcttctagtctgggatggaagtggaacagttggtcagaatatgttaacttggatgcgattcatcgtgaaaaggtcgaacctctgttcatcagcaaggtaaacacagtattccagttaatgttggttgcagctgcacttctgcaaccagagtttggcacggaggagacgcaaaattacattacactactgagttggcttgtagctactacaacaatcacttccacgataggctatggggtgaaatactaccggatcaaaccaaggagtccatgactgttgctgcatgcacttgtttcatggatgaatttgtcgctgatgatgaggacaggcatccagtgactactgacttgtatcaggcatgcatcaagtcttaagctgtgcaaacttcccattttacacatgcaagactgagtcttgtaaccacctccactcccat

SEQ ID NO: 15856 - DNA, 308 bp, Setaria italica
  Peptide Sequence Number=SeqID_81830
acaagacaagtcagccccaagctcccccgcgccgccactcgctcttccttctccgtccctcgccggccgccgcatccctcaccggccgccgcagcgcgccataatcctgccctcctgatccgccaccccaacccgcgtgggagaagaggaggctccaaggaagatggggtggaaggcggcggagaagctcatcagacactggaagatcctccgcggcgacaacgtgatgatcatcagaggcaaggacaagggggaaaccgggctcatcaagcgggtcattcgatcgcagaatcgtgttatcgtcgagg

SEQ ID NO: 15857 - DNA, 1166 bp, Setaria italica
  Peptide Sequence Number=SeqID_81831
ctctctactgggcgaggttgttgagcacctggagcagcacctccctgaacctgccgacgtcgacggtgatgtcctggccgtccatgagcgtctgcctgatgaacccgaaccccttcttgtgcagcgccgtcgggttggtgaagatctcgtgccccgccgggaacttgtccttgagcgtggtctcgccgacggccacctcgtactgcacgtacctgagccccatcgcctccgccgggtcgccgtagtccgcccgcgccatccactgcagccctccccacggcacgatctgcaccagcgtcgcgcccggcggcaggaacatcatgttggtcagcccggcgccgtgcacccccagcagcgcgtcgcacgagttgatcagcgccccgacctccgagatgtcgttgcccacgtcggactcgttcaccacggcctcgaacccgacctcctccgccgccctgatcacggcgtcgatgttcaggagcagccgcgtgcggtggcgggagatgataagcagccggggcttccggcccgtgccgtcgccgagccgggtcggcgcgtcgcggggcagcgagagcgcgcgccggatgaaccgcgtgaagtccggcgtcgcgagcccgtcgatgctgcgctcccgctcgatgatgagctccttgtgcgcgcgcaggctcacggtggcgtgcccgaagcagtggacctcgccggcggccccggccttggcgaggtccagcggcgcgtggcgcgacagctcgcggaggagcttgtcgtacttgaccagccaccatgacgccacgttcgccatcaccagctgcacgtcgccgccgtaacggtgcgccgtgttgaacagcgggacgagcacgtcggagaagtcgtggaagatgttgcccgtgtacccgccgatggagaacaccaccgctggcgcggagtgcgcccgcgtgcaccgcgccgcgtcgtcgcccgtcgaacgcaccgtgatctccgtgatccggcccatgcacgtctcgtcgcccttccgcgggtacggccggaccttatgcaactggcctccgtcactggccccgatcgccgggtcgacgacgacgaacgccgacgcgttggcgtccaggcggatgtcgccggcgaggtcgcagatgtcgctgcggaagtcggagaagtcgcacagcggcggccgc

SEQ ID NO: 15858 - DNA, 279 bp, Setaria italica
  Peptide Sequence Number=SeqID_81832
gtcaagaaaggaaccactcattatatgagtgtcaaataggaaattctctctttattattttatttgagaaccttcaactagtaacacccaacctatgattagatctttagtcaaattgacttttaagctttctaactttttatatttggatgatgaaatatcaaaatttctaatttttcatttgcataagtatgaattttattgcaatctttcaaacgtgtagtccgtgtgtacacgctgtgggcacgtcctactcgctactcgagaggtgaccgaacg

SEQ ID NO: 15859 - DNA, 350 bp, Setaria italica
  Peptide Sequence Number=SeqID_81833
tgccgtcaccgtgtttctgcttggggacatctgaaaacgatagcaccctgagagatcatcttgagttggctctcctggaggcgctctttcggagagtatataattttgggaaatggtgtgtgcgctttcttgtcgaagcatgtttcgagtgttttactgggattataatcttcgatgaaaaatgatataagccctgggcaagtaatcctgagttttcgatgttgtacaccgctagtcttatggcgccatgctgctagttttgactaacgactcgtttataatggactggccatctgtcctggcttcataaacataaacgaagagatagtaagtatatttcttgtgtgtgc

SEQ ID NO: 15860 - DNA, 2583 bp, Setaria italica
  Peptide Sequence Number=SeqID_81834
tggtgttccctgaggtgggttcgatctgtttcgtgctcatttactggctccgtcgattcggtttcctcgatccgttttgcgtgattttttggtcccctgctaccatcatccccacaccactccctcttttctctctcctatgcttctcctctaattcatctaggaaaagacaaaaaaaaaggatcttggtgtatcggtttctggtgtctgctgttgctgggggattcttggcttgttcttgattcacgccgagacagatttggtgtccattcggggttcccccgagcagtgctgaatcctcctggtgttccctgagggttggatcgggggtaggagatggaagtggagaagaagaagaattcgcagattggatccaagggcaaggaggttcagagcaagaatccgaggagggaagagcaagaacccggggttcagagcaagaatccgaggcgggaggagccgctggcatcgtcagaggtggtcgtggatgagccagccgttgctgagggcggcgacacggttgatgatgccaataatggcagctccaaggagagccccttgccacccaaggattccaagaactccaagggttgtgtgggcaagaagtccagatcggtgagctccgactttggggaggagatggacctggagcttgggaatggggacaaagagaatgggaggcagcaggagaggaagctctcgaggcaagatcgggttgagctttgccggttgttccagcacgcggtgagctcgcatgactgggagagtgctgaggggctggtagggaaggctgacgcgcaggggctcaacgatgtgctttgcgtgacagtggatgcgatttggttcttgagtgacagggatgagctgcatgctgttgtggggttgatcaggaggattgtgtccgagggcgcgaaggatttcacacgtgctgcgctacggacatcattcctcgcgtcatgtgtatcagcatgcaggggacggtcgactagccttgctgatgctgttagcttcatggggcaaaaattgcatgaacgacttcaagaatcccaaggcgatgaggtattgaaggcagaagcaagtgcaaaggtgcacaagtttacagaatgggctctaaagtgcattgggctacattcacgtgtgcgagagaataagggcaaaggaaaccatgacactgtcatcgaggttcaacttcagttgtctgctttcaagacatttctggatcttgctgataatgaacttactgggaaggatttcacagaggcatttgatgctgcatgcttccctcttacactcttctcaaccacctttgaccaaggatgggcatcaggaatatcggcagctgcaatacaagggcttttagagttgttggtagagggtggtgcagacaatgtgaaccaatgctttcttgaagctgcacgctatggaagcactgaacttgtgcggatcttacttcagattgctcaaaggaacagcttggacattgatgtggatctagcccttggctttgccgcgcactatgggaagattgaaaccatgggatgcttggttgaagaaggtaatgctgttggctttcttggccctttaatgcgggctgctgaacgtggatgcctccaagttgtggaatggtttgtcaaccacggttgtcgagaaatggagctttgcttagccctcactgctgccacctccagtagccagattgcagtggctgcttatcttctgcctctcgttccacaacatgttcttgcccccctcagcattgaaatcatcaaggctgctggtgagaggaccacaggttccctgcatggtgtggattttcttctccgctcggacttcctcaatgacccagctgccacatatgctgtagcagacagtatcgcaaaatctgctgatgaggctgtggatgcaaagcttaggtctttcatgaacgagcactggagcgaggcagctttttctgcaggatttgaatccgcgcaacagcaatttgttaacttcatgaggataatggaaaggggtgaatcaccaatctgcctaagagacctcccgattgagctggtgattgccatggcctacctgccactctataaggaatgcatcaattccagtgggcgacttctgccgcaaaggcttagaggtcagcttgtggaggctgcaagcaggctcgagggccggcaaatggatagtggtagccaaagcagagagctcttggccatcttggagcatcacatcccacaattcatgactcaaacttgaaggcaggcaggcttcctttcgaacctcatctgttgatgccaacaaaaagcaagtaacaaggtcagtgcaccgtctcaagtgccgtcaccgtgtttctgcttggggacatctgaaaacgatagcaccctgagagatcatcttgagttggctctcctggaggcgctctttcggagagtatataattttgggaaatggtgtgtgcgctttcttgtcgaagcatgtttcgagtgttttactgggattataatcttcgattaaaaattatttaagaagtgccttagggtactaaaaaatgaaatcttaagtttaatttcctttgttagttttttcgtt

SEQ ID NO: 15861 - DNA, 1179 bp, Setaria italica
  Peptide Sequence Number=SeqID_81835
tcgtggcagtgatttgtttagtacttgtaccccttgacgtacaagctctcggaggcggcggcgtcgccggcgccggagccggcgtacttgccgagcgcggcctcggagttggccttgcaccggacgaggaaggtggcctgcgcggcggcgacgttctccttcttgccgagccacttcttgagggtgctctgctgcagcgcgcggccgaaggagaaggagagcgtccatggcttgagcacctccagcttgttcatggcgtccaggttctgcgtcgcctcctcctcgctctgcccgcccgacaggaacaccacccccggcaccgccggcggcaccgtgcgccgcagcgccgccaccgtgtactccgcgatcacctccgctccaaccttggggctgtcggagccaggggtgaccatgttgcacttgaggagcgtgccctcgaggaggaccttgtggtcgttgagcgacttgaatacggcggcgaggacgcgctcggtgacggcggcgcaggtcttgatgtcgtgcccgccgtcggtgaggatctcgggctcgacgatggggacgaggccgttctcctggcagatcagcgcgtaccgggcgaggccctcggcgttctgcttgaccgcgagctcggacggctcgccggaggcgccgatcttgagcacggcgcgccacttggcgaagcgcgcgccggcctcgtagtacttggcgcagcgggccccgagggagtcgaggccctgggtggtggtctcgccgttggtgccggcgatctcgacggtgcccttgtccaccttgatccccgggaccacgccgccggcggtgagcaggtccacgaacggcttcccgtcggaggtcttctggtacagggtctcctcgaagaggatgaccccggagaggtagtcgaacacgccgggcgccgtaaaaagcaactcccggagcgcctgccggttggactccacgttctcgaggttgatgctggagaggcgcttaccgatggtgcccgtcgactcgtcggaggccaggatgcccttgcccggcgtcgcgaggtacttggcggtcttgaccatctcatctgcatattttcccacaaaggcagacatggcgaccccgtcggatggaagaggcttcgtgtgaggagaatcaagggtagtctaggttagttctttaaaagttttcctttta

SEQ ID NO: 15862 - DNA, 762 bp, Setaria italica
  Peptide Sequence Number=SeqID_81836
tttcataatgatttataataaaataaattctctcttctagaaccgtaatgtggcagttctgatattccaaccagcatacagctgtccagcctcttctatattgatttctcatccttttttgaaatgttgcccagttgcacatggtgataattcttgtgtcacgtgtaggttagggtaaagcattttcctctattccagataacaggttgaggattgatggcctgggataaatcattagcttactgaacaactagaaccattgaagttatccttcttcatgagtctttctggcatattaaaggacttgcagttcctagattcctgttgcattcattgtcacagaaaatgagaatcaattgtgatatcttttaccccttagttaatgtttatggatagttactagttcgtatgttggttcttatgacctacttccacagcattggagatcttcgcaaccgcgcagcgaaaagcaaacagttatctcctgtttataaggttacaaaaactgtatacgcgtcccctagccgtgtaaattttcatctcgaccgaaggaaggctgtagaaacggtacctgcatatcccaacatttatttttctgtggacgacttcgatgatacttttgatgcagtggttttgtcagatcctgaacactgctattgtgtgattctcaacgcacatgatggggcagcatttcctgaagaaaccgagtccaagaatcctggttcaaatgtacagcctgaactgagctctgggagtgcccaa

SEQ ID NO: 15863 - DNA, 1545 bp, Setaria italica
  Peptide Sequence Number=SeqID_81837
cacgggaggaggcgtgcggtgcggtcggctgctttgcttccgagttccgacgcgcgtggcctccctccctcggaatcggccggatccccccaccccatcaccatggcggcgccgccttctcctccgtccccctccccgtcgggagagatcgccgtccacagattcagcggcgccatggatgcgtcatcatcgccctctaggactgagttgttgagcatggtgaagaaacactcacatttgattgggtggacgattgttgatgccgaggatgatgcgtcagatgttggaatggatgataagttctggcatgaaatgcttgatcttttctttgtgcgtggtgggaaatcaaagagaagtgaagaggatgaccttgtcttctttgttaataatatgaaattgcatggttatgggttcaatgataatatggaagatccacctcccttttttgtacggagatgggcccccacgcttgaaaaggtcatcaatgttaatacactggaggttgattgggaacgttccttctatttgaatttaatagctcacacgtcatacactgttacagttgcaatatttagcattggagatcttcgcaaccgcgcagcgaaaagcaaacagttatctcctgtttataaggttacaaaaactgtatacgcgtcccctagccgtgtaaattttcatctcgaccgaaggaaggctgtagaaacggtacctgcatatcccaacatttatttttctgtggacgacttcgatgatacttttgatgcagtggttttgtcagatcctgaacactgctattgtgtgattctcaacgcacatgatggggcagcatttcctgaagaaaccgagtccaagaatcctggttcaaatgtacagcctgaactgagctctgggagtgcccaagagaaaccaccaaagagaactctcttctcaggttatgtgagctaccaaaacgtccgtgaggcttatgatgctggcagatcaaaatttgggagcttactctcacttgggcatgaccacactaaacttgacagactttatatgaggggcccagaagggcgtggagaagtggaagtagctgtttctggtattgcagatcagagccgtgagaagtcaaagaaagatccaggagatagcttccgggtccttgttcacagggcagcttctgctgcatcaaagctagcaaagcatgcttacgagtctgcatctgctaacaagcgaatggatgatgagcttgtgcctctgaagtgctgcttgatgtctgtgtctcttccttgggactacattgcccatgaccttttgcacaaggacacacctccattggatttctgaggctgcaattccagatcttcactgccattcaggtgtggtgaaatgtaagacacagaatcaaagtggaagcgagatgtacatgtgtacatgtagactaaatatggtgcagagtttgcaacttgctttaatttgtgcacagacaatcgtaggatgtaaatacacagtcgttgtttgttttttcgaggtccagttctttataattacatagcatgcatg

SEQ ID NO: 15864 - DNA, 239 bp, Setaria italica
  Peptide Sequence Number=SeqID_81838
ctgattgcccatgcgttcactataattcttgtatttgccggaacatcatagcctgtgatattaacttgctggatggtctcccttggaagtagcagagttaaaggagggtgcagccggaggatctccttcacaaccatcttcagattcttgagcttggacacatcatcacgcgaagccctctgtttccttcctactacagctctgatctcgtcctgtacattcttcagcaccctcgggtg

SEQ ID NO: 15865 - DNA, 431 bp, Setaria italica
  Peptide Sequence Number=SeqID_81839
tttcgatttagaacgaggagagatggctgagtggactaaagcggcggattgctaatccgttgtacaatttttttgttaccgagggttcgaatccctctctttccgccccctcggatcatttgggactttcaaattgtaaggaattctgacccccggattttctcatcgataaatgtacgaaataaatccaatttgtaagaaaaaattcccacaaattttggatttttactcttcacgcccaggattacgtcctgggtcattagataagaatccaaagataaagagggaaacaaagaatatcactactgtataaacaaaaagtttgagagtaagcattacataatctccaagattttttgttaaggaatagattacccatttttccttactacacagatccactaggatgggttttgtttattttgacacct

SEQ ID NO: 15866 - DNA, 999 bp, Setaria italica
  Peptide Sequence Number=SeqID_81840
gcggggttcttccacttgcagatgccgtccatccacttgcccaccgccaccgcgccggagaagagagacgtgatgcggtagaagttggccttgctccgccgcaggctgaacatgtgcgagtccacgtccagcatgtactccaccacctcgcgccgcagcgggggctccgccctccccagccgcgccgccacctgctgcatcgcctggaaccgcaggtagtccagctgcagcacggagatggggtgggtgtagtgcatcttgggcagcagcggccgcccgtacatgcccagcatgttggcccaggccgtgcaggtgaagcgcaccgccaggtggagctccccggtcttcttcagccccgacggcgccagcgccatcagcgggtagtagtgggtgtacacgcggtcgatctccagcgtcgacagccgcacgcgcaccttgccgatccgctggtccttcttgctgccgtcgccggcgccgtgcacgaaggcgttgtcgaaggccgccaccgtcagcacggtgcaggggtcgaacacctcccaggtgtactgctcgttccactgcggcgacagcgtgttgagcgccgtccgcgtgcgcacccacttagcgccgtacttggccacgcagtaggggtgcttggtgggccccgccaggttgcgcgcgctcaggatgcccagctccaggatgccgatggaccccttccggagcttcttcgccgacggctgcaggtcgctggcgtagtgcgtcgactcgtccagcacgtggtacgccgtctccaggctcagccgcaggtggatcttgctcgagaactgacgctccttgttgtgcgggttgcccgccgccgcctcgtccgccgacagcgcccgcgacagggggagccacttggagtccaccgccttggccaggtcgttgcggtagacgtacggcgccgcctcccgctccaccacccggcccaccggctcgtcccgccccgccgccaccttctcctccaccgtcaccaac

SEQ ID NO: 15867 - DNA, 360 bp, Setaria italica
  Peptide Sequence Number=SeqID_81841
gtttgtccctttagtcctattccgtttcggcttctgctcgctctcgatgaacatcaaatcgtatatggattgaagttggtggaatggtgggggcatgatttggattaggattttgggaagcagcagcgagcccagaagagaccgggcgacgagtcggcgagcggcgccgcccttctccagcccttcgtcgggtccttcgccggcgacgggcgtccaccagatacaggaatgagcagatagtctaagcgcctgatccagacaccaagggaacaatgctgcaccaccatagtgcgcttgtctctgcgcaccctgcaatttgttcacccactaggcttgcttgttcttccatatgttacaaag

SEQ ID NO: 15868 - DNA, 1177 bp, Setaria italica
  Peptide Sequence Number=SeqID_81842
ccggctgctccctcccgctcggagggcaacaaaccgcgcgcctcatgtcttgcttcggtaggaagcggagcggaggtctggacggagggatggaacgtggaatgcggattcccgcagcgaggatggcggcggcagtgtcaagttaccagagtacaacaactgatcaaggaaagataacaaatggtatctcatcgcagcaacagaagtcacaaacaagccgcacgctgtaagtgaatgacacaagtgacgaatgaaagatatggtgatacaattcagttttgcatatcttcctcatgctgatatcttcagttctagcgtctttgttgttcagattttggtcttgctggtcagcctcagccatgacttggtacagcaggccagcggcaaacactgttacagtcgactctccaagaaatagtcatatgaggtgccacatttcaggtctttctttcctgcttgaagtcccagagctgcagcctcggctctgcattgaccgtcaccggaggagcagcagcgccgcctccaagaaagaacggcagtccagcggcatcagccggagcagcggcgaacctctgcagaaagcacgcctgctgagatggcggccacagcggcgcagcgatggcggcattggactgaagtgtgccccggtcgaagccgacggcggggtgcggctgctcctggaggaaggccagctggggcatcgtctcgaagggcatggccggcgcggcgtgcgagctaggaagctgcgcggcatagtaggcgagcgtcggctgctgctgctgctgcattggcttgctgtcgttggagcagtgcaggagctcggcgaacgcgccgccgctgccgccggcgttgccgttgtaggcatggttggcttggtgagcgctggcagaggcgttatcggccggggcgttggcgagcgagagcacggagctcttgctggtctcggaggtgctgacctccgcgtcgtctccggctgccggcggagaggaggcggcgccggctgcggggagggcgaatgagcagtccagcgacggaagctcgtcgatggcggcgccggcggcgcggatgagccactcgatggccttgctgggctggtcgacgccgaggcggtcctggatgtcgtagaactggatggccgtgggtaccgagagccggacgcgccggtcccggagccccc

SEQ ID NO: 15869 - DNA, 286 bp, Setaria italica
  Peptide Sequence Number=SeqID_81843
cactgctccagggaggggatccatccacctttcacgcgagttcttccttctcaggcgcgtgcgtccgtggcggcggcggcgatgggcccgggcgggagccgggcgcggcagaacgcgatgcggtcgggggtggtggtgctgggcgccgtggccttcggctacctctccttccgcgtcggcttcaagccctacctcgaccaggcccaggaggccatgaactcctcccacgaccccgccgccgccgccgcggcgagggacgcatccgacgaccgccccggggacgggg

SEQ ID NO: 15870 - DNA, 671 bp, Setaria italica
  Peptide Sequence Number=SeqID_81844
agctggtgtctggagacaagttgggagcttccgtggtgctccgacggatagaggggtgcatgtgaatggaacagtgtactatctgacaaagttccgctacattgcttcatctcgtatcaattgcttgaatcttgagagtgaaaaatttgatgtgatgacgcttcctccacgcaagtcttatggagggcattgttctttgacagagattgagggaaggctatgcttgttagttgtggatggtgtacttgaagggccacctcggacaatggacatattgatgctcaatagcgatgataagcagagctggactcccagataccacttctctttgccttggttgatgccttcttgttattttactccgaaacacacactcttccatgacaggaagatttgggtgcagttgttggctaggaacctctattgtttcgatccaagttcaggttctgaagaactgacagtagcctggccagagcttgactttccgtttagcacacatactttcattgagagcatagttcctctgcgtaaagctacttcatcaagcagatacagtgacagtggtgttgtgccccttgtttcaaggtggtattcagtttacagcaatacagtaccttaattgtttctttttcttttatgaaccaagctgttattcagcttaaggtgatgtg

SEQ ID NO: 15871 - DNA, 919 bp, Setaria italica
  Peptide Sequence Number=SeqID_81845
gtctttggttggttttcttccgttgctgtgctcgcgtgccgtcctcccactctcactcgctccgcctcctcgcttccttcgccgcctgccgcacccgcgcgccgtctcctcctcttcctcttcccagctttacccaccgccgccgccggggatggaggtctcctcctacaagttcgggccctacaagatcgacgccagggaggtcttccacgccacgcccctctcctacgccatggtcaacctccgccccctcctcccgggtcatgttcttgtgtgccccaagcgtgaagtgaaaagattcgctgatctaagttctgatgagacaagtgacttatgggttactgcaaaggaagtcggcgtacgtcttgagcagtaccataaagcatcttcgcttacctttgctattcaggatggtcctcaagctggccaaacagttccacatgtccacattcatgtcatcccgaggaagaaaggggattttgagaaaaatgatgaaatatatgatgcgattgatgtgaaagagaaagaattgaaggagaagcttgacctggacattgagaggaaagatagaagcatggaagaaatggctcatgaggccaatgagtaccgtgctcttttctcctagaatgacatctagtgtaggagttggtttctaagttgagctgcctgtttgccatgaataagtcttgctacttcttgttctccattgtcgggattcagttatcattgcagtgacatggtgatggtgtccagtggtgcgaactggaatggtggcatgttatgtaagatggagaaatggtcatcttgtctaaggactgcattcttactggcaaaccttttagattagaaactagtttttgtgtactgaggagtgaggaggatcagctgtttgttggaagtatgcctttactacaaaaaa

SEQ ID NO: 15872 - DNA, 567 bp, Setaria italica
  Peptide Sequence Number=SeqID_81846
tctggggctatcaagaaagtatggacagtgaacttcaggaatgcttcaatctggctctgaagaatggcataaacctttttgacactgcggactcttacggaactggaaagttgaatggacagagcgaacggttacttggtagatttatacgtgagtttgaagggccgatcaaatctccagatgatgtggtcattgcaacgaagtttgctgcatatccttggcgacttacatcgggccagtttgtcggagcttgcaaatcttctttggaaagattgcaactagatcggcttggaatagggcagctgcattggtccactgctaactatgcacctttacaggaacgtgctctctgggatggtctagttgaaatgtatgaaaagggcctcgttcgtgctgttggtgtcagcaattacggaccgaagcagcttctgaagatccacagctatctagcttctaaaggtgttcccttgagctcagctcaggttcagttctcactactgagcatgggtgacgagcagatggaactgaaaaccgtgtgtgactcgttgggcattacgtactacaata

SEQ ID NO: 15873 - DNA, 1405 bp, Setaria italica
  Peptide Sequence Number=SeqID_81847
aggaaacaagtaccagtaagggtctaaatcctacgtggaacagtacatttaacatggtactgcatggagagacaggcattgtcaagtttcttctgtatgaattggattctggtggtgtcaaattcaatttcttgacaagctgtgagataaaggtcaagtatgttcatgacggttcaacaatattttgggctataggacataactctggtgttgtcgcaaagcatactcaacattgcggacaagaagttggaatggttgttccatttgaggatatcaatggcgagttaactgtaagccttgtgctaaaagaatggcagttctcagatgggtcagttacattgagtaattctccgagcaatggtcatcaatccccatttgatggatcaccaaatcttcagtccgtaacaggaaggagacttagggtcagagttgttgagggtagggccctcactgcaaacagtaaatctggaaaatgtgatccttatgtgaaacttcagtacggaaaggctctataccgaacaaaaacgctgtcacacactgttcgtccagtttggaatgacaagtttgagtttgatgagatcgctggtggtgaatgcctgaagatcaaatgctataatgcagatatatttggtgatgaaagcattggtagtgcaagggttaacttggagggacttttagatggtgctaaccgcgatgtttgggtcccacttgaaaaaatagattcgggagagatcaggcttgaaatagagccaataaagaatgatcacaacaatagcatgcagagctcaagtagtaacgctggagctggttggattgagctagttataattgaagctagagatcttgttgctgccgatctgagaggcactagtgatccttatgtcagggtgcaatatgggaacaagaagaaacgtaccaaggtcatttacaaaacactctctccgcagtggaaccagacgtttgagttcccagaaaccggagaacccctgactttgcatgtcaaggaccacaacgctgtccttccaactgctagcattggccattgcactgtcgaatacagcatgctatctccaaatcaatccgcggagaaatggataccgctccaaggggtaaaaagtggagaaatccgtgtaaaaatcgcacgaagggtgccgatgtcagactcggaaaagaaaaccacgctagggacagatccatctggtaaaggacacaagatagcaacacagatgagggacagcctgaagaaattcacaggcttgattgacgagggcggtgacccggaggccctgtctttggcggtgacagagatggaaggtattcagggtgagcaggaagagtacatagaagtgctggagcgtgagaaggcaatgctgctgcacaagatacacgagcttggttccgaaat

SEQ ID NO: 15874 - DNA, 1651 bp, Setaria italica
  Peptide Sequence Number=SeqID_81848
cttcggcttctagggcccaacgagtggtatctgggctcgagaggaggctccgccggcagcagcggttcttgtgattggttctgggatttggggttttagtgcccaatcgcgtccccactccccaggggcgtccccggcaagctggatcggcaaggaggtggttactggaatctacagcactcaactggtggacaggtacccattactcacagtgcaaaagggggagagggagagggctagggcgacagcaactcaggatcaagtggaaacaaaggcataaagcggcaaaggtatctgtaccaaggtgaaggtgactcctacaggagaggtgtgatttgtgaaaaggagctggttgctgaagctacagagacaagggaggaaccatggtgaagaagaagctgaagaagctgtatggcaaggatgctcgggagttctttaaccaggtcatggtggagcagcccttgctacccttcctaatcccacttggcctctttgcgtggttcgtcgaacgctgggttgtgccattttccaactgggttcccctcgctgctgccgtttgggctaccattcagtatgggaggtttaaaaggaggataactgtagaagatttgaacaaaagatggaagcatctgatactgaatacaacccctaccacaccgattgagccttgcgagtggttaaacaaacttctaacagaagtttggcccaattacatggaaccaaaactatcgaggaggtttcaatctactgttgagagacgtttgaagaatcgaaaaccaaaattaatagataaaatagagttactggaattctcacttggctcttgtccacctaccttgggagatgaggggatgcgctggattacttcgggtgaccagcaagtcatgtgcttgggttttgattggaatagccatgagatgagtgtaatgtttttggcgaaattagcaaagccactgatcgggacttgtcgcattgtcataaacagcattcacatcaagggagatcttctactatcacccatacttgatggtgaagctatactctattcttttgaatctaccccggaagtcaggattggagtagcatttggaagtggtggaagccaagcaattcctggtatggagttgccaggtgtctcgacatggctggtaaagcttttgactgaaaccatagggaaaacaatggttgaaccacgccgactatgtttttctttgccagccgtagatctaagaaaagaagcagttggaggtgttctttcagttactgttgtttcagctagtaacctctgtaagagcacagctaaccgtcaaagctcaaatggagggaccatgcctggaattgctgataacaaggtatcacagacatttgttgaggtagaagttggcaatttaatgaggaaaacaagtaccagtaagggtctaaatcctacgtggaacagtacatttaacatggtactgcatggagagacaggcattgtcaagtttcttctgtatgaattggattctggtggtgtcaaattcaatttcttgacaagctgtgagataaaggtcaagtatgttcatgacggttcaacaatattttgggctataggacataacttcttggttgttgttcgtctaaagttctatttacttcttaacttatttgttct

SEQ ID NO: 15875 - DNA, 535 bp, Setaria italica
  misc_feature (433)..(433): n is a, c, g, or t
  misc_feature (474)..(474): n is a, c, g, or t
  Peptide Sequence Number=SeqID_81849
ggaaaaaataaatgatgaaagtcaatagacgtcattaccagctttgatcaatcattcaatcttatggaaatactccctccatcccgaaataatatagttacttttacgcttgtcctaagtcaaatatttctaaaaataatttagttcatacagaaaaagttacatgctatggtagttggtttcacgatgaatcttctaacatcatttttgctattcatagtcaaacctaaatattctaggatggaagaactatatatttgatattttccttacggtttttatgtctaaattgcacgatcgaaacactactttggtcacattttttccatttatttctttcccttttctggagggagttcgtacataagaaaaatgctcatcttctatgcatattagaaataatgggttgtctgatgaactatttgaagttaanacaaatgcgtcttagtggcctccggtatctttattgtttcncatcttactttagattatcaggaatactccttttcactggtattgctccatgctattattg

SEQ ID NO: 15876 - DNA, 406 bp, Setaria italica
  Peptide Sequence Number=SeqID_81850
ttgctgcaagcacttcgcggcctacgacgtggacgcgtggttcgacgccgaccgcctcaccttcgacgcgcgggtccaggagcgcgacatggtcgagaccttcgagcgccccttcgagatgtgcatccgcgacggcgacgccagctgcgtcatgtgctcctacaaccgcgtcaacggcatcccggcctgcgccgacgcgcgcctcctgtcggaaaccgtccggggccagtggcagctgcacggctacatcgtctccgactgcgactcggtgcgcgtcatggtccgggacgcgaaatggctcaacttcaccggcggcggcaaccacggcaagaagagcagcagcaaggatgcagccagtggtggtggtggcggcggcggcaggcccccggggcagcagcagcggcaa

SEQ ID NO: 15877 - DNA, 1118 bp, Setaria italica
  Peptide Sequence Number=SeqID_81851
atgcaggacgaccttgaggggccgtgagaacgggtcccgctccccggcccatcaaggtgtccagttgctgcaagcacttcgcggcctacgacgtggacgcgtggttcgacgccgaccgcctcaccttcgacgcgcgggtccaggagcgcgacatggtcgagaccttcgagcgccccttcgagatgtgcatccgcgacggcgacgccagctgcgtcatgtgctcctacaaccgcgtcaacggcatcccggcctgcgccgacgcgcgcctcctgtcggaaaccgtccggggccagtggcagctgcacggctacatcgtctccgactgcgactcggtgcgcgtcatggtccgggacgcgaaatggctcaacttcaccggcgtcgaggccaccgccgccgccatgaaggccgggctcgacctcgactgcggcatgttctgggagggcgcacgggacttcttcaccacctacggcgtcgacgccgtgcgccaggggaagatcaaggaggccgacgtcgacaacgcgctcaccaacgtctacctcaccctcatgcgcctcggcttcttcgacggcatgccggagttcgagtccctcggcgccggcgacgtctgcaccgaggagcacaaggagctagccgccgacgccgccaggcaggggatgatcctcctaaagaacgatgcccgccgcctcccattggaccccaacaggattaattccgtgtcgttagttggcctgttggaacacatcaatgccacggacgtcatgctcggagactaccgaggtaaaccttgcagggttgtgacgccatacaacgccataaggaagatggtgaacgccacgtacgtgcacgcctgcgacaacgggggtgtgacacggcggaagggatgggcagagcagccaggacggcgaagctcggcgacacgaccatcgtcatcgccggcctgaacatgagcgtggagagggagagcaacgacagggaggatctcctcctgccgtggaaccagaccacatggatcagtgccgtcgccgaggcctctccgcacccaatcgtcctggtgatcatgtcggccggcggcgtcgacgtctccttcgcgcagagcaacccgaagattcggtcgtcct

SEQ ID NO: 15878 - DNA, 612 bp, Setaria italica
  Peptide Sequence Number=SeqID_81852
cctcgctcccctccccgcccctcccctacaaagccagccgctaaaccctcctcgtcctcatccactcctctaacccaccacccgttccctccgccgccgccatgggctcctcctacgacccctccccatcccccggcgccatcgccgacgacctctccttctacctctccgacctcggccccacctccccctccgcctacctcgacctcccgcccaccccgcatcacgagcagcctcagcctcagcctcagccgcagccgtcttacccccaacctaacggtggggccggggcggcggcgtcgccggaggacatggtgctccccttcatctcccgcatgctcatggaggaggacatcgacgacaagttcttctacgagtaccccgaccacccggcgctgctccaggcgcagcagcccttcctcgacatcctctccgacgacacctccacctccccttccgcgacccacagcggcgccagcgtctcccaccccgcctcctcctgctcctccgacgccgccaacgcgcccctcacccccgcggcggtcgactcctacgcctcggcccccggcgcccagttcaacggcttcgacctcgaccctgccgccttcttca

SEQ ID NO: 15879 - DNA, 283 bp, Setaria italica
  Peptide Sequence Number=SeqID_81853
ccgtgcgtttcgtcttcgtcttcgccggtcctcttccccctttggcgatggcttcctggggagtctcccacttcaccgccaagcgcgccgaaggtctggtgcggaaggggctcctctacgagaggacggcggcggacgagtggaggctgccggagacggagcaggttccgtcgccgcccgccggctacgtcgtctccttcgcccatttccacgagcggggattcgcctcccctccgagccgtttctccgcgggctgctccactactacgggctcgagctccag

SEQ ID NO: 15880 - DNA, 1082 bp, Setaria italica
  Peptide Sequence Number=SeqID_81854
tgaacaagtagttctcagagaagctgaccaatttgcctgagctcttgaatacagattcatgatatgttgcaggtcttctgatggaaaaccaataacagaagtagcagagtattgatcaatgtatctctttacctgccaacaatttacacagagaacttcagcatatctcctcatccatgattctagatcattctgcgatgtacaagcattggtacccatccttttgattatcccatgtcccggtgctcaaggcatacaattctgggtttacatgcccaatgcttccaaagggaaagggtatgccaagaagtgctgatatagtcgctgctgcatagtgctgatgcacacctcttccccgtgcagatcaacattgcatgaactatcatcaagaacagacaagactgcatctggtggggtctttggactccatgcaaatagagatgtttcaacctcttcagcggttccccctcccgtggtcaccattcagggtttgaccatgatcgcccattaccaaaagcaaagtgttctcatgggtgccaccaggtttggacagacttctcaatgtgtcaataacaccctccaggatctgattatattgctctaacttctggatcatcggggttgagtcaacaccaaatatatgcccacaccaagaaaatgtgcaataagaacatcccaatcatttttgtgaagagatggaagcaagtgctcaattacaccattatctaccgtgtcaaggtctttaacattaaaggaagggtacgggaatgacttgttgaagtgttcagggtacagctgtatccatgtatcatctcccatcatgactactctctttccatttttaaccaactgatgcattatattatcttctactattgcgggcgcaccaaagctattgccaacatcaataaaggtagggagaccacccgtggtgagagccttaaggcgctggaggctggtggtcggtggatcagcaagtgctttgaagatccttgcggaggtcttttcattggcagcaagcttctgcaagacctgtaacttgtccatccacgggtgcttttcttgaaagaaggtactcggcg

SEQ ID NO: 15881 - DNA, 836 bp, Setaria italica
  Peptide Sequence Number=SeqID_81855
gcagtataagatatatgtgaaatataatattatgaagctacttttcaagacaatctagctatacaattttcaaaagctcaatggaatcttcaaaaaagtttattgaatgcacaatctatttgaaacttcaccaaggaataaattaagaacagctagtgcaccaaaaccaggttttttcccaaagaaaatggttaggactcaataatttcctcctttccctcgcagaatatagtaattttcatttttgaaacgatccaaacataaaaatccacaaaacattcaacactgaacattgcaacataaaacaggacaaagccagaactgttcaggtaatggacaaaccagtttcccaaaaactatctagcataagttgtctagatttatgcatcctaaaaatacatggtttagaaaaatgctcaactatgaatggtaccaaactggcataatccacagttccacagagctgccataataggtatctatccttgaagaaaatatggtttttttccaaaaggaggttacaagtgacctagccatgtacatgaaaagatctcacaactgcaatagtggttccaccatcttctgtgcagcggagttctctgcatcctttaaccttgacataggatcacctattgttacaaaagtgccattttgggtttctacctgaacagaacacacaaacttcctttcatgtgcagggccgccttctctttccaacttaaagatgggttttggccaattctttccgatgcagtgctcagtaagtttatgtttacactccctgagctctccaacctcatcccccaatccattgccaaccccggtgatcaatactt

SEQ ID NO: 15882 - DNA, 897 bp, Setaria italica
  Peptide Sequence Number=SeqID_81856
tagtaggtaggtttctttgtttgtacctgatctgttgaatggagatcaatcacaattatgttatgaatcatgtaaatatttatctttcattaccttcaaatttccaagcttccatagtgataaaaaaaatatgatctttcctaaacattgaagttccagcatcatcttttcccacaggttttctatgtagatatatcctccatatttgacttcaattgccaattgtaagatctcaacaagcaactgaactcccatcccatcttacgggactatccatgcatcttgaggactaaagcctgaacagaacacacaaacttcctttcatgtgcagggccgccttctctttccaacttaaagatgggttttggccaattctttccgatgcagtgctcagtaagtttatgtttacactccctgagctctccaacctcatcccccaatccattgccaaccccggtgatcaatacttgctgctttgcaccactgacaagcttgcctaacgcatctcgtgcagcattgagcttagcaattaccttctgctccgaggagccaagcccaaccatctccccaccaacaaatacatttaccaccatcatcccacctctctgccatgtcttaaactgtgcaactttgccatgtttctggcataactcatgcaatgttctcacaggttgttcatctatggtttctgctgtgacaattggctcaaagagccaccttgtaaccttccaaagcttctcaaggtcaaatttgcaatcaacgtagacagcagcagcgatggactcaacaatatccgcaagaaccttgggagctttaaccacactaccaccatagggtgcagtggcaaggtcctcgtttagttcttccttcactgaatcaataaactggcctacaagg

SEQ ID NO: 15883 - DNA, 865 bp, Setaria italica
  Peptide Sequence Number=SeqID_81857
ttccattccatgtccgtcaattatccaatctaatctccagcttcaagcatgcaagtgattccatgtagtacaagaggaggttcttgtttgtacctgatcttcaaatttccaagcttccatagtgataaaaaatatgatcttttcctaaacattgaagttccagcatcatcttttcccacaggttttctatgtagatatatcctccatatttgacttcaattgccaattgtaagatctcaacaagcaactgaactcccatcccatcttacgggactatccatgcatcttgaggactaaagcctgtaaagcatgaataagcaaatattgttgatggcggaagttttggaaatgtaaatttactttaaaactaattgactgcatgtactgatgtcacgtcaggtatagaagcagtaaacaagaactagttactacatataagcaaccgtaaaccttcaatgaagctgcaataaatgtttaccagcaatttatatctctaaaagatgttgcatgtaatttctttgacataatactcttagactcaccaatattcccaacaccacagggaaacagaaaatggcatcaccaaaagacataatgcaaccagcttttgggatttacctgacaaagcagaacactggtactgtttcccatatattgtgcaagtaacatttaagttaaatcaagtaggacgtagttggtgagatgcgtatcagaaaggcaacaatataagtagcaaagaaattttatcatacaaacaaaagacaatgtgaaactacactaacaaaaaaaataagtataacatgtagcagtcaacagtagtgcttgtgagaaaccaaaatgaataaaaccaacctgtctgttggac

SEQ ID NO: 15884 - DNA, 2348 bp, Setaria italica
  misc_feature (1)..(1): n is a, c, g, or t
  Peptide Sequence Number=SeqID_81858
ngcagagtcacactagcaaaagaaacactgaacgatgctggtggataaataacatacacggtatcgaaatgcagagatcccagctggtcagctacagcctacagggtagagatcattctacttctaccagcctccaggctccagtcagttctagatcattctacttctaccaacacacactgcatcgaaatgcaatttacaatttttttctagaaacacctaaatttacatggagtacatctaaaacttaaattaaccacccaaaagctgcttcgagataacctacacatttaactttacaaaagcctgctgctgccaaggcaggattcggccaatcaatgcactgcagatctcatcacgtccctccaacaatccccggcgctccaaacttccgctggcttctcgatccatgggccgttcatgatgttcaaaatgctgcaggcatcgctgtactccagatcaggcagcagcttgggcgtcagaaggaagcactgtggtgtgttaatttggctggcagctctaacaagctgctggaacatcttcctctcatttatggggtccattccttgatttatctcatcaaccacccgaaaggggcagttggtaagatcttgaagtgacacaagatacaagatggtcgatactgatcgctcccctccagattggtgatgagcacttagcacctgcagctgactagtttgcctaaacttcacctttattaagaattgccgttagtgatcaaaatcaagaccatgctcatccagtgaaacttctccagcaactgccatttcttgaaagttatgactgaatgtgtcgtttatttttgaaacaagagtccgcagagttggaagccatttaccctttacagtttcaatttcggagcagcatatttcatattcatctttatcacccttaagtttatttgagattgactctatctcgcgttgcctgttttgatactcctgcaaaacattttggtttagaaatagcatagaatttgcctccaattcagtatcttgtattgcagcttccagttcttctatggtaggaggcatcgcacgaaactctttttccaggtcactgatcttggcaatagactctgcatgctgtttcgccatagccagcttccgcttatgctctgcagttattctcttacaatcttcgtattctctggcagccagattagcatccttttcaagttttttcacacccttttccatctcccatatcttagcatcaagctcaatggaagccatgtgcttttctgtgtgactccacttgagagcaactgcttcagtaagcaaatccttaagttccttcattgcttgaaaccgcctgtcatttaacttagccacctgatcaaccagcttcttgtgctagattctacatcttcctctttgcataagtcctccagctttctccttctcatatcaacacgcctttgtatttcttctcgtttcttcttttgggatttcatcatgttaataatttcttccttttgcctgtgtatatttgcctcttcatcttccaattgcctctgttttctctgaagctgttttaaagcttcatgcattccttcaatgtccttttcatgtttttctttctgaagtcgaagattttcaatgtcacttacgtcaagattggacttgaaaagacgagaaggattgactgcatctacagatgctgacatataaccgccatatctggatttggaccatcgataatggttattcggagtccaaaagtcagaaatacctaactttgatacctgatctgctctgcaatgagtttcatccgtacctatgtacgaatcatccaaaatcgcctgactaatcagaacatcttttacagcatcaggggcttgaaatacttgatcaagtcgggagtagatcccaagttgttccatctctggagtaatgtttaatggtcgtctcctgatgccttcatccactatgtagttcagaacagggatgccatacttcttcatttctctagccatgtagtcacggtcagaagcatcctgagtgatgaatgacttccatatatagtttggaacatggctttccaaataagtcgcatggagcttatcctgaacatttacctcaagaagaacaggcccgtaaacttctcgcctgaaattctttttgttatcttgcacccagtggtatgcttcactgatgttatcagcaccattaatttgcaatgcttgaagtagcttatgattcttgctttccatttccttcagtctataagaacatttcctcatgctttcatcctctcgagctaactgagactccacagtattcctttctgcttttagattttttatctccacatttacttgtgca

SEQ ID NO: 15885 - DNA, 997 bp, Setaria italica
  Peptide Sequence Number=SeqID_81859
caagcgaaagattgatcagaaatgagagaggcgaccaagagatgtgtcgatcaagctactatgtatcatgaccccctgaattttgtactctctgatgtgttagagccccaattaagtcgatggtcagcaaaacacacatgaactcgcgacgacaacggcgagaggaccaagaacaccaagaaccaacaccagggaagagatcaaagactcccatgtcacggcgaccgtaccaccaccaatgccaacctcttattgaacccttgtctctactgcatgcctatgtctccagtcgcccatgcacgctcgcacggaggctttgcatgagccatgcatggcgccgccgcattaccaagaagcgccactgccgccgatcatgccgttccagaatcccggcgggtcgtgcccggcactgggggctccacctccttggtccttgttgtggtcaaactgggggtggccgctgtttccatcgccgtcgccgccgcttgcaccggtggccacaccgccgcctcccgaactaaccggcggcttcaagtcctcgaacgggaacaataacctgcccgcgttctccggcacgccctgcaaccccgcgctggagccgtacccggccgcggcagcaccgggccccgggccgtgcgcgtccagcgagaacccgagcacgctctgtgacggtggaggcgcgcggaactctccgagcgcgaaccctcccgccgcgtaatctccgggcatatgcatcggcatctgcagcggcatgtagcagccggagctccgcagcagctccatggccgagagggcgccgaccgcgggccccgcgccgccgccgccgccgccccggccgttgctcgccattgcaccaccggagttgcacacgctgctgctctccaggctcgggaacgccccgaactcgggcgcgtgcaagccgctgtggtgcgggaacgccaggttaaggtcctgcgcgccctcgtgcgccagcttggggttcttggacgccgcccca

SEQ ID NO: 15886 - DNA, 1467 bp, Setaria italica
  Peptide Sequence Number=SeqID_81860
cgaaatgacagcacacttactcaagatcttctgaatcaacacaaccttggactggaccagagatccaggctttccaagggcagtagatctaggagtcattctgctccaccattttatagagggaaacagaaattctctagattaaatgagccactgagcaaattggccacagatggtgataaaggcatctgcattaacaaccccaaagacaatgcatctagacctgtggatgtcttgcctatgagttcaacccagcctgttccagcgactgatggcagtgaatttccagacttaaatttcaggcttgaagattcagctgctcgaataactaaatggcgagatgactctggccagcatacagcttcgaacttgccacatggtccttttggatgctatgatgatgtactgagcatttcttctgggaccttacatctctcttgtacctcgctagttcctgaatgtgttgacaggaactgctttgaggaggcaagggttttgttgcagctggacaagaaatttattcccgtcatatctgggaacactatcctccttgttgatcagcatgcagctgatgaaaggatacgtctggaggagcttcgtagaaaggttttatcagaagaaggccatgtcgtcacttacttggactctgaggaggaattatgtctccctgagactggttttcaattgttccagaagtatgctgaacaaattcagaaatggggctggatcatcagcagtgatagcaattcctctgaatcattcaagaagaacatgaacattctgaggagacaaacccgtctcgttactcttgttgctgttccatgtattttgggtgtcaatttgacagggaaagatcttatggagtttatccagcagcttgatgagactgatgggtcatcagctatgcccccagcagttctccgtattcttaacttcaaagcttgcagaggggcgatcatgtttggtgaccccttgctaccatccgaatgctgtctgattattgaagaactgaaagcaacatctctatgcttccagtgtgctcatgggcgcccgaccacggtgcctattgtgaacgttgcatccctccatgatgagctggcgaggcaccaaatgctgagcggaaggcaggcagagtcctggcacggcttggcgcaccaagggcccagccttgagcgcgctcagatgcgcctcaaacaactgaggaacctacgccgtggcctatagctgtaggacaatatcaaatggtttcgatcagataaacgggagtgtgctttgtacagtttgtcgaggagggagtagaattccactgctgtaatacaattgtacatacaatagatattcatccctgacgaagagatagaacggcgcccatcacctgacaggcgactggggtttgccacggcgttgttgtaaactttggacattccgtttgttataacaattcataaccaaaaaaaaaaaaaaaac

SEQ ID NO: 15887 - DNA, 715 bp, Setaria italica
  Peptide Sequence Number=SeqID_81861
actcgtttcggctcagctaattgtttggccaacttcagaagcttgccaagcttaagagagcctgcagctgctcatgtttgcaatggccagcaccaatctcgcgcatatctacatgttcctcaagacgtgccagtgtccccagctggagaggctctttgtgcagctcccaacaagcagccgtgatacttccgtgggaaattcctcgaaggtagcacagaaagatgagccagctggagtttttgatgaacatgagccagatgaagagctatctgaggaagacgagacagatggcggcctatctgaggaagacgagactgagaaagaattattggaagaagaacgagtacaagaatatatgctaaaggaaaggctatactacgaggatgtgtattatgaggaagacacttttgatgaaaacgtgccgcaggaagagcaatctgaggaagatgtgccagggtatggcttaaataaccttatgactgccaagatgattaaattcaagggccactactttgagatgcgactagtaagctttttgttgaggaaggcttctgttctgaagaaactgctattggtcgctcccaagggacacataaaagcactaggaaaaggcacattcaatatatcacattttatagagccaaaattgttgcgttccaggaaagcttcaccagatgctcaggtaattctaagtgaaacagattttgctgaaaac

SEQ ID NO: 15888 - DNA, 412 bp, Setaria italica
  Peptide Sequence Number=SeqID_81862
agctcttgatcttcccggacattgactggtagattatcctccatttctgctacattaaattgttaaaaggccattgaggaatcaggatgctgcaaatatctctgttacgcttatacagaaaatttagaaacataatccacaagttgttcctttttcagtacaggcccccaacatttcattttggttgcatatcaaaagtttggcatacttgtatcaaactatagtagtataggcattttagatcttgcctttttcttggaatcaacagttagcattttgtgttgttcctcaatgtaaaatttgttccaaaccagtacatatcctagagttaagcgaagtagactagtctgaaatctacaatattgcttttctctaagggtacataataggtcaagggcaaaccctacatggg

SEQ ID NO: 15889 - DNA, 487 bp, Setaria italica
  Peptide Sequence Number=SeqID_81863
caaatcccctgctcatcatggacgccaagaccacacagctccgtactcacctgctggcccatgaccatgatcgcctcccctgcgcgccgccgctgccgctgtcaccaccactcaatgacgatgtgccgccggtgctcagccgctgcgccgtgcgccgctcgctgctgctggccaccagctacgcggcgctgtttgccggatcgctgtcgtcgagcctcctctcccggttctacttcgcgcacggcggcgccgaccggtggctcgcgacgctggtccagtccgccggatttccattttctcctcctcgtccttctggcccggccaccggcgatgggggaagatgttcggtggcttcacgccgcggttggtcctgtactgtgtcctacttggcctcgtgatggggctcaacaacttgctctactcgtgtggcacgtcctacctacccgtgtccacaacgtctctgctcctctccatgcagctggcgttc

SEQ ID NO: 15890 - DNA, 270 bp, Setaria italica
  Peptide Sequence Number=SeqID_81864
cagccgcagaaggagcaaactgagaggagacagagaggcacaggagagaggtgggggagcaggggaggaaagagagaaagctccaatctctcgcctgccctagctgccgagattcttgattgattccaaaacaaaaaatcgggtggagattgaagagtggccattggagcgcgacgtctgagctgagctattgtggaacgcaaatttgtcgacgaagatgtcagtgagccatgcggaggacatcgagatatcgctgtgcgacggcaactc

SEQ ID NO: 15891 - DNA, 528 bp, Setaria italica
  Peptide Sequence Number=SeqID_81865
aaagaatggaggaagccatagagtactatgatcagatgctggagaaaggagtgcaccctaatgagttcacgtatgatggtctgattcatggctatagtatgactgggaatgtagaaaaggctgaacagttactccatctttcccaccttagatagtccaattataagagaattgtagcagtacaaatcaggcactacattggaactggtcatctttttgaaagcttcacaagccaatgagaatttgccttccctgcaataccctgagataagaggcgcataaacaaatgcattgggctttataccttctgcaaccatttgctcaaggagaccacctgctgtttccaattcaccgatttggcatagtccattgatgattatgctgtaagtgtatacattaggcgaaataccatcctttctcatttcattaagcagccaaaaggcttcttctttgttatgctgtcggagatgcccttcaatgagatgattgaaagtgatggtgtcagcgatatgatccaattttgacctt

SEQ ID NO: 15892 - DNA, 1661 bp, Setaria italica
  Peptide Sequence Number=SeqID_81866
tcactttcaatcatctcattgaagggcatctccgacagcataacaaagaagaagccttttggctgcttaatgaaatgagaaaggatggtatttcgcctaatgtatacacttacagcataatcatcaatggactatgccaaatcggtgaattggaaacagcaggtggtctccttgagcaaatggttgcagaaggtataaagcccaatgcatttgtttatgcgcctcttatctcagggtattgcagggaaggcaaattctcattggcttgtgaagctttcaaaaagatgaccagttccaatgtagtgcctgatttgtactgctacaattctcttataattggactatctaaggtgggaaagatggaggaagccatagagtactatgatcagatgctggagaaaggagtgcaccctaatgagttcacgtatgatggtctgattcatggctatagtatgactgggaatgtagaaaaggctgaacagttactccatcagatgcttaatagactaaaaccaaaggactttatctacgctcacctcctagaagtttacttcaagtcagataatcttgaaaaggtttcctctattcttcaatccatgttagacaggggagtcatgccagacaaccgtttgtatggaattgtgattcacaatctgtcaagatctggacatatggaagcagcttttagggttctctcagtgatggagaagaatgggttagttcctgatttgcatatatacagttcattgatatctggtctttgcaagacagctgatgtggagaaagctgttggccttcttgatgagatgggtaaaaaaaggagtggagcctggtattgtatgctataatgccctaatcgatgggctttgcaagtccgataatatttctcatgctcgtaatgtcttcagtagcatattaattaagggattagtgccaaattgtgtgacatatacatgtttgatagatggatactgcaaagctggtgatatccatgatgctattggtctttataacgaaatgctagcaagaggggtaaccccagatgcttttgtctatagtgtgcttacctctggctgctcaaattccggggaccttcaacaggctctgtttataactgaagagatggttcttaggggatatgcaagtatttcttctttcaacaccttggtccatggcttctgcaaacgtggaaaattgcaggaaactgtgaagtttctccacatgatgatggacaaagacatagtgcctaacatgctgactgttgaaaatatcgtaaaaggacttgatgaggctgggaaactcagtgaagcacacacaatttttgttgagctgcaacagaagaaagcttcgcaacatgatacagatcacttgtcctcattgtttacaggcatgatcaatcaaggactagctcctctagatgtgacacataacatgatccagtctcattgtaaaggaggagatttggataaggctttgatgctacatgatgctcttgtggcaaaaggtgctcccatgagctgcacatcttatcttgctttattggatggcctttgccggaagagcaaactgaccgaagcttttaatttgctaaaagaaatggaagagatgggtatttgtccttccgagatcagtgcatgatactgttaaatgatcttcactcg

SEQ ID NO: 15893 - DNA, 719 bp, Setaria italica
  Peptide Sequence Number=SeqID_81867
cgttccacgtcccctgcatcgacacctggctccgggcacacgtcaactgcccgctctgccgctccgacgtgatcgaccccgccgtcacagcggccaccggggacggacggcggaggcggggaggccagctccgacacgccgactgatcaggatgcgaacgacaacgtcgaagccgagcaagcggctgcggcgagcgacgcaatcccggatcacgaacaagaggacagggagagtgaccaccaagaagaagaagcttcacccgcagtagaggaccagcaagaacgatccagctccccggatccgccgccgccgcagcagcagccgttctgtccgctgcctcgtaacgtgaggcgcgcggcgtccatggacgcggccattgtgtcaaccgcggcagaggtcgcggcacgggagcgcttgccggaggcagctcctgaagaggagcagatcggtggcaggcggaagcggtcctgcgcgaaggcatcgggttccggccatcggagcaacctcagcatcgacaggccggcttcaggtggcatccccaggtcgttcttctcgcggcattcgcgtgctcggagctcggtgctgccgctgagctccccgagctgaatttttgctcgctgctaataatgtttctcctgtcgttgatccacggcgcgatgtattatgcttctgaagcttatgatctcaaaagcgaggttacaagtaataaacaaaccggt

SEQ ID NO: 15894 - DNA, 584 bp, Setaria italica
  Peptide Sequence Number=SeqID_81868
gccgaaaccacacaaacaaccgtcaaaaacgaagaaaaagcagtaaacccgcccgcctcaagccccgaatcggcaggcaccgccacccaacggccccgagggtggtactactactactagtacgcacgcgcgggcccgtaggcggtagccactttcttctactcctcttccagaagcgcagggctgcgcagtgctccgtcgtcttccttcctcgcaccttctccgctcgccgagaacgactccacaccgcaccgcaccagcgcgggcgcgccagcgagcacgcacgcgcccgcggagaaaaaggagacgacggggagggggagaggagggcggttggattcggtcgtccaatccggccggcgcgagcctaccgtcgctcccgcggccgcacgcagcgccggccagtcgatccccgaggggggcccgacgagtcgatccgcggaggcgcggggcgatgaggagcagcgctgccgggtgagcggcgcgtgagggcgtgtcccgcccgcggatcttctggattggttggagcgcggggggcgcgcgcctccgatcggcggcggctggcgtgggcaggatcgcgtggg

SEQ ID NO: 15895 - DNA, 752 bp, Setaria italica
  Peptide Sequence Number=SeqID_81869
tagaataatacaaactaagaagacaagggggtagtaggggacttaaatactacaattaggtgctgatactgttatcttttatgaacaagactggaatcctcaagctgacaaacaggccctacaacgcgcccaccgcattggacagttaaatcatgtgttgtcaataaatttggtgtcagagcgcacaattgaagaggtcataatgcgaagagccgagagaaaacttaagcttagccacaatgttattggagaagaggatagaactgatgtgaagggtggagatatgggaaatgaagctagtgacatgagatcaattatctttggcttgcatctgtttgatcctgcagatacaaccacagatacgatcaatgaggacacaacttctgagacaatcagtgtggagaaactggcaaagttgaaaacaatgtctgaaaaggttgtcatgatgcgtagccatgaaccttcagaaaaggatgaacgcgcatttgaaatcaacccaaatttggctgatggcagtggaactgtgattagaagggcttctgattctattagtgttgaccccgggcttgatgaatctgcatacctatcctggttcaagaagttcaaagaggcttcgcattccattgaagatgccgcagctgaacttggaaggcaaagagcagcgcctgaagaaaagctcttgaaacgtgaagttaacaagaaaaaagtagaagaaaagagattggccaaatgggagactatgggttacaaga

SEQ ID NO: 15896 - DNA, 252 bp, Setaria italica
  Peptide Sequence Number=SeqID_81870
ccggcgccgaggaagtaccagccctgttctcttcgggagctgcgagggtaggaggaggaagagacggagatggcggacgcgaagcagcagcagcaggcgccaccaccaagcgtcgcgtggaagacggtgaagcccttcgtcaatggcggggcctccggcatgctcgccacctgcgtcatccagccaatcgacatggtcaaggttaagatccaactaggagagggctctgcagctactgtcaccaagaagatg

SEQ ID NO: 15897 - DNA, 522 bp, Setaria italica
  Peptide Sequence Number=SeqID_81871
aatagaaaagcgtgctcttttttctatcctctcgtgtgtgtgcgtgcgtgcgtgcgccccccttcctgcctccccccacctcgcgatcccaattcgatccgctcgcctgccctcccgatccgccgcgccctccccggccgcccaattcggccgccgccgcccggattcgcgtgggcccgcccgcggattcgcgctccccggcgcgccaaaccctagatccgccgccgctcatcccgccgccgccatgttctggcgcatgaccggcctctccgcggcctcgcccgtggatacaattctggacaaagaaaattttacgttggaagaacttcttgatgaggatgaaattattcaggagtgcaaagcactgaattcacgactcataaacttcttacgtgacaaggcccaggtggaacagttgcttcgttatgttgtggaagaagttccagaggacaatagaaaaaagcgctcttcaagttcccttttattgcttgtgaaatatttacttgtgaaattgatgtcgtt

SEQ ID NO: 15898 - DNA, 665 bp, Setaria italica
  Peptide Sequence Number=SeqID_81872
gaatcccttattgcccttgagttatgtggcatgatggttcagctccctgtttggatcacacaacttgatgctgtcactaagttgaccttatcaataacagctctccggacagacaacttaagcaagctaagcaagctcaaaacattattctccctcacctttacacttgctgcagaaaaacagggtccagaaattatggccattcttgcaaaaaataagttgttctcagatgggcacatcgtatttccggatggtggatttgagaaccttaagcttcttcgcttgtgtgctcctgtcgttccattggtgagctttatggaaaatgccatggcaaagcttgaaaggcttgaggtgcggttcaaaatattggagggcatttatggcgtagagaaccttgcaagactcgaagagatgtatttgagattaaatgacaaagatggcgaagctatgaccaaccatatagtagaagagatgaagagtgcagtaagaggagatcctgccaataagtccgtggtcaggataatctttcatatcaccacgacagattaagactagaatcaaattgtttgggtcatttctgagtcattgcgagcttcctgtgtatcatcatattgacagttatgcatgtttgaaaagtcttcagtaaattacttgcttcaggtgtt

SEQ ID NO: 15899 - DNA, 1486 bp, Setaria italica
  Peptide Sequence Number=SeqID_81873
tcttgtgaggaggaaggaatgatacgatcagtgggagcacagcagcagcgggaagatcaagcaatgtgtagtccatgacatggttcttgagcacattgtatccaaggcaagtgaagagaatttcatcactgtggttgggggccactggctcatgcacccaccaagcagcaaagttcgccggctgtccctccaagggagtgatcccaagcgtgcaaaggatacggaaaagatgaacctgtcccatgtccggtcactcaccatgtttgaaagcttgaagcaactgccctccaattcgttcaagtttggaacaattgtgcaggtcctggatcttgagggctgcacggatatcaaagagcaacacgccaaggagatatgtggcatgcttcttctcaagtatctcagcctccgaagaacagatactaaggagcttcctaaagctattggaaagcttcagaatctagagacactggacataagggagacaaagattgttaagctgcctaaagaagtttgcagccttgaacgactcatcaacatacttggcggtgacaaagaaacacgcagggcactgaagctcccagaagagtttgtgaagaagcagaagatgaagggcttgcgcgtactatcaggcattgggattgttggggaattagaagaccttcaccatttgacggacctgaggaaacttgccatttacaagctcgaactcacaggcgatagtgcgaatttgaaattaagttcctctatccagtacctctgtggctactctctgcacacccttgtaatccatgatgagtcatccaagttcctcaaatgtctggatgagatgacatctccaccagaatcccttattgcccttgagttatgtggcatgatggttcagctccctgtttggatcacacaacttgatgctgtcactaagttgaccttatcaataacagctctccggacagacaacttaagcaagctaagcaagctcaaaacattattctccctcacctttacacttgctgcagaaaaacagggtccagaaattatggccattcttgcaaaaaataagttgttctcagatgggcacatcgtatttccggatggtggatttgagaaccttaagcttcttcgcttgtgtgctcctgtcgttccattggtgagctttatggaaaatgccatggcaaagcttgaaaggcttgaggtgcggttcaaaatattggagggcatttatggcgtagagaaccttgcaagacttttcaaacatgcataactgtcaatatgatgatacacaggaagctcgcaatgactcagaaaatgacccaaacaatttgatattagtcttaatctgtcgtggtgatatgaaagattatcctgaccacggacttattggcaggatctcctcttactgcactcttcatctcttctactatatggttggtcatagcttcgccatctttgtcatttaatctcaaatacatctcttcgagtcttgcaa

SEQ ID NO: 15900 - DNA, 271 bp, Setaria italica
  Peptide Sequence Number=SeqID_81874
cgctggtgaccaggacggcatgaggttgccgccgaactcctcgagcagcacgacgaggttgccgctggggttgagccacgacctggggacgtggtagtaccgctgggagacgtcgccgcagccgctctggcacttggtctcgctgtaggtgccggcgtagccgcacccgccgcacccgccgccgccggcggccttgtacgaccagtaccgcccgatgtggtgcccgttcacccactacgagacgtggaacgtcggcgtcctcggcccggtg

SEQ ID NO: 15901 - DNA, 443 bp, Setaria italica
  Peptide Sequence Number=SeqID_81875
aggtcgaagttgtaccggccgccgccatacccgcagcaggtcagcagtaggatcgtcaaagcctgcattgcaaacacaacaacacatgaagtttccacgaaccctagaatcacttataccgtgtgcgtgcgtccggttttagacccgcgttgtataagtactatctatttcttcttaattcttaatggaatgatgcgcagctctcctgcgtattctgaaaaaaaaagtttccacgaacccagtgctcagttaagagactatgcattcgttttgttcatcagacgggacgattgcgccttaccgagcttcttggcttcgctaatcagcttgtacttggcggtgtagacgtcaacgtaggtgaacgcggcgtcagggtgcgtcttccggaggcttgccacggtctccttgagcctgaggttgaagagctgcgccaccttgttgta

SEQ ID NO: 15902 - DNA, 1324 bp, Setaria italica
  Peptide Sequence Number=SeqID_81876
cgaaactaagttctcgcttgtatttcctgatcatcgatctcttttgggggacagtgatgcccatcgatgtgatttccatttccctttattacaaatgacgcagtataccccatcctcaagcacgcgtgctcctccaatgtacaattacacagcaagaagaagcagcagctgcagcgtagccagcccgacgagtgacgcacggccggttcatcgccctttgctctggcacgctcgcttcagaggcaccggcgggtccgagagcgcgccggcgacgatctggtcgaacacaaacttgttggcggcctcggtgaagtgcacgccgtcccagctcaccctcttggaggggtccgcgcacgactttcccaccaccacccacgtcccgttcacctgcttcttcccgccgcagccgatgttcaggtcgaagttgtaccggccgccgccatacccgcagcaggtcagcagaggatcgtcaaagccgagcttcttggcttcgctaatcagcttgtacttggcggtgtagacgtcaacgtaggtgaacgcggcgtcagggtgcgtcttccggaggcttgccacggtctccttgagcctgaggttgaagagctgcgccaccttgttgtaggtgacggagcagccggcgccatccgtgggagcggcgaggtcggggcggtggagcagcgcgtagggcaggcagccgagcggccccgtgttgtggatccagaagtaccttcctccgcgcgagtagacagtctggattatgaatgtgagcctctccatcagatcaggaatgatggcttcgacttcttcagttgtgttgttaacaaagtagcttgaggtgatgtcattttgcccgatgtcgaaggtgtaaagcgcctgggagaagtattctgcccttggtaggagcgccctgtagataccacctttgttgctgtagacgaattggcttctgttgatgaattgctcaaattcccaggactgcacgtccaaggaaatggggctgaaaccagagaggaacagcgatgtattctgccgtctgattgatgaaccagctgtcgcaaaattggctccctgtgtgaagttgcttccgatcgagttgaggtacgcactgaggtgaggtattcccaggctttcagcgatgaagtcgatgacgaggcggccgtcggagtagcggccggcgggcatgccgaagaaggtcctgccgttgggcggcggcgcggcgccgaagagcgacgacagcccgcccgtgtccgagttggagtcgccgaagttgaagatggccgggaagtggcagtccccgcggcccgcgcccgcggccccggaggcccgc

SEQ ID NO: 15903 - DNA, 838 bp, Setaria italica
  Peptide Sequence Number=SeqID_81877
cttttcatgcgctgctaccaaaggattctagggttaaatgtcttgcagatggcggttttttccttgatgtagaggacatttctgggaaaaggacgatgcagtctttttacagtagtaccgaccgccttcagcatctaggggaacagttttcgcattgtaactcaaatctagagccaggccagtgtttttttccacgtgaagttgtgaaacacattgtcaccccggtattcattctcaatccagcatatgatgcttggcaggtacaacatgcgttagctcctgaagcatctgaccctcaacattcatggctggactgcagactggacatcgccaagtgcagctctgagcaacttgaaattctccaaggtttcaggaaagaactgcatgacgcaataagtgaagttaagcagaaaagggactggggtttttatatcaactcgtgctttgttcattgtcaatcgctgaactcgttgacctggcattctccaacttcccccagagtgaacaataagagcattgcagaagcagttggagattggttcttcgacaggagagaggtgaaggaaatagattgtgaatatccctgcaacccgacatgccacaacttggttttcactaggcctttcaagatatgaagttttggccgcctcctctgctacgattttggtgtaacattagcaaataaacttgttagtattgtttttttccaacttattttggtgagtgataccctgaaaacaatacttgacagtaaagttgtaaagttatcagaattatacgatgttaacagaatcctgttccatgatgatgctattgcttcgctgcaaaaaaaaaaaaa

SEQ ID NO: 15904 - DNA, 501 bp, Setaria italica
  Peptide Sequence Number=SeqID_81878
aattgcttagtggctgctgtgaaatatgaactacatgctgttcaaggactgatggatcatcaaactacagtatcacatggaatggaaccaaaccaacttctttcattgtctcctgaataagctgctacggtgaactgtcagtgcaaggctggtgcctcctcatcttggcaagaacccgtgctgtgagacgggaacctcaaacgccatcatcttatcgccccgagcaaagccgttgcggtcgtaggaggagatctcggagatgccaagctcctcgcacgccctgacgagctcctccccaaccctccgggcagcctccacggtgccgcagggcgggtcgccgcagatggacttctgcagggtgctgccgtagaagaggaccttcttgttgtggtcgtcggcgagcacggcgtagagctgccggttggagcagaacaccgacagcctgggcttcgtcgccgtgccattgaacttcttctgcagccgttggttcctgaccttggg

SEQ ID NO: 15905 - DNA, 932 bp, Setaria italica
  Peptide Sequence Number=SeqID_81879
ggtgcaggcaagctgaacgaggaagtccacaattcagagatgagggagagtatgtcttgtaaatatttccgaatgtgctgccggacaatagatatcaatgttccaagcttccaggttataaactcttttaaaccaccatcctcacacatgcgaacagcacggaatagctcagggagaacctttggtaagtacggaacacagccaaggcccattgacttaaaaataaagattagggagccaaccaccatttgatggtaacttgaaagggaaggatcttgaagaattcgcatgagagaactaattgcaacagttgaataataatcctcagatgccgaaaaagatggccagaagtcagttggtaactcttccatggaaacaatatgctgtgcagtctcaattgtaggccgtaggacctctctatgttgaccaggtagattatgttgatttcgcttgtgtgcatgagggtccaatgcacccataattcctaaaaccttcaacacttctagtctagttgaccattccaattcaccattcaacaacttcaagagtaagccaagcaatagcggatactcattatagggggcgataacatagcctgtgctttggataatttgtcccagagttgctaccgccacttcccttttactaacagcacctccgtctaagagagcatccacaactactggcatcagctcgggaatatattgcctcatagcaaaaccacccactttggccagttctccaacagtagcaagcactcccgcagcaagcgcattattagcatttggtcccgttccttcacataatctagtcactagcgccttgtgaactggagcaatgtaaggaagaattagccgcgcacagctcctaattaagcaacccaacagtctagcactttcctctctacacttgctatccatgctctggtcaag

SEQ ID NO: 15906 - DNA, 1903 bp, Setaria italica
  misc_feature (1858)..(1903): n is a, c, g, or t
  Peptide Sequence Number=SeqID_81880
aaaccgccacagctgggggaagcggcgcacggagagaaagggggcctgggagagggaggaattgacaggggagcaccccgcgtggcttgatctcagcgatggaggcggcgctagtggagcggctggaggcggcggtggcgcgactggaggcggccgtggcctccggcgcctcgctcgcgttggcggcgccgcgcgacctcgacgtcccggcggccgcggatccagtcatcgtggcctacgacgagttcgtcgcggaggccgtcgggcggctaaataccgcggccgagaagatcggcgggaaggtgctcgacgccaccaaggtgctcgccgaggccttcgccgtcgccaaggacctgctcgtccaggccaagcagctccagaaaccagcatcaatggctgatgcgcagggcttcttgaagcccctcggtgatgttatcgccaaagcaactgcaatgaccgaaggaaggaggcccgactacttcaaccatttgaagagtgttgctgacagtctccctgctttggcttgggttgcattcttaggaaaggattgtggcatgagtttcccaacagctcatgtggaggaaagctggcagatggctgaattctacaataataaggttcttgtggagtacagaaacaaagaccctgatcatgttgagtgggctaaagcactgaaggatctatacgtgcctggtttgcgggattttgttaagaagcattaccctcttggtcctgtttggggccccgttggaggtgccactgcttcccaaccaaaggctgctgctccaacacctaaagcaccagcagctaaggctccccctccaccggctcctccttcagcgcctctttttaccacagagaagtctccaaaatcttcacggccaaaagaagggatgtcggctgtctttcaagagattagttcaaaacctgtgactgcagggttgcgaaaggttaccgatgacatgaaaagcaaaaaccgcactgatagaagcggtgttgtcagcagcactgctgctgctcctgcagctcctgagaagacctctcgcgcagggtccttctccttcaagtctggacccccaaaactggaacttcagatgggacgcaaatgggtggttgagaatcaggttggtaagaagacccttgctattgatgattgtgattccagacaatccatctatgtatatggatgcaaggattccgtccttcaagtaaatggcaaggttaacaatatcactgttgacaaatgcactaaatttggaatcgttttcaaggatgttgtagcagcttttgaggttgtcaactgcaatggcgttgaggtccaatgtcagggtacagcaccgacaatatcaattgacaacacatctggatgtcagttatacttgagcaaagattcgctgggagcttcaattacttctgctaaatctagtgaaatcaatgtgatggttccgagtggtgccactgatggtgattgggtggagcatgctttgccacaacagtacatccatagtttcaaggatgggcagttcatcacgtcaccagtttcgcactctggagcgtaaatacaatgattactgctattgtgtgtgtgtgtgtttgtttgaccggctttgccttgcttgaagatgatggtatgctgagatctgtagcagtttttgggtctgctgcagcactggacttggactgcgaatgctgtttttgttgtccgttgctcagtgcgcggtgtgtatgtttagtttacacactggttccgtttgattggttttttgtatgccaacaacaactttacttggtctatgtctttagctgatcattctttggcatcggatatcaaaaaaatcagttgatgtggacggtttcnnnnnnnnnnnnnnnnnnnnnnnnnnnnnnnnnnnnnnnnnnnnnn

SEQ ID NO: 15907 - DNA, 396 bp, Setaria italica
  Peptide Sequence Number=SeqID_81881
cccttttcaccccaaatcggtttcactcccgaaaatccccaccgcttctcgctcgatcaaacgattcgaacacccattccgcactagaaaatccaaatcgtctcgcctcgccaccaaaccctaaccctactctcccctcccgccaccgcccgtcccaatggcgaagccggtgaagtacgacgacgaggagatctcgtcctccgccgaggaggaggaggaccagtccgacgccgccggctccggatctggcgatgagggggacgaggacgaggaggatgccgcggcgccgcccggcgggggatgtggaggaggaagaggctgagggggaggggcagcagcaggaggaggaggaggtcgacgaggaggagattgaggccgtcactaccggcggcggcg

SEQ ID NO: 15908 - DNA, 266 bp, Setaria italica
  Peptide Sequence Number=SeqID_81882
ctgcctcataatttccaatgctaaccactgaagcctttaagtgaacagtgaactctttaaattaacaaccagtagctaaatataggagaaaggtgatgggcagaaatgattttagaacaaaccttaagccgtaagacactgccgtagcagctacttggtggtgttttcttgcactaaattaactgcagggatgaacattccagcccatatcatgccgaattagaccaacaatgattcttgtactaaattaactgcaggacggaaca

SEQ ID NO: 15909 - DNA, 435 bp, Setaria italica
  misc_feature (1)..(51): n is a, c, g, or t
  Peptide Sequence Number=SeqID_81883
nnnnnnnnnnnnnnnnnnnnnnnnnnnnnnnnnnnnnnnnnnnnnnnnnnnctaacacattatccttttaattgaatgtacggccagagttattacacaagaaaccttggaatcatttatctaaaatccttcccattccccatctccaccacttctatatttcgaatttacagcttttgtatatactattctcagttaatcgtacacaatcacacaagcagtgtgacatataaaatataaactgtacaatcatcaaccagaactagggaatccaaggctcaagccggcaccaagagccatgtgccattcaagatatgcaagcacaatgctatgcagatcgtggcaattaccatggacctatcactcatatgcctcaaggcacgcaatccagccccaactctggcatcacctccagcccttgtgccggcgtgcagt

SEQ ID NO: 15910 - DNA, 444 bp, Setaria italica
  Peptide Sequence Number=SeqID_81884
agctcttccgcacgtcctcttgctgctgctgctggtgttcatcactggtaggagcggtgcttgttggcaggagaggcttgattaggctggagatgatctccggtggcttccctcgaaatgagtttgtcaggaaggagttggacagacgactcagtgatggtgtccccaggaagctcaggttgggcgagtgcacgctgctgtacatgtcaatagattgcctgtagctctgcggccattgctgggtgtaggaactcggctggctgcacctcgcggcaaccacccgcgggctgtcgcacggcgacgacgagtccgacccggagacgtcgtcgtcgcccgattcctcgccgccatggccgcggcgcttcccgtcctccacggcggcggcggcgtcctcgtcgtcgctctcgatgaggaagctccgttccgaaccaccgaagtagtcga

SEQ ID NO: 15911 - DNA, 703 bp, Setaria italica
  Peptide Sequence Number=SeqID_81885
cgccggcgctcctgatgatggcgctgggacgggcgagagggaaggggagcccgcggcggcggccttgctgccggcgaggacgagcttggccttggcggagaggttgtcggccccgaacgcgtgcttgtcgggtgccccgccggtgacggaggaccccacctgccacacctggttcacggccttcatccccttgcgcagctgcagcttcccgtacacccggatcttgccgccgctgccgccggcgtccgcggcgagctcggtggccgggaactcgagcggggacgacgcgcccagcccgtagcctgagatgttgtacgtcttcacggtgggggccccggacccggaccccttgagcgccacaagcgcctgcgcgccggccatgccctcgccggtcgggttgagcccccacgccacccacccgccgggcgccgccggcgcggccacgaacgccacggagagcgagctcttggacgcgtcgtaggtccagtgcagcgacgcgccgagcttggggaggtcctcgcacgtcgcgtacgcccgccccgccgggaacttctcgctcgcgcaggcggcggaggccagccgcgtggccgccggcgacgccagcaggaggaacaggagcagcattgcggaggcggccatgtggggtttgggctggctggcggtcgctcactgcttcggtgtgcgtgggctttgctgttcttgg

SEQ ID NO: 15912 - DNA, 279 bp, Setaria italica
  Peptide Sequence Number=SeqID_81886
agactgaaccacagtaaagacttcgccttttgatgaactcagcaacaggacgtaaaccttccgggctaatgttgttgttaccaatatccacaactgtgatcttccctttgtgagcagataatgctgacatcaactcatgtattccctcattcccaatcccatttccatgcaagtgaatttccctcaaagacttgttccctaaaactcctcgagctaggctggatgcaccaagaggaccgccatagttgccattgagatacaggctccttatagaattta

SEQ ID NO: 15913 - DNA, 620 bp, Setaria italica
  Peptide Sequence Number=SeqID_81887
atctcaactacccgtcgttctcagtggtgttcaagcagaaatctaagcggttcatgaggttcagaagggaggtaaccaacgttggcccagcgacgtctgtttacaacgtgaaggtcaccagccctgcatctgttagtgtcacagtgacaccaacgaaactgacgttcaagaaggtcgggcagaagcagagatactatgtcaccttcgcgtcgaaggctggtcaaggccaagcgaaaccggatttcgggtggatatcctgggcgaacgatgaccacgtcgttcgcagtccggttgcctatacatggaagatgtgagtcttcctggtgcctaatcatgccccggagcaggtgaaagatagatagcttgatctagtttgctgatcgctccacaaagagaatcggcgtggagcactcgactgcaaacctgtatttgtttcttcccttggttggtcggtaactcaccgggccttaatatctatctcctctagtcttcagaatccggcatgtaacttgtgaaattaacatgtgacatttcctttcttttctagcttattgtttgcagacatgactcttttactcctgaagctgtgcagaatgaaatgattgggtttctgtttcact

SEQ ID NO: 15914 - DNA, 1130 bp, Setaria italica
  Peptide Sequence Number=SeqID_81888
aaaaagggtgccgtcgtcaaggccgccggcggcgccgggatggtgctggccaacacggctgccagcggcgaggagctcgtggcggacagccaccttctcccggccgtggcagttgggcggacggtcggcgacaagatacgggagtacgcggcgcgcggcggcggcaggccgatggcaatgctgagcttcggcggcacggttcttggcgtccggccgtcgccggtcgtggcggcattcagctctcgcggccccaacaccgtcgtgccggagatcctcaagccggacatgattggcccgggggtaaacatcctggccggttggtccggcctagctggaccgaccgggctcgctaaggacggccgccggacgaacttcaacatcatctccgggacatcgatgtcctgccctcacatcagtggagtcgctgcgcttctgaaggccgctcaccctaactggagccctgctgccatcaagtctgcactgatgaccactgcatacaccgttgacaacacaaactcctctcttcgtgatgcagcagatgggtcacttgcaaacgtatttgcttatggtgctggccatgtcgacccacagaaggcgctttctccaggccttgtgtatgatatctccaccaatgactatgttgccttcctctgctccctggactacagcgccccacacatccaagtgatcactaagatgtccaacttctcctgtccgaagaaattccgtcctggtgatctcaactacccgtcgttctcagtggtgttcaagcagaaatctaagcggttcatgaggttcagaagggaggtaaccaacgttggcccagcgacgtctgtttacaacgtgaaggtcaccagccctgcatctgttagtgtcacagtgacaccaacgaaactgacgttcaagaaggtcgggcagaagcagagatactatgtcaccttcgcgtcgtacggctggtactaggtacaagggaccaaagacgaaagtggggaatctggccggtacgatagtaccaacgtacgttacgacaagtaccggtttaagaacctaaattaaactaaattaaggtaaaagtaaaatttaaagtttaaagttaaaagtttaaactttttaaacctttaaagttaaaa

SEQ ID NO: 15915 - DNA, 873 bp, Setaria italica
  misc_feature (871)..(871): n is a, c, g, or t
  Peptide Sequence Number=SeqID_81889
aggaaaagggaaaggaagctttcttgcagggtggaggagggcataaagctcaaaaggaaagagctgctgctcttgctgctattttagcaagaaaggagaaggatgactcaaaatcaggaaaagaacctaaacctcagcaaactttcagtattgttgatgctgcttctgcttctgttcatggcaggagtgcagccgcagcaaaagcagcttctgctgaaaaaaccgctgctagaattgctatgcatatggctggggatcgggctcctgtaaatgctaaattggtcaaaagtcgttacactactggagcagcttcacgctctttcacatcaactgcctatgatcctgttacgaaaatgaatttgagtatgttaaagttgaaaggaatccaaaaaagaaaggatatgttcagctgcatacaacccatggtgatttgaatttggagcttcattgtgatataactcctcggacgtgtgaaaatttcctcacacattgtgaaaacggttactacaatggtcttatcttccatcggagtatcaaaaacttcatgattcaaggaggtgatccaactggcacaggaagtggaggagagtccatatggggtaaacccttcaaggatgaggtgaactcaaagctgctacattcaggaagaggtgtagtcagcatggcaaattcaggccctcataccaatggatcccaattttttatcctgtacaagtctgcaccacatttaaatttcaagcacacagtatttggcatggtggtgggtggtttgaccacactttcagctatggaaaaggttcccgttgatgatgacgaccggccattggaggaaataaagattctaagaataagtatattcgtgaatccttanac

SEQ ID NO: 15916 - DNA, 917 bp, Setaria italica
  Peptide Sequence Number=SeqID_81890
atggcatgggattcaacccttccaaaaccaacaaccatgatgattttactgggagaagttatgttggtagtccccataagatgccgggtagtcctattgatcggtttaaaatggaggcactgcctccaagacttgccaagaggacactgtctgttgcacaatacaagttattgtctcccatgaagaaccctaatcatatatccagccgaaatgcggctgatataatggaggcagcatctcggatcattaggcctggacttgaaaacatcagttcttacagagtccatgatgttgggcacacaaatgctgcgcgtgcctacaacccaggagagatcataggagtccaacaaaggtcacagaagctaaacgaagcactaaggaaacgtgatgggcctgcatcttttaggccaccaagcggaaaacctttggatggaagatcgagaagttcagagggcacctcgtcttccaggatctcacagtcaaatggatgtgccccagttggccccaaggtcaaatccggcaatagatcatcaaatgttgctcaagctatgcatgcccaaggaggcatgagaaaaggcagtagaaagcttgaaactcgcaggaaccctgaaaatagcttggtcgagagaaatgggttgcaccaaccaaaggataataatcaaatgggctcaacaagttcttccagtgtgcttgtgccaaacaacagaaggcagaatactatggctagcaaacacaaggtgaattcaaatccagcaaaccccagtagacaacggagcaatatacaccaaataaatgcctctcccagaaaggctggggcagccagcacatttgctggaaacaatactcaaggtagcaagaaagatggacttgcagccaactgctcgagcaaatgtaagaaatgattccatagccaaggc

SEQ ID NO: 15917 - DNA, 432 bp, Setaria italica
  Peptide Sequence Number=SeqID_81891
acggttaggtaagactaagactaagttaccgtagtacaatcaagcagcaggcagaggaattgaaggtccatggactccaagaggatgagctcgagctcgtcggtgcagtcctgggtggaggagcacaagctctcaacagttggtgagtcgtcagtgatccgacccgacccgatccgatcccctctggattttccttgctgctgaatcgaccttagttagcttctcctccggccccttcacttgatgcgtctgtatgcagccggcgtgtgggctgcggcggcgggcgcgtcggtggcgtacagccggcggggggcggcgccgcagcgggcggcgacgagcttgaggctgatccacgccaggatacacgcccaggcgctcaccctcgccgtcctcggcggagcggcggcgttcgtgcactaccgcagcaagaag

SEQ ID NO: 15918 - DNA, 279 bp, Setaria italica
  Peptide Sequence Number=SeqID_81892
tccatgacatgtaccgcaagtttgatgtgatagggaatcttctttttgcatagtgctaaaattgggattttggggggataaacaggcccctagggtgccggcctttcttcttcaccatcgaatgaaacctggggcgacagagcccacaagaaaaccacccacagaactagacaagagaagaaatgaattcattcgcacaaaaccaaccactagtgagctataagtatctcaactcacctgctgccaccaatccctttcattcgtccatccatagcatca

SEQ ID NO: 15919 - DNA, 1110 bp, Setaria italica
  misc_feature (1038)..(1110): n is a, c, g, or t
  Peptide Sequence Number=SeqID_81893
ggagggcaactcgacgttccagcagcagcaacggtctccttgcccttgctgttggtggtggtggtggtggtggcggtggtggtggtggtggtggggttcctcctccccatcctgctccctcgagtctcagcagtcccgcgcctccagtaaaccgtggcgacgggggatttgaccacactgcgttcctcgtcgaagcctgctgccaccaatccctttcattcgtccatccatagcatcaccaagtaatccaagacccggtagctagctagttccgtgtcatcagcaggcagaggaattgaaggtccatggactccaagaggatgagctcgagctcgtcggtgcagtcctgggtggaggagcacaaactctcaacagttggtgagtcgtcagtgatccgatccgatcccctctggatttcccttgctgctgaatcgaccttaagctcacttgatgcgtctgtatgcagccggcgtgtgggctgcggcggtgggcgcgtcggtggcgtacagccggcggagggcgacgagcttgaggctgatccacgccaggatacacgcccaggcgctcaccctcgccgtcctcggcggagcggcggcgttcgtgcactaccgcagcaagaagggcaagaaccacgccgccgacaagctggacctcgacttctactcgcagctgccgccggccacggacgccgacggcaacgagaacgagcgctggagctggtagtcgtccttccgttgggaggatcgccggagaagctggacctcagcatgacgtggcgggtttgtgctaatccatccagctaagacgcccgtgattccgtttactttacattatccatccaacgtccgcatccacatccatgggcggcacataggaaataaaggaagaatccatggtttggtttcctgctgccttttgggatccggaggcggcgactactgctccgatcctgatcctcctgtactgttacaaccatttgatttgttgaatggtgatgatgatgacgataatggtattttctttactttaaaaaaaaannnnnnnnnnnnnnnnnnnnnnnnnnnnnnnnnnnnnnnnnnnnnnnnnnnnnnnnnnnnnnnnnnnnnnnnn

SEQ ID NO: 15920 - DNA, 969 bp, Setaria italica
  Peptide Sequence Number=SeqID_81894
aaaaccacccacagaaagaactagagagctataagtatctcaactcatatatctcaactcacctgctgccaccaatccctttcattcgttcatccctagcatcaccaaacaatccaagacccggttggtagctagctagttccgtgtcatcagcagcaggcagaggaattgaaggtccatggactccaagaggatgagctcgagctcgtcggtgcagtcctgggtggaggagcacaagctctcaacagttgccggcgtgtgggctgcggcggcgggcgcgtcggtggcgtacagccggcggggggcgcgccgcagcgggcggcgacgagcttgaggctgatccacgccaggatacacgcccaggcgctcaccctcgccgtcctcggcggagcggcggcgttcgtgcactaccgcagcaagaagggcaagaaccacgccgccgacaagctggacctcgacttctactcgcagctgccgccggccacggacgccgacggcaacgagaacgagcgctggagctggtaatccttccgttgggaggatcgccggagaaggaacggaataaataaattagtagcaataattggggaggcaggcagaggcatgacgtggcggctttgtcctaatccatccagcttgactcgcccctggtttcgtttactctacattatccatctcaacatagggcgggcagcatctggggagcatgcaggttctacttgttgtattgcatgggtcctcctcctcctgtactgctagaaccatttgattttattgaatggtgatgatgacgactaaaatgatgtaaaaactaaaaggatgctaaggctcttactttcagaataaaacaatcggacgctcgattcagtatctaaaagatcggctcgagatatgtttcaatagttaatcgttgcaggtattgtttccgtatgtgtttcactagtgaatattgcatcaaacgttgtgttt

SEQ ID NO: 15921 - DNA, 3112 bp, Setaria italica
  Peptide Sequence Number=SeqID_81895
tctgcccgcaccggcggatgcgagattgagccggcccgcgcgccgtgggattcggccggccatggcggctgcggcagcggcgggggcggaggcggacggctgcctccagagcttcgagctctacgaggccgagtcgaaattctatattcttggaactaatactgacaagacattatggagattactcacgattgatagaatggaaccatcagagctcaatgtagatgaggattccactgtccactcacagagtggctatcttgatctgctaaaaattctagatgaagagcataggtcaactggtggagttaaatttgtcaccaactgttttggaatcatcggtttcgttaagttccttgggccctattacatgttaattattactgagcagagaaagattggggacatatttggccatccagtataccaagttactaagactgcaatgattgagttatcaaattccaagactaggccaaagttaaataattccaaggatgaaaacaggtacaagaagctcttgcagacaattgatcttagaaaagacttcttttttagccactcgtatcatataatgagaagtctccagaagaactttagtgatccacaagaagggtgggaactatatgacacaatgtttgtgtggaatgagttcctaactcgagggatacgtaacattctgaaaaccacactctggactgttgcgttagtctatggttttttaagcaggataaacttgcaatatgcgggaaggacattatgttgacgctcattgctagacgctcgaggcattatgctggcaccaggtatctaaagaggggtgtgaatgacgagggcagagtagcgaatgatgtcgagactgagcaaattgtttatgaagacatgcttggaccaaggcaaataagctctgtcgtgcagaacaggggttcaattccactattctggtcccaggagacatcaaagctgaatcttaagcctgatatcatattgcatgaaaaggacaagaattatgaggctaccagacttcattttgaaaatctaaggaagagatacggaaatcctatcatcatcttaaacttgattaagacacgtgagaagagaccacgtgaaattattctccgtcgggaatttgacagagcaataaagataataaataatggtctaccaggggaagatcatttgaggtttttacattgggatcttcataagaactctcaaagcaaaagtacaaatgcccttcaagtgcttttgaaagtggcatttgaagctctgaacttgacagaattcttttatcatcaagtctccccagctcgaagaacagagtgtttccttaatttaagcgctacattgaagaatgattttggtcctcacgtgtgtgatgacaacagcaattgtggcaatgcagactatgtcagtgatcttgatgacatttcccaagatgatacctgtggcagttctgatccgggcaatggaattgcagaagataattccgaggtcaacggatctacccaaacaaagcctccaaaatttcaaaagggtgtcttacgtacaaactgcatagattgtttggaccgcacaaatgtcgctcaatatgcctatgggttagctgctctaggacaccagttacatgcaattggctctttagaatctccagatattcatatagactccggtttgtctcgacatttgatgcacttttatgaacggatgggtgacacgcttgctttacagtatggtggttcggctgctcacaataagatattctctgcaaagagagggcacctgaagtttgctattcaatctcaagagttctttaggacgctgcaacggtactacagcaatgcctatatggatgcttacaaacaggcagcgataaacttatttttaggatacttcgaaccccaggtgggaaaacctgcactttgggaaccagaatctggtgatgagcatgtacttgatgacgagacaagtaaattgatgaagagggcaaggtcagatggcagcattcttaataaaagcaaaccatcgctgtccagcaaaggaccaaatggaatgttaaagtcagcattcactggttcaaaaaaagaagggcaatatccaaactggagttctggatccatgcacggaatgtcttcaacctctgacaattccatgtcgaagttaagttatactccaacagtgtctcatgtgaagcatataagctgtgaactagactattgcaatggttctggtgattcaaatttcctggatcttgactggctttcagcttcagacaacgaaaggtcaaaagccataagcactcctgacgtgaatatttcaactgataatgctgttggtgatgtaagctctgggacaacggatgatcaaactattgagatcgaggctcaggggttatctaaggattttatgcggtgggttaatcaaggagaggcattttggtactgattgattttgcaagatggcttatcatgtaaatccaaactacgtgatggtagcagttgcaaaaagaaaaaaaaagaagagaggctgcaagacggcggcccaaactttgttccaaagcatcttaactcttgaagaccatcgcaaggagtcatcgtcatcgtatcgtttatcaaccaccagcaggagttagggaagtgtaccattctgttcatttgttgaagcttgctcaccaggcgggtagatagggcattgttgttatttttcttaaaaggaaagaaagaaggtagttagtagtatatgattattctttcggagctgtccaggcatcacccccacccccatcgtgtaaatatatatgtcccaagtgtttcaccccctttcccttttcccttcccatgagagttgaggtgggcaggaaagcaccatttttccctcaaccttttttctggatgggacctttggaaaacacaactgtgtacatgtattttccgtcacaacaggagagacaacccttgtgtaattcccattcccttgtaccaaacccctgtcccaatacacatctcttgcactgtttgttgtatcgcagattgctgtagcacctgctaaatctccgttttgtgtaacaaaaaaaaatgctttacctgtaacactgacctttttgttaaaaaaa

SEQ ID NO: 15922 - DNA, 447 bp, Setaria italica
  Peptide Sequence Number=SeqID_81896
tcggccatcctccccgcccgcgcccacgccgtcaacggaaaggttatcaaggggctcaccgacagggaactccatgtgttcgacctgttcgaggacgaggagtacgtgaagagaaccgttgaggtctcgctgaccgatacattggagagatcactcgcctacgcgtacatctggggcaacgagggcgatcctgacctctacggggaatgggattacgaggaatggaggaaggtgcatttgaaggattatcttgagatgacgagggaattcatggacgaagttggacaactttaaacggatctcctgccctctggtttgtaaacagtgtccttgcaaagatcacccgtgaaatctgtgtcgtagtaatagactaatagtatagcctcctgtgctcatagacttgacagagtgcaactatacatttcttctgtgtttttggatcagaag

SEQ ID NO: 15923 - DNA, 514 bp, Setaria italica
  Peptide Sequence Number=SeqID_81897
agcaaagtaactgtccagctattattttcagttgattaatcctgacaaagttcaacctgaatacagtttgggcagaagggccttttggatttggattgttgatcagttgccgcattgtacagggatttcagttatatcacgtttttgttaagcaccggttgccaccgatcaggccttccattattttagtagttatactccttccatggatatgtggagctgctgtttttcattggaataaacctttgaatcaccggtgtcacatgcaggctcagtgggtgattccagtaatgtgtatacatggattttatattgctggtttaattgtcatcacattatccattcgacatattgaattcagattcagtgaatttaaggatcttctacaagcaattattgtttcaacaatagcagtaggattttggattgttgcatatgtcctgaatgaaattcacgaagatattgcatggattcaagttttctctagattttcccttcttgtcatgcataggca

SEQ ID NO: 15924 - DNA, 281 bp, Setaria italica
  Peptide Sequence Number=SeqID_81898
caagaacttgggttccccggccaccgacacacccgcctccgcccccgccgcgccgcattgctccgtcggtgcgagaagaagaaggcgatggacagcccgagcaccgccaccgtgagcagcggcagcagaatggccggtacgagcttggacgccttcttggactcgtgcgagccggcggccggaggcgccgcgccgctggagccggtgttgggcagcaccaaggcagggtacgtcggctggtcctgccccgccggcatctgcggcgggggcggcaccgggag

SEQ ID NO: 15925 - DNA, 566 bp, Setaria italica
  Peptide Sequence Number=SeqID_81899
tttttttttttttattatgctactgaaaaatgtaagacattatatttatttttttgaaggtatacaagtaattccatgcgtgctcatggacgcacacatgtacgagttttcacgtcgtcgtcttattcatcaatataatttctccactcatacaaaaatgcgatacttattattgtgatgtcacacgtgtacgttgctcatgtcgagctgctgtgttcgacgacgagtcgacgaccactgtgaaactgcctcaccatcatgtgcagaatgtgacctggtagttgctattgccgctacaagcatgggtcttgttatcgttcgggaagaggtaggcctgggggcagctggagctcgtgcacacgatgcggtcgccggagctgcaggagaaggccatggcgaggttgtagccgtcgatcaccgagatgtcgtagaagtcctgggtgccgccgagggtgaactcggccagcgtcatgggaggctgcccggagagggtgcaggagagcgcgccggcgcagtcgccagtcgcgcacctcccgctgttgccgttgaaggaacaccccgtgcgg

SEQ ID NO: 15926 - DNA, 1026 bp, Setaria italica
  misc_feature (1)..(43): n is a, c, g, or t
  Peptide Sequence Number=SeqID_81900
nnnnnnnnnnnnnnnnnnnnnnnnnnnnnnnnnnnnnnnnnnnagtttactattttttgtgaatatatcatatattgtgtttattatatatcttgactttcgttattatattacatcatcatcaccatggatttgatccacaaaaggaaggaaaaaaatccaagaaactgaaatgcactcagtctacgtatacatcagttacgtacatccattacatatgtaggcagtgtatgcatgtgaaggccggatggagtagtagtcaagcaaaagaacttggaacttcacacgtgcagcagggtaatcaacgaataatataattgaatgatcaaccgaatgcagatgaaacgaaagcatcagcagcaaaagcatcagattatggatggatgatcagttagttgacgaggtagcatttcttcctgatctctccctgcgctccggtgagcacgtcgacggtggacatcttgaccatggagtcggcgaagtcacggaagaactcgtccgcgaagagtccggtggcctggcgctggacgtacgccctggtggcggggtcgctgagcagcgcggcgtcggagtggaagagcccccggcgcttggcgacgaggcggtagtagctggcgtcgaagctgaggaagctgccggggtccatctcgttgagggtggtgttgtcggcgaggctctggcacctggagcggaggcgggcgaggtacgtggcgtcgagggcggggtcgacgtccgcgaggttgttggcgccggtgaagttgtagaggcggtcgctgaagaggttgcagtgggcggtgccgagggtgtggccgccggagaggacgacgaggtccttgacgccgaggcccttggcggcgaacatctggacgaggcgggtgaagttggcggtgggcggggggagctggttggtctcgttggcgatggagacgcggccgtcgcggcggccgagggcgacgggccaggaggggcccctggcaaggacgacggcgtcgcgggccatgagggcgaggatgtcggcgcaggaga

SEQ ID NO: 15927 - DNA, 769 bp, Setaria italica
  Peptide Sequence Number=SeqID_81901
atttgaactccctgtccgttgttaacctgaggggaaataatttgcaacaggatgatgttgtagatcttcacaaaattctaatacaaatgcctaacttaagagatttggatataagtggcaatccaatcatggatgaaggtatcagatcgttggtcccttttatttcatgggctattcaaaaggaaatccacttttgaaattaagagtggagaattgtgacttgtccagtattggtgtcagtgaacttctggagtgcctcacatatgttaagcaaccacttgatgtgctatctatagcggacaatcctttagggagttctgtggcagccgtattggccaaattcttgggttcacatgtaagggatctaaatattgaagatattgacttgggagcattaggtttccaaattctcgaggaagcattaccaatggaagtagctctttcgcatatcaacatcagtaagaatcgtggtgggatcagagcagcatactttgtttctaaattaatattgcaaacgccaaacctcgtctcagtcaatgcagcagccaacattttaccgcctgaatcattggaggtcatttgtaacaccttgaagcagaggacatgtaatttggagcgagtggatctgactggcaactttcatttgtcaagcactagtttcctgcattccttgaattcaagaagcatggaaagccgattctggttgtcccatcaaacttgagcacttgtgctccatacgatgatgacccatgactagtatatattggta

SEQ ID NO: 15928 - DNA, 1885 bp, Setaria italica
  Peptide Sequence Number=SeqID_81902
gcttttgtatctctccaaaagaaacggaagtcaacccgccagttacataggtatgcttataaagctgggtacccgggtatcacttcccatactttcggcagggtggcttacccctctggctgtttttgcccctcaacattgccattgtcgggccaagagcactgctcctgagcgccctataagaccaagcagatgtactagcgtttcgtttccaagttccccagccattttcctgaacatcagtcttgtcattggagggctcgacattttcttcccagactgtattctccgtcttttctagcgtggcttcttgatctttagtgttgtttggcaccatgcctggtttctggcagtcaattttaccttcattatcgtctaaggtaactgtctttccagccagtgatccacctttgcatatttctgcagagggagtactgacaacccctggtaccgactcaatacccttcagtagccttacatcaagaagtgaagagtactcgatctccaaggagccatcttccttgtaaggtgacaagtccataaacatatctgactcgccctcgggcttgttttcctcggtggtgaccattggatgctcaggaacaggtaagagaatgatacgaagtgatatgggatcatatatcagaacttttccgacacggtaagaggacagctctggacacaatgaggaagacagctccaccaatcgataggcgatcagatctccctccttcggaagtcgtgttagggggtacaagctctcaaaatccaaaggttcaccattaaacttttcttcattagcaatagtcttcacacttggcctcttaatattactgctttcatcatccttttgattactgacagcacaaaaatcattttcagtaatctttctgtcaatgaaatgatggttagcttccatgctgcttccagcaccaatatcagcatatttcttgttcgagttattcattccccacttctggcccttctttttgctcatagttccactccattggaaagtgccctgtatctcctttgctggtgacttgtcaggttgtccacctgccggttcaaagcgaatgtgaccaggccgaaccacaactggaacaatctcatctgatgtatcagattcttcctcatctgctttgtggctagaacaaggaacatgtgatccgttttgattgtttgatgggccaggcaagctatcttggttgcttggtgatggacaatcagcagctattggtgaatcttcatgcacattcttttctgtttgtagttttgatttctgcctcagttgccttttgattttcttgcgacgagcacttctactctccgacttttttatgtcactttgagcattacagtctgctgcctccgtctcacatttcaactcagtttgattgttcctctctgcttttggctgttccatcgaggtagcggtagtttcaggttgtagtgtttccttctgagtttcaatatcaatagctgacaacatcaagtttttagatccactctgatcctggtattgctgaacattatcctccttgctgtcatctatatgctttccagaatttgccaccttcagcttctttctctttatctcaggtattcctgcaacgccatcatgacacttcctctttgaacatgcaccattattttctatgttgtggctaacggttgcattttcttcaggctggcgatcaccatcttcctcttcttcttggtacttactgccatccttttgatactcaatcgcaagtatttcatgatcaactggaagtggcctcttctctacaacctcaggatcttgaatgcagtgcacatcattgtgccctccaagcttcttgcaggatttttgttttaaccctttattgtattattcctttgt

SEQ ID NO: 15929 - DNA, 200 bp, Setaria italica
  Peptide Sequence Number=SeqID_81903
ggaaacaaacaactttgaatggacaagaaatatctgttcgctcttgtaattcactagcacaagtatacttgtatgtatattattgttttagcatttagatgccatgtggtcacatctctttacagtcttgaataatgcattacagtataaccattcaatgtttgtgcgtaggacagatatacgactagcccacatctctt

SEQ ID NO: 15930 - DNA, 809 bp, Setaria italica
  Peptide Sequence Number=SeqID_81904
gagaattctgctgattatgtttgggttttggaccctatagatggaacgaaaagtttcataactggcaagcctctttttggtacgcttatagcacttctgcacaacgggaagccggttattggtgtaattgatcagccaatcttgcgagaaagatggattggagtggatgggaaacaaacaactttgaatggacaagaaatatctgttcgctcttgtaattcactagcacaagtatacttatatacgactagcccacatctctttgaaggagatgctgaagatgcattcattcgtgtaagagataaggtgaaagtcccactttatggttgtgattgctatgcctatgctcttctggcttctggttttgtggatcttgttgttgaatcgggtttgaagccatacgatttcctctcccttgtacctgtcattgaaggagctggagggtcaataactgattggaggggtggcaagctctattggcctgtcacggcagactcacggcccacaagtttcaacgtggtagcagctggagatgcccgtgtccacaaacaggctcttgatgcgctgcagtggcgctagcctgctgcttatgcaatccttacaatttacaggtgataaaaccaataataagcttcacctgtatgcttgcccccaatccaggccttgctctaataatccacagcatggatgtaaactataaatcaatcctgctgcaccgtggagtgcttggagaaagcttaatctagagcttgtttcgtgttgcttcttcctttcctagttgcctcggcttatcttgaccagcgtgcagc

SEQ ID NO: 15931 - DNA, 1172 bp, Setaria italica
  Peptide Sequence Number=SeqID_81905
taagacaacagagagacaggcagaggcagagcggccgccctaccagtcaaccaccgcttcgttctccttccccacaccgctcgccccacttcccgattcccatcttctccgagctccccgcctcacgtctataaataaggcgccagcggcgcccatcaattcgcgtcaccgcgtaccgagagcgcgaatcattccgcgcgccgcaaaaacctagcccagccaccgcccgccgatcccctcccatggcggccaccaccagccaggcaagcctcctcctccagaagcagctcagagatctagcgaagcacccggtggatgggttctcggctgggctggtcgacgacagcaacgtgttcgagtggcaggtcaccatcatcggcccgcccgacaccctatatgatggagggtacttcaatgctataatgagcttccctcaaaattacccgaacagcccaccatcagtcagatttacatctgaaatgtggcatccgaatgtttatcctgatgggcgggtgtgtatctctattcttcatccacctggtgaagatcccaacggctatgagcttgccagtgagcgttggacacctgtgcatacagttgaaagtatagttctaagcattatttctatgctctctagtccaaatgacgagtctccagcaaatattgaggcagctaaagagtggagggagaagagggaggacttcaagaaaaaggttaggcgcatcgtgcggaaatcacaggaaatgctctgaagaaaatgggtatactgtggaatctaaccccgtgtcagtgtcaggccgcaagattttgctgtcgatctccaaatgttcatctgatgccagcgtcttgtatattctccacttagcgtctgtccattggttgatagtggttttgtctccagaaatgcactgggacgggtcgcgtattctaaagattcgattgtatcgtgtgtcttgggcaaccaatgttgataaacttgaaatgctaaattttatcataactttggtagtgaacctggtataaactgacgccacttatgttagctaactgttgagcgctattcgaacaagctggattttcaataggtagaacatatctatgaaatcgtgcaatagtttgtgtactgaatcagttttggtccagataattagttatgtgagtttagtcaaaaa

SEQ ID NO: 15932 - DNA, 279 bp, Setaria italica
  Peptide Sequence Number=SeqID_81906
cttcttgattatcagtaggccttcaaaatcatggagccctttcagtgctttagtaggagataggaggaaaacatagtagcatgtattacaacaacatcttaaatttaatatcgcatgccaccataggccatccaatttctagcaagtaatacaaaattgaacggtacagaagctgacaagaggatatgcaaaactgtatttactttattgggacttaaatataataccactgaatctgatcattaactttagtctaaatatctctaccaacaaccacag

SEQ ID NO: 15933 - DNA, 2915 bp, Setaria italica
  Peptide Sequence Number=SeqID_81907
taaaaggtaagtaattactaattagtactaagtaactaaacttgtcgttaattattttttattacaacaacatcttaaatttaatatcgcatgccaccataggccatccaatttctagcaagtaatacaaaattgaacggtacagaagctgacaagaggatatgcaaaactgtatttactttattgggacttaaatataataccactgaatctgatcattaactttagtctaaatatctctaccaacaaccacagctgaacagcatgcctaatactttactaataaacaactgatggtagatgacatcgaatttgcctacttaacagctgctgtgccattgatgaactctcggtgtcgcttacggagcatcagcagttgtctgtttccatctcataaaagtctcccaaacatcttggcgagatcccttcaagtttgcaattcacagcacaaaagttgcaagaagagctgccaaaggaattaggcctttgcagctgcctgcttcgcaccaaccgcaaagaactcactgatgacctcaaggggcatgccctttgtctcagggaccttaaggaagacgaagacaaaggagatcatgcagacaactgcgtatatgccaaagacgcctgctagaccaatagcattgagcatcacaggaaggctgtaggtgacaatgatgtctccaatccaaaatgtcaacgcgcagatggcaatgcagaggccgcgaaccctagttggaaaaatctctgcacatagaatgttggggatgggtccaaagcccatgacaaagcagcagaaatagatgatgacactgactgtggagagcgcagcatggggcactgtacccaagtcgacaacattggatataaccaggacaactaaagatgcaatcaagattggaattgtgcctagcagcagaaaccttctaccagaaagatccataagtctcatggctaaaccaatgctaggaagcatcaataaggtagtgagagagctgatcaagatggatgctgatgccgagctgagaccaagattggaaagaagaactgccacaccagcttgttcaagaatttgtggggtgtagtagagaaccccgtttattccagcaaactgttgaaggatctgaattccaacaccgactaacaaggcacgcctcacaccaggttcaaataaatctttccagcttgggcctttggcagctgcctcagatgggtgaatcatggcaggaccagacatacgccgctctgtaagatcctttgagtaaagtgctggctggcttaccaaagcagcagcatgtatgaactcgccaccctcaggaacatcgcctccaccagggagtgaaacaatcgagccccttctcgagccaggaactccctcttggtgcaggtagattcttttgaaaccaccttccttcttaccatcctcaccttctcgctctgaccatttccatgcaagctgccatcccccaccaataccagtgctgctcacaccctccccaccctcccccaggaggcttggccttctcatgctcaaagaacttccacggtgaccatggtgtgcaatgtccttaccttctgcacttgtagtttgcctggacagcaatgggctgtggacgttgtcttcatagtcacctcctgcaccatcagatgcatactcctcgtcgtccctgtgaagattctcttcatcccactgctcatttttggtatgctgatctgtgacgctgaacatacttccaaagtttggaaacagtgtgctcctcatacttcctccagcttgaggcatgttctcatggacactcccaaaaagtgtgacgatcggatccataaggggtacactctggttcaccatgcttccatgacgagatgcgagagaaagcacacttccaagcatgctgggtcccttggaaggtcgagcaatccatgattgtccttcttcaggcccataaagtgtgatatgttccttatcaccatcagcaacatgatcatcagctggctcagtggcagggccgatgatatactcttcaatggaggtgtctcctccaacctccaacccttcaacaagaagggccatttcacttgagacatcgtctttcccacgtaatttttgcaacaccttctttgcctctgccatccgccctttgctgaccagccatcttggggattcaggcagatagaatatcgtcaatccaaagaaaaacaatgaaggtatggcaagcaccccaagcataattctccaatcaggtgatggcaatagcgacatcccaaacaccatgcagtatgacaagaacattcctcctgaaccactgaactgtggcagtgtattcagcaaacctctgatctctggaggggctgtttctgaaatgtacaaaggcacaagcgtgacagccaagccgataccgaatccatccacgagacgtgccagcagcaggacatagacattaggggaccatagcatgatgaggctgctgcagaagtacagaattgaagagaggatgagcatagggcggcggccaatcaagtccgatactggcccggagaatgtggtgatgatagttgcgccaatgagtgacatggccacaatcagcccctccacagtgggctcgctttgcaagttgaattccttctttatgtacaaaacagcacctgcaatggtggcattgtcccacccctgcagcaggttgccgatggaggcggcgattgcgacgagcactgcccccgacatcttggccctccaaacaacggcccctctcaagaagaagaacaagacggccgaaggcaaccaagaagtgatgggaggagcggaggcctccggtccagatcaggggcgacgggcggctctaatgggggccaagagccgctccccagtcgacgtctgtgctccctcctcctccctgccgccggctcgcaatagaataggaggg

SEQ ID NO: 15934 - DNA, 254 bp, Setaria italica
  Peptide Sequence Number=SeqID_81908
aatttcaggtgatctgtttggtagcaacaatttgattttgagtagcttcagaatcttaagtgaggcaaaactttatttggcaaaattggtcaatcttttctttagtagctccatttgtatgtaaggtatacttctcagccctcacgctactgttgcagattggaattagcaggtcatgctgcagatgctttgcttcctttattgttctgcgaacaggagctatatcaggtctgtctcttccgtaagaaaaaaaa

SEQ ID NO: 15935 - DNA, 3047 bp, Setaria italica
  Peptide Sequence Number=SeqID_81909
tctatggggtgattctcccattgctgtctcttgcagacagcttatagtgcagttatgctccttggcaggctctgtgtttccaaatgataatggagatgcacagattaaacaccttattacgatattatctgctgttgttctgtggattgaacctcctgatgtaattgcagcatcaatccgaaatggaggaagtgaaagtgagtttatagatggttgccatgccctgctttcaatggcttctttgactactggctcactttttgacaacctcctaaagtcaataaggcattatggcacaattaatctgctttcagctttgacttcagaagctgtcaagtctgttctggttaaccagagtgaagaggaaacctggggcatagattctcttgatattttgttagagacatggaatgttattctgggggatgtcgatgccgataaaagtcctatcgcagttgatggagcacttgcagcttcaagtttgtttaagatcattgttgagtcacatttgaaggctgctgctgattctgcattcgaggataccgatgacactgaatactttcatgtttctgtttcaaagcgtgatgagcagttggccttgtatgctctgattgcacgtgctgctccagacactactattccatttcttgcacaattgttttcagaacgattcgcacggctaaatcagagaaatggtgaaagtgatcctactcaaacactggaagagctctattggctgctgttggttaccagtcatgtcctaactgattcaggtgaaggagaaacactgcttatacctgacgcattacaggctggattctccaatgtgattgaagcagcacagcatcctgttgttacactctcctggtcaataataaatttttccaggcagtgtctagatccagggattagggcaaaatacttcagtccacgactaatggaggctgtaatttggttcctggccagatgggttgcaacctatttagtaccacttgatgtgagtagagggcaagtaagcagaggagaaattgatagtattggtacaaatggatcccagcattctagaaagctgctaaacagttttgcttgggagaataaccaaggagagctcgttcttgattttgttgttctcatttcaatgttagcacttactacatatcagggagaaaatgagttgcagacactgacatgccagaagctacttgctacggttgttcgccggaaacacacatgtgcttatcttgttcaattggattcatggcgtgatcttacaagagcttttgcaagtggacgctctttgctttcattgagtggacgtttacaaagatctctagcggaaacacttgcctgtgcagcttcctgcatcaaagatcctgaagcatctgcacagtacctgagggatctcatgggaccagttgcagggtgccttgtggaaaatgctagtaggagtgatctgaaatctgtggcacatcaagcagatgttgtctacatggtctgttgtctattggaacgactaagaggagctgcaagagctgctcaacctcgcactcaaaaagttctatttgagatgggtcgtactgtgatgaacccactcttgactcttctggaggtctacaaaaaccagtctacagtcatatacatgatactcaagtttgtggttgactttgttgatggtcaagctgtattcctggatgctaaagaaacatcagctttggtgagcttttgcctgcgactgctccagatatactcctctcataacattgggaaggtaatgctctcactttcttcgagtctgcgtagtgagtcgcaagcagaaaaatataaggatctgcgtgctttgcttcgtcttcttacaaatatatgctcaaaggatttggttggctttctgtctgattgcgatggtgatggttcaccagatattgcagaggttatctatgttggtcttgatattgtgactcccttgatatctttggaccttctgaaataccctaaactcagtcgtgattattttgtgctcatgtcgcacttgttggaagtgtacccggaaaaggttgctcacttaaatagggatgcttttgcaaggattattggaagtcttgactttgggctccgtaatcaggatagcgatgttgttgagaggtgcctggcagcagtaaatgctcttgcttcataccatttcaaagaaaggttgggaggcagaggaggactgaactcacagcttatggaatctgaaggatcaaatggcaaagttcaggaaagcatatcaagtcacttcttgaggcttctcctgcaaatacttctttttgaagatttcagattggaattagcaggtcatgctgcagatgctttgcttcctttattgttctgcgaacaggagctatatcagggactggtccatgaggtgcttgagaaacagcagaatccgaccatgaaatcaaggctggcaactgcgttccataatctcacaagctcaaacaatctctcaagcgcgcttgaccggccaaacaggcagagattcaggaaaaacctcctcaacttcttggtggacatctcaagtttcatgcagatcaagtagatggtatgatgtcatggacccagtgatgtttcgtcagtcagttaaactcggaggtctgtcaccattgtgacaggggagtgcatgtgggcatcgcgctggcggagtgatgagcgaggacactaccatgaggccggctttggtggtttggccagtagatcttgaaggggtagtgtcaccagaaaggatagggagatgtgctagtcttagggtcggcattcattcgtagctgcgtttgctggaaaagatacagacgtccccatccatgcggtcgtcgtgtaaatggttttgttagaagcggtgggagttttgttgcgacaattatattggctcgatccggcagtttcccacaggtaggagagggtagaattggttttagctggtggccacgagatggccggtcggtgtaaattgtgcctgtaatactgctcgaccttaaaacatgccttgtattttcaaaaaaaaaaaaaaaact

SEQ ID NO: 15936 - DNA, 315 bp, Setaria italica
  Peptide Sequence Number=SeqID_81910
ttccacttgccaccgccggcttgtcccctcctcgccccttccagctccttcagacttgttcatccaagagaggaggaggaggactggaggaggcatccgccgccattactctcacctcacctgcttgcgcgtttgactcgtcctcgactcggagtcgaatgatcaaccactgaccgatacgagctccacttcccccatggcctccaacggcggcggcggcggcgtcctccgccacagcaacagcagccgcctctcgcgcatgtcctactccggcgaggacggccgcggcgcccaggccccgccggcgaccgccca

SEQ ID NO: 15937 - DNA, 593 bp, Setaria italica
  Peptide Sequence Number=SeqID_81911
gaatggccgaggcgtgggacgaagttcctgtcggagatagtggccgcgcacaaggagaaggggccggcgttgcagggaggaggacgaggacttcttggacgtcttgctccggctgagggaagaaggcgccgacggactcgagctcacagacgatcgcatcaaatccaccgtcgaggacatgatagccgcggcaactgaaacatcatcacagacgctggaatggaccatggcagagctcgtcgccaacccccgggtgatggccaagctccaggacgagatcgcacgagccgccgccgccgatgagcctgccatcgcggaatcggacttgaacaagatgggatacctgaaggcggtgttcaaggaggtgctccggctccacgcgccggcgccgctccttgtcccgcacgagtcaacggcgcccgcggtcgtgcagggctacgagatcccggccaagacctcgctcttcgtcaacgtgtgggcgatcgggcgggaccccgctgcgtgggacgcgccggatgagttccggccggagcggttcgtcggcggcagcgccccgttggacttcagggggaccactaccagctcatcccgtt

SEQ ID NO: 15938 - DNA, 485 bp, Setaria italica
  Peptide Sequence Number=SeqID_81912
caactcgtgctccaaatccgaaccggcaacagccggacctctctgcctggtcagtgtataagttgcaacgaacagcgatttgtggtggggttttttaatttggaaggaaggtccatgcccccaagctggcctgaaccaagctccgccagtataatcaataggctaggctcggggtaggtggtcaggggccacccatcttgtttcccttttggaccatggattcaccgtgcggagtcgtatgctgtggtagcgtgtatttctcgctgtgggtactgtaggctcaatgttaattgtgttcagttcttgcgtcaatctggctctgatcctttactaggtttgggagagcattagagcatatgattgctcaactacaaactagaataaggttagtactagaaatttagaataagtaaaacgaatactaagtaagaatactttagtaaggggtaagtaacaagaaaacaaataacgtaagaacttaagaa

SEQ ID NO: 15939 - DNA, 1674 bp, Setaria italica
  Peptide Sequence Number=SeqID_81913
aacactgcaagtatgttatcctctatagccgtgtctggactctgagctacattgcttgtgtacaccattcacctagtggagatggatatcctcaaagatctacactcgagcaaacaacaaagtctatttcatgctcccaagacaaaatgtgctccccgagccccagataagccaaactttgctagtcccgaacacacaacacccactatctacacactacagctatgaacctctcctctctttgaactttggaacatgccgaaccgcgcaataacctaatcgtattacacagctaagtaaagttgggaaaaacaggtgccgacttggattggttcttcatttggagctcagcaggctctccaagtacctctccacattgtccaagccacagagttccttcaccacgggcatgatggcaggaacctccagatcgaaatgggaaggtgaagaaggtccagaagcagagcagtggggttccctccttgctgctctgatggcttctcttgtcgcgcagtgcactgaagcggcaagaagcaaaggcggctccccagatgcttttgaagagagcacccgtttcttgtggaatccactgttaagcaacttaacattgaactgttttgggatagtgtccacagttgggatcttatatgtccaagtcccgtcagatataaccaacccatccgagttggtgacatattcctcggtcataaaatagccaattccttgaacgaatgccccttcaacctgccccaagtccacggcagggtttaagctctggccacagtcatatataagatcacttcgcacaatcgtggtggccccagtgagaagatcaatctccacctcactagcagcagctccgtagtttagataagaaccagaaggcccaggaatgtagtattctcgtgctgataagtccacaccagccatttttgccttggaaataagttcatcccatgaaagattgctttgttacctttgaaattgctccttgactaatttcagcctgtcaaccaagatattgcaggcaagacgaacagcttcacagctagattctgatgttgtactccctgtggtccaccctccctgtacattactcaatgtatccgcttgaataactcttattctttccaaaagctcttgacttcgatcagcccacagttgtccaagaccaaacgctgccatctgcttcacttttgtccaaagcccctggcctaactcaatgcctccaacttcaacagcaatagaaccatcattaaggattgacacttttccaggtgtcggtcgagataatactttgtgcacaattggcacaaaagagaggcctcgctttttccatctgttatttttgttgaaagacttgactacttcaagacggtgctggaaattttctgatgcagtcaattgaccacatatagagggaagtgtataacccatgtcatcttcagtgcactcactgtgaaacagagcaaggctctcaattgtgtgaagatttctctgcctaaccaaattagcatcagtggacagtgcggaagcaacatgctcaactatagcttcagcaacataagagccctgaacttccccaggcccacgcatcgcagatttcgttgcagtgtttgttttacagacctttgcttcataagaaaggccaccccagttattattttttcagtg

SEQ ID NO: 15940 - DNA, 568 bp, Setaria italica
  Peptide Sequence Number=SeqID_81914
agttttactttgtcattctgctatgtgctagccttatctagtgtgaaatcaaccttgttcttcgcagatcttaggctctacctacataaatgcgcattgtcaatgcaactaaatattaaaatgtctgtcatgtgctaagcatttgctatgttctgcaggttgcgttcaagacaaaggtcttccatccgaatatcaacatcaatgggagcatctgtcttgatatcttgaaggaacagtggagccctgcactgacagtttctaaggttagtaagttctgctttccatagctttcgtaacctaatatttcaaggcaactgtgttaatcatatggtagtagcctgcccaagaagttggggcaatctagtgttttcaacagattagcccacacccccctgcacgctactaatatgtccaagtacggttctccagttgtgtcattatctcacaatgcatgcatgttttcaggtactactatcaatttgctcccttttgacggacctgatgacccattggttccggagattgctcacatgtacaagactgatcgggtgaagtatgagtctactgc

SEQ ID NO: 15941 - DNA, 429 bp, Setaria italica
  Peptide Sequence Number=SeqID_81915
agacaccagttgcaggtgccgtacgactccaccttcgggtaccgatccgtgcagtatgtgtgctgggagcggacggagcaggcggagcagcggaagagctcgggcaggaggccgcggtcgccgcacatgcagcagacggcggcgcccggcggctgctgcggcgggccaccgctcgcgccggcaacggcgcctggtgaggatgccttgccgctccccatggatcgatgcctcccggcgatctcagatgcacgggtcgagccggcgccgcatgcgatcgatccgacgggatcaaacccaacgctagctggtctgctggtgccgaacaactgccgttgatagctgcagcagctgggttcgtcggcggctgcttgatttctcgtcgctcctcccggagaacgatgatgagacggtggagttggcaaacttgtg

SEQ ID NO: 15942 - DNA, 378 bp, Setaria italica
  misc_feature (364)..(364): n is a, c, g, or t
  Peptide Sequence Number=SeqID_81916
gctgtggctggcacgcagtatgagaagaagctaacatgattgaaaaccacatcctcttctctcttttgcaactgtacataatgatgcatattgtattgcatacaggcttgtaacattgtttctgtaatgtcgtgtgaatgtgtgatacgcaaggacattagtactagaatatttcttcacagggagaggttgctcttgctcgggcgagctgtttgattggattgaggcaacgaaaatcctcatctttccaggcatttttcccctgtggaggtctgtgtaacttgtaaaaggtatggacgtatggtaagactacggaggaatgcaagaggaagcagctctctgatcgaaataaaccatccttttnagtttccttgttta

SEQ ID NO: 15943 - DNA, 1405 bp, Setaria italica
  Peptide Sequence Number=SeqID_81917
cattcagagctagagctcaggaagaaagattaacatgttatttcattcgatccaatgctacttgcaagcaggccaacatgcgatagattcgtcatgcagaaccggtagttacagaacactacacttggccggcggcggcccacttggcaacggataggtcatcactgcctgcatatcctgctgatgatgaactgcaactacaagctaatcacagtcactgcatcgccgtcggctactcggccacatgcgccaccaggctcgccgagtgtggtgccaccggcttgccgcatgcgtcgttgatctcctcctcccggccccggcggcgcccggtggtcagcgtcagtcgtaggcggcgctgaagaagaccttgacgacgccgccggagaggatctggagcacgccggagttgttggacctgccgacgcaccgcggcgacttgaactggctgacgggggcgccgagggagaggtagtggcggagcaccttctggaacgttccccgctgcagcacccggagctccaggggcccgatggcggcggccttcctggacccgacgtagccggggtccgtgaaggcccggtccagctcgtcgcagcagctctgcagcacgtcgccgttggcctccgcgttcagctcccagaacacgacgtagtggcccgggtcccgcgacacgtcggcgtggctgctgtagtcgaccacctccagcttctccgccgccaggatcttcgccgcgctgtcgacggcgagctgcaggtcgtgctcgctgttcttgtcgatgttgatggacagcatcaggttccgccggcacacgaacttgagcttgggcgtcgagttgtagaacccggccaccttcaccacgtcccccagtcggtaccggtacagccctgcgaatgtggtcatgacgacctcgtagtgctcgccgacggtgacctccgtcaggccaacgggctccgcctcggcgaagcaggtgtctgaggcggcggcgccgccgtcgccggccttgagcgggatgaactcgaagtagccgatgttggggagcacggtgaacgtcgcggactccggcggcgtctccggctcgacgttggcgccgacccagccctcggacgcgccgtactcggcggcgacgaggggcagcccgccggcgtagtggcgaagcttcttgacgtagtgctccatggaccccgtcatgatgccgtgcacgtacctggcgttggggaacagcgccgggatcaccccgtaccagttgctgagcgcggcgcaccggcgcgccacctcgtcggcgagcgccgggttgggcgcggggaggagcgcggagacggccctccggacggcggggctcgtgacccgcgttgccgacagcgcgccggcgcggatgtcggcgcagagctcctcccagacgcgctcg

SEQ ID NO: 15944 - DNA, 2706 bp, Setaria italica
  Peptide Sequence Number=SeqID_81918
gtgcgacctgtgaacaatgagaaagatctccaacgtctcgatcaacttcctctgactaatttccgtccagagttcagatctggtctggatgctttcacaaaatttgtgcttgaccgaacaagaccaaaacaacttggagctagtacaatgacaggccccatccttgctggattgacacaatcatttcttgatgccattaatagtggtgctgttcctacaatatcttcatcatggcagagtgtggaggaagcagaatgtcggagggcatatgattctgctgtggacgcttacaattcttcatttgaccagaaaaaacaagttgaagaggattctttgagagaagcacacgaagatgcaatgaggaaggctatcactgcttttaatgcttctgctgtgggtgctgggccagctcgttcaaaatttgaaaagcttcttcacagttctctcaggaaggcctttgaggattacaaaaggaatgcttttctggaggctgatttgcaatgttcaaaccgagtacagaacatggaatcaaaggtgcgggcagcatgtaaccgtcctgatgcaaagttagatgatgtcgtcaggctccttgatggcctgctcacagagtatgagtcaatggcctatggtcctgggaaatggaaaaggctagccacattcctacagcagtgtttggctgggcccgtgctagaccttttcagaaggcagttggagcatatagacgctgaaagaaatgccctaagattgaaatgcaattcgagcgatgataagttggcattgctcaggaagcagcttgaagcgagtgagggccacagagctgaatacttgaggcgctatgaagaagttatcaatgataagcagaaaatttcaaaggattactccgttcgtattactgaacttcaggccaagggtagcaagttggaagagcggtgtatgagcttgtcttcttctcttgaaactgcaaaacgggaatccaatgattggaagagcaagtatgatcacattattttgcagcaaaaggcagatgagagcaagttgaaatctcaaattgcttccctggagtctagggtaagtatcagtgagggcagattatctgcaacacgagaacaggctgagtctgctcaagaggaagcatcagagtggaaacgcaaatatgaagttgctgttagtgaggccaaaacagctctgcagagagcggctgtagcacaggaacgtacaaacaagaaagtgcaagagagggaagatgctttgagggcagaacttgctaaccaactatctgagaaggaagaggaaatttcaagattaagcgctaaagttagccaaaccgaaattcatgctacaagtttgatctcaaggcttgaggccactgaagcaaagttgaagagccatgaatcagattctctggctttgaaggaagagatcagattgttgactgataacctggagtctattagaagtgaagttctttcacgtgagaaggaagtgaggatcctggaacaagaaaagaaccatcttcaggagaagtatttggcggagtgcaaaaagtttgatgagacagacattagatgcaaggaagctgaaagggaggccagacgagcaacggaattggctgacgtagctcgtgcagaagctgctgctgctcaaaaggataagggtgaagctcagaggcttgcaatggagagacttgcactgatagaaagaatggagcggcaggttgaggctctagaaagagacaaggttaagatggtggaagaggttgagaaacttcatcagtcagagaaggatgctgtgtccaaggtcgcattgcttgaaaaaagtgttgatgaacgtgaaaaagagattgatgagatgttgaaacggaataaccagcaaagatccagcacggtccaggtgcttgagagcctgctggcaacagagcgtgaagcttgtgctgaggctaataagagagctgaggctttgtcattgcagttgcaagcaactcaaggcaaacttgacatgcttcaacaagagctgacatcagttcagctcaatgagactgcactcgatagcaagctcaagacctctgcgagacgcttgaggggtgaagctaccgagtctgtccatgatatggatatcgacaatgacaacaatgggaggcgtaggaaacgatcaaaaagcacaacaagcccattcaagaacaatcacacagaggacggtggatctgtgttcattggtgaagatacctacactgggagccagcaagggacagagactgaagactataccaaattcactgtgcagaaactgaagcaggagctcaccaagcacgggtttggtgctcaactgctccagttgaaaaatcctaacaagaaggacatcgtcgccttatacgaaaagcatgttgtcggcaagtagtagttcctcggcaacactcttgagattcgtgcttagactatcctgtagcgttggatgttattgacacgattcagatggaagtgaaacaaagcatgtaacttagttaaaactctgttttgtgtgtttctccaatggtgctgttcattttagcgtgcatcattggcaagcacttgtatcagtttgcccttcacagttaggacgtgtgtttgagaagttcgtcatttcgtacgtggtgctgtaggtgagattgaactatccgaaagttcaaacttgaagaaatgaactgattgaatcttcagagaaacaaaaaaa

SEQ ID NO: 15945 - DNA, 899 bp, Setaria italica
  Peptide Sequence Number=SeqID_81919
gatagcctcacatgactcccacacatgaactgcaatctccagcaccttccgttgtggaacaagtgtcaatatgagaagaaaccagaatcaaattttcctcagcttcaggcatatacttgggaacaactctcaatagcacatgctttaaatctgaatacaagagagtttttcccttgaaaagacctttagatagacgatttgcgccaatatctgtgtgaaacagctccaattgaacatcaacctcccaatgagatgtcttctttattttctctgctactgcatatacatactggacagcaagatcgagtgagtctgaaccaactggatgaggacccaagcttgtaagatacttcacatgttcaagcgcagaagcttccgagaaacccctcttgccagcctgcttggcatctagcggcaaaggaaggtttccaaactggatttgataaacagaccaggatccatgaaggaatactatcaacaatcccagcaacaaataagcacccctcctgtgcttgcggctctcttcatttgaatcaactgcttgatcaactttaggattctctcggtttgacatagaagagccttgccctcgaggtattctgctcatcttgtcgacggtgctctcctcgcggtggtccgggcccaggactgaggcggcggcgggaagacggctcgggaggggaacgaacgccgaggaactggagaggaggaagacgacctgcgggagtacgatttccgcgaggcggcgtgcttcactttggccggcgaggccccctaaggaaggagggcttgctgagagggagactgttcggcagcgagggttccgtgatgctgtttcgtttggggtcgtcgactcgtcgtccctcgcaccgtccgcgaggatggaggctaagatgaag

SEQ ID NO: 15946 - DNA, 462 bp, Setaria italica
  Peptide Sequence Number=SeqID_81920
ttgcaataacatcagtctccatgaactgcaaagcttcaaccatgccaaggaaaccatcatcgcaattcgtatccctcatgtcaacccgtaacattgttccatttagaactgtcggatcagagttgatatcctccaaggccgcacggatggcaaccgctgaaacacctccagtggtggagttaaaccgaagaatagaaccgatactcacaactgaaggccttgcagctaagctattgtggatcccattagggaagaggaacagggagagaagcaacaacatgagaaacactatcttcattttggctcaaattgttcaaaggttgctatcaatgagtttgaaaagtgggaatcgggttggctgcggtgctcccccggaagaagaaatcttggtcgtcgtctccgcgtcgggaccctgctctgcttgacttctcgtctcctcctcaggaccccaggaccgggcgg

SEQ ID NO: 15947 - DNA, 348 bp, Setaria italica
  Peptide Sequence Number=SeqID_81921
gcagcaagctccatccaagctcaatcaccctccgcatctggcattgtaaaagctcaacaagacagcggccacattcttgcaccctagcctgcagaggtcgatccacatggcaatggccaaatccatcctcgccgtcgtggccgtggccgccgctctggtggtgcagctcgccgccgcggcggaccacccggtgggaggcaacggcgcgtgggacgccagcggcaccagctacaacgcctggtccgccaaccagaagttcgtccagggcgacaccatgtgtaagccaatacattattccttcccgagtacagcactactcatctgtgatcattgttcctgcccttcctc

SEQ ID NO: 15948 - DNA, 251 bp, Setaria italica
  Peptide Sequence Number=SeqID_81922
agacgttgttgtagtaccccaggtcgaaggtgctgggcgtcgtggggtcgagcggctgcacggtggcgacgttgcccggcttgcacttcgccgtgaggttcttggcgtagtcggcgtcgacaccatgtgtaagccaatacattattccttcccgagtacagcactactcatctgtgatcatgttcctcaacgttgcccggcttgcactactcacggtgaagctaatggtgattggagctgcaggtgttgct

SEQ ID NO: 15949 - DNA, 622 bp, Setaria italica
  Peptide Sequence Number=SeqID_81923
cagccccagctagcaacacctgcagcaccaatcaccattagctttgcaattgcagagctcaattcagctgcgcaacgcctagcaacatccgcaagaagaagcagagctagagatggccatggctagcagagccatcctcgccgtcgcggccgtggccgccctggcggtgcagctcgccgcggcggtggaccatccggtgggaggcagcggcgcctgggacgccagcggcaccaactacaacgcctgggccgcaaagcagcccatcaagcagggcgacaccatgtcgttccagtactcggcgtcgcacgacgtcacggaggtgaccaaggccgactacgacacctgctccggcgccaaccccatcaagtcctacaccggcggcgccaccaccatcaagctcaccaccccgggcaagcgctacttcatctgcagcgtcaccggccactgctccgccggcatgaagctcgaggtcaccgtcgccgccgccgcgcccgcgccagcaggcaagagcaagccccgccaccagaggagcgtcgccccgaccccggccccggcaatggcgccggagccttcgtccaccgaggagctccccaacgtgtcctcgcccaccgcggcgccggcg

SEQ ID NO: 15950 - DNA, 1691 bp, Setaria italica
  Peptide Sequence Number=SeqID_81924
gtttttttttttttttttttttaaattttttataattcatgaaccacttcttttcaccgaaccctgctggttacaatgttacaccatccacgcaacactcaatatctacaaatcactttttaaacatatctgtgaacctatcataaccacagtcaggtaatgagtaactgcagccgttgatcaattcgttccatggagaatcaatactggaaggcaaatccaaaagcttccttgcattggagtataaggtcagtgaagccgaagcgttcactaggcggtcagagggccaaggaaggatgcaagttcccagccaccagcctccatgagcccctcttccaagaacaggagagatcgcgatgctcgtcaaatcagcaatgtaatttacagttctgaaaacactgtggttcctcctttgttcctctctacaacctataaatacttcggtttgggattaatctgctattgactcgtttcatttggtacagtaggcaggctcttcctaaatgcgtgcttcctgcagcgctggaaaattccatcgtacagcaaatcgaactgcactccagctctttcccgattcacaatgaatagaatgtggtcagcttcaataatcttgtaataccatatcccaggttgcaaaggatggcagtcagaatcgtccactacaaaacggtgtggatgctctataggaatgcgtgggtaagtcatagagatcgtgttcaaagccccatcattgtcttcccaatcttcatccctgtatcctttgtagggcagaggagcattctgagggtgccgccacatacacatctgaaggactctgagaaagagcatgggatggactccaagaacacttgaaggcactgtaattccaaatagctttcttgttttctttgtagcataactgaagtagaatgtattgggaaatgtcctcagactagagttaagctttatagatccctggattgtgaggtcaggtaaaatccaatctccgctggcaaatgggccagtgcgccccagcagcagatcaattaaacctgaaaaccctactttcctccgtgacatctcatagtggtcaaaaccaaaattgtaataattcttcagccaaggaatgtccagccagtcgtagacaataactccaagccggcagagctgaagaagacagatagatctcataaacctcccatcttcaaccagcatgccgtcatagtaagttctcgttgtcccattaagtgcgccagacaaggaagtaaggcttagaatccagtcttcagaagtatcatgacctgggaaagccttgtcggctagcatctgatgcagcaccctcacaacctgcgcgccggccgagtgcccaacaaagtgcaccgggttctggtcatcccacacaggatagtgccctgtgtgatagattctcccgaacctcgtgtggccgcaagccttgctgtggtcctcgccgtagtccacctgcccgcccttgaggtagtagaacagctcgcacgccctgtcatggatgccggtgagcgaccccaaatccggcacgagcacgcggtcgtccttcttctcggcgccggcaaagtaggagagccccccgagcctccccttgccgaagccgaagattgccgttggacgaggacgatgggcggcggcgagccgtcgagcacgacgggcccggcgcccctgcgctcgtcgcgctcccc

SEQ ID NO: 15951 - DNA, 276 bp, Setaria italica
  Peptide Sequence Number=SeqID_81925
ccgtcctctcggccttctccgcgcgcgaactcttccgccgccccgcctgctgctcctcctcggccgccgccgggcagtgcgcgcgtctcgctctagggtgaaacggccgatcacaggggaacgcagttggcatgggaaggaaaagcagctagcgagagtgtcacgcgttggcttctttttgtgcccaagatttgcttgtaaggctaagattagaattgcttgaccaggatctgacgtctcgatcgacttgatcaagtttacatacgagaaatgaag

SEQ ID NO: 15952 - DNA, 561 bp, Setaria italica
  Peptide Sequence Number=SeqID_81926
tttttttctaacataactagcgtaatctttgccatacgcaaaaacaatttgattccgtcttgccgtgataaccgtttaagactacatgtctgtcacggaaacacaaaaaatcaattatcaagctcataagagaatacaagcacaagttcgtcaacgaagcaggaaaccatggagcttcttcagggcattcaagttcccgccatatatggataatggactgagaccggaggaggacactgtcgcaatcagccagtcctcttgatgatgtgcaccccgctctctgtatcaaccacgtcgcttatctcccccaccttcagagcaaacgcagccttctcgaaagccttttgcatcttacccctcccaaatgaaccgaggtcaccgccgcgcttggccgagttgcagtcggagttctcggcggcgatgtcctcgaacttgcggtccccggagacgatctgttcgcggagcgcgcgcgcgaggtcggccgcgtcgtcgcgggtcgtggcggagatggcgacgccctcggggtccctccacgaggccttgcggcgggagccctcgtgc

SEQ ID NO: 15953 - DNA, 449 bp, Setaria italica
  Peptide Sequence Number=SeqID_81927
taccttcttgacttggattgggctgataggtcatcatcttcaaaagtacgtccgcttgatgatggcacatgaaggaaaaatactccagcaggaaatctttgcctccttgtcacccatagagttaactcagcatatggagtagactggattacagcgattacaatttccagcatcacgcacacccagataaccgttgttgtcaagatagagaagaatacatagaatacagaagttgtaggtataagaagtaggactggtgtaaatagcaaggaaccaaccacatgctgttcaactgtgtagtcatagctatctaacctctgcctaagaggattccatttgcgccctctgttatggcataagcaaatgattagcaaacttacgagataagtatgaaaaaatctgatggagaaacaagtatttcagtatctaagttgctattgtaacaatat

SEQ ID NO: 15954 - DNA, 1669 bp, Setaria italica
  Peptide Sequence Number=SeqID_81928
cctttttttgaaaatgacaacctaagcttcatataaagataaaaaatcagtgccttgctgtaaaacgttattacatttttgctatgcaagtgttgcataaaagatgggacaccaaaacttggccatgtatttctacagatctaggtacaggatctaaatcatgctgctgagttaggcaataaaaacgggaatctgtcactgggtcaggcaattagtgcaaaactcttcattccatcacctcttaggtgcacaagaaaggacagaatcacggcaatgcatccagtattctgtaataccaatgttcatccaaggaaatgaaggagacggctgcagatgcagtgatgaaggcaccctttcaccactaaggatcccatatgccaattgtttgcagaaggagaaaccagtcctgttgaaaaccctctcataatttgatccgattacttgaacaagagtggcatagttgcaatcaagttctgaaactaatgattcggattgttcatcaacagtatcctttgttttcctttcattgaaacctctgactggatgggctgataggtcatcatcttcaaaagtacgtccgcttgatgatggcacatgaaggaaaaatactccagcaggaaatctttgcctccttgtcacccatagagttaactcagcatatggagtagactggattacagcgattacaatttccagcatcacgcacacccagataaccgttgttgtcaagatagagaagaatacatagaatacagaagttgtaggtataagaagtaggactggtgtaaatagcaaggaaccaaccacatgctgttcaactgtgtagtcatagctatctaacctctgcctaagaggattccatttgcgccctctgaaaagacgccacaaggatgcaaccgtctgaatctgtcttgaatatattgatgatattaaccagtgaagcatggtaacatgcaacgtagcaagctggataatgtcaataaagaatgaaactggagctgtcagacctaaaataattccagaaagtgcaatgcctcgaattatatgcctcaggtagcctcccacgaagaaccaaagggtagagtaaatttgaactgcattcagagaaatcatgcctaaaagctctgctaactctgtattcagcttaaagccagctggaacacccatcagccacacacaaccagatcgcaagattgcgtctgtcatgtggtgaacaagatcaatagtacaactacaaatagtctctgtatgtaataaaaatgctgctccaaggacaaaacccatcaggagatccacagcgatacttgaccacaaagcatgcttccgaattgcagctttgtgtgcatattcaacgttcacagtggagcttagggaggtatcccggaggacaattggccagtgaagaatttgacaactgcgaagatgaatgttattccacgaatgtttgaaaaccttgtgtaacatcaagtactggaacatatggcttaaacattttcggaacattagaatcataatgtagaggatagttgatgctgaagccaaaaatattcccatgcagtgccatgtcacttgaactaagacatcatatacagatgcaaaggcgaaataagccccagagctgctggttgagcattcctgagtaactggcagtctagctgcatttgaacaa

SEQ ID NO: 15955 - DNA, 886 bp, Setaria italica
  Peptide Sequence Number=SeqID_81929
accttcaatccctttctcccggacgatgaccatggccagcaccacctctcctctcctcgtcctgctctctgccatggcggtggtggcgctcgtcgcagcaccagtctcgtcggcggacctgccatccaccttcgcggacatcgcgtccaagatccccaacccgtggtcggccttcaggaacctcaccggctgccacttcggcgaggagcagcagggcgtcgccaagctcaaggactacctcgcccacttcggctacctcccggagtcttccgggttcaccgacatcttcgacgccgacctggaggaggccatcaaggtgtaccagcgcaacttcggcctcaacatcaccggcgtgatggacgcgaccacggtggcccagatgatggcgccgcggtgcggcgtcgccgacgtcatcaacggcacctccaccatgggcgcctcatcccacgctcacggccggaacctctactcctacttcccgggttccccgtcgtggccgcgctccaagaagagactcacgtacgccattaccgacaccgccgcgacgaccatcgaccgggcgacgctgagccgggtgttcgcgcgggccttcgcgcggtggtcggcggcgacgacgctcaacttcacggagaccgcgtcggcgcgggacgccgacatcaccatcgggttccacgcgggggaccacggcgacggcgaggcgttcgacgggccgctcggcacgctggcgcacgccttctcgccgacggacgggcggttccacctggacgccgccgaggcgtgggtggccgccggcgacgtgtcgcgggcgtcctcggacgtggcctatgacctcgagtccgtggccgtgcacgagatcgggcacctcctcgggctcggccactcgtcg

SEQ ID NO: 15956 - DNA, 846 bp, Setaria italica
  Peptide Sequence Number=SeqID_81930
tctaaaagtcttagtgaaaactttttgttgccatggagtgttcaacctttggtcagaaagatgaataaggcttctttgatcagtgtaaatggtgaattcagcatgctggaggtaggatctccactgttctacagccaatagaattgccaaatattccttctcataagtagagagacctgaagttttggggccaagtggtttactaatgaatgccaatggatgaccattttgagttaacacagcaccaatcccagtagcacaggcatctgtttccacacaaaattgttttgagacatcaggtgtagctaaaacaggtgctgaacttagagcagatttgagggcatcaaaggcaggctgatggtctgaagtccacataaagataatatgctttttgagcagggcagtcaggggtttggcaataactgcaaagtgtttgacaaatttcctatagtaaccagcaaggcctaggaagctgcgaagttctttagcattaactggtggagaccaagaggtaatggtggaaattttgttgctgtctatagaaataccttcaaagctgacaatgtggcccaggtatgagatttgcctttgaccaggtatgagatttgcctttgagcaaatgagtatttagacagcttaacttgccacttatcagttgccaatagttggaggactgctcttaggtgtaacagatgttcttcaaaagtcttgctgtaaactaggatgtcatcaaagaatactagcacacattttctgagaagaggctcgagggtggaattcatggcaccctggaaaagagacaggaactccacacaatctaaaggacatgaccaagaattcaaaatg

SEQ ID NO: 15957 - DNA, 754 bp, Setaria italica
  Peptide Sequence Number=SeqID_81931
cgtttaacactttacatccgccaccttatgcaaagtgattgactgattgtgaggcaatccgagaggcatgtgtttgcttggactttagtcattctgaggttgggcttcttggtaagagcccagctgtttgatttcgccattcctccatcgtcgtctttgctttgcaatttgcacttgagatttgccccccggaccgtcacagctagaggccttgttgaatgctgattcttcaagttttggcctcgaatttgttgctgaatcgctcagttcatggaggcttatcagccggagcatcatcgtcaggcccacatatactgggaccgctgtggccgcttctcaatccaatcccatgccgtcgccccgccgctctccacggcatctcgcgcacctagtccgccatgaattcgcgcgggcgcacgatagccaccgtgggaccagaagctctcgagaaaaccgagcacgcgcgtgacttcgcagacgacgacacggcgactcgcccgtctcagcccaacgccggtcaaagcgacgattcgccgagcgacaaaccaatcgattctcatacgctagctcgtgcatccggatcacgtcaaccccggcggtcgccagcacggacagaccaaccaaagctcgtcaaccaagtcaagcaccaatgatacacatcgatccgcaagagcacggcagcagcggctgctacgccgctccttcaagttccacgcccgatacctccacaaatcatgtggagttccagcaaagt

SEQ ID NO: 15958 - DNA, 1574 bp, Setaria italica
  Peptide Sequence Number=SeqID_81932
taccgtagaccctggcccgagagcctccacaagatctggcatgacaacatgccttatggtaagattgctgaaagaaaaggtcatcaagggtggatgaagcatgaaggttcacactttatttttcctggtggtgggactatgttccctgatggagctgaacaatacattgaaaagcttagccagtatgttccgctgaaaactggtgtcctcaggacaggtcttgatatgggatgtggggttgccagctttggagggtttttgcttaaggagaatatcatgacactttcatttgcaccaagagattcacataaatctcaaatacaatttgctttggagagaggaattccagcatttcttttgatgttgggcacacgtcgtcttccatttccagcacagtcctttgattttgtccattgctcccggtgtttgataccttttaccgcctataatggatcttatttgattgaagttgaccgtctacttagaccagggggttacctaatcatatcaggtccccctgtgaaatggaagaagcaggagaaggaatgggatgaacttcaagtaatggcaggagctttgtgctacaaattgatcacggtagatggtaatactgccatttggaagaaacctgctgaggcttcatgccttcctaaccaaaatgaatttggtcttgatctgtgtagtactgatgatgatccagacgaagcatggtacttcaagttgaagaaatgtgttagtaaagtttctatggtggaagaaatagctataggttccattcaaaggtggccagataggctgtctaaaccttctgctagggcatcacttatcaacaatggagcaaacttgtttggagtagatagtcagaagtgggtgaggagagtatcatattataagaaatcacttggtgtcaagcttgggaccacacacatacgcaatgtcatggatatgaatgcattcttaggaggattcgcagctgctatagtgtctgatcctgtatgggttatgaatgttgttcctgctcggaaaccattgacacttggagttatctatgataggggtcttattggggtttatcacgactggtgtgaaccattctcaacatatcctcgaacttatgatctcattcatgctgatgcaatcgactccttgataagcgatccaatttcaggcactagcagatgcgatctgtttgatgtcatgttggagatggaccgcatactgcgcccagaaggaattgctgttatacggggctccccagatctaatagccaaggcagcacaggttgctcagtcaattcggtggaatgcccaggtacgtgacagtgagccagaatcaggtaatactgagaaaatacttgtggctacgaaaacattttggaagctaccactaacatcacaatagggtaactccattcatgtatgaaccccttttctcttgcactcccttaattttgtgttttttggggggttgggctggagggatataacaatatcaggctaacggggactgctggaatagtttaatcaaggtggtcattcttttcttaattctttttgttttgttccattagttga

SEQ ID NO: 15959 - DNA, 589 bp, Setaria italica
  Peptide Sequence Number=SeqID_81933
ttcttttgatggtgaagttggacgtgacactgtggtcgatttgcaaactttctcaacagctgcattatttccacgtctgcaattccgttttgattttgtgcttcctttttgctcattgggacttatcaagcgatgaaatgtatcgatcaggttttctttggttggttttcttaacatcttttgacgatgacttactccaccatggcggcatattgaatatgaaaatgttgtgctgtatctgaccagctacttgttgaaatgctatccaaactgatcaattaccatattatggccatcagatggaaggcatatgcatggaactttcatgtgacctcgtatagcaccatccactcacacaatgcactggcaatgaacaatacttggagcagtccgatcaatggaaaacaaatatgagcaccttctctgcctcaaaggcagggcgcagctgcggcgagatccgaccgccggagcagaagccggagggaatccggaggcggtgccgcggggctcgggcagcaaaaggagcggagcggagtggaagccgggacgcggaaagggatggaagcccggaaaaaaaaaacggaaaaag

SEQ ID NO: 15960 - DNA, 1056 bp, Setaria italica
  Peptide Sequence Number=SeqID_81934
aatccacttggattacgccaactgttgccaccatcactgcactcaggcttgggtatggtggatggtgctgtgctttctcaagcaagaatacagggagtccacccttgccattaaatatttatcatctgaggctggcagaccctgtgtatcgctgaaaaggtactgaacaaggccttccagcacttccttggattgttcctcattattggccaaaggagggtcaccagcactcctttgctcacctatgcagtcacctagatggttaaccaaatcttccacagatatggatgctctcagtccaggccctttcagctgattccattgattgcaattctttggtccttgaggaacatcacggccctggaaatctgtagcaccagatcctatgtttattggctgtccgacgttcttggacagtgaggaaatcacacaaggtgaggcaggatcattgaacttgggcaaagatgcttctcgttcatacttcaaaccattaaaaccaaggcagtcctttgaatcatttggatcttcaaaaatagagcgcttaggttcaaaatctggagtttccaatatggcatctggctgttggctcaattcatatagccgctgatcacactgagtgagcttttcaaaattcttgcttaacaaacttgagtggcactgcaaggtatgtttcctgtttaagcttgcctgcccatcagtgaagtctgatgcagcctgccacagtgtatgttttcttggctgaggatcagtctctttgaagaaaaggggtggtcgagccaacaccagatctaaggtcgcttcttgttcattctctgggtaggttgccttcagagcagtaatatctgaccactgaatttctattttactcttgagaccatcatgcaggacctcccagacaagcttatgctttgcaaagtagcactttgccaccaaatcaccttcatagcgtgaaatgtactcccaattaccaattttcaaaacatttgcatgaaagtttgaagctttcatccgttcaccagctgtgggagccccagatttgacatcttacaatactta

SEQ ID NO: 15961 - DNA, 425 bp, Setaria italica
  Peptide Sequence Number=SeqID_81935
tttcttcaatgtgtgcggtttcttcagaagtatccacaatacaatagaagaaattctttgttcgacacagtcgtagagaaatttggaactggtgatataggaaaaagatatatgccagaattgttatctcatacatatcttgtatctttgatctgttatcatcttaacaaggatttatttgaaatgaatcccctgatgaaacaattgtatgcaaggatgatgattggttagatgagccaaaggagtacttgcatgcttgcattttctgatctgcaacattcatgaattgtattacatgcttcatctggtagttaacaacatgaaatcatcaatttatggagtcacctgatgagcgtgttcaggacctttattaccatttgtttatctggatggcctttgttctatttgtttctctagaaacctgt

SEQ ID NO: 15962 - DNA, 1251 bp, Setaria italica
  misc_feature (1)..(36): n is a, c, g, or t
  Peptide Sequence Number=SeqID_81936
nnnnnnnnnnnnnnnnnnnnnnnnnnnnnnnnnnnnaaaaaagttggaatccaaattagataccatcccaaataaaaattgctctttttgcagagctatcggataccatctctataatctgctacagaggttccactcaatgctcaagaaactgcggagattttgagattaacccatgtcttaatattattacttcccacaaatatgaaaaacagtaaaagaagtgcataacaccagatagataaaaggtaaatacaaaacagacatgaagtgcctaatatagagaagactaattcagatgatggctatcctctcttccttgcagctcagtccccttcactcagattggcatgcctttgggtacaatctggtcctttatccacatgtaaatgggcaccagaacatagtatgcagcacatatcgttcccatgaggaagcgaaagaggaaggtgatgggattcaccggcttgctgacatcctcagccttcggaccaagctccaaaggagagtccccgcgttctctcttcacacctgtgacagagcatcccatgatcaggccatgcctccggacaccacgataccactttggtccaattctcttcagcttgacatccttgaacccagccttcttgaaccactcgatgtactcttcttccttggggaagagcatccacatgtcggcgaagaagcgggacagccagaaggttgggtacacggggccaatcacgcaagctgtcccacccatcctcaggaccctgtacgcttccttgattcctctctgcggatcaggccagtactcaatgctgccggcggagatgtatcggtcgaaggtgtcggtggggaagggcaggtcctcggcgtcgccctccatgatggtgacccccttgagcgcctccttctgcctggccttctcgagctggtgcggggactggtcgagcagcgtgacgttctccgggttgacgtgcttgacgatcccgagcgtggtgaagcccgtgccgccgccgacgtcgacgaccttgaggtagcggctgtagaggtcggcgggctcgagcgcgtcgtcgcgcatgtcctcggtccagtgccccgggttgatgacgtggtcgtagacgatggagaggaagcggtagaaccagaaggcctccttcttgtgctggatgaaccgcggcgccgtcacggggcgcgccgccgacgaggaagacgccgcgcaccgcagcctggcgccggccgcgacggggctccgcctggcgaggg

SEQ ID NO: 15963 - DNA, 234 bp, Setaria italica
  Peptide Sequence Number=SeqID_81937
ttaaacctgatcatcttaacatctccccttgatgatcatgatgcgacttgtaagagcatgtaggaacctgcagatggagtacctggacctgtacctgatccactggccgatctgcatcaagcccgtgccgccatcgttcccggccaagaaggaggacgccatgccgttcgactccgagggcgtgtggctggcgatggaggagtgccaccggctcgggctcgccaaggcgatcgg

SEQ ID NO: 15964 - DNA, 419 bp, Setaria italica
  Peptide Sequence Number=SeqID_81938
ctttggagtctgtcagcatcattttttcacaaagaactctccgtcctactagaagcggaaccaacacgaatacgagcagatccgcgtcacctgtccgcgaatttgcgacacataaagcggccagcacgggctcacgccgcgcgcgcccctgttctgtccgcacctagacgtagtcattgcagagcgacacatctgaccttcagatcaggcgcaccagctagcatggcatccacggcggcggcggcggcggcggcggcgatggtgccgaaggtggccctgcggtcgggcaacgcgacgccgatgccggcggtcggcatgggcacggcgtcgttccccctggtgcccgaggccaccaagaacgccgtgctggcggccatcgaggtgggctaccgccacttcgacaccgcctccatgtacgg

SEQ ID NO: 15965 - DNA, 660 bp, Setaria italica
  misc_feature (17)..(17): n is a, c, g, or t
  misc_feature (28)..(28): n is a, c, g, or t
  misc_feature (72)..(72): n is a, c, g, or t
  misc_feature (556)..(556): n is a, c, g, or t
  misc_feature (648)..(648): n is a, c, g, or t
  Peptide Sequence Number=SeqID_81939
aaatagagtatgttttntaataaataanaaaggattctacttacagtgcatgagtatagtatcttaatctcngtttttgctctcgctctgtgcgtacgtgcagcctacgtgaatcaaagctctgttatcctatcctatcctatgtaatatcgaacttatttgtaagcataaacttctatctccttagatgaatcagtagtactcctgctttatttcaaaaaaaaagctctgttatctaggcttctagctccaaaccccttttgatgctgatagtctgatacacatccattattctcttccttcaggtggcgttgcgatggatatatgagcagggagtgacgtccatcgtcaagagctacaacaaggagaggctcaagcaaaacctggagatcttcgactgggagctgaccgacgaagaccagctcaagatcagccagatcccacagaagaagatttttgaggccagtgacatgttctcgcaagagggtgaattcaggtctgttgatccagcggacctggacatcgtagaggaatagggactgcgaaatgtacccgntggctccggtagacatttcgtgcatttgaataagcaggcttgcgttcaccgtttccggcttgctcgtgttgatgctgtaattcctttttaangtatgcgatatg

SEQ ID NO: 15966 - DNA, 490 bp, Setaria italica
  misc_feature (476)..(476): n is a, c, g, or t
  Peptide Sequence Number=SeqID_81940
tgagcagggagtgacgtccatcgccaagagctacaacatggagaggctcaagcaaaacctagagactttcgactgggagctgactgacgaggaccggctcaagatcagccaaatcccgcagaagaaggttgtaaagggtacagacttgttctcgcgagagggcgaattcacttcagttgatgcagcagatctggacgttgaagagtaggggcactgaaaaatgccccgcccggcatcactttgtttttttctcgaacgtgtaggagaactacgcatcataaactcaggtgtcactattagcatgtacgtatatagtgcatttgaataaggtagttccatcgtttgtactgctgcgtgtcggtgttatttcccatcttcactcatttcagtaagtattgtagccaccatttccagacttcgttttgatataaaaatatgaattcattgtaatttcatataaaaaaaaaaaaaaaaanaaaaaaaaaaaaaa

SEQ ID NO: 15967 - DNA, 1448 bp, Setaria italica
  Peptide Sequence Number=SeqID_81941
cgacagtgcttgatcacctactacgagaaagcgaaagtgtaaccaagtgcagcaagctcaagaccatctaatacttaaattatcacaccaagtacttgtggactctgctgctttatggagatgcgcatcggcatggcgtctaagggaacggcgacggtggcggcggcggtgccggaggtggcgctgcggtcgggcaacgcgaggccgatgccggcggtcggcatgggcacggcggcattccccctggtgcccgaggccaccaagaacgccgtgctggctgccatcgaggtgggctaccgccacttcgacaccgcctccatgtacggcacagagaagccgctcggcgaggccgtggcggaggcggtgcggcgcgggctcctccagtcccgggaggagctgttcgtcacctccaagctgtggtgcacgcagaaccacccggacctcgtgctcccctccctccgggagaccctgaagaacctgcagatggagtacctggacctgtacctgatccactggccgatctgcatcaagcccgtgccgccatcgttcccggccaagaaggaggacgccatgccgttcgacttcgagggcgtgtggctggcgatggaggagtgccaccggctcgggctcgccaaggcgatcggcgtgagcaacttcaccaccaagcacctcgacaaggtcctggccgccgccacgatccctcccgccgtgaaccaggtggagttgaacccggcgtggcagcagcgcacgctgagggcctactgcgccgagaagggcatccacgtcgcggcctactcgccgctgggaggtcagaactgggacgggacggggaggaacgccgtgctggagtccgatgcgctcgccgggattgcgaaagcgagaggtaaaaccgtcgcgcaggtggcgttgcgatggatatatgagcagggagtgacgtccatcgtcaagagctacaacaaggagaggctcaagcaaaacctggagatcttcgactgggagctgaccgacgaagaccagctcaagatcagccagatcccacagaagaagatttttgaggccagtgacatgttctcgcaagagggtgaattcaggtctgttgatccagcggacctggacatcgtagaggaatagggactgcgaaatgtacccgctggctccggtagacatttcgtgcatttgaataagcaggcttgcgttcaccgtttccggtcttgctcgtgttgatgctgtaattcccttttttaatgatgcgatatgcaagttttatctcaataaagattgcaactgctcaccattttcagaggttgccatattcgaatttttcttggttgtctgttttacccctcttcccctggcagcagggtccaaggtgtcggtatggtttgtaatagatcgatggagattagaaatattgtcaaatttggttgtcaaaaaattagtacaaaaaa

SEQ ID NO: 15968 - DNA, 550 bp, Setaria italica
  misc_feature (1)..(78): n is a, c, g, or t
  Peptide Sequence Number=SeqID_81942
nnnnnnnnnnnnnnnnnnnnnnnnnnnnnnnnnnnnnnnnnnnnnnnnnnnnnnnnnnnnnnnnnnnnnnnnnnnnnncttaacaagtcaccgtttcctgatatacttttattagcaaataaatggaacttcaactcaccattaattgaatacttgtactatccattctactacttgcaccgcataaaatacttagcaaaggagtagatatgctctacctcccgccgctctttattaattaaatgtacctctgatacgatccgtacttaatgaatacgtgtatatttatatatatatgcctctttctcggctttgacaagaatagaatagcttatttcacccatccattcaggaggtggctgatcagatcagagcctggagagcctgagctgctgcttgagcaaggggcggaggtactcgtggtacccgtccggcaccaccgtctcgttcagagggtccttccacgcctcctcgtacagtgaccgggtaacaacaaattaacccgtaacgtaaaccgaaccccaaagaacaaaccgaaataacccaaaga

SEQ ID NO: 15969 - DNA, 947 bp, Setaria italica
  Peptide Sequence Number=SeqID_81943
agaacttgagtctcagggccaccatcttgagagccaaactgctttcgaacggcgctgtatcgtacagcaatgcaaacagcacgggacaaagccttagaagcatctgcaacaattgattcgttggtgattggctcaagtggctgtacacggatgtcactcagaaaccagcagtacaggcatgagcttcttgcagtgttgagtagtctttagcttccagtttctgagtgacatccgtgtacagccacctgagccaatcaacccaccgaatctaaatgcataagctgaagccagcaatggaaagagtctgctttgttgagtcttgtaattaaggacctgagtctcagggccaccatcttgagagccaaactgctttcggattgcgctgtatcgtacagcaatgcaaacagcacgggataaagccttagaagcatccgcgacaattgattgacgaacaaaaccattgtcccataaagcagctgctttggaacaccttgtacagtggtaaccacttctgctgctgctcctcagtcccttgccctttgttagcagggacgaacatgcctgatggaataaagaatggataggcatacccaatgcagatcaacataaccaggctggtcgacatataacctcaacaaatttgcttcctcttctgtaagacgtagctcgacaatgcgcttccacgcatgggctgcctttcttaaagtgtccttgaacaggtccttcctggagagcatggtcctgttatccttgcggaagacagggtcggatgcgacgaggcgtgccatgcggtcctcgacgtcgacggcgtggcgcgagccggcccatgcgaccttcatctcttcgacgtcgaagcgcgcggcggccctctcggcggcgaggtggtccactgcgtccatggccatctatctctgcggggcagctcctcgactccacccaactactca

SEQ ID NO: 15970 - DNA, 797 bp, Setaria italica
  misc_feature (145)..(145): n is a, c, g, or t
  Peptide Sequence Number=SeqID_81944
agattaaggaaaatatccagcccacgaatgaatgactgccgccaaaaatacaccaagaagacagaaactcagcacttagaccgttctagcagtactacccttgagactcacagttcacttcaaaaacaagactactaacataacnccttaacactaatcaggatgaacatcctgctactgaagaattcttctttcgaaattccaaccaaacttgttgaagtactccaaagcagtgccttcaagcctgctgtagcagttcttcttcatttcttctaccgcagatacatagtaaccctattgcattcaatctctaccaattcaaggcacttgatcgctctttattaattgatgaacgtattatattataccacttgacttgcgtgtctaaacacttacaagaatcgctaccagcttatatttctcactcgattcattcatcagagcctggaggagaggttgagctgctgcttgagcaatgggcggaggtactcgtggtacccctccggcaccaccgtctcgttcagagggtccttccacgcctcctcgtacagggccgggtacacgttcccgtcgtaccgccccagcacagaccccaggtagtgatccgtgtagttgaacgcatccaccagcgcaacagcattcggccgcacctgcgcgtacagcttccccagctgctcgtttgccagcgctccctgctttggcgtgatgcacccagtcgccaggaagtcgcccaggtgcttgtggagaattgttactagtcgtcgttaaactatttgtctaaaggttttctttcctta

SEQ ID NO: 15971 - DNA, 2486 bp, Setaria italica
  Peptide Sequence Number=SeqID_81945
taaagggtctattaaactatttgtctagtaggtttcttggtagtcttgtttcctttctacttcctattgttcctaggtaattgttccttgtcttgtacttgtactatccattctactttttctttctaataaaatacttagcaaaggagtagatatgctctacctcccgccgctctttattaattaaatgtacctctgatacgatccgtacttaatgaatacgtgtatatttatatatatatgcctctttctcggctttgacaagaatagaatagcttatttcacccatccattcaggaggtggctgatcagatcagagcctggagagcctgagctgctgcttgagcaagggggcggaggtactcgtggtacccgtccggcaccaccgtctcgttcagagggtccttccacgcctcctcgtacagtgccgggtacacattcccgtcgtaccgccccagcaccgatcccaggtagtgatccgtgtagttgaacgcatccaccagcgcaacggcattcgggcgcacctgtgcgtaaagcttgcccagctgctcgtttgccagcgctccctgcttgggtgtgatgcacccagttgccaggaagtcgcccaggtgcttgtgaagaatgtaaagggcataaacattgcagaggttctggagctgttccttcactccatgtccaggaatgtcctgctgtaccttctcgatgaacttggttacaatgatcaactggatgtgagccgcggcagcctcaagcaaatctggggaccgctcatagaaaccttcttcttggcttgttgcttggcctatgttctgggcgcagtttaccgccatcctgagagctctagcttcaaatgcctcttgtatggcagcagggttaagccaatcttcagctgtgttgacagcgcatttgcattgcatgagatattgtactttgcccatgtaagccattgtaccaacaggttgttttccagaggtcaattgagatacagtcttcattagaatccttgcaacctgcaaaagcagaacaacattgtctccttcataagtgcaagcaggaacatagacggcaaacaattcaggaagcccactgctgttcaagtaaccatgtccaccacagagctttctgcattcttcaattgcatcagctgttgcagatgttgtcacagccttcaaaccagcagtacaggcatgagcttcttgcagtgttgagtagtctttagcttccagtttctgagtgacatccgtgtacagccacttgagccaatcaccaacgaatctaaatgcatatgctgaagccagcaatggaaagagtctgctttgttgagtcctgtaattaagaacttgagtctcagggccaccatcttgagagccaaactgctttcgaacggcgctgtatcgtacagcaatgcaaacagcacgggacaaagccttagaagcatctgcaacaattgattgacgaacaaaaaccattgtcccataaagcagctgctttggcacatctgaatggacatatttcccctcccttgtaacttgtgaaagcctcatcaacatttgatcccttgggatgcgcacatggtgaaatcgaaggacaccgttgtccatactgttatatgcaccgctaccaaattttccaccaatatcaccaagggtaacaccaggaagcggtgagtgatcctctaagcttcgcagttgaacaatgaaaccatgtatgccgtagtcctttccttcagttatcaaccgagcgtacaccacggcatgagtggaagctttccccaagccaccaggccaccatttgctggaggtcagagttggactgtggatgacaaattcatcggtctttggatcaaatgtagcagttgtttcaaggccctgaacgtttgagccatgaccaagttcagtctgagcatagcacccaattatttggaacttgtaagccagtggtaaccacttcttctgctgctcctcagttccttgcccttttatagcaggaacaaacatgccccagtgcagatcaacataaccaggctgatcgacatattgcctcagtagacctgcttcctcctctgtaagacgtagctccacaatacgcttccacgcatgggcagcttttcttagcgtgtccttgaacaagtccttcctggagatcatggtcctgttatccttgcggaagacagggtcggacgcgacgaggcgggccatgcggtcggcgacatcgacggcgtgccgcgacccggcccacgcgaccttcatctcctcgacgtcgaagcgcgccgcggccctctcggcggcgaggtggtccgcctccgccgccgcgtccatggccatctctgacttcgccgcggtgcgtggagggagggaggaggagcaactcggcgactacaactacaactccgtcctcgtcgcttttgctttgctttgatttggttcgggaatccgggtgacggatataaagataggcgtgcgagaattgcaatgtggaagaggaat

SEQ ID NO: 15972 - DNA, 706 bp, Setaria italica
  Peptide Sequence Number=SeqID_81946
ttcaccgacgacgccgtgtacaagaaggcgctcggctccgaggaaggcaaggcgcggttcctccgctggcgggtgcgcgccatggagagccacgtcgccgagctggacttcaagcccggcggggccgcgtcgctgctgcaggtgacggacctcaagaactcgccgggaccggccaagaaggacttccgcgtcgccgtcaagcaggtgctcgacctgttccaggacaactaccccgagctcgtcgcaagaaacatcttgatcaacgtgccgttctggtactacgcgttcagcaccctgttctacccgttcctgacgcagcggaccaagagcaagttcgtcattgctcgcccgtccaaggtcactgagaccctcctcaagtacattccgattgaggccatcccggtgaagtacggcggcctgaagcgcgacagcgacaccgagttctccgccgatgacagcgaggtcactgagctaacagtaaagggaagctccaccgagaccatcgagatcgaagccactgaggctgatgccaccctgacatgggacctgacggtgctgggctgggaggtgaactacaaggaggaattcgtgcctgccgacgagggctcctacaccatcatcgtcaggaagggcaagaagatgggggccggcgaggaggcggtccgcaactccttccgcgccggcgagcctggcaaggtggtgctca

SEQ ID NO: 15973 - DNA, 424 bp, Setaria italica
  Peptide Sequence Number=SeqID_81947
tattggggttaggtatgaggatgggcccgccggcgccggcggtgcggccgccgaggatgccgcggaagacgccgcggtcgaagtcggcgatgcgggacgccggcacgaagaggttgagccacgggtgcggcacctcccacatgcccttggtgcgcagcttcagctccgccttgtgcacgcggtcgaggaagtccacgtacggcaggtccgtcgtgaacaccgtgcccgggaggaagtttagctcgcccagcagcgcgtccacgtcctggtcgacggatgcggcggtggcgtcgtcgtagttcttggtgacctcgaggcagtagagcacgccggagtggtgcttgagcgagctgagcttcaccgggttctgcggcgagaagaaggaggagcgccagttgttgatgaggccctcggcggcgacgac

SEQ ID NO: 15974 - DNA, 408 bp, Setaria italica
  misc_feature (1)..(45): n is a, c, g, or t
  Peptide Sequence Number=SeqID_81948
nnnnnnnnnnnnnnnnnnnnnnnnnnnnnnnnnnnnnnnnnnnnncaaaggcatttaccttttatatcaagctagatgaaccagtgattacttcagtgttcatgttttttttttgtaatgataggtgttcatgttgacgtctgcataaacacggtatgcagcaggtagcctgctgcaagcagcaccaagcattgctgccatagtgccatacacatgcacacatacactgtagtagcattcataatcgaaaaaaagaatccaattgaattgagctcgaagtgtgtgccggtgcagccggccggctgccgtccctgccgccgcagtgatggccggcaaccacccaccctctcctccgcccggcactaaattgcttctattcctattccttcttttgtttagtttagttta

SEQ ID NO: 15975 - DNA, 245 bp, Setaria italica
  Peptide Sequence Number=SeqID_81949
tgaagtccggtgcggcgccggcgccggcgcacgcgtgccgcacctcgtcacggacccggcactgccactccgggtgcagcgccaggagcatcaggcaccaggcggcggtcaccgccgtggtctcgtacccggcgaagtagatgttcttgcagttgtccacgatgaagtcctccgccgccacgctgccgccagagctcgccgcgctgcggagcatcgcgctcaggaggttcctgtcgtcgttcccg

SEQ ID NO: 15976 - DNA, 927 bp, Setaria italica
  Peptide Sequence Number=SeqID_81950
tccgccgccctcccgcgcgccgccttccccgcaatcgccgtcgcggcggtgaggccccggcgagcgcagcagctgaagcctccggccgcggcgggggccgctgggggcgagcagagggagacgatactgctccctgggtgcgactacaaccactggctgatcgtcatggagttccccaaggaccccgcccccacccgcgagcagatgatcgacacctacctcaacaccctcgccaccgtcctcggaagtatggaggaagccaagaagaacatgtatgcattcagcacaaccacctacacagggttccagtgcactgttgatgaagagacatcagagaagttcaagggtttgcctggtgttctgtgggtgcttcctgattcctacattgatgtaaaaaacaaggactatggaggtgacaaatacataaatggtgagataattccctgcacgtacccaacctaccagccaaaggaacggagaacatctaagtatgagagtagacggtatgagaggcgaagagatggccccccagccaacaggagaccaaggcaacaggccccccagactgagtcagcatcttcatgagtattgcaggcatttatccacatactactgaaacaaaagagcacgctctttggcaccatgtacggacgagcaggcaaatccatcctcagcccaaaatatcatgcagagctgtgcaattgacccgcacagcttggatttggatcatgtggatgggtgctggtattttgagcagactatgacatctcagtgtgacacgtgactgaaaaccctgattcatctaaagtgttactattctcccaactcctagggaactatcctcatgatattttctatgatgtcgactggcctagctgtatcacggaattctaaatgtgctccagttccccttttgagctttgcttg

SEQ ID NO: 15977 - DNA, 655 bp, Setaria italica
  Peptide Sequence Number=SeqID_81951
accagcagccggtgaagggaggagaaactacaatgtgccgggtattgttcttgccgttgtgctggctgtgctagcagccttgaacctcgtcgcctgcctctgtttctggaggcggcggcagcggcagcggcggcgaccaactgcggaagcgaagaagccatatcaagcagaggatgtggaaatggtggactccatgatgatggacgtctcgaccctgcgaacggcgaccggagatttcgacgagagcaacaagctcggcgaaggcgggttcggcgcagtgtacaagggtgtcctccccgacggcgacgagatagcagtgaagcggctgtcggacagctcgacgcagggagaggacgagctgaagaacgagctcgcgctggtggccaaactgaagcacaagaacctcgtcatgcttgtcggcgtctgccttgagcagcaggagagactgctcgtctacgagtatgtccccaaccggagcctcgacctgatcctcttcgacactgagaatgagaaccatgagcagctggactggaggcagaggtacaggatcataaatggcatcgctcgaggcctgcagtacctccatgaggactcgcagctcaaagttgtccaccgtgatctcaaggctagcaacatcctgttagacgcgaacatg

SEQ ID NO: 15978 - DNA, 1345 bp, Setaria italica
  Peptide Sequence Number=SeqID_81952
cgtactgaaattcaacagagacaaggtaataatcagacaattacatctcttcagtcttcaatttcatagcctttcctgaatacaggggaatgaactcaaatgcagcctccaaactaaggccaaaaattatctcttataaaccgaaactacatgtgtatttgaccctgcccggcgatcagaagaggtacttggacagcacgtacttggggggcaggcctccctgtcccccgagccagtgctgcatgtgcacgccgatggcgtccaggtgctgcccgctccggccgtggaatcccaccaccttcccctccgtcatcgccgacgagaagtaggcgccgaactcatcgccgaatggcccgtacttgccccggttggtgacgaacgtcagcgacctcaggacccggggcccgtcctccctgctcgtgttgtagtagccgtacacgcacgtcagcacctcgtgagggtagtccagcttcaccctgtgggttatgtggccgatgttcccatgccttgcagaccagacggagtagccactccggtcatactcgacctgaatcgacccgatgaaagcgcctctcatgatgtagatttgtttcaccccggtgtagacgccgtcatcccatggccggcctccctcaccgccccatggccctggtcccattggaaccggttctttcaccatgccataagcaacctgcagagtggttcaaatgcctcggtcattgtctgtttcagctatctcatctcgtcgtttgtatatgtattactctgcgcttgagcaagcatgttgtaatgcagtgatggactagtaggggtcgtcggtctgctaacaaatcgctgtggtgctaccttgccttcctggacatgaactccaatgccatcgatgtaccacccctccctgccatgaaatcctactatccttccattggtaaaacttgtggagaagtatgtcccactctcatccccatacggtccgtatgttcgcttgtttgtgtggaatgtgagcgatctgaccacagttgggcccatgattattgctgaatccaagaacccggttatatgagttaacacctctgacgggaaatcgaatactatcttgtcaggtggaacacctccactgtaagtgtaggtgttccaccatactgcctgcccatttcgatcatacagcaccttcatagaagaaattcccactgcacgcgtcaaattaatctgccacacaccggtgtatacaccatcgtcaaagatggtgccaccacttccaccccagggaccataagtgtgagtgctgttcatggctgcagctcctttatctccatagtaactagggaaagaaaccatcttgttccag

SEQ ID NO: 15979 - DNA, 264 bp, Setaria italica
  Peptide Sequence Number=SeqID_81953
tgtttatggctcttgctttattaaggggaggtgtatctagaaggacaattaaagcatctgcgatttatggattgcacatggcgctgcatcctaaagcgttgattttacccaaaggcatggaccctgcctattgagcggcggtgaacactctacagggattcctcccaaatagtttggccaccacttgtatcagtagggctgctcatcactactaactttttttttccaaaaagaaaagaggcccatgaatctcttacaaaagta

SEQ ID NO: 15980 - DNA, 455 bp, Setaria italica
  Peptide Sequence Number=SeqID_81954
ctttgaagaatatgtgtactagagaatcctgccgttttttgcaccctgagacacatactgcggtttgcatttgtgcctttcttttgctgtgttttctgctagtatccgagctactgatttgtaacattttattttctgcatctatttactgcggcgacaagtgacaatgttgaagtttgccgtgattttaaacgaggagaatgcaaccgacctgcctgtcgctttttccatccatatacaagctgaagtttctgttagctaaatctgagtgcccagccctgtgccgctgctaccgctgtgctgctgctgctgctgccaccgccgccacctcccatcctgcttctgccaccaatgagccatgttcctattccatatcctgagatgctttacatgccaccgccgccgccaccaccccttggagtaccaatgatggggcctccgccttcacctcccag

SEQ ID NO: 15981 - DNA, 1119 bp, Setaria italica
  Peptide Sequence Number=SeqID_81955
taaagtaaacggtaaacggtaaacgtaaaccaaaacaaaaataagaaacctacaaccgcccgatggcaggcggcggcgccacaatgacctcaccgtcgaggcgtgccgcgacttcctgcgggacaggtgcacccgctccgacctcgagtgcagatacgcgcacccgcacccgtccgtctccgtcgatcgggagaataaggtgacggcgtgcgcggattcgctgaggaacaattgcttccgcgggaggacgtgccgctactaccacccgcctccgcatatccaggagcaattgctgagatcaattggtgtggaagacccaaaggtgaagacgatctgcagagattttacacgtgggaagtgttcaagatcagcaaatgagtgccgtttcttgcaccattcatctgttgaagagcttgcaattgtttgccaagatttcttgcgtggacagtgcaaccgcaaatcatgtaggtactctcatgcagtagcacatccggtgccaccaatgagccatgttcctattccatatcctgagatgctttacatgccaccgccgccgccaccaccccttggagtaccaatgatggggcctccgccttcacctcccagaccatattctgataataagaacagagttgaagtttgtagggacttcttgaagaatatgtgtactagagaatcctgccgttttttgcaccctgagacacatactgcggcgacaagtgacaatgttgaagtttgccgtgattttaaacgaggagaatgcaaccgacctgcctgtcgctttttccatccatatacaagctgaagtttctgttagctaaatctgagtgcccagccctgtgccgctgctaccgctgtgctgctgctgctgctgccaccgccgccacctcccatcctgcttctgctgccaaagagctgctgcgctggctgttgtgttgctaaggtgccatagagtatgggagccttagaaggtgctatgtatgcatggaataaagatactgttactatcatcctgtgatgttctaatggtttaacgaacttgactcggtaccctttacaatgtggctcgcatgtgtggttatgtacttgctgtcataaagataatttgccgtgagttaa

SEQ ID NO: 15982 - DNA, 283 bp, Setaria italica
  Peptide Sequence Number=SeqID_81956
aggtaggccaatcctttcgccgatccaagtgcgatcctccacctgtgctgccaatccagtgccgggcgattacccccgtgcaggtggagctcgagcgtcttgttgggcacgtactcgtagacgagcaggcgctggtcgccatggatgcagtagccgacgagggacacgaggtggcggtggtgcacgcggctgatgatctccacctcggcgcggaactcgcggtctccctgcccgctcccgggccgcagccgcttgatggccacctccccggcgccctccagcg

SEQ ID NO: 15983 - DNA, 904 bp, Setaria italica
  Peptide Sequence Number=SeqID_81957
aaatataactttgagtccattcgtgatcttctgaggtatatcagaaataaatcaggccattacagagaactttcagatgatgtcaaggttcgttggaatgcacttgttactgtgtttgattttgtcttttgatttatggatgcaattaaattatcgattagttgctgacctaattagcaatggctgcatgcactacctggtactttttggttagatttccaccatctcaaccgcaggccaaagaacatgcaagagacagaaggttgtaaatgaataatggagagaatttgtataatgaaggataaactattaggtgaacaaactatggtgaattagcttgctttgaaatgccattttaactatgtttagtacatttctgatttcttcatggtagttatcccatcctattttctgcctagaaatgttttgctttgcataagtgaatgtatagaataggtagtgcaaaggttcagttgtaaagtacaaaatctagatttatgttgccagtgttattaaaatttggagaaggaaatactagttctgtcatacctaagtatggtacattgacacctacattcatcatacaagggagctaaacccaaggttgaacctgataaattacatatttttcttggtattttaaacttcacttacatggcattacacatagatctgaagtagcctgccagaggtggcaagatgtttgactatcatcagttttatgataggagggcactgctttagggattttgtatgaattaagaatactaggctaccatcacccttttcttccctctcatatttggagaaatcttatggcaagtttttagataaaactatgttttctattacaaattgtttttgcttgccagtcgagtcaagctttgttttgttctcataaggc

SEQ ID NO: 15984 - DNA, 2811 bp, Setaria italica
  Peptide Sequence Number=SeqID_81958
gagattcgccgccgccgggggcgcgctccaccgaggtcgtcgcgccggcggcgccgaagaagcagagtctccgagagctcttcgtcgtgccgaagcccccgcgccacgagccggctcgcgcggtgagcggcgaggcggaggccgaaccccgctccgtgcttcagttttacgacaacggcacaattcagcttgtggaccggtcgtcacagtctcctctctgggagatctccacagggcctccactttcagatcatattactaccgccgagtctggtctgaattacctcatatatcctttgaacgggaatgagaacatgaatgggaatgggactgaactttgggaagtttataatgggaacaacgtgatgcttccgtggaaactggaggaatttgttgccagaagtccatacatacgggattctgttgttactgttggatcaaaagcttcaaccgtttttgtagttgatgctgacaatggtgagattatttacaagcgcagcattccagctcccttgaatgaattggaaggaccaggggttgaaggagcaccacccaagttaaatgctcgaactagtgatgacagtgataatatcatagtggttgtgagaactgactattctctaagtgcatcagatcttggcaagcatttatttaactggacgagaacttctttcactgcaaattactatatgaaatacagccaccctgacatgcttgatcagtcatcctgcctgcgaggagatattccgtgcattagaactgagggtttgccacttgctttacctgattcagattcagctaatgcaattattttgagagatgagaccccaataatctccagggatggtactgatactctgaaatcacttcaaacctcaaggaagctaccaaaagtttctggcaagtcaaactttgtcttggatgatgctcaaaatcaaacccatgatgatgctcgatctcatttcatctctcctgatcctaaagctaccaacatgcccactaggaacacttatagatggtttttccccctgttccccatatttctggtcataggttatctgttcagcttgatgtctgcaaacaagacatgtaggcagttcgttattcagcttatgaggccattcatgcgtgaaaagaaaccggttgacattagaggcaggtcagagggaactcctaataagagaagaaaaacacggaagaaagatgggcttgtcaatggccatgagacattatcagcatctgacaaggagagcaatgaaactggtgggtcaatggaggcaccagttagggaaaattctgcagtaacagataaggggattacaggtggccttgatggtcgtcagattggtaaactctttgtgtccaataaagaaattggtagagggagcaatggcacagttgtttttgaaggatcttatgatggtcgtcaagttgctgtgaaacgtctactgcattcccacaatgatatagctgaaaaggagactcagaatcttattatatctgaccgggatcctaatattgtcagactatatggttgtgagcatgacaacgattttgtttatatctcccttgagaggtgccagtgcagcttggctgatctaatccaaaaacagtcctcattatcttccggagaatctattgctaatattgaagttagtatcagcatcaagtcaaagttttcaaatgtgaaaggagtagacgtggagttgtggatgcaggatgggcttccttcggcacaactcctaaagctgatgagagatgtagttgctggtcttgcacatttgcataacttgggaattatacaccgtgatttgaagcctcagaatgtcttaataagcgcagatggacctattagagcaaagctttctgatatgggtatcagtaagcgcctgcaagatgacatgacttctgttagccatcatggcacaggaattggaagctctggctggcaagcacctgaacagctttgtcatggtcgtcaaactcgcgcaatggatctgtttagtttgggctgccttattttctattgtatcactaaagggaagcatccttttggtgagtactatgaacgggataggaacattgtaaacaattgttttgatctttttgtggtggactacataccagaagcagtacatcttatttctcaattgttacatccaaatccagagatgagaccaacggcagtatatgtgatgcatcatcctctattctggagccctgaattgcgcctttcgtttctaagggataccagtgacagaattgagaaaaccagtgaaactgacctcataaatgccctggaaggcgtaggacctgtggcgtttggtggaaaatggggagataaattcgatgctgctttggttacagacatggggcgttatagaaaatataactttgagtccattcgtgatcttctgaggtatatcagaaataaatcaggccattacagagaactttcagatgatgtcaaggccatacttgggtcactgccagaggggttcgaccgctactttgcaagccgatttccaaagctgctaattgaggtgtacaaggtcatgtgggtgcattgcaaggaagaggaagctttcagtaaatatttcaatggaagctcggtatagctgttggtggggattgcccattccttattttacaaactaacactgatgtagccaaagttgtatgtacatgtgatatttgtaccatattatcatagaataaaagagctcaatctgtacattatgtagcatagaacactgttgcctatatatggaagttatacttgcacttgatgcactaagttaaaaaaaaaaa

SEQ ID NO: 15985 - DNA, 416 bp, Setaria italica
  Peptide Sequence Number=SeqID_81959
gggggttaataataaatggttttctactttgttttagggggttaaaacatcttggtttttgttagtatttgggggtattgtaagttgtattcctattcgtcgtatatacgtcctagggcaataaatctatggagttcaataaatgcaagggaagccatcagcccatcgcccatcatatctgttatagccttataggaggggcagaaaaggaagaaatgaggagatagaaggagatcactggaaagaaagaaaaaaaaagagggaggttacaatctcaacaaaagagaaggcaggggaaggaaattgcggtttaaccaaaacagctggtcggtaaggcaggatagggtgcgcgctagctcccagcaggacctgtcgtgcgttatccatgactatactaaatgatgatacacaatgtg

SEQ ID NO: 15986 - DNA, 627 bp, Setaria italica
  Peptide Sequence Number=SeqID_81960
actgtccgagaagcctgttataaccttcgcagggcattcagaggatgtgcttgatctcagctggtccaaatctcagtatttgctttcttcatcaatggataaaacagtacggttgtggcacatgtcaagcacttattgtttgaaaaccttctcacacagtgactacgtgacttgcatccagttcaatcctgttgatgatagatacttcattagtggttccctggatgaaaaggttcgtatctggagtattccaaaacgcgaaattgttgactgggtcgatctacatgaaatggttactgctgcctgctataccccagatggaaagggtgcgctgattggctcccacaagggcagttgccatctgtatgatacatctgatgatatgctttgctacaaaaaaagattgacctgcaaatcaagaaaaggaaatccagccagaagaaaatcactggatttcaggtgcttattttaaacattttgttgtgatgtgaatcgtactgcaccagtgtttagattattttgctttgttaaactgaaaatagttcctcaaatagtttgtcccaggcagtccttcaaaggtcgtaatcacatctgcagattcacgaatacgagttcttgatggttttg

SEQ ID NO: 15987 - DNA, 2292 bp, Setaria italica
  Peptide Sequence Number=SeqID_81961
tgtccgtccgcgaggtcggcacggggcggcagctcaccgtggaggagttaggccgctcacccatcgttcaggagcttatgcgccgccaggctttcagcacccccaactccaactgcacctcgaattcccaaagtggcgcctccacgcccatcgagaggtccagctccagctctagcaacggcggggcgcgctccaagcggcgcagcagctggctccgcagcatccgctgcgtagctggctccatggccactcactcccgtgaccgccgcagcagcgacgagaaggacacgtcttcagagaaaggtgggcaccactccagctctgcaacggatgacagccaggaccgtgttccacgccatggcccgtcccgtgtcaaggtgcgccagtacgggaagacatataaggagctcagtagcctgtttatgacacaggatatacaggcacacaatggttctatctggagcatcaaatttagtcctgatggccgttaccttgcgagcgctggggaggattgcgtgatccatgtttgggaggtattagagttcgagagggtggggaaggagagggcagtggaggagaatggggtgtgcaatgagtcatcagagctaatggtgtcatcagctgctccaagtgggagccattgggagaagaagctgcggtcaaaggtactgcacagtgggggatcggtgagctcagacaggttgatggtgcccgagtatgtatttgcactgtccgagaagcctgttataaccttcgcagggcattcagaggatgtgcttgatctcagctggtccaaatctcagtatttgctttcttcatcaatggataaaacagtacggttgtggcacatgtcaagcacttattgtttgaaaaccttctcacacagtgactacgtgacttgcatcccgttagaatccctgtccttctctgtctcagcactgtaatagcattttccttctgatatcatttctttttgattcagtgacttgcatccagttcaatcctgttgatgatagatacttcattagtggttccctggatgaaaaggttcgtatctggagtattccaaaacgcgaaattgttgactgggtcgatctacatgaaatggttactgctgcctgctataccccagatggaaagggtgcgctgattggctcccacaagggcagttgccatctgtatgatacatctgatgatatgctttgctacaaaaaaagaattgacctgcaaatcaagaaaaggaaatccagccagaagaaaatcactggatttcagtttgtcccaggcagtccttcaaaggtcgtaatcacatctgcagattcacgaatacgagttcttgatggttttgagctagttaacaggtttaaaggattccgaaacaccagcagccaaatctcagcttgttcagctggaaatgggcggcatattatctctgcaagtgaggattcccatgtatatatgtggaggaacaatgatgattttgaaccaagtagaaagaaaggcattgtttctgtcacaaatacccatgaacacttccactgcaagagtgtgacagttgctgttacctggccttttaccagcaccacaatgacttctttaatgaaccctaggaaacaagaagagctggattgtgggttggagaatgaccatgtactgcaaaccaaacctgctaaagcacaggagatgccagatgttaagtaccagagcaccacaatcacaagtaacaactcaaatcatactggtgactggacatctgtgacttggcccgaagaactcaccacaccagcaaagcagagtcacaggcctactacctgccttgccgacgagggagatcaagttccaaatcggtcagcctggggcctagtaattgtcacagcaggtcgtggaggtcaaatcaggacatttcaaaactttggtttccctgttagagtatagcatgaatccagatacgtaagatagtcactgccattcaggatgtagtttgtgtatagataggagatagcggctgagttttgtgccattcagggattgaatttgattgttccttcgtgcgcctgctagatatcagaatcttcagctaacatacactgtcagtactccggaacttggtatgccaaattcatttaccctaaactgtacatgaaagggaaagccctgcagagagagcaacaccatcagctgactggagatatttcttccatcagtttcaaccttgttccactccccatctttcactttttgtcttttatccccgttccgttacatgttcttgtaaggaacgtcaataccaac

SEQ ID NO: 15988 - DNA, 1106 bp, Setaria italica
  Peptide Sequence Number=SeqID_81962
cgcccgcccgccaggcgcccgcgccggccccgtgcgcgctgctggggaaccccgccgccgcgcccgagaaaatgccggaagaggacgaggagatcgtcgcctcggtcgtcgccggggagatcccctcctacgtgctcgagaccaggctcggggactgccgccgcgccgcgggcatccggcgagaggcggtgcggcggatcacgggcagggagatcgaggggctccctctcgacggcttcgactacgcctccatcctcggccagtgctgcgagctgccggtcggctacgtgcagctgccggtgggcatcgccgggccgctcctgctcgacggccagaggttctatgtgcccatggcaaccaccgaggggtgcctcgtcgccagcaccaaccgcggctgcaaggccatcgcggagtcaggcggcgccaacagcgtcgtcctccgcgacgggatgacccgcgcacccgtcgcccgcctccccaccgcgcgccgcgctgcggaggtcagggcattcctggaggaccctgccaatttcgagacgctctccatggttttcaacaggtcaagcaggttcgcaaggctgaagagcgtgcagtgcgcgatggcgggaaggaacctgtacatgagattcacctgcagcacaggggacgccatggggatgaacatgatctcaaagggcgtgcagaatgtgctggatttccttcaggatgacttccctgacatggacgtcatcagcatctcaggtaacttttgctctgacaagaagccagctgctgtgaattggattgaaggacgtgggaagtctgtggtttgtgaggcggtaatcaaggaagaagtggtgaaaaaggttctaaagaccaatgtacagtcactagttgagctgaacacgatcaagaatcttgctggctctgctattgctggagctcttgggggtttcaacgctcatgccagcaatattgtgacagccatcttcattgccactggccaggatcccgcacagaatgtagaaagctctcactgcatcacaatgctggaaccccccaactgtgcccacctcaatagacggcatggtgacagagatgtgaagatctcttccatcatttatggg

SEQ ID NO: 15989 - DNA, 1290 bp, Setaria italica
  Peptide Sequence Number=SeqID_81963
agtttttttttttttttggttttgcaggtgcagctggagaagccgccatggacatgccttgtttttttgacaaccactacatcaccgaatttccagagcattcgattaagaaatcggatcgaacaacgcgaaggaaagaaaagaaatagttacagagctgaaaaggggaacagaaaaaggttcacgagctgctgctgcttctgaagcaatgtgggagagagagatctacaaggacctacaactacaaggctacaacaacactactttcttttctgcaacaaggtaatcaaagctttatgaacacgaaacaaagagggttagctcgcctctccagtgtcagcgcgcagacgcagaggacgacgacggccggtgtccatggctgagttgagctggccggccccggccggcaccaagaaacaaatgggtcaaactcctgaacaaggacctggccaattcgcaatcttgacggtttcgcttgatgcaaacttttcgcagctcacttgatgtcgatggtgaatccgtctttggctcttgagaaagtgaccaggccggcgttgaacaacctcaaccctgtccatgcccccaagtccctccccaacctctgcgcttccacgggacatgaaaaacttattcgagggtgttttcactctccggatccgtccgtacccctgaaatgatccaaatctcggatcaaggcacggccttggacatgtccttgatggatctgttgtacttcatgtggctcttcacaagctggccggccgcgagcgcggacaggagggatagctccccagcgagaaccccgccagccaccacggtggccaggagccttgcgtttgctccgggggagtccctgtttgcgcctttcaccccgaggaggtcaaggcacgctgactgggacgccagctgagtccctcccccaactgtgcccacctcaatagacggcatggtgacagagatgtgaagatctcttccatcatttatgggttccagcattgtgatgcagtgagagctttctacattctgtgcgggatcctggccagtggcaatgaagatggctgtcacaatattgctggcatgagcgttgaaacccccaagagctccagcaatagcagagccagcaagattcttgatcgtgttcagctcaactagtgactgtacattggtctttagaacctttttcaccacttcttccttgattaccgcctcacaaaccacagacttcccacgtccttcaatccaattcacagcagctggcttcttgtcagagcaaaagttacctgagatgct

SEQ ID NO: 15990 - DNA, 460 bp, Setaria italica
  Peptide Sequence Number=SeqID_81964
atccaagcacttcctcgactccattctcccaagcctcaccttagaggcaaagaatggaagctctgttactgttgactgcacaaaggagcactccacaacatcaggaactccattgagaccctttaagcatgcatcagcaaaaaccgcaccagcatacctgcaaagatataattatataaaatattagcaaaacagataaagcaacaaaataatattagacagagagcggtaagaaatcctcagcctgcaatgtctattcttctttttgacttacgccattgacaaggttgcagagccctttccagcctttgcctcaacaacttcagtcccgccatcctgtgtcctcttggtgagagccttgatgtcttcatgagacaatgcattggttgcaggggttgcctgtgagaacagtggcagaatggtaatacccgcatgaccaccaacaacaggaacgttcaca

SEQ ID NO: 15991 - DNA, 1453 bp, Setaria italica
  Peptide Sequence Number=SeqID_81965
ttttaaaccactgtctgaaaggcacaaagtgcatgatcgatcgattaagttcaagacttgacacaagatatatgccgctagaatagatctcttgcaaaagttttgttctgtctggcaatagagcctctggggttcttattgtaagtaaagctcaaatcctcccacacccaagcaaaggggcagaaaagcgtaagaatcaaaacagaagatccatcctttaactacaggtctcaattgctgctataatctgcaaaatggccaatctagttcgcatgtgcaaacttgatacccttctcaattgaagatttgagctcacccttgaggttctcgagcccttccttctcaaagtccgacagctcacccaatccaagcacttcctcgactccattcttcccaagcctcaccttagaggcaaagaatggaagctctgttactgttgactgcacaaaggagcactccacaacatcaggaactccattgagaccctttaagcatgcatcagcaaaaaccgcaccagcatacgccattgacaaggttgcagagccctttccagcctttgcctcaacaacttcagtcccgccatcctgtgtcctcttggtgagagccttgatgtcttcatgagacaatgcattggttgcaggggttgcctgtgagaacagtggcagaatggtaatacccgcatgaccaccaacaacaggaacgttcacatcggtaactggtacattggccttcccagcatagaaagtcttagcacgaacaacatctagggtggtcacgccaaacaacctcttctcatcataagtcccagccttcttgaaaacctcagcagcaattggtacagttgaattcacagggttgctgatcatgttcacaagggcattggggcagtacttggcgatggcggcgctgaggttcttaacgatgccagcgttgatgttgaagaggtcgtccctggtcataccgggcttcctcggcacgccggccgggatgatgaccacgtcggagccctccagcgcctccccgagctggtcctcccccgtgaaccccttcaccagtgcgggggtgttgatgtgggagacgtcagcggcgacaccgggggtgccggcgagatcgtagagcgagagggaggagacgagcgggttgagcttcatgaggagcgccagcggctgcccgatgccgccggccgcgccgaggatggccaccttccgctcaggctgcccggaggcggcggagtagctgcggcggcgggcgagctgggcggcggatctcatcatcgacggcctcattgtggattttggttgggctgcggcggcgcgtgagatctggggtcggaggacggaggcgaaggccgaagtggcgaatgaaatggggacggctcggtgcgggctgcgggatgggatctacttgaagataaagtcgcttgggaaaagggttcttgggttttcaaggagct

SEQ ID NO: 15992 - DNA, 310 bp, Setaria italica
  Peptide Sequence Number=SeqID_81966
ccgaaatatctcgtcgcacggcacgatgggcttgaggatggcatccggctccgagctctccagccgcttgggatcgaacttgcccacgttcacgagcaagtcgcggacctggaggtgcttgtgccggatctgcgcggcgtacgcgagggcctgggtcttgcagccgccgcagtcggccgcgagggggcaaggcgcctcgacggcgtcgtggtgcggctcgagtgtcttgagcttggcggcctcggcgaaggtgccgcggcggaggcggcggacgcgggcgatgaggcgctcgcctgggagcgcgccgtcg

SEQ ID NO: 15993 - DNA, 401 bp, Setaria italica
  Peptide Sequence Number=SeqID_81967
cttcaaacgtaccatcaaggatgagggtttctcctccttgtggaggggtaacactgctaacgttatccgctacttccctactcaggtagccctcgcctttcttcactttccttatgcatggtagcagagttttattatattttccgttgttagctgttgtataccgaacatatgtttgttcggtactcctgtgattactatcttttttctagcatcccttttttgtcctaaggttgttttagaaaccagaccctttttatacgaggtgtattgaaagttctctagctgtgtataaagttagaaactagatctggttccttgataatccaattattttgttttctgttttgttggtgggtaaattttatttatattcttaccttaacatttgtttttctttg

SEQ ID NO: 15994 - DNA, 275 bp, Setaria italica
  Peptide Sequence Number=SeqID_81968
ttcgagatctctgatgagctggtaagccataattctgaaatgacatcttgttgattcagataatctactgcggtttgatacacaaattgcgcttaatggcaagaagaaatcttcttttaaaagaatcattgcttttgagttctgcccaagcaacccaagtaaattaatggttacatctgccgactcgaagatcaaaattcttgatggaaccattgtgactcagaattatagtggacttcgaagcggctcctgccagtcattggcaacattcactc

SEQ ID NO: 15995 - DNA, 584 bp, Setaria italica
  Peptide Sequence Number=SeqID_81969
tattagtcgatggtaacaagtacaaggggagcactttactatggttttcgagtatatggatcatggacctcaccgggtcttgccgataggccgggaatggcggttcactggtgccacagattaagtagttacatgagagtcgactgcggctcgagcagatcggcgagggtacctacgggcaagtgtacatggcgaaggagatgggcaccaacgagattgtcgcgctcaagaagatccgcatggacaacgagcgcgagggtttctatcactgccatacgcgagatcaagatcctggcttcaccaccagaacgtcatcaagctcaaggagattgtatcccaggcccagagcgggacgagcaagggaagccaatcgatggtaacaagtacaaggggagcatttacatggttttcgagtatatggatcatgacctcaccggtcttgccgataggccgggaatgcggttcactgtgccacagattaagtgttacatgaggcagctgcttacaggcctgcactattgccatgtcaatcaagtgctgcatcgagatattaaaggatctaacctcttgatagacaatgaggg

SEQ ID NO: 15996 - DNA, 497 bp, Setaria italica
  Peptide Sequence Number=SeqID_81970
tgatcacaatggacaccttactaaccgtgtgatcactttgtggtatagacctccagagttgctacttggaagcacaaagtatggtccagccgttgacatgtggtcagtgggctgtatttttgcagagcttctcaatgggaagccaatattgcctggaaagaatgaggtatatttttcaggccttaatgtgttggctaaggcttccgctcaaatttgtggacacgtattaaacctttagcccatatgcatttccttacatcttgggcaaataaactgctggttattatactgctgtattcatgattgatcagcatgtgttaagttattccttgttttgtaaccctttgcaagttcaccaattatcttctggagtagttttccatcatggtttatggctgtagctacaactacatccccttgtgatgtaatgctattcctgcagcctgagcagctgacaaagatctttgaactttgtggtacccctgatgacgtaatct

SEQ ID NO: 15997 - DNA, 428 bp, Setaria italica
  Peptide Sequence Number=SeqID_81971
cgagcaacgctgagcgacgacgcgtcttgagggttgttgtcgcgttgcctccctgtctctggttccggcggccatggcggtggcggctcccgggcagctcaacctcgacgaggccccgtcatggggctcccgcagcgtcgactgcttcgaaaagctcgagcagatcggcgagggtacctacgggcaagtgtacatggcgaaggagatgggcaccaacgagattgtcgcgctcaagaagatccgcatggacaacgagcgcgagggtttccctatcactgccatacgcgagatcaagatcctgaaaaagcttcaccaccagaacgtcatcaagctcaaggagattgtcacctccccaggcccagagcgggacgagcaagggaagccaatcgatggtaacaagtacaaggggagcatttacatggttttcg

SEQ ID NO: 15998 - DNA, 481 bp, Setaria italica
  Peptide Sequence Number=SeqID_81972
tggtctcaacttctcgccactctccccgacttcctttggtaccatcttcgatgagaacagtcgggagcgcgtggcgttttctcctgcaatggaagaggagcggcccatcgagcccatttcagacattagcattgttcaagtcaacagtgttatgtttggtgatacctgattactctagatggaaaatgagtctaccttagagcacaagattggactattggagacagtagcaacatggagaaagacgtcaattgaactttcagtttgctttcgtaaccaatcggggaactcaatcattccgtattttttaaaaggaacccccagccttcccctgtgtacaattcagctatatcttgtgcagcaatggaatgcactgtaatagttttcttgtgtgttgcacacttcacctctttgtaatagtcctgcgctgctcttgatggcttctttcatctatctgccaaataaaaagaaaaaataaaaa

SEQ ID NO: 15999 - DNA, 1663 bp, Setaria italica
  Peptide Sequence Number=SeqID_81973
cacctctccgctccgctcccgcgtctccacctccacctcgtcttcgtcgtcgccgggccccgcttaccgccgccccgcccgccgtcgactcgtctcaggcaagaggcaaggagaaaggagaggtcgttatgcgccggtggttttgctgcacgcagtttcacgcgtcatatcgcgaacatgaaaatgaacttcccatcagtccagatgagaaagaaggaaatggttttgttgccaatagtgatcctaacaaagcaccacctcccattgaagtccctgaattatcatttgaagaactgaaagaaaagacagacaattttggatcaaaggctttgatcggggagggatcgtatggaagagtgtattatgctattctggacagcggaaaacatgttgctgttaaaaagcttgatgcttcaacagaccctgaacttgataatgagtttttgacacaggtatccattgcctcaaagctaaaacatgctaattttgtggaaatgcttggatattgtgtggaaggaaatcagcgtttagtggcctatgaatttgctacaatgggttctctacatgatattctgcatggaagaaagggtgttccaggtgcacagcctggcccagcacttgactggatgcagcgggttaagattgctatagatgctgctaaagggctagagtatcttcatgaaaaggttcggccttcgatagtccaccgggacatacggtccagcaatgttcttctgtttgaggactacaaagcgaaaattgcagatttcaatctttcaaatcagtctccagatatggctgctcgtttgcattctacccgtgtccttggaaccttcggttaccatgctcctgagtatgccatgactggtcagctaactcagaaaagtgatgtatatagctttggagttgttcttttagagcttctaacaggaaggaaaccggtagatcatacaatgcctagaggtcagcagagtctggttacatgggcaacacctagattgactgaggatacagtgaaacaatgtgttgatccgagattaaagggagagtatcctccaaagggagttgccaagcttgcggcggtggcagcactctgtgtgcaatacgaatctgagtttagacccagcatgagcatcgtagtcaaggcactctctccccttcttcaacataagccgcatccaccaccggccgtagctcctgatgcaacagcaccttcagatgcctgactttctcagtcccgacaagaatgtaaagagataaccatttccccttcggtgcgtgcgctgtttttcagtactgttctgtgcaggcggagtgattagtgtcacacaagtaacggcatcgtggactgatgcatagcttatcctttacataggctgctacaaacaagaggcttttccttgtcattaccgtgtgctgagccgagtgatttggactaatgcatagcttatcctttacataggctgctacaaacaagaggcttttccttgtcattaccgtgtgctgagctgagtgatttgctgccttcgttggccgggcgaggttgtgcttggttggccagcggtcgtgatcacctaattaccgtgttctgagtctatactgtaaattgggaaggttctaacttttcatggcttgaaaacctttttaagttaaaaaaaaaaaa

SEQ ID NO: 16000 - DNA, 666 bp, Setaria italica
  Peptide Sequence Number=SeqID_81974
ggagatgattgcatctagaaaaaaatgagaaaatggcaaatattgttgttgaagtagttgataaggttggatatcaaccactacatagttcaacttggttcaaaggcagttctggtgtcactagtcatgctgatccagtatgtccttcatctcatgctgaaggtgcaggtgacacattttacctcagtgatgaacttgtgattggagtcaattgattattatccctgatcttgatcaagatggagaaccttatgtgttagctgatgaggatattgtatttgaagcaatggaattcaaagcagctgatgagagtgcaacacaagcagctaaggaagaagctgctattccagccattccagaagaccttgtagatgatatgaatgagacaagtattgatgtacttgacaataaggattcagagccagtgttggattgggacagggacaacccagaaatggcagtggttactatttatccttgcatggttgatttcaggttggcaatcaagcaacatgctatagtgtaagagtttgagctcgggacagagaaatttgacaaaagtaaatttaggggatattgcaaggccaatggatgcccttgggtaattagagctagaacacaagcagataggtttgttagggtacaattactaaccagattttttaa

SEQ ID NO: 16001 - DNA, 444 bp, Setaria italica
  Peptide Sequence Number=SeqID_81975
cgtgcgcaaaggggatccctttgtgcgccgtcgggaacctgcaccgccgccagtccattccctccgacgccaccgcctagggagcacgcgatggatcaggcgctccgcttccagtgtgcattgcagtggtgcaggagacggcatcctgaagatgacgcccagtgagtgccctccttggtgcaaataaacaacctggaacacaagtgtgcttcaagaagcagagtgtgtggcacaatggctagccaagcgtgggttgctgaaagggcaattccacttttgaagaggaagtcaaatatgggtgctaaagaagtgaaggatgctttggaggacaagtacagaatccagattaactatcagacagtgtggtatgggagacagagagcagcagagaaactttttggaattgggatgatttattgactggttgtataggttcaaggcagg

SEQ ID NO: 16002 - DNA, 2379 bp, Setaria italica
  Peptide Sequence Number=SeqID_81976
gtgcgccgtacgggaacctgcaccgccgccagtccattccctccgacgccaccgcctagggagcacgcgatggatcaggcgctccgcttccagtgtgcattgcagtggtgcaggagacggcatcctgaagatgacgcccagtgagtgccctccttggttcagagccagtgttggattgggacagggacaacccagaaatggcagtggttactatttatccttgcatggttgatttcaggttggcaatcaagcaacatgctatagtgtaagagtttgagctcgggacagagaaatttgacaaaagtaaatttaggggatattgcaaggccaatggatgcccttgggtaattagagctagaacacaagcagataggttgcaaataaacaacctggaacacaagtgtgcttcaagaagcagagtgtgtggcacaatggctagccaagcgtgggttgctgaaagggcaattccacttttgaagaggaagtcaaatatgggtgctaaagaagtgaaggatgctttggaggacaagtacagaatccagattaactatcagacagtgtggtatgggagacagagagcagcagagaaactttttggtaattgggatgatttatttgactggttgtataggttcaaggcagaggtggaattgagggcacttcactagattcttttgtgcttccaagggcagcatagatggatttttatatggatgcagaccttatattagcatagattccattgccctaaatcggcagtggaatggtcacatgcctgcagaattagctttaaatggtcataattggatgtttccattagcatttgggttcttcctatcagagaccaaggatgactgaatttggttcatggagcaactgagaagggctattggagaacttccaaagttagctgtatgcactgatgcttgcaaggggttagaagctgcagtcaagcatgtctttccatgggacagagagaatgtttcaggcgtctcatggagaacatgaagaaacactttataggagaagtgtatgcagcaaacatgtggcctacagctagggcttatgcacctgggaagcataagtatttcatggacaaagtaattgaaactagtcctgatgtagaaaaatggcttcgagagcaccacaatctcctatgggctagatcaaattttcaactgacatcaagtgtgattacatcttaaacaacctagctgagtcatggaatgcatggatcaaagaattcaaagatctgccacttcactatatggtagatgctataagggagaagggtgtgatcatgatggcaaagaggagaaggatctctagagctcttcatggagtcattctgtcagctgtcatccatcaactagatgctggctcaaagggattaggccacctcaaagtcatcaagggccttcctgatcaagctgaggtgacaaagatctacaaggatgaagaggtaagaagtcatgttgtgtacctcaaagaccacatgtgtacttgcagggaattgcaagtgacaggaaagtcttgcccacatgccttggctgtgatcacaactgataggcaaccaaactatgataaatttatggatatggcttatctgtatagagtttcaagcaagtatatgatcttagatggcctaatatcactgacatgaaccaatgacctgaagttgagaaagaatttaagctatatccacttgtggcacagaagagaggtgtacgtagacaaagaaaaaataagaaataccaatcgtgcctagagagaactagtaaagttaaaaggcaagtgaagtgtgacaattgtgatgaaaaggggcatagaaagggaagttggaggtgtgaggtaattgggacaaagaagaggaaaagaaccaagaagaccattgtcaaggctggaaggaaaaatgccaaggaagactctgcttcagaggtggtgttaacaactcccaggacaagagcaatagcagctaatgaagcagaagcatcaacatcaatgcaatacactaagaggaggctagatttggaggcaccactagctttggagcaccactggctttgaaggcaccactggagaaggcaacaaatgtggccaagaagatgacaccaaggaagaaacagctggccagcaaggtgaaaaagaagtcacaagcaaagaagtagaagttacatggccatgaactgttcaagtctggaaactttgttctatgacgtgctgctgctgaaaaatgcattagaaccatagtggttactatttttcttatttcataaccttttatcttgatatgtctgtaagtgaaggcttgtttatgtgtgcttgatcagtacttatttatccaggatgtgttctctcatgttcccgatgataaaaaaa

SEQ ID NO: 16003 - DNA, 332 bp, Setaria italica
  Peptide Sequence Number=SeqID_81977
cgcgcagagagacctgagttgaactgcggcaggcttctctcgaactccggcgaaggctccgaaccgtcggcgtcagttgggcggcgtcgggatggacgaggcgacgaagaagaaggtggaggagacggtgctggggatcctgcggggctccgacatggagtccgtcacggagtacaaggtccgctccgccgccgccgcccgcctcggcatcgacctctccgcccctgaccgcaagctcttcgtccgcggcgtcgtggaggggtacctcacctccctctcctcccaggaggcggaggaagagcagcagcagcagggcggcgacggcgaggagg

SEQ ID NO: 16004 - DNA, 233 bp, Setaria italica
  Peptide Sequence Number=SeqID_81978
ggctctggtggacgcggccccatcaccgagtggatgaggcagcggcgtcgccacccctctcgatggtctgccctcctcctccctagcaggtttgtttgtctgtgttgctccttacagccagcaacatgccaacgaagtgtttgttaaaatgctagaatgcttcagccttcagagatcatgtcttgccgattaagatggagatggatcaacaacctcctgtggcggcgcaacat

SEQ ID NO: 16005 - DNA, 634 bp, Setaria italica
  Peptide Sequence Number=SeqID_81979
ggtatgaggatgagcctaccatggagaaagctcacgggtgagggcccttccttctacttcagctctgatgcacaccagttgcttgttgtattgcctgaacaaaagattgactacctactacttcaggtccatggatcatcatcaaacttggaagaggtgaatggtctgcctggtggtaaggccaagaaaaaggttgtttatatatcttaccgttaggatcatcagggttgagcattactgagattggtagcggaagaaatcatgttcaggagaaagcatgcctctcatttcaacctaaaaggttgttctctgaatcctggtcaagtaaccacatacacgctaactgccttttagcctgatgttttctgttgaagcggaaaccggcaaaatgtacagggcaaattttcgagataaagaggggagagccgttgttattatgatttatgagacctacaaaggagaatacaacatcccatgacaggcaaatccgattcacctgtatgctctgtgaagatattatttattttattttatgaaaggtgtgtgatgctgccacaaaatgataatctgcattagtaatgcataatacgtattggggcacctagaccagtggtagaccattctttcattcatt

SEQ ID NO: 16006 - DNA, 1566 bp, Setaria italica
  Peptide Sequence Number=SeqID_81980
aaaagaacaaaataaatatatggagcccgatttctggcccctgccctgcggctgccctctcctccccttgttggccaatcgtgcgatccctgatggaggagaaggctctggcttccataacctccatggaaagagatcgacggcggctctggtggacgcggccccatcaccgagtggatgaggcagcggcgtcgccacccctctcgatggtctgccctctcctagcagccttcagagatcatgtcttgccgattaagatggagatggatcaacaacctcctgtggcggcgcaacatgtgcaagtatgtcattggggtcgcacatcggatgcctgctgctgcgttgcctgatgttttgctgtagaatttccactaagggtatcaggatgagcctaccatggagaaagctcacgggtccatggatcatcatcaaacttggaagaggtgaatggtctgcctggtggtaaggccaagaaaaaggttgtttatatatcttaccattaggatcatcagggttgagcattactgagattggtagcggaagaaatcatgttcaggagaaagcatgcctctcatttcaacctaaaaggttgttctctgaatcctgatcaagtaaccacatacacgctaactgccttttagcctgatgtttctgttgaagcggaaaccggcaaaatgtacagggcaaattttcgagataaagaggggagagccgttgttattatgatttatgagacctacaaaggagaatacaacatcccatgacaggcaaatccgattcacctgtatgctctgtgaagatattatttattttattttatgaaaagttaagaactcttttgcaacaagttgttctttacctggagctgtatgtaagtacactctgaattctgaagcttactgtgccatatccaggtgtgtgatgctgccacaaaatgataatctgcattagtaatgcataatacgtattggggcacctagaccagtggtagaccattctttcattcatgttttaatacgatgaagattgacgctatcttcatattatgggttgttagcatgtatgctaccaaattccttcttgcctcttggactgttaagagaaaccatgggctcttggattggaggccagatcctgctgcagcaagcagctcaggtaaaaagaggcatgagtgctttttcttcggttcggaactttagtttcatgccatttgaaatgttagattttcattagagtatgcagagccaatcatttttttgaagaattcaaatcagccactcagaatttctgctgtaatggaggagttttggccacaacgaaagattacatgcatgtctatttccttgctgttgctgtatggtcttatggggaagtttgactattaggcaataatggtcaactaatagtacaatagtatttggaagagcgactgtacatgaatcgatagtatgcatcatagaagagcaactgcatacatgaatcttaggctgttaccaagatcgctgaaattttgtatttggaaaattgcagtattccaaagaaatattaatacaatatttaagtaaa

SEQ ID NO: 16007 - DNA, 1938 bp, Setaria italica
  Peptide Sequence Number=SeqID_81981
tcaataatctccattgcagaatcaatccacactaaccccatttcagtattcctgttgttggacaggacccgatctaccggtgggcggtggagccatggaggtgatagccatgcatcctcccattctcgcagcttcaagaccattcgcgtcactgatggaaacaaccaaagagccaccggtcttcaattgatctcccatctgatggggcgcataaattctcactgagactcaagtcgatatgaaggcaccactgggattctactgatatgaacaatgcaagtgacattaataaagtagcatatggattcctgctttagtaaactattggaccagtggattccggcagcactgagattgagacaggcaattagatgggaccatcgccattgtgcttgaatgatgaatcaaggacgagatcacgctctaacggctgaggaaactagacatgaataaaaaggaaagatgcacttttgttaaacaatgttttagcgaagttcatgcttggcagttcgaaaaggatggcaatttcatggtaagatgtttatgacaactaacacattgaggcagtaagagcccatgaatagttttctctgcagcagtactggaagaacaatttcttttccactttatatggtttctttaatggtttatgatttagagtttgaagcttgataatgtcatcacaagatttacttagatgtttggacactggtcatggttgtttggaaggctgatgtaagtggaccactcttgacttaactgaacttcttagacaacatttgatctgaaagctttccgacaatgtagaagcagaacttcttgtttgagtactgcatttccttttttttccttcttagatttaatggctggcattggaaaattttagcttttgtattcattgtgttcattccaataccaagtattgttttccgatgtatcactttggatgatctgttatttgtatatgctatttgcttcagcctgatcaacaaatctctgtgttgacagcatgcagcagtgaagtatcccatttgacttgtattttccttcagaaaaattattaaacctgaatgaatttgatgtgtttgtgtggtttgcttcattccagaatggtccacacagtaccacaggagcactatctttgatgatgagtccattcgtgtctctatttttgtttattcacaaacatatgtagtatgttagggatagtggtgttcttaccattcaaaggtcagtattcgttttgagttttagctctgtgaagatattatttattttatattatgaaaaggtcagtattggtggagcaagccttctgaaatctctttgattttgagagtatacatttctgctaaattcatctcatctagtgtccatctgacagtttagaactcttttgcaacaagttgttctttacctggagctgtatgtaagtacactctgaattctgaagcttactgtgccatatccagtcctggcttggatggatttctggactgaaccatgccggtctgcaatacgtggtgattagttctttgtaattccaaattgtgcaccaagttgtgcctttgcgactgagatgaacttcaacataattgttgcagagttgtgcctttgcgactcagatgaacttctaccttagatacttccaaaggaacccattgactggacttatgggtgatacaagtgatgcatcagttggctgattgataaaatgattcttttgtttgccccctttggccccttgtatatgtatgaaaaatatattagtacacagatcagtgatccaaaaatgttggtagtttgtttgggacatatttgatataatatctctcatgaatatgaacatacagggatcagaccataatatttgtttaacggtgacaacaaagtggggtgatgtactcgctctcaagtttatttttattattattttgt

SEQ ID NO: 16008 - DNA, 1335 bp, Setaria italica
  misc_feature (1298)..(1335): n is a, c, g, or t
  Peptide Sequence Number=SeqID_81982
ttgttgattcctgcgcccccgagaggacaggaggagaggacagcgggcgaggcgagggaggaaaattccagtccaagtctaacgcttctcccttctccttttcttcctccccgcggccctgggcctggtcaggtcggtctttgccgccattgcgcgaatcgcagcttcttcctggtgggaattcctggatcatcagggttgagcattactgagattgggagtggaagaaatcatgttcaggagaaagcatgcctctcatttcaactcaagtgatactgagcagcgagaagcaaagataaatgaattaaaatctgcacttggacctctgtctgcccgctgtgagaagtactgcagtgaagcttgtttgacaagataccttgaagcccggaactggaatgttgccaagtcgaaaaaatgctggaagaaagcctcaagtggagggcagcttataggccggaggatattcgctggcctgatgtttctgttgaagcggaaaccggcaaaatgtacagggcaaattttcgagataaagaggggagaacggttgttattatgagacctacaaaggagaatacaacatcccatgacgggcaaatccggttccttgtgtatgttttggagaacgctatcctgaacctgcatgaaggtcaagagaaaatggtatggctgatagacttcacaggatggacaatggcccatgccacgcctataaaaactgccagagaatgtacaagcatcctgcaaaattattaccctgagaggctggccactgcatttctgtttaatcccccaaaagtattcgaaaccttttacaaggctgtcaaatatttccttgacccaagatcgatcgagaagctgaacttcgtgtacctgaaggatgaggagagcatgaaggtcctgtacagttgcatcgatcccgaggtacttcctgtagagttcgggggaaggaagaatgtggtgtacaaccatgaggactactccaagctgatgctggaagatgacatcaaaacctcaagcttctgggcagatgacgcaaaacctgttaaccatgttgccagagggaccttggttgctgatgttacacctcagtcgtccgtaattgctgctaaagccagttgaggagtatccgcctaccgtgatgggagctattcgtatagctttaatggaggaaatagataagtgaaggcgctaatagcgtgttcattgtgaagagaaataaacggaatgacaaaatagatgttacttgttcataccaaaatttgcagtaatcaagcaattgatctggtaaataaaaaaannnnnnnnnnnnnnnnnnnnnnnnnnnnnnnnnnnnnn

SEQ ID NO: 16009 - DNA, 668 bp, Setaria italica
  Peptide Sequence Number=SeqID_81983
atgatgatgttagcattactgatatgtggagaacagcacaaatggagtgggatcagatagaccccaatgatttcttagctgaagaggtgagcaccccaggcccagggacactcaatcagcagccagatgcaaatggtgaacctacagctgacggccctaaccatgggtaaacaagaagataataccacgctggacattttggaacaacctgaactcattttcctcacgtcccacacactcagcgaagaggcaggcttgcagcggccgagatgcacatgctgagataggccttttgttgtggactagcggtggtgtgtctggtaacttatacagcgtatcggtggcatggatgcacgacgatgctccagccagtcgggcaaactgaagctctggttacgcaggcgcctccaacttgtagggtaggtcaggtttatggcaatccgattctgccttgaaatggtgccacaattttgtgtacatatttcttgttcttaggtcttggtcttagtactgtttgtgtagagaggtataattcatgagtaacttactgttatgtgtctagcatcgtttgcaaattccatgctgagaagtgtaaagacattgcttaaactctaaagcagctgtactaccagcttccagatttaaaacgctaaccaaaaaaaaaaaaa

SEQ ID NO: 16010 - DNA, 857 bp, Setaria italica
  Peptide Sequence Number=SeqID_81984
tagttgatgagaatgtggagaacattttgcgaatgataggagaggagaccgagcaaattgagaatgaacaagatgattatggaaatcctgtcaagaaatcaaagctgtcttcccttgtgaagggcttccatgaggactatcaataccttcacaagcactacaagcaactaattagcaaactagaaaatgttggctacaatttctctggttcagattcatctgattcagacacagaaggagacagctcagacaatgatgtcactgcaccaaaagtagcagtgaaggaagaaaacggactaaaccataagcctactaagcataataacatggaagcagagattgagaagctgaaacaaagtacagaagaacaggccaaggaaatatctgatctgaagcagctaattgataaagcaatcaaggataaagaagctacaagttcagagattgcaaatttgtcatctgagtatgaaaatctgaaattgttagttgaaactgcaaagagggaggaaggagaattacttaacaccttaaaatccaaggagaccgaggtcacaacattgtctggtgagaagcagattattgaagaagagagagataacctgaagatgttaattgcagacatcgagaaggagaaggaagatatgaggaatcagctgaaagatacaatggacaaatgcagcctcctatcatcagaagttgagaaggcccaacaggctgagaaagaagtgcatgccttgttggaagaaaaccagaagctgaagaatgataacttgatgctgttggttgagcatgataacctgaaagcacttcatcagaatttagatgttgagtgctttcaactagaaaggacaagacca

SEQ ID NO: 16011 - DNA, 347 bp, Setaria italica
  Peptide Sequence Number=SeqID_81985
gcgtatttcggtcactaacggcaagttttggtttgacatccccctctcgatgaacccactcaacagccccaggaacaaatgggagacgcatcatgaacatcatgtcatagtttacaacatcgtatatcttcacagacctatcgctggatatcgtgcagcaaagcaatccatcaaggctcacagctaagccttcgatgggactgagatgagaccgaaaatgcttagcgaattcaatcccagcaggtttcttcttccaaaacttgaggtgcccatctgcgctcccagtgataaagaagtcagcaggagagacagcgacgtgggtgacgacgtcccggtgcatatagctc

SEQ ID NO: 16012 - DNA, 340 bp, Setaria italica
  Peptide Sequence Number=SeqID_81986
ccaagattgcattcactgctaaagatcatgaacactgtattttgcagtttgaaaccagtatcgacggaccatacaagtcccacatacttataaataattcacatagcagaggctgccttcagtggcacgttcatgatgatgatgaactcaaaacaggttctgatcaagacaggcttgatcggatttgtatactcgtcgtttgttgctggtgcctgaggtaggcttgtgatgatcagagctcttcgacattggccttccaaaagaattgtaagagcggtctgtttttgccttgctgctgctgcgaagagaaccactggattccagtcttcttcccattcca

SEQ ID NO: 16013 - DNA, 535 bp, Setaria italica
  Peptide Sequence Number=SeqID_81987
cgagggacgaggccaaggacgccgaggccgccgcggctgccggcatgggggcggggatcccgcaccccgccgccggcatgcccgccaccgaccccatgggctactactacgtccagccgcagtaaaaccattgcccatcccgtatcttttactagtagcttcgatcgagccttgcgagttttagtaaattattgagagtgcgctgagctctgctgtttcccttgttctgttgtttgccgcctaataactctaagatggcgtgatgatcatctgatgtgccccctcttgagtacaagtagtgatattcgattcagatttgggagagggaactggttgtagttgggagagggaggctgtatgatggtgatgattcatgcgtgacagatactccttccatatttattaatcgtgtgctactccctgattattgtgatgcttcatcttgtccatctcagactgccatgaaatgtttgtattactataaattcctgaagctatagttgtgttatgtcattatgttcttttagatagacag

SEQ ID NO: 16014 - DNA, 754 bp, Setaria italica
  Peptide Sequence Number=SeqID_81988
aactatatatatatatatatatatatatatatatatatatatatatatatatatatatatatgctattactattttttttaactatgatctaaatttctctctcaatatacgtgcccaactcccagtttgctatattcccagtttgctatattctctcctctctggcgggaaggccaaccgctcctggtcggagctttccgtgccgcttctgtcccctccgcccctgcgtcgctggcgtcctcctcgcctccggccaccactgccgccatggaaatccaccccgagctcgattcaagaacccccatgctcggttccaccgtccccatgctcttgccgtccccgtcctcgattcacatccactgaaccagcccaaccctttgtgcgcgccgccggcctcgaatcgacggtgaggatgaaggtgaggtgcaggagaagatgaggaccggctcaagaacagcaattggtgaagcgtaccttgcgggagccgtcgctggcgtagtagggcacaaaccggaagcccccgtcgtcggactcgtgcaggcggcggacctcgtcgacgcccccgacgaggagctgcgcgagcgagaaaccggggccccgcgcggcgaggaccccctggagctcccgcacagcgccggggcgaggaagggcaccaggggacgccgggcgcgggccgggagtagaggacggcggcggaggtgcgcgcggagcagctacgggccgcgcgcgggtggagcggcggcgaaaggacgc

SEQ ID NO: 16015 - DNA, 1277 bp, Setaria italica
  Peptide Sequence Number=SeqID_81989
tgcttccctcctccacttccacttacagtaagagggttccgcctccgcagtcccgctgcttcgcctacgtctcgcgcgtctctcccccgcgggcgcgccaccgcatccgcctcgtgcgcgccgccgagcagcccgacggtgccgcctcctctggctctggagacgacgccacggccaacccaaccaacaacggcctgcccaagaacaggagggatattctcctggaatatgtaaaaaatgtccagccagagtttatggagcttttcataaaaagagctccagcgcaggttgttgaggccatgcggcaaacggtgactaatatgatcgggactttaccaccacaattttttgctgtaactgtcacgacggttgctgaaaatctggctcagcttatgtacagtgtcctaatgactggatacatgtttaggaacgcacagtaccgtctggagttgcaacagagtttggagcagattgctcttcctgaaccgaaagaagaagaggattcagcagattacgctcctggaacccagaaaaaggtgaccggggaagtaatccgatggaacaaggccactgggcctgagagaatcgacgccgtaaaatatatagagttgcttgaggcagagatcgatgagctgagccgccaagtggctaggaaatcatcgcagggaagtaatgagctgttggagtacctgaagagcctagaacctcagaatttgaaggaactcacgagtactgctggggaagacgtcgttttcgctatgaatgcgttcataaagcgtctcctggctgtctcggatccggagaagatgaagacaacggtttcagaaacaagcgcaaaccagctagcgaacctgctgttttggttgatgatggtcgggtacagcatgcgcaacatcgaggtgcgtttcgacatggagcgggtgctgggggctcccccgaaggttgccgagttaccacctggagagaccatctaattattcttttctagtggtatttactagtatttattaggaggaggaggaggagaggatttgctattgctatcataccaccgggattttactgtactgtagatggaggagaggctttgaaatgtttttggttggtgttattggccattgcttacctactatattgtgtagtagtaagtacatgattgatgatacaaagatgaacatgatacctcatagttcatacactacaccagacatatgatgatgcatgatcatctaccacttgtcttgattcagtctagttctttttcttttttgtcgttg

SEQ ID NO: 16016 - DNA, 264 bp, Setaria italica
  Peptide Sequence Number=SeqID_81990
aagcattgaggacaagtgcagcttgcctccagcgccgcagccgctcgaccggggcgcgcttggcggggatgtcgaaggggtcggcgtccgggccccgcacgtcgacgccgagcacgtccgcgcagtcgtcgtcgatctcgtcgcggcggcgctggtagcgcccgggcgacgcctcgggctgctgccccccggccattgccgcgccgcttcctcaggagagatgacaccgcacccctcccgatctcgggacgggcgggcgaaggg

SEQ ID NO: 16017 - DNA, 394 bp, Setaria italica
  Peptide Sequence Number=SeqID_81991
cccaccttcagcgtcacgcacctcgacgggcagcgcacggcgacacggctcgttcaccgcccccgtccccgtcccgtgatctagccagccgggacccgatccgccacccgttccgcacgcaaccccatggtaccagggccacgagcggcggcaaggcatctcatcggcgaacggaatatttcgcggtcggactccgtctccaccggaatctagggtttgccaccccggcgtcgcccccgatggtcccggccgcggcgccgccggacgccggcgggggtggggacccggaggcgtggtacggtagcatccagtacctcatcaacatctccgccgtgggggccgcctcctgcgtgctcctgttcctcctcgtcaagctccgcttcgaccaccgccg

SEQ ID NO: 16018 - DNA, 2398 bp, Setaria italica
  Peptide Sequence Number=SeqID_81992
ttttttttttttttttgttacgacgaaagcattttgcacattgcttttttttttcacacatctgcgtagactttgagcgcacatatttctggatagaccaaaagtattttgcacatcctccgacccttgaacgctacattttaagttgcactgagttttcgtcactgacgttacaatttttggctaacaaactggcagccagggaaaaacacaatggtatcatttatcaaaataatgaaaatagaaaaccactcacaagcactggcaaaaagatgtataaattccctacgggccttcagactttcatatatccttctgtcagtggcgccaagcatccggcagaatttaaccttttgtggatttcggctgtggacaactactcttgaggcttcatagccgggaatagaagaacttccttaatgttctgggaatctgttagcaacattgtgaggcgatcgattcccaaaccccaaccacctgtcggtggcaaaccatactcaagggcagtacagaacgtttcatctaaggccatagcttcatcatcaccagattgacgatcctttagttgttcctcaaaccgttgcctctggacaacaggatcattcaactctgtgtacgcattgcacacctcatgtttgttaacaaatagctcgaatctctcagtcagtccaggtcgggacctatgccacttagctaatggactcattatctctggatgattgatgataaatgttggattcacgcatgtctcctccaagaagtggccaactaacttgtcaagcaaccgtgatgttgtctggggaggtggacatttcacatcatacttcgcacatgcttctatcaaataccgattagcttcatcacttgacagatcttttggtatatcgagattggccatagcctccaaatctttaatcatatctatccttctgaagggaggtgtgaaatcaatttctattgggggatttgtaacaccatttgcatgatattttatcttgtagccacctgtaagctccttaaccatgcctgacaacatggtctcagtaagctccatcaaatcgttgtaatctgcgtaagccatataaaattcacaagttgtgaattcaggattgtgtgttaaatcaatcccttcattcctgaattgttttccaatttcatatacacggtccaatccaccgacaaccaattccttcagatataactcaggagcaatgcgcataaaaagcctcatgtttaattcattgtggtgtgtgacaaaaggccttgcagctgctccaccagcaatcatgttcatcattggagtctccacctccaaaaattcacgatcatcgagaaacttccggataaaagagacaactttagatcgtgtcttgaagatatgcctcacttcatggtttaccataagatcaagataccgttgacgataccgagtttcctgatccctcaaaacataattctcgatgttcctacccattcctggagtccacgatgcaggtgctgcacttccttcacccttctgtcgaggcatcatatgaagacatggagagagcacaacaaatttctgtgggaatacactaagctcgccacgcttgctttttcctggatagccacatatgccaacaatatcacctcgcttcacacccgagtggtacttagtgaattcagcttcatccaactctgaggtcctggcatcagccatcacttgaaccttcatgccaccaccgtaaagatcataaaagaatagcttagatgatgatgttctcttgttcatgatcctcccagctaaacactctgtcacatccagcttctccccatcgctcaagctcttgtacttctcaatgtattcggctacagagatgccaactgggaacttatgtggataggggtttacacctgcggtcttgagcgaatccagtgtcttgagcctattctcatagtattgagtgggatccatgtcatcatcgtcggcagcacttgccctctgagtcgttccacaggcagcagcagcagcagccgccttgttcttcttctcttcctccttgagcctccgctcctcctccagcttcttcctcttctcctccctcttcttcgcgttcttcgagagctgcggctcctctccgccctcacccgccggcggaggattctgtttgtcgccgccgccgccgcccgtggagagccccgcgagcttctcctctaggcccgacgccgagcccgcgccgtccgccatgtcgcccgcccggactctagggtttcgtggggaggcggcggagcggtttgaggaggagaacagatgagacgcggttgggatgcggaggcgcaggtggtggtagggttttagagcagctcgtggcggcggggagggaaggggaaaaatggcaggggaacccctcgccaagtc

SEQ ID NO: 16019 - DNA, 213 bp, Setaria italica
  Peptide Sequence Number=SeqID_81993
gcatattttggcttggggtttcttttagcagctttgaaacaaagtataaacatcttgtgcaagtgtaaagtgtatacttgttcaaatacaggatagaggatacaggtgaacctaccgatctgaagtattctacaaagcgtggttcttggaagacaattgatcgatattctttggttgccacaatagccatttcatccatcagagcacgccatt

SEQ ID NO: 16020 - DNA, 269 bp, Setaria italica
  Peptide Sequence Number=SeqID_81994
ctggctctcgtcggtgaactccttggacagagccggctgggggctcacctggaagccagggtcacgaatccgcttcagggtgtaggcctggcagacgttcagggtggtgatgtacgactcacgcagccgcagacgctgcttcaggtaaggatcaccttcgaggacgtccttgtgaccggcgacctgaaggagcagctcttttgtctcctcatagttcttccttagctgctcgccaagggagacccaggaatcgcagctgtgtatgataa

SEQ ID NO: 16021 - DNA, 851 bp, Setaria italica
  Peptide Sequence Number=SeqID_81995
tgtacaccgagggtctggcctagccggtgttctgcatcccggcggcgatacccttcatggtcaggatcagcgtgtcctccaggcccggcgcgtactcgctctcggggttcagctgcaccagctgcgccggctggctctcgtcggtgaactccttggacagagccggctgggggctcacctggaagccagggtcacgaatccgcttcagggtgtaggcctggcagacgttcagggtggtgatgtacgactcacgcagccgcagacgctgcttcaggtaaggatcaccttcgaggacgtccttgtgaccggcgacctgcggaaaattggcaattgttggaatcatatgcaataggacttatctgcctatggctatattagtacaaaaacacctgaaatgcaagcaaaacgaaatcttttagcgtgagctattagagcactttacctgaaggagcagctcttttgtctcctcatagttcttccttagctgctctccaaaggactgcagatcttcagccaccagcaatttatcatacacagctgcgattcctgggtctcccttggcgaaaaccatctcaagcaagtcaagggtaaccctgaagaatggccactcattgtacatttctttaagagtatggatgttcctgatgtccttctgcatgagatgcttgaatgctgcgccaaatccaagccaaacagggagatggaaccttgtttgcgtccaagcaaagatccatggaattgcacggagcgattctattcccccataggcttcctctttgatggacggctgccaatattcatcctaccatattcagtctcaggtgtagccgatctgaagtattctacaagcg

SEQ ID NO: 16022 - DNA, 988 bp, Setaria italica
  Peptide Sequence Number=SeqID_81996
caataccaagaagccaaggctaaatagcaagaagtgaagtgtttggagaaacaacaggcaggccggatcatattggtttgacaaattaatttgtgtttctatttaaaaggcagaagagctacaaaattgcctcaagttatactagttggggcatccggcaggatgatccccaacgaacatacatctctctgagctcaaacaatctgttcacacctccaaagtcctgttgcttgctgttcgcttcttgcatcgaattcctcctgcaggcgtagctgcaaaagtgccgaactttgtgatttcttcttgcttgcaatgtcatcttctacaacacagagtgttcctccacacatccaaccaactaccctacaagtcgtctttctcctcctttagtcggattggatggatggcaaccccattttgagctgaccgaacacggccccatctaccaaggcggggctcctggccaacaccagcaacaataaagcgtccagatttggcaatagtgagagaattgacaaatccatccagtttaaatttaaataacggtcgaatccccttagaatcaggttcgatcgcccagagacgaactaaaccatttcctgctcctgatgcagcaagatcggaaccttttcttgcagttacagcactaacccatgactgggccattgacacattttcaggtttatgtattccattttctttaggtaactcttgatcatcgctgtctagtgaagggtgagcatttctaacaatgaaagtaggctttttcctcattatgctccaaagctcaatgcttccatcatcagatccagataaaaattccttgtcgtcaataaagctgcagcactctaaagacgcagcagcaggagcacgaaaaactaactgcgattcttccggaatcttccaaagatgcattgtccggtcccgtgctacagtcagaatcctatctttactaaatgcatccatggtcaagatttcattctgatgg

SEQ ID NO: 16023 - DNA, 561 bp, Setaria italica
  Peptide Sequence Number=SeqID_81997
ctactactacccgccttccgattaccccctccacaagagccttatcatggataccctcctcctcctcagccgggctgggatgactaccacggcggcggctatgcgccacaccaaggaggaggtcactggggccggcacggctacggagggcacgcggggtggctagcagccggagccggagccgccgccgccgccggggctggagtttacggcgcgtaccaccgcttccgcaagcaccacgggcatggtggggatcagtacggtggtggttacggccatggctatggccaccatgctggcaagttcacgcacgaacaccagggcaagttcaagcactatgctcgccacgacggcaagttcaacaacaagcatgctgcgcaaggcaagttctctgccaagtcccccgtcacggtcctggacacatgagagctccaagctctcaccctgatggaagggccatatcgccttatagtataaatactatccgtaaataaacttccgatccgttacgatggatcctctgacgcaggaggcttgcttcgctttcaggactgcctccat

SEQ ID NO: 16024 - DNA, 474 bp, Setaria italica
  Peptide Sequence Number=SeqID_81998
aaggacggacggactggctgcttattcggatgatcgatcggatctacagcactggatccctcgaatgaatcttcacaggtgaataactcatttgccaaaaataatctacaaaaacaacggcttgttcgttccatgatcgatggcggcggcgaggatgacgacgacgatcatatatgcactggtttcatctggatggatggactccgtgaaggagcaaagaatgctttgctacggcttgtcgtcgacctgctcgctgctatccgttcgccggcggcccatcttgccgatggacgaggcgatgctgcccatgaggctgctggtgctgccggcgtcgccgctgaggttcatggcccggcgcgaccgccggtgcctgggcgactccagtctgctcccctcctcgtcgtcgccgccggctggcgcccgcgttgccaccaccagcgccgcgatgccgccgcggcagaaggggcaggtcgg

SEQ ID NO: 16025 - DNA, 403 bp, Setaria italica
  Peptide Sequence Number=SeqID_81999
cgccgtccgcggcggccttgctcggtgccttgtagtcgtagccgaacggcgtgtcgtctctggcgccgccgccgcccgcggcgcccttgtccggcgccttgtagtcgtagccgtacggtgcagatgagcgctcgtagttctggtaatcaaacggagagtttgaccgatccgcgtcctccacctcggctttgcttacgaagctgtcggggcggaggaaccggagaacggcgtccggcacggcggagcccggcaggacggcgcgccagaacacctcggccgtcgacggcgccgcatggctcagccgtccagccgctagcaagggcggcagcggcggcggcgaggagaacggcagcgaagcgcgccatggaaccggaagcagagtcaggcagccgcgtctcccgtg

SEQ ID NO: 16026 - DNA, 418 bp, Setaria italica
  Peptide Sequence Number=SeqID_82000
ggatgatgaaggtgcatgccttgaggaagctggaagaatctctgattccagccacaagtaagacatgacctggcatatgccttcttcaacctccgcatttagatttcggtaacctgagaagtacgattcagtagagcttatgaatagatttttcaatcaaattcaggaagaaaaaataatagaccaatgactgttcagttcagtaaaatttatctgtccatttacctttgaggcgcaaccacccgtgcatcagctcatgggcaaggatagagcctgttagtagcctgcaatggcattatgacacaagtggtgtgccatcatagaatgtcaaagaactgcaatatctgaatcaggtacattatttaagctatgtgcacagagataaaattgactgacctggggaggccgtacaagacaa

SEQ ID NO: 16027 - DNA, 1398 bp, Setaria italica
  Peptide Sequence Number=SeqID_82001
gactaacttcgtttgtacagcagcataggcagttctgaatccgtcaccgtaggctgtcgatgtgtcattggcaatctggtgcatgaagaactcgccaagcttcttctcggtatgagatattccacctttcttggacgatgtgggtggatacgaagaagaggaagacgaggcgtaggatgatgaaggtgcatgccttgaggaagctggaagaatctctgattccagccacaagtaagacatgacctggcatatgccttcttcaacctccgcatttagatttcggtaacctttgaggcgcaaccacccgtgcatcagctcatgggcaaggatagagcctgttagtagcctggggaggccgtacaagacaagtatcgcagtaacttcacatctcctggtcagcttttgtggctgagttcgcatgtccagtaacctatttccaccaattctgggcctcctaagtatactgctcacagtctgctcctcggacagacataggcctcttgtttcaggcatatggtgtggacctctgctctctccttccatggcttcattaagtgcttgccgttcaaccaagagcatgggtatctgctggtccagtttcatgttcatcccttcgtagtagtctctgatagaatggtacaggggttggcattcaccggtgtccatgactgcagaacccaggcattccatgcacaagctgcggccatctcccagtgacatatactttgtgttccttggctccattttctcacagctacagcaacgcggcgtcctgtcttgctcatgtaaagggcaatacttctggccccagaatggatgggctctgtactctatcaaaccactcctattcgttgggataaactgaaggcagacgtcgcattttgggtgatgcagctccttgtagcacaacttgtgatatggatctgtgcctagcaaggtgaactcggtctcgcggatagggtggccgcaggagcagcagcggaagcactgagggtgccagtaaattcccatgcagctcaagtaatgaccatgtcctatctcatgcttgcagcgtccacataccctgtgtcctctaggctgggcctgggagggggcataagggttgtaaggcgtgtaaggattcatgttgagactgtcctgtatggctcttgcaagatcctcatcgttgctgtctcctttatggtttcgctctttgggaggtttgacatcctcttcaagagactctgcaattgcacggtccaattcttcattgtcatttctaggcggatcattctttggtctaactggtggttgccagagagtgtcctcctctccggcagtcacccggggccgccgccggttcggttcgccaggcttctgccccttcaggaaagtgcagagccacttcatgaagctgga

SEQ ID NO: 16028 - DNA, 276 bp, Setaria italica
  Peptide Sequence Number=SeqID_82002
cggagcgtgccagcctaattttagccgaaccggagattgccatgggacggattcttcaggggtagcttcggttggttgctaggctgggctcttccccccagtctgttcgattcgacgccatggaggtctagccggccacttgcaggtgccggagctcgcgtttcctgacgcgcgctttctggcgttctgcaagaatctcatccctccaagagcagattcttcacccacaaccttgttgttggagttggagcccaaatttttttttttttttgtaag

SEQ ID NO: 16029 - DNA, 451 bp, Setaria italica
  Peptide Sequence Number=SeqID_82003
tcattagcagcctccacaggaggatcggaacacgtggacagcagtcagtacacatccaccaagcttcatccattgaggccagcacatgccttggatgtaatggagcgatcggcatactcaagaaatgcacaaggcccaccaagctcatcattaaaagaaagcggtatgcagccaatgggccaaatgcactaacaatctccattagcatctcggatgagatcattccagcaatccccgctatgaaaatctgtaaaattcaaagtgaaacataaagcataaacattataacaacaaaaatcaacagtcaaatcttcttgcgcttggctattttgaaaatatctggtgtaaatattagatgcacatgccaagtcgcaacaactacacttcattaattaagataagtagtaattttaagaaaaggggaacaaaactcagttaactcttttttatt

SEQ ID NO: 16030 - DNA, 171 bp, Setaria italica
  Peptide Sequence Number=SeqID_82004
tcccgacgccacctcgacctctgctgctctgcaccactgctctgtgctctccggtgcaggcagcaggccaccccgaccctctcgcaaaggttctagaaccttcgcgagagggtcggggtggcctgctgctgagacacgcaacaggggataggaaggcacacaggggatagg

SEQ ID NO: 16031 - DNA, 627 bp, Setaria italica
  Peptide Sequence Number=SeqID_82005
tcaatgggatgaagcttggtggatgtgatggagcgatcggcatactcaagaaatgcacaaggcccaccaagcgtcatcattaaaaagaaagcggtatgcagccaatgggccaaatgcactaacaatctccattagcatctcggatgagatcattccagcaatccccgctatgaaaatcttgtatggtgaatctgcaactacgtcagatattaacccagtctcttcagcaggcttcttaggagctacattatttacttgaaccatgctgtacaagatgtcttcctaatgtttccatgaactgagcaccataaggactctgcctgtctgccagcactgtaatgagccaatgaaatctggaagtagcagcagtcacataataatggcctacaccaggaagtctgctttacaattcctttgcttcacgatgctgctgaacgtgaattatgacacacccaattaaaataccctatttgagagatttcaatatgaccgtcagacaggaatttgtcgaatgatagaaatatatgtcatgaacaaacagcaactctagaatactttttgcaccatgaataaatctgaatatatctactccagaataattttcacaacatattgcaaggttcaccg

SEQ ID NO: 16032 - DNA, 307 bp, Setaria italica
  Peptide Sequence Number=SeqID_82006
cagacacaaatttcaaaacatgtcttgatccaaaaaaagtaagatcacaaattaccctaacagtgaattcgtattgcttcaaaagaaaaacatttatacactaaaatcaacattgtcacctcagtgctgttcttcaggactcctgtttctcctatcaactccctcggtaccgcgattgcacttgctggagttttcctgtactcacaactgaagagactgaagcccaagccaaagactgcttgaaagagattgtaattactgtatctctttcaagcagtctttggcttgggcttcagtctctgcactt

SEQ ID NO: 16033 - DNA, 755 bp, Setaria italica
  Peptide Sequence Number=SeqID_82007
caaacgccaatctaagagcgatgcttaaggatctcacttgtatcgataatttggtatccagtatcttataattcaccaaatatttcattctactgtggaatagcaatgtcccatatttcattctactaatagtaccacattcctgactgaacatctaaaggctcaaaaactacgagtctctacaactgttggcacatacgtaaagctcatctaatcgctagtcagagccgcggcagtctcaaacgcagaatcaccttgggtatttctgcaagtagagatcatatggagcatatccagcatacacggttctgctgccgaaacgccgtccatgtaacgaatgtgcagccatgcatgcagcctccttccgcatgaactccacaagcacagaaccaggttcaaacacgaaagcagtgtcactggtctcaacagcaggtactttttctgcatgatcttcagtcacatcatcagcatcttgttcacagtcccttccaggtttctccatttcgtctccaggctcagcgggactacagatctctgatgttctcgggtcttgatgtctcttttctactgcatcatcatcctttgcggtagtggtggcctccactgctgtatgtttattctcatctgcagctgcttctgtatgatcagtttcagaatgttgcgatatggggagagcagctctagtctgagtgccatctatgtctgtgtgcccatctgctacaggtgcttcactctcacaatgtgctgcatttgat

SEQ ID NO: 16034 - DNA, 2967 bp, Setaria italica
  Peptide Sequence Number=SeqID_82008
agcatctcggatgagatcattccagcaatcccgctatgaaaatcttgtatggtgaatctgcaactacgtcagatattaacccagtctcttcagcaggcttcttaggagctacattctgcagggaacaaaaaggtatgtcttaacatttaaaatgcaatatctaaaattctgaatgtcctcatatttaaaatatataaatctccaaaaaatcaatgtcgtaacaatcaaaatataatacagacaaatcaacccagttacttctgtcaagcagcaaacatactacgtataagtaaataacactgatatttcaacagctaatggtgatggaaagcaatcactgtgaactattgttaggtgtagaagaaaagtctggttcatgactctgacttgaacaccataatactaacagagacctgatgtcacatgtttgcatgatactattgttaagctagtcatgttggtggtatacagcacatttgacctggaccgcaaccccaaacaaggccatctagccacgcaacctaaggtgcaccaaccaggccaatcccctcattagaactgatgtgggagaatcactatccacttccatctctacggtagtttagtagaatgttacccttaatcagctacaggtggaacagataaccatatctacctatgtaaagaaacttttgtgcttttggaagtaaagaggccagagataaaaataagggaactaagatgtaagacaacctccatgaaataaactgagcaagaaaatattagaaatgcaacacaaaagagcaaaatagtaaagtcaatttttgttaaactaaatgaagaataactttgaagttgtcaaagtttaaatgatatctcttgccaccgaattgcactcagctgtagatatttggataattaggcttagcaatcagcatactcaatgtttgctaacaatacatttacttgaaccatgctgtacaagatgtcttcctaatgtttccatgaactgagcaccataaggactctgcctgtctgccagcactgtaatgagccaatgaaatctggaagtagcagcagtcacataataatggcctacaccaggaagtctgctttacaattcctttgcttcacgatgctgctgaacgtgaattatgacacacccaattaaaatacccaccatttcaacatattctttggggcgtcgaattctcaaagcagatccatttagagaccttccatcaaaagaaagagctgctgtagcatcctctggtgtaagaaattcagcaaatgcctgacgtttttccttgtttatcgtacaactgaggcatggtttagaccgctgggtgtatttaacaccggtagacaacaagaagtcattcaagcagtcaatcaacctatcctctgttgctgaatcaggtaaattttcaatgtgcaacctcctgagtggacgggttgcttgtgtaagctggacagaatctgcagacaaactattccctgccaatattgtctcaactttagttgaagggtcctttggagtagatggagtcatctggccaacagttgactgcaaagtagtagggaatttaaattggcttgctttcacaggaggttgatcccatgtggctgatttcttttctggggattgaatgaccggtggaggagtcttggtagttgcctgctcagcttgcggtgctgttttccttttccttggtgagtatccaccaagccgactttcatatctctggtgtgacccgccactgtatccaccactcccagatgatctttgtttgtcaacttcagcatacttcctccttgatttctccattgagtagtatggacgataattgcccaaatcatgtccatggtagttatgtctttgttcccttggcggtggggagatagacctgccatgtctctctcgatcacgatccctgcttctagaccttctccttttcaaccttggctctccgtggtatggttttgcatactcatttcttccatcatttctgtcagaatgtttggaaccttggaaccatgcagagtcctgtttctttgacattggtcgatcaacctctgaactcttctcattatcaaactacggtttttcctctttgtctcatttcgaagcttctcactcttatccttaattctatcattgtcaacggtttcatcattccctcttttcccaggtcctttctgatattcagatctcgtgacatcaccatttcttgctctgatttcaccaaggtttctatctttgctttcatcagctcggctactcatgcttgtggtacgtttctgagaactaccaatgcctttatctttgccaactgaacgatactcatctcctatggagggcctctctttcatggagcccctctttagtgcatctctcaggtcttccttctccgaggcctttggtgtatctttcaggccatccatcttgtaacaaccttttggcctatctttagagttgtccttcttggagacctcctttggtgtatatctcgtgtcatcctttctagagccttcccttggtataactctcaggttttctttcttggattcctcccttgatgtatctctaatcttctttttgaaccctccacaggcatatctttcaaatcctttctaagtttgtaacctcttccttgttccaagtgattagatgtacccttgtcattttcttggagctcttccttggttttcttagcttctgatgcagccttcttttcacgccgcaacataatgtcctgaatgctcagaggtcttgtgcgggcagcagtcccttcactagtgattctctgagagtcatgttcaccatgtatttttctactcatcttgctccttgagccaagaatttcgtcaagactcaagaacaacgagatcctaagttatctaacctagcatacacacagagccaaaccaacaacagcatttgacgacatgtggcttcctggtgagggtgctcgtcgccggcgaaga

SEQ ID NO: 16035 - DNA, 178 bp, Setaria italica
  Peptide Sequence Number=SeqID_82009
ggccccaagtaacttccctaaagaaggccggcttttgaagagggaacatacagggtcccaaatgtaaactcaagtgcagtgattgctgggtgtggcatcgtatctggatcattatctgtggttacatttgggaccctgtattttttattgatactaagcagagggcataaaaccatag

SEQ ID NO: 16036 - DNA, 242 bp, Setaria italica
  Peptide Sequence Number=SeqID_82010
ttgacattttcaatggaaagaagcttgaggatattgttccctcatctcacaactgcgacgtaagctatcaagtctcacgttctggttcagttacaagtgcacagaatttgtttgaaccttttgtttcccacttgcatcatacaggttcctcatgttaatcgtactgagtatcagctgattgacatttctgaagatggatatgttagccttttgactgagagtggcaacactaaggacgacct

SEQ ID NO: 16037 - DNA, 329 bp, Setaria italica
  Peptide Sequence Number=SeqID_82011
cgactccaaggccgacgccggcgcgtccaagacctacccgcagaaggccggcaccgtccgcaagaacggctacctcgtaatcaagaaccgcccctgcaaggttgtggaggtctcaacctctaaaactgggaagcatggtcacgcaagtgtcactttgttgctagtgacatcttcaatggcaagaagcttgaagatattgtcccatcttctcacaactgtgatgttcctcatgtgaattgcactgaataccagctcattgatatatctgaggatggatttgtgagttcttctgactgagatggtaacactaaagatgacctgaggctccc

SEQ ID NO: 16038 - DNA, 585 bp, Setaria italica
  Peptide Sequence Number=SeqID_82012
gtagccactttgttgccatagacatattcaatgggaaaaaacttagaagatattgttccgtcttcacacaactgtgatgtgccacacgtgaaccgcactgagtatcagctgattgacatatcagaggatggatttgtgagccttcttacttctgacggcaacaccaaggatgatcttagactcccaactgatgagactctcctgggtcagatcaaggaaggattttgatggggggaaaggatcttgtggtgactgtccagtctgccatggggggaggagcagatctgtgccctgaaggatgttggccccaagtaacttccctaacaaggccggcttttgaagagggaacagttgtatctgaaaattgaaatcgaaaaagacgtgtatcgcgacgaaagattggtaccgagacattcgccctagcttgagctggcttttgctgtagtaaactcaagtgcagtgattgctgggtgtggcatcgtatctggatcattatctgtggttacatttgggaccctgtattttctatggttttatgccctctgcttagtatcaataaattggtttggaatggttgaatttcaa

SEQ ID NO: 16039 - DNA, 697 bp, Setaria italica
  Peptide Sequence Number=SeqID_82013
ccatagaatcttgttaatagattttgcatgaaagcagtagaatgtaagaccttatagaacaagaggtggatttcacatactctttatttttcttgcaaggatccaacttggttgccatgtggtattaaaaaatatttaaagtatgcatggcctcaatgtttgccaggctagtatgattgacatgagtttatttataatgttctgtgaccacatcagttcttccatgctcatgtttgactttgtgctgtttctatttgaatgctcctgcgcatatctactgaaaagttgcgtttatttgaatttttgtcattgcactcttgcatgcctgttctgtgattttaacaaatgttgaaatattttatcatgttctaagattgtccaaaaatgcttactccatctaatcagatcaaggaaggatttgatgggggaaaggatcttgtggtgactgtccagtctgccatgggggaggagcagatctgtgccctgaaggatgttggccccaagtaacttcctaaagaaggccggcttttgaagagggaagttacttggggccaacatccttcagggcacagatctgctcctcccccatggcagactggacagtcaccacaagatcctttcccccatcaaatccttccttgatctgacccaggagagtctcatcagttgggagtctaagatcatcttggtgtgccgt

SEQ ID NO: 16040 - DNA, 814 bp, Setaria italica
  Peptide Sequence Number=SeqID_82014
tacgtcttaatcatctgcgcctccccatctctcccctgctcctccgcctcctcgtgatccatccaaaccaggggtagccatgtcggactccgaggagcaccacttcgagtcgaaggccgacgctggggcgtccaagacctacccgcagcaggccggcaccatccgcaagaacggcttcatccgtcatcaagggccgcccctgcaaggtggtggaggtttctacctcaaagaccggtaagcacggtcatgctaagtgccactttgttgccatagacatattcaatgggaaaaaacttgaagatattgttccgtcttcacacaactgtgatgtgccacacgtgaaccgcactgagtatcagctgattgacatatcagaggatggatttgtgagccttcttacttctgacggcaacaccaaggatgatcttagactcccaactgatgagactctcctgggtcagatcaaggaaggatttgatgggggaaaggatcttgtggtgactgtccagtctgccatgggggaggaggcagatctgtgccctgaaggatgttggccccaagtaacttccctaaagaaggccggcttttgaagagggaacagttgtatctgaaaattgaaatcgaaaaagacgtgtatcgcgacgaaagattggtaccgagacattcgccctagcttgagctggcttttgctgtagtaaactcaagtgcagtgattgctgggtgtggcatcgtatctggatcattatctgtggttacatttgggaccctgtatttttattgatactaagcagagggcataaaaccatagaaatac

SEQ ID NO: 16041 - DNA, 874 bp, Setaria italica
  Peptide Sequence Number=SeqID_82015
tagacgaaccaaacaaagaaaccctaagtcttgcggatccatcccaatcccatattcgcatccgtcgctgcatctcctctccccacttctccgccggactccttttagattctccgacatgtcggactcggaggagcaccacttcgagtccaaggccgacgccggcgcatccaagacctacccgcagcaggccggcaccatccgcaagaacggtttcatcgtcatcaagaaccgcccctgcaaggttgttgaggtgtccacttccaagactgggaagcatggccatgccaagtgccactttgtcggcattgacattttcaatggaaagaagcttgaggatattgttccctcatctcacaactgcgacgttcctcatgttaatcgtactgagtatcagctgattgacatttctgaagatggatatgttagccttttgactgagagtggcaacactaaggacgacctgaagcttcccactgatgaagctctgcaagcccagatcagaagtggatattgatgaagggaaggacattatcctgactgtgcagtccgccatgggtgaggaacagatttgttctctgaaggagattggtggtggcaagaactaagccactcattgctcctgctgtccacctgggatacatgtggtctattgctgagtgttctgaagcttagttgcgatacatacataggcatttcagttatctgtggttttattttatccccgaattcttgaggtgttactttctacttggttgtctgtctctggaatccctttaaacttaagtggatggtgtaattctggtttactcatcaatgtgaattgcaatatatatagattcgttgcattattcgattctaaaaaaaaaaaaaa

SEQ ID NO: 16042 - DNA, 393 bp, Setaria italica
  misc_feature (10)..(10): n is a, c, g, or t
  Peptide Sequence Number=SeqID_82016
ggagtggtcnctttatggagatatttgaccttctaaaccttatgatggctgaagggttgcagcctacttcacttatctatggtgtagcaattgatagcctttgtaaacgaggcaagcttagcgaagcagaaaagttattttatacagttgaagaaaaagggatagataatattgaagcactacatagtgccatggtctgtggctatttgaattcaggttggagtaactatgcttacatgctttttcttagggttactcagcaaggaaatcttgtggatcattttgcatgttcaaaattgatagatgacctttgtagagatgaaaatgtcaaagaagcttcagatgtactgagcatgatgctaaaaaaaatgttgttcctgatgtagtttcgta

SEQ ID NO: 16043 - DNA, 320 bp, Setaria italica
  Peptide Sequence Number=SeqID_82017
acacacaatcataggcattacattttttaattttacaaacgtcagctgcattgtacctctggaggtctctcagcggcagcgcagatcacatagaaagattgaaggatttgacagccaagatctgattcaaacaccagattccgctggatctagctagctaccgggtgagatttggcgcttcttgatctgctctagcgggtgaaggcgtagaagacgatgccgatgtagatgagcatggcggcggccgcgatagtaccccgtccatggcttccgcttgttcgggattggattgggttcttggctgtgcctctgcaggtggg

SEQ ID NO: 16044 - DNA, 533 bp, Setaria italica
  Peptide Sequence Number=SeqID_82018
ttgtgccgctgctcgggtattgcaagattggcgatgagcggcttctagtgtacgagtacatgaagcatggcagccttgatgttgttctgcatgacaaggccaaggctagtgtgaagtttgactgggctgcaaggaagaagattgcaattggttcggcaaggggcctcgcattcctgcaccacagctgcatcccccacatcattcaccgggacatgaagtcgagcaatgtgcttcttgatagcaacctggaggcgcgtgtttctgactttgggatggccaggctgatgaacgcacttgacacacatctgagtgtgagcacacttgcaggcacgcctgggtatgtgccacctgagtactaccagagcttccggtgcacgaccaagggcgatgtctacagctatggtgtcgtgctcttggagctcctatcggggaagaagccgattgatcctaatgagtttggagacaacaaccttgtaggatcgaagatctcacctgagacacgcaagggataggcaaggcacacaggggatagg

SEQ ID NO: 16045 - DNA, 456 bp, Setaria italica
  misc_feature (445)..(445): n is a, c, g, or t
  Peptide Sequence Number=SeqID_82019
cgcggacaggctccttgtcgcctccgcacgcggcctcgacctgggcgcgccgccggcgctcgggatggagagcgaaaccgccgccgccgcgggcagggagaagtggcggcggcaggggggttccggtgcacgaccaagggtgatgcctacagctatggtgtcgtgctcttggagctcctatcggggaagaagccgattgatcctaatgagtttggagacaacaaccttgttggatgggtgggtgaagcagatggtgaaggagaacagaagcagtgagatcttcgatcctaccctgacaaacacaaagtcaggggaagctgagctctaccagtacctgaagatcgcttgtgagtgccttgatgaccggccaaacaggaggccaaccatgatccaggtcatggcaatgttcaaagagctgcagcttgacctccgacagcgacttccnggacggcttct

SEQ ID NO: 16046 - DNA, 1740 bp, Setaria italica
  misc_feature (45)..(45): n is a, c, g, or t
  Peptide Sequence Number=SeqID_82020
ggtcgccggagtacaaaagcccgtggcatcgagggggtacttgcncgtacacaccaatggcggtctcaaccagatgcgcgctgggatcagtgatatggtggcagttgcgcgcatacttaatgctacactcatcattccagagcttgataagaaatcattttggcatgacagaagcaacttttcagatgtctttgatgaagaacacttcataaattctttagcaaatgatgtaaaagttttgaagaaactgccaaaggagttggtgaaagctccaaagtctgttaggtacttcaagagttggtctggagtagattattaccaggaagagatttctccactgtgggatcatcgccaggtcattcgagctgctaagtcagattctcgccttgcaaacaactaccttcctaccgacattcagaagcttcgctgtcgggcctttttcaagcacttagatttgctcccccaattgaagctttaggcaagctattggtggagaggatgagatcatttggaccatatatagctttgcatctacgctatgagaaggatatgcttgcttttagtgggtgtacatatggtttatctcaaacagaatcagaagaacttgcaatgatcagagaaaacacaacctactggaaggtgaaagacattgatccattagaacaaagatcccatggttactgccccttgacaccaaaggaggttggcatgtttctttctgccctaggatatccgtcaagcaccccagtgtacatagccgcaggggaaatatacggaggtgaatctcatatggttgatttgcaatcacgcttcccgattctgatgaacaaggagaaacttgcctcagccgaggagctacggcctttcagccaatacgctgctcaaatggcagctctggattacattgtttcggtggagagccatgtctttgtcccatcctattcgggtaacatggcacgtgctgttgcgggtcatcgccgttttcttggtcaccggaagacaataagtcctgacaggaaagcattagttcgattgtttgacaaagtcgacagaggattactgaaggaaggcaagaagctatctgaaaggatactagacatccaccggaaaagacaaggctctccacggaaacgaaaaggtccagtctcaggaacaaagggcaaagataggtttcggtcagaagaggcgttttatgagaatcctcttcccgactgcctgtgtcaaccagggtctccagatagcgatgattctcttgtcagcatctaagccaaggagcagatcatcctcgctgatcctggtggccaccactcctgtgtacatagagcaattcaggaacagagagcaaggcgcgcacacataaatttcaccgagcaaggtgcatactgaccagtccatgtacctgacataatgcgccaactattcgttggcgcaccattgtccagctgtggctgaagttctggcatggttggcttgttcagaagtcaacagctggaggtggaagcagctgtataaggctacatatgtagccaaattgctgtataggactacagagaagttttgagattttttagatcaggataattagctcaactgcttgtaagtagatggtaataaacggagaaatatagaattatactggagcagtttgacactaacattcaatcagagttacttattggcattatctccatcccacctctcagtggaaggatgagctaatatgaactggttgataattta

SEQ ID NO: 16047 - DNA, 1405 bp, Setaria italica
  Peptide Sequence Number=SeqID_82021
cgcgagccttcgccagagtcttacctccccgcgctgccgccgccgcccttcccgtcttcccgcggtagccggccgacgacgcggggcgcgggcgcggcagcgatgtcgtcgtcgtcgtcggctccggcgcaggccccgaggaagtgggagggtctggtggacgaggcgctggagcgggaggtgctggaggtgtgcctggaccaggcccccgagcgccgccgcgtccgcgaggcgttcaaagacgtgcagctcaacatcgaccattgcctcttcaagggacaatataatggcattggaacaaaggagacatatgagcgtaactctagaggcttggagatattctcgaaatgttggtttccagagaaccaacgcatgaaagcaattgtttgtttctgccatggttatggagacacctgcaccttcttccttgatggggttgctaggaagattgcttcagctggatatggagtatttgcacttgactaccctggctttggcctttcggaaggacttcatggatatattccaagttttgatactctagttgatgatgtagctgaacactttgctaaggtcaaaggaaatcctgaacatagaggtctgccaagcttcctatttggtcaatctatgggtggagcagttgcattgaaggttcacttcaagcaaccaaatgaatggaatggtgcaatactagttgcacccatgtgcaagattgcagatgatgtggttcctccttggcctgttcggcaagttctaatttttatggccaaacttctgccaaaagaaaagcttgttcctcaaaaagatttggccgagttggcattcaaagagaagaagaaacaagagcagtgttctttcaatgtgatcgcgtacaaggacaaaccacgtctccgaacagctctggagatgctgaatacaacacaagagatagaaagacgtctggaagaagtttcactgcccatgatcatattacacggtgaggctgatttggttaccgacccagacgtgagtaaagctctgtatgagaaagcaaagagccaagacaagaagctgtgcctctacaaaggtgcataccatgctatcttggaaggtgagccggacaatacaattttccaagttctcgatgatattatctcttggctggatcagcattccacaaaggaacaaggttcatcgccatgaatcgtgcagtgccatccgtcaggattaggtaaatttgtgtatcattgctgtaccccttcctgtcagggataccgtacccaactgtttgaatcccacttttgcggtaaccctgtaaaattcttacttctgattattaagttgtccatcttgtatctgaacgttgtacataactgatgcacgtgtatttatttaccacatgaattgtttaagaaaaattcaagtt

SEQ ID NO: 16048 - DNA, 452 bp, Setaria italica
  Peptide Sequence Number=SeqID_82022
ggacacctcgtccgtcatgcgtcggaggttgtgctggttcttgccgaagccgttgacgagctcgccgaagaggaggaagaagaccggcatggcggcgccgtgcacgacggcgcccgcgctcccggccgccatgagcagccagtccagcgggtccgcgaagccgaacagctcgtggaacgccacgctctgctccggccgcttcttgaccgcctcgcacccgccaccgccgctgcagctccccgcctccgccttccccgcatcctccgccattgccacgacgcccccttctccgcggcccgggtcctcctcacgacaacaagaggtggcgcggccctcaccgccttggcatcggatctaaagaacccacgggaggccggcgtatgctcggggctcaaaagccgctcccctcctcttcttcctcctcgagcagcacccccgctgctcgcctttga

SEQ ID NO: 16049 - DNA, 409 bp, Setaria italica
  Peptide Sequence Number=SeqID_82023
aaacacaaagaaaaactaaacgaccagtttaagtaaaccctgtaataccttctccaggtcttctatctcttggcgcaaacggttttcctagaacaaataacccacctctataattgatgtgcacataacaagacagtaaaattttcaggtacaagaaaaaagcaacccatgcaagcattcctcttcatattagtatacgagttaacatcacttttcagcaaatacatatatggcatgattaaactaacggatcataaggaaattcaaacagtagaatgtaaagtgcctccaccagacaactatatcctatacaaatgttcagttttcccttgttcctgtgaaaaaatcgcgggccactaaggatatctaatcctagacaaataaatagtatcagcatcctcagcatgtg

SEQ ID NO: 16050 - DNA, 486 bp, Setaria italica
  Peptide Sequence Number=SeqID_82024
tcgggagctagggttccggcgcgcctctcccagacgcgacgcctggccatggagggagccgccgcggcccggaagagatcccggccggagacggccaacggggtcgcatccggttaaaagcgcgcgacagaaacggagtcatttcaaactggtcaatcaagcaaatcgaagccttgcaccaagtttttcaggttataatcttaacctacttgaaataacatcagaatggtaacttatatttttcaccttttgttacagttacaaatcaaattctgtgtaagttttattttgatgcagaaggtataaaatattgtaaattgtgacacatgagctagtcttttgcattgaactacttgctgtcttctgtggttagtttagatgaatacgatactcgtaaagcgttaacaaaccactcttacttcatggtgtaattttttcctctagacctcggatgaatgatataactattttaatttggatctggtg

SEQ ID NO: 16051 - DNA, 1225 bp, Setaria italica
  misc_feature (1202)..(1225): n is a, c, g, or t
  Peptide Sequence Number=SeqID_82025
cgagcttgcaatctttcttttctcctctcctccgtcgcatatcgggagctagggttccggcgcgcctctcccagacgcgacgcctggccatggagggagccgccgcggcccggaagagatcccggccggagacggccaacggggtcgcagccggtgggaagcgctcgaaagaaacggagtcatttcaaactggtcaatcaagcaaatcgaagccttgcaccaagtttttcagtaccattgggtgcccttttggtgaaggatgtcattttctccactttgtccctggtggatacccggcagttgcaaaaatgctcaacctaggcagccctgctgtatctgcaccagcaagagcttctgtggatcatgctgctgttgctaactctcatccagcttcaacgggcaagacacgcatgtgcaccaagtacaacaccgtggagggttgcaaattcggtgagaagtgccattttgcccatggcgagagagaacttggtaggccagcctacatgtcgcatgaaggccctccgatgggtggtcggtatggaggccgacctgaaccgcctccaccagttgccatgggccctccagcagggaactttggcgcctcggctactgccaagatcagtgttgatgcctcccttgctggcggcataattggtaagggtggggtcaacacaaagcagatatgccgagttgccggtgtcaagctctcaatccgcgaccatgagtcagatccaaacctgaagaatatcgagctggagggcaatttcgaccagatcaagcaagccagcaacatggtgagcgacctcattgcctccatcagcgccagcatgccccccaaagccccacctgcgccagcaggaggccgagggggtgccccggggggcaggagcaactacaagacgaagctatgcgagaacttcgtgaagggtacctgcacattcggcgatcggtgccacttcgcccatggtgagaacgagcagcggagaggtgccgcttgagagctaggcattgagatgtacatgcatcttgggcgggcgacccgtatcgtctgtccattttgctactgtgactattctctttaccgcgttataggcatttagactgttgtattgcgatttgaatggatttattcagcgctagatttcagcctttttgagatatgtttgagaagaaatcgttaatctgccaaaaaaaaaaaaaannnnnnnnnnnnnnnnnnnnnnnn

SEQ ID NO: 16052 - DNA, 465 bp, Setaria italica
  Peptide Sequence Number=SeqID_82026
acaaacaaatagactagtaatggagtagagacagcaccttctgttcactgaaaacaagcttgattgacaatctttgtgttccgggctagtcataagtcagatgactgtgcagcaagcaaggatggcttcaagtagccagttgacctcactgttgagatttgtagataggatttttgatgagtcgtggtacctttactgaaagtggggtatcacgctcgtcgatgctgatttgttccctttgttccttctgccaataagggcacacacatgtattctgctatagtcaaatttttcgttcttagttgtcaggcattgattatttaccaaaattacaattctgcaaaggttgttcaccagacctactgacagttctgctgacaacttgtatattatttgtccgtgcttcctactgcaatgcttcttgtgccgtaggggcttccctatcaaaagaaaaaaaaaaaaaaa

SEQ ID NO: 16053 - DNA, 1966 bp, Setaria italica
  Peptide Sequence Number=SeqID_82027
tacaaacttcaactcgagacaccagagagatcagaaaagatgtacaagagcgacaaaaaggtgcaaaagctgatgatgtggaaagggcgaaggcttgtcaacttgaatttgggagttattgtctctggtccatagagcacaaagaagtaatgaaagattctatagtgaaaaggctaaaagatcaactctttgtagcacgctcatactatccgagcattgcaaaacttcaaggacaggaagctctcactcaggaaatgaagcagaacatacaagaccatgagagggttcttagtgtatcgacagttgatgctgatctaccatcctttatcaacaagaggatggagcagatggaacgaacaatagcgagatccaaatcttgcacagtggattgtaagaatgttgacaggaagcttcgccagatacttgatatgactgaggatgaagctcattttcatatgaagcagagtgcattcctctacaatcttggtgcccagacattgccgaaaagtcatcattgcctttctatgaggttgacgttagaatacttcaaatcatcgtcgctggattcggatgattctccttctggcaagttcaatagtccaaaatatcggcactatgttatactgtctaggaatgttcttgcggcttctgtagtgatcaactcaactgtgagcagttgtaaggagccaggcatccttgcttttcacatcctaactgatgctcagaacttctatgccatgaaacactggtttgccaggaattcatataaaagtgcagctatccatgtcataaactatgaagcaattattttggagaggttgccaaagtatagtatcagacacctgtatttgccagaggagtttcgtgttctcattaggagcactaagcagcctactgataatacaagaatggaatacctatcgttgttcagccactctcatttccttattccagaaattttcaagtatctaaacaaagtggttctgttggatgacgatttagtcattcaacgagatttgtccttcttgtggaatattgatatgggggacaaggtaaacggtgccgtcgaattttgtggtctgaaactgggtcaaatgagaaatgtcttgggtaaaacagcatacgatcccaagtcatgtgcatggatttcaggggtgaatttgattaatttggataaatggagggaacataatgttacagaaaactatctgatgctcatgaagaagttcaaattcaaggatgagcaatctctgcgagcagcagcatttcctctaagcttgctatccttccaacatctcatctatcctctagatgaaaaattgaccctgtcaggacttggatatgattatggaattgatgaagaggttgctcggagatcagtatcattgcactacaatggtaacatgaaaccttggcttgaattaggtataccacactacaaaaagtactggaagaggtttcttgttcgaggagatcaatttatggatgagtgcaatgtaaatccatgacacagatggacaaaatcagaacaattggcaatagattgctacatctaaagtttgtgtcggtgaagtgtggatgcgtgacttctcaaaagctctgcaccagaacaacaaacacagatgttgaacaggaaaagtggtgcggtcgttggccaacaatgctgtatggagtagagacagcaccttctgttcactgaaaacaagcttgattgacaatctttgtgttccgggctagtcataagtcagatgactgtgcagcaagcaaggatggcttcaagtagccagttgacctcactgttgagatttgtagataggatttttgatgagtcgtggtacctttactgaaagtggggtatcacgctcgtcgatgctgatttgttccctttggtcctcctgcttgtacttattagcctttgtattctgctatagtcaaatttttcgttcttagttgtcaggcattgatt

SEQ ID NO: 16054 - DNA, 296 bp, Setaria italica
  Peptide Sequence Number=SeqID_82028
atccggtgcgtaggccgctagcacggcggacgcagtggcggggccgacgcccttgagcacggtgagctcggtgatggccctgctgaggtcgggcagcgccgcgaacgccttgcgcgatgccgactccaccaccgcgtcgtccaagcccttgacgaaatccatcagtctcggcctccacttgccgcgggagagcttccactggaggaggcgcaccagctcgggcttggcgatgaaggggtccggttcgcggccccgcaggagggcggggaggtcgtggcggtagaaggagtccacgg

SEQ ID NO: 16055 - DNA, 276 bp, Setaria italica
  Peptide Sequence Number=SeqID_82029
ctagatttctcccctgtttgcttgtggcataactgaggcaatgctgaccacacatttccacaagagaaattctttagtttatctgtaacctgccttttacactctggagggatcacatgaatcgctatcagaacatgaagaagaacataaacaagaacaagacacaataaaactgatgtggaaatggacttctttgcatccctgcagcttcccatgacaaaggccccagttagggaaagtaagtccactatcataactatcagcaacacgcggttg

SEQ ID NO: 16056 - DNA, 314 bp, Setaria italica
  Peptide Sequence Number=SeqID_82030
agtacctagttttagtacgaatataggagtgcgtatgtgaggaatgatgacggagaactgcaagacatctgacttgaatggtccttttgagttcccaaacattacttgcatgaatgtccctgatgtggccccaagaattacgacttcgtcagataacccaggaatatgccaatcaaagcaacaattatgacaacgataaaggagaagccgcctcctcgcctcttgctgatctcccgtctaaccaaatcaagttcctgtctaagcctatgatttggttagacgggagatcagcaagaggcgaggaggcggcttct

SEQ ID NO: 16057 - DNA, 1033 bp, Setaria italica
  misc_feature (1)..(30): n is a, c, g, or t
  Peptide Sequence Number=SeqID_82031
nnnnnnnnnnnnnnnnnnnnnnnnnnnnnnaaaaaaagataaacaactccagcacatatgtaatgccacaattcaaggttgggcagttaccgcatttgacaacataaacggtgaacaaaagcaattgatgcattttccaagttacagtgtcagcaatgcgcacgacccacccaatgaaagttaacaacaaaagaagaaaagcttaaactggctcatcattcctcacatacgcactcctatatcgacaaaacaggacggagaactgcaagacatctgacttgaatggtccttttgagttcccaaacattacttgcatgaatgtctttgatatggctgaaagaattacgacttcatcagataacccaggaatatgccaatcaaagcaacaattatgacaacgataaaggagaagccgcctcctcgcctcttgctgatctcccgtctaaccaaatcaagttcctgtctaagcctatgattctgttgaatcgcggagttcttttcttcagttaatttggaaatcaaagctccagcctctgaagatttttcttgaggctccatgcgctctctcagtgctctggtgaatcccccagcagggccatctccattttctgattcagaagccctagacggtgaaccttcttcagattcctctggaactggagagggtggctgtggaggagcaacgtaggtcactcgcaatttgacctcttccatcttattccctgactcctttgtaaacatatccgccgtgacatccttcatagtaataataccagcaggtgcaacaatgctttggactaagaacttatctttgcactgcatgtcagggggggtctcccgttgtgcttgcattgtcacaacgacatcgcaagtagaccgtggtgagacaacccctgtattgggtcgcactgaatacttctttggactagtagttttcaccttgaaggcgatgtagtcgttgctgagattcgacagctgcatggagcacgagatctgcttcttcaactcgaatgggaagcggagctcgagaggg

SEQ ID NO: 16058 - DNA, 291 bp, Setaria italica
  Peptide Sequence Number=SeqID_82032
cacccaggggaagcacaactaattactgatgtgctggctcatgccgaacaagctagaacaatgaagttcaaagaagaaaaaagttcgcatggttcacgagctagccaacctgaagttctgcagtgtcctgtctagctgtggattatcttcatatatacctagtcatctctcacccgtgtgattttccattcgcttctcgagctcatcatgtacctgtacgtcctggaactttaatccgccgtcttggcttgagatgctaaatggaaattctagactgttgtgctacaaaaa

SEQ ID NO: 16059 - DNA, 353 bp, Setaria italica
  Peptide Sequence Number=SeqID_82033
tcgagaccactcgcccggacccgggaggagatgggcaccgggggagacggggagaaggcggccccggcgctgccgctggaggcgctgctggcgctcgggctcgaccagcgcaccgcggagaacgcgctcgtcaacagcaaggtcaccgccaacctcgccgccgtcatagccgaggctggcataaaggaatgtgacaagtcagttggcaatcttctctatgcagtcgccactaagtacccaactaatgcacttgttcatcgtcctgtccttattaaatatgtcttgtcaataaagataaagaaccctgcacagctagatgctgctttgtcatttcttaccaatacaggtcctga

SEQ ID NO: 16060 - DNA, 540 bp, Setaria italica
  Peptide Sequence Number=SeqID_82034
ttggccccttctatatcaatatcaggaaaatcttccctagttttgtattactgatactgtaatattttgttgcaggaattaacagaagtgataatagcttgattcaagttgaacgccttgaataccatattagagaagagcttaacaaagtagcccctcgagctttggttgttttgcatcctctaaaggttgtcataactaatttagattacggaacgataatgaaccttgatgccaaaatgtggcctaatgctcctgacagtgatgcttcagcccactataaggttccatttcgaagaacactctacattagttattctgatttccgcctaaaggattcgaaagatttctatgggcttgctcctggtaaatcagtaatgctgaggcacgcattcccaataaaatgtgcggaggttatctatggagacaatccggatagtattgttgaaatccgagctgagtatgacccttccaaggctacaaaaccgaagggcgtgtttactacttgggtttgtccgtagtcctttccccttggggttt

SEQ ID NO: 16061 - DNA, 410 bp, Setaria italica
  Peptide Sequence Number=SeqID_82035
aaaataaagttttaagacaaaaccactaatcctacatttacaccattaaaacaatggggttttgaactagaaactaaatacgtcctactttgatgtggatttcaggctactttgcggtagataccgactccacgcctgagaagctggtgttcaacagaacagttaccctccgcgattcatttggtaaagctggacccaagtgaccgcgtcggttttgtttgggtgcagaggcgcacctgaactatacagtttgtgaagaaaatgatagtttaatccatgacaacagtttaaaggccttccaccctgtaaaatgtgcatgtgactgctgtttgcttgctttgattgaatctgattttgtatgatctttttagtggtaggtacccaatttgtgtcaaaagctacatatgcat

SEQ ID NO: 16062 - DNA, 554 bp, Setaria italica
  misc_feature (495)..(554): n is a, c, g, or t
  Peptide Sequence Number=SeqID_82036
aggaaggaactaggactaggggggaatcttaaacccgcactcaaaagaggtgataaaggacgcctatgctgtaccgtcacttgccactgcggttctgggtgacaagttccagtttgagcgcctcggctactttgcggtagataccgactccacgcctgagaagctggtgttcaacagaacagttaccctccgcgattcatttggtaaagctggacccaagtgaccgcgtcggttttgtttgggtgcagaggcgcacctgaactatacagtttgtgaagaaaatgatagtttaatccatgacaacagtttaaaggccttccaccctgtaaaatgtgcatgtgactgctgtttgcttgctttgattgaatctgattttgtatgatctttttagtggtagggtacccaatttgtgtcaaaagctacatatgcatgatttgggatgtccgcaatcaaaagctgcatatactatcattatttggagcttacttccggcannnnnnnnnnnnnnnnnnnnnnnnnnnnnnnnnnnnnnnnnnnnnnnnnnnnnnnnnnnn

SEQ ID NO: 16063 - DNA, 515 bp, Setaria italica
  Peptide Sequence Number=SeqID_82037
actcaaggttgaagtgagattgtttgagaaactgtttctttcagagaaccctgcagagctcgaggattggctgggtgatctcaacccgcagtcaaaagaggtgataaagggagcatatgctgtaccatcacttgcaaatgccgtgctgggtgacaaattccagtttgaacgccttggttacttcgccgtggattcagactcgacgcctgaggggctggtgttcaacagaacggttaccctgaaagactcctatggaaaagctggacccaagtgatcgactcaccatctgccgaggaagagacttgctcgcttggcttggcgaaaaagattttgttgtaatactgttagtggtttctaaatagttgtagcacactgccctgcatgagattctgtgggggtacccaattttgcagcgatgtcaccaacactgaactgttgttttcattaatggcaactcaaattatgtttacttaaaagtaaaaattatttaacatcccgagatttgatgtaggaac

SEQ ID NO: 16064 - DNA, 1110 bp, Setaria italica
  Peptide Sequence Number=SeqID_82038
tctgccgcagcttgagtcgtttctggccatcgggctcgaccagcgcacggcggagaacgcccttgccaaccgcaaggtcacagccaacctcaccgccgtcatcgccgaggctggtgttactgagtgccacaaatctgtgggggaatctcctttacactgttgcgaccaagtatccggcaaatgcgctagtgcaccgaccagatctcattaagtacattctttcagaaaagatcaagaattctgcacaattggatgctgctctgtcatttctttctaccttaggtcctgattccttggatccagtgaagtttgaagaggcttgtggtgtgggggtagttgtttcgtttgaagagattcagtcaacagtcaatgatgttctaaatgaaaatatggaggccatactggaacagcgatatcgtataaatgttggcagcttatgtggactggttaggaagaggcaaccctggggtgatgctaagttggtcaaggaggaaattgagaaaaggcttgtggaaattttaggtccaaagacagaagcagataatgctaagcctaattaaaaagaaaaaggagaagcctgccaaagttgaggaggagaaaactgttgctgctccaccttctgaggaggaactaaatccgtactccatatttcctcaaccagaggaaaacttcaaggtccatacagaaatatttttcagtgatggaaatatatggagagcacataacacaaagagcattttagagaaacatcttaaagtaactggaggaaaagtgatgacccgctttccccctgagcctaatggataccttcatattggtcattccaaggctatgttcattgattttggacttgctaaagagcgcaatggccattgttaccttaggtttgatgatacgaacccggaggctgagaagaaagaatacatagaccatattcaagaaattgtcacatggatgggctgggaaccttacaaagttacatacacgagtgactatttccaagatctatatgaacttgctatttgtttgatacagaagggactagcctatgtcgatcaccagaccctagaagaaattaaggagtatagagaaaagaagatgaatagtcca

SEQ ID NO: 16065 - DNA, 1065 bp, Setaria italica
  Peptide Sequence Number=SeqID_82039
caaaacaaccaaagctcgaggggctactttgttaagctcttctctaatatggtattcaaggcgttcaacttgaatcaagctattatcaaacaatgttatgtccaaaagaaagctgaatcgacttgtcacggacaagtgggtagatgggtgggatgatcctcgactattgacactagcaggactaagaaggagaggggtatcatcaacagcgattaattcgtttatccgtggaattgggataactagaagtgacaatagcttaattcgtgttgaccgtctggaatatcacatcagggaagagcttaataaaacagctcctcgatcgatggttgttttgcgccctctaaaggttgtaataactaacttggaagaaggaaaagtaatggatcttgatgggaaaatgtggcctgatgcttctgatactgatgcttcctcccactacaaggttcctttctcaagaactgtctacattgagagtactgattttcgcctaaaggactcaaaagattactatgggctagcccctggtaaatctgtcatgctaaggtatgcattccccataaaatgcacagatgttatctacggtaatagccctgatgatatcgttgaaattcgagctgaatatgatcctttgaagacttctaaacttaagggtgttctgcactgggttgccgagccagcacctggtattgaaccattaaaggtggaagttagattgttcgagaaattgttcatgtcagagaatcctgctgaattggaggactggctgggggatcttaacccgcactcaaaagaggtgataaaggacgcctatgctgtaccgtcacttgccactgcggttctgggtgacaagttccagtttgagcgcctcggctactttgcggtagataccgactccacgcctgagaagctggtgttcaacagaacagttaccctccgcgattcatttggtaaagctggacccaagtgaccgcgtcggttttgtttgggtgcagaggcgcacctgaactatacagtttgtgaagaaaaaccatctgccgaggaagagacttgctcgcttggctt

SEQ ID NO: 16066 - DNA, 741 bp, Setaria italica
  Peptide Sequence Number=SeqID_82040
ttttatattaatcaatgtttgaaaaaaacctacagattaagcaatgtttttctgggggtaagctagcagtatagtgaataatcataaatgataaacttgtgatttgcatattacgcctttcttttaacatattccctgaaaacaccaaataaaggatgaatgattacggcatcatatatggtcaaatgctctcacaaaagacagatctttgcctttacttttccatctttcggatttaatatgctttctgtcatgtctcaggcccctgatgatctccatagtttgctgctattgtggtagctaattggtggtaccctattgatctggtgcagctttgcgtgtggaatctgtttctcccttagacattgacacttacattcagatttctagagatactcctgatgcttctccccgtcgccattctatttctagcccaattccaagctatgatgatccaagcatgccagatatgttatcatgccatatatagttttgttgataatcagttcctctgcagattatcggaatgcattcatttgttgtcatgatatcaatatcaaggactgtggacccctcaaaggaaagagttgagtgtatggttaaacaggaaaaaatatgatgcagctgactcataaatatgcagcaaaaggggaagggaagtatcgaggatgtggctcttgcctaattgttcttactaaatgcatgctgtaaaaggataaatttgtattgtcaccatgagag

SEQ ID NO: 16067 - DNA, 262 bp, Setaria italica
  Peptide Sequence Number=SeqID_82041
ccgttctccgatttttttttgtaaggttctccgaatttatttcgctaacaaccactgcacgcggcgtaaaattgtggatgacaaattgggggtaggattgatgtgatgagccacatgggcctcacacggatcagagccgaccctaagccgccgattaggtagcactatgggctactggggatagcccgttgggctgctgtgacgctcatgtcactttgcttctgatattaaaggaactaaaaattgtagctcagctcgtcag

SEQ ID NO: 16068 - DNA, 538 bp, Setaria italica
  Peptide Sequence Number=SeqID_82042
ctgtatcgtcgccaaacaagaggtagccagagagagcagtcagggcatagaccacaacacatagcactgtactgatcctcccaaccttgtacatgttctggggtgtcttctccttgagctcattgtagattggctggacattgaaatggcagatgtaggcattcgtcatgatgggtatcacgacaagcaagtcaagcatcgcctctcgtgagctgaaatctggccccatcctgggcatactgatcttgccctcggcgatcttgatcaaagcaatgatgcaagacacaaccacaaacacgacagcaagggcaactgatgcggcagatgacaaactcagcgagtcaatcttctcaagtgcgcacaatggcgcaaggaagatcacaagaaccaccaagatcagcagcttccggttatcccactcgccatggccaatcaactgatccatgacgccgatgtgcttcagcgacccggacatcacgtctccaatgatgatcaggtacaccactaggactccggcgttgttgatgatgacacacat

SEQ ID NO: 16069 - DNA, 943 bp, Setaria italica
  Peptide Sequence Number=SeqID_82043
tacctaaataaaacttctaaaaccttccataaactggttatcttttacacacataatcctatgatcaagcaactgtctaaatctaaaaacagatggcaaaggagaacacatgcttcaaatccaatcattcacagccctgatggatactgacttaaacgagttgttggtgtctgctatatgaaaatgcgcaaaaaataaaacttttcaatgaacaggcacattcatatagcatcaacaaagttcgtcagggtgttgtttctgctgaggagatgaaggcaatgcagcattattaaccgacaagtccagatccctaacttcaccgaagatctcggtcttagttctggttacaggaatgtcggtatctgaatctggcgtgcgatatttaacaccattgcttccggactccaattcttcatcgctaacttcatctgtccggcgccttgaggtcttcagaatgtcaagacccatttctagatcatcctcaaccttggctcttggacggtggggtgcatcatcttctggcacattggcgtagctggtctgtggctgtactacctcatgttcctcttgaacaatagctcttagattgatcttagaaggcttcctttttgtgcaccagaactcatgacagttgcgcacgcagccgtggtcatacacgtttggctggttgctgtacttgtacttgatattctcatatgttgtcttgttcgttgcgataagataagaatggaacccagtgagaccaccgacaaaccagaagcaaatgagtttcatttgcttctggtttgtcggtgctggagattctttaatggccttcagcaatgaatcatgacccctactcatgagaagcttgatgtacaatccacacattgaacatacatagatacacaggactgccgccgacgaaacaaaacagaagaagtaccggtaatttctctcatga

SEQ ID NO: 16070 - DNA, 341 bp, Setaria italica
  Peptide Sequence Number=SeqID_82044
ggccgagctcctcggggaggtggccggcgaggtcggcgtggttgaggtcgacggaggcgacaacggtgaggtgcgggtcggtgggggacggcgcgcagaagatgccggcgtaggcgcacacgtcgggcccgtgccaggtgcccgtcacgttgtgcgggtcggagaggatggcgcgccgccacgcctggagcgcgacgtacgcgtcgcggaggcgcgggttcgggaaggagtaggacgggtcgacggcggccacgtcgtcgtggccatggtcgccgccggagctgtactggaggagctggcggcgccggatgcgagcggcgtcggacgcgctgaggccgcgg

SEQ ID NO: 16071 - DNA, 1176 bp, Setaria italica
  Peptide Sequence Number=SeqID_82045
tgccgctgtcacgctccgcggtcgcatcagggcactagccgctagggatggcggccctggcggcgagccgccgcctcctccatctccggccggggctagagctatgcctgcggtcccgtccccaatcctgctcctcctgggcaaaggggacggctcgtttccggcgcgacgttccgcgccggagtctcgtgagctgccggcaagggtctttcgaagaggggaatgcagcgatggataaggctatgcggagtccggacgaacagctcagtcattgcaaggatgggaacggcacaaccctggatcccattggaaagaactttgccaatgagtttgcgcagcattctttggaagaggaggcgactgatgacgtgatgtgcggaattagtgaaagcgtggtgcgagatgtggggaaggctgcaattgaattgcttgctgccagagcattcacagtttctgagcttaggaagaaactacgaagtaagaattatcctgttgatgcaattgatgctgtggttgctgatttcaaatcaaggggtttgctgaatgatggtttttatgcggaatcattttcgcgatcccggtggatgtcatcgacatggggtccaaggcgaataaaacaggcacttcgccaaaagggtgtgccagaggcagaagtagatcaggcaacaagaagtgtgttccaggatggtgatggccatgggaaagaggcaacatatggcatatcggaagcttccatggatcatctgtttgctcaggcattaaaacagtggcagcgtgggcaaagcttgactctggagaatcgccgtgggcgcattgtgaggtggcttcagtaccgagggttcaactggtccgtgaccaatgccatcgtcaagaagttggaggctcagcacccttcctgacccttctggattgcaagttagtgtgctgtttttgtttgggtatgtagtagctgcactatctgattagtttgtgataaacatgcccagtcaacaatgggaagaatacaagatcattgctttaacaccttagttcagatattctagattgagaaatgggaatgtgaaaatctgacgaaatgagtagcaatgaagacttcaaagtttcaattgagaagttctatatgaaaaatgtgaaataaaatgtggacaaaaaagaaaatgctctagtggcattgat

SEQ ID NO: 16072 - DNA, 256 bp, Setaria italica
  Peptide Sequence Number=SeqID_82046
cacgcggattcgcgcttgccctgcgggtgcgggtccgcgcttcgcctagggggtccggccgcttgggttacttcgtctcgctgaggtcctgccgcgccgaggagctcccgggaagctcgattcctcgcggggttttcgaggcgggggcgccgatctgcggctgccggcaccgcggcattgggcggcttcccaagtccccgggcgtctggagcttcgattcggccggttccaaggcaccgccttcagctcgtctcca

SEQ ID NO: 16073 - DNA, 338 bp, Setaria italica
  Peptide Sequence Number=SeqID_82047
agcatgagccccaccacgaggaggcccagcagggtgatgagggacaggtagaggagctgcgtgacggcgtcgccgaggaacgcgtagtagaccggcgggaagaaggaggcgacgatcatcacggcgatccccgcgtagtcgagctgccagaagaggcggttgaagcggtgcgagtggcacgccagcaggtgcgccgccgcgctcaccgccaggcacgtcatggcaccccccaggaacaccgtccgcggccacctcggcaccaagtggtgggcggcgccatggccgctgctgctcacgctccccaacaacacggacgagaagtccgtgctcgccaccaa

SEQ ID NO: 16074 - DNA, 435 bp, Setaria italica
  Peptide Sequence Number=SeqID_82048
ggaggacggcgacgagggggaggaggaattggaggatgaggcggaggaggaggaggaggagccgcggctcaagtaccagcggctgggcgggagcgtgccggcgatcctctccaccgacgccgccgcgtccatcgccgtcgccgaccgcatggtcgcgctcggcacccacaacggcaccctccacatcctcgacttccagggcaatcaggtgaaggaaattgctgcccacacggcaactgtcaatgacatcagctttgacgcagacggtgaatatataggcagctgctcagatgatggcacagtagcaataagcagcctcttcactgatgaaaaactgaagtttgagtaccatcgccccatgaaagcaattgctctagaccctaattattcccggaactataggagatttgctactggtggtttagcaggtcaagg

SEQ ID NO: 16075 - DNA, 241 bp, Setaria italica
  Peptide Sequence Number=SeqID_82049
tgataaactttgcattgcacacatgctcatccatacacgttggagcttggatgcttcatccatacgccgacacgaacagttggcacaccaaactatacacattactagtagtactaatgctagcatctaacctaactgcttatgatcaactaaagtcagttgttgggtccccagttgctgaggtacatgacagtccggagctcctcctcctgttgcctcgctttcctcctcgcggccgccg

SEQ ID NO: 16076 - DNA, 951 bp, Setaria italica
  Peptide Sequence Number=SeqID_82050
ccggctaaaaagggtcttattaaatctggttttcataaaacacgagatccaaacaaccacttatgtacaatcacatagaaacatcaatatcctaaacagcacttgctgtaccataatcatccttagttacattcctcactttgaatcttacttttacttgggtaccctgtaagacagcagggcagcgctgagtttataggctcataacctcatactgtcagacaccctttgaaccagggaggtcgacccactgaagctggagctctatttccccgcactccacgttctttagcctgacaaccaggtcctgcttcaccttcccctcggatacataaatcgagctctcctctgctaggcagttctctctgttgggcaccactttctttacaatggttttgtcgggaacatcctggagtttcatcttcacaacgtcgaccaatgggcggatgtccagctctgcattacccattgaatcgtccacaaaagtgtccttgtcaaacacttccaatctgacaggatctgcagggttctcaatggagagggtgagttcttcgttccattccggattggtgctcttctttatcacccgtgttttcaacttctgcttgccgatgcggacgacgacgtagggatcgctggatcggaggtcgcggatggcgaggttcacccccctcacgacgcgcaccttcaccagtccgacgagatggtccagcatgatgctagcgttcttcttcctctccaactcctcttccccgcagccgcaaggtctcctcggcaatttctggatgggggttctgtctgtctatctataaaaaagcgctccggcttcgcggagtagctgacgctatgaagtcaagaaaaagtaggatggcgtatggccggcgatggttggttgatgacctccagcggctgctctcttcctccccctgctcttatactcctccccaagcg

SEQ ID NO: 16077 - DNA, 2101 bp, Setaria italica
  Peptide Sequence Number=SeqID_82051
taggtccatcagatctggtccaaggtcctctagtgcaattttgctgtatgaagttaatgtgataccaagatttaacttcccggcaatatttcttgagaggattataaggtcggatcttcctgtaaatcttcgggccttggcttgtagagctgaaaagatttatttagaaaatcaaagatgtggtttttctgctgtggattcgaagccatcgtccacttcttctcagcttaagttccatagttcaacaattgatactacttctagtaagttcaaagaagcacctcccacttctggtgttggtagtgtgcttccgtcaccttcttctgagttgattggcaaatggggtgtatatggaaacacatgcagaattgataggccttgtgtggtggatgagatccatcttcgaagatttgatggcctcttggaacatgagggggctcacaggtgtgtttttgctagtatcactgtgaaagcaccagttctagaggtatggaatgttctcacggcatatgagaatttacctgaatttgtgccaaacctggctatcagtaggattgtccttcgtgataataacaaggtccgcataatgcaggagggttgcaaaggcctactgtatatggtccttcatgcccgtgttgttatggatcttcggcgaaaacttgaggaagagatcagctttgaacaagttgagggtgatttctactcattcaaagggaaatggcgctttgaacaacttggtgatcagcacaccttgttgaagtacatggttgagactaaaatgcataaggacacatttctctctgagtctattcttgaagagatcatatatgaggaccttccgtcaaacttgtgtgcaatccgtgattatattgaaaaggctggagctgaaggcagcaactccacaactcattctgctgcaccaacacacccagatattgatcatgcagaagacaggcaatcagagaaagaatctgcatcttgctccttcagttccatgaaacagagaccaaaagtccctggcttgcaaaaggacattgaggtcctcaaatctgagcttgagaatttcattgctaagtacggtcaggatggtttcatgcctaagagaaagcatcttcggtctcatggaagggtggatatcgagaaggcaataacacgaatgggtggattcaggaagattgccagcacaatgaacctttccctttcttacaaaaatcgaaaaccaagaggttattgggataatctggagaacttgcaagaagagatcagtcggttccagaagagctgggggatggatccttcttatatgccaagtagaaaatcttttgagagagcaggtcgttacgacattgctcgggcattggaaaaatggggtggcgtgcaggaggtttcacgccttctttctcttgaactaaggcggcctagaaggcaagctgactctgatgatgagaggcagtctgaatcaccagctggcagtggcattacaaagcagcatggaatgaaacctgataaagccaacacgtccctggacgcacataaatggctcctgaagctgaaggatttggatgttaactgggtggaatattagattaataagcttcgaaaaagaatgctgtaaattggaggtgatctggaagcattcttttccatcgttggaggtgatctggaagcattctttcaaagaagctgtaaattgtgtacagaaaaattgcaatgcacaggccaacccatgctgaaaggttacaggcaacaggttttcatttgtcaactgtcatgactcttggtcctcaagtgttacttatctagaagtgtcgactactactcccagctttgttgcagtcaaattgatccgtggatttgaccaagacaaaccactaaacgcaaatgggggtgttgattgcatgtacctgttcaaaggtgtttagagtcaggtggtcaatcgttggggttaactcgcgttcacaggttactgatgatgtcagttgaccgcttacttgttgatgtgagttgacttgacccttcttttttgacacagaaagagaaggttactgtccagtagtttcaatcagcacggttacattagtctgtacaaaaaaaaaaaaaa

SEQ ID NO: 16078 - DNA, 398 bp, Setaria italica
  Peptide Sequence Number=SeqID_82052
ggtcacagctttggtggaaaagtggccctgagtatggtagaacaagctgcaaaaccacttgctcgtcctgttagagtgagtgatacttctaatcctgcatgttatcatgtagtggaaatgggattgcagatattatttcttgtcttttgtgataattttcttaaagtgttgatcctcaaaaggtatgggtccttgatgctactcctggcaaagttcgtgctggaggagatggcgaagatcaccctgctgaacttattgaattcctcagaagaatgcctacgcaggtttcttcaaagcaggaggttgtcaatgctcttgttaaagaacaattttctgtggatgttgcacagtgggtggccacaaatctacgtcggagcagtccattaggtcagcgatca

SEQ ID NO: 16079 - DNA, 1644 bp, Setaria italica
  misc_feature (1596)..(1596): n is a, c, g, or t
  Peptide Sequence Number=SeqID_82053
gcccgagtccccgtgcgccctccaccgccgcccgcacccccaccccccgcccccccgttcgctgacccccaactcgccggtggtctcatggcggcggcggcgccgccgcgctctctctccgcggaatcgaggaggaccgcgctcggcgccgtggccctccccgcgctgcgacccggggctagggttcgcgcggcacggccacgcgaggagaattttcatacccatcgcttgctgatgtcgtctaatatgaattcaaggtcgtcagtgtgccctccatgcaattgtgctcaaatggctttggctgacacaggaattttttatcagcctgatgttggcaagcatgctggagttctggcctatgaactggtccaagggagccttgtgcagtggaattcatttatggacaaatcgatacctgatccaccaacagctgttctccttcatggcatccttgggagcaggaaaaactggggatcttttgcaaagaggttggctcaggaattcccgatgtggcagtttctcttggttgatttgcgctgccatggcgactcagcatcaattaagaagcgcggaccacacactgttgcctcaactgctcttgatgttctaaagctggtagtgcagctcaggctggcccctcgggttttggttggtcacagctttggtggaaaagtggccctgagtatggtagaacaagctgcaaaaccacttgctcgtcctgttagagtatgggtccttgatgctactcctggcaaagttcgtgctggaggagatggcgaagatcaccctgctgaacttattgaattcctcagaagaatgcctacgcaggtttcttcaaagcaggaggttgtcaatgctcttgttaaagaacaattttctgtggatgttgcacagtgggtggccacaaatctacgtcggagcagtccattaggtcagcgatcatcttcaagcttctcatggacttttgacctaaatggcatctctgagatgtacaagtcttatgaagatactaacttatggaggattgtagagaatgtaccaaggggggttcatattaattttctaaaagctgaacggagtttgcatagatgggctcttgaagacctccaaagaattcatactgcagaagaattagctgcagatgagggtggaggagttgaaatgcacgtgcttgaagatgctggacactgggttcatgcagacaacccagatggtctgtttcggattctttcatcaaccttccgagtcgagactaccataagaggaatgcaagattaagtaccaaaccataatttgacccagtgatgatatgagctgatgcaatgacatgaatagaatacgtgtataatacaagaagggagggggaaactgtcagcgatgatgctaactgcaatcattggcatgtttgttcattttgttcattcttttcctgtatcgcgtgtgtaacatgatagccatctacacctgtgctgtttcttcgaggaacaaccagttattttatcttttatacactaaacgaatgagaaacattttcaagctcgtctcagtaattgactcctaactttgcagctgaacgaaaaaaaaaaaaaaaaaaanaaaaaaaaaaaactaaaaagagaactagaccaaaggacacacagggat

SEQ ID NO: 16080 - DNA, 266 bp, Setaria italica
  Peptide Sequence Number=SeqID_82054
cgccgacgatgaagacgaagaaacccgcgaaaacgagctcctggttggcggcggaatgatagttcagccccgtgctgtggatgagcatgcagaaacccaaggccaggaagcagaccgccgcgcgcgggaggcgacggtcctggggcgggatcagctctagggcgcccagttcgccgccgccagcagcggcagcggcggcggcggggcggtcacggcggatcccctgcatcgtgtctagctaggtggcggcgcagtctaaggctaag

SEQ ID NO: 16081 - DNA, 1437 bp, Setaria italica
  Peptide Sequence Number=SeqID_82055
actgatctcatcgaagaaactaatgtttaatggcaaacgaggcttcttacaaatgcaatcatcattgttttacatcatcgtagacttctctaaagcaactggggaagcatgttctgaataggctaagcaccactccttgaactggagatgcatcttctccccaaaaaaaagaactaaaccaaaaaaaaagaaagaacctacgtttagaccaattaaacattagtttcttcgatgagatcagtaactgtttggtgggcaaagtggacctcttacaaatgcaatcatcattgttttacatcatcgtagacttctctaaagcaactggggaagcatgttctgaataggctaagcaccactccttgaactggagatgcatcttctccccaaaaaaagcattaaaagacagcagaatcattgaaggaaaacattacttccacatacaagtgcttggccttcatcaccctttgcttagttttctcaactatccagcaacattcttgtattcaaacaaaattcttcacaacctcaatgaattatcggtcctcaatgctcctctttcgggacttgtgtggccgttcagattttaccatgctattttcgttctggagtattctgtgttcttgttcattctgctcaattttgatgctgatatcccttgacttccttttaccactgttgatttgtgaagcatattcagcatcgtgtgctgacagccaacgcatggatccagtctggggtgggatcaaagatccagtaatatgacaattcatttctgtatccacacttttgacagaaaaccttatcattgttccttttttaatcatgtgctctctatctgagcgactcacaaatctcccgccatcacctctccttttgaatttgaacttttcatgaatatcgtcagacataatggccactgagaaaacccccaacacaatggcatgaattgactccttcccgagcatttcaaccttcccttccaggatcatgtctggctggggagagaagagcagcaggttcgcatgcacgcgcaggccgaagtacggtaccaagccattcaggattttggcttttacgatattggttttcttcttaccctcgactacagtttcatcttccacctcgcgctcctcgacctcgactaattgagtttcatgagccagtaacacgccatcaaatcgctcttcgtacctgcgttgtaacgaggatgatccaaaatcgatcacagaataccgagacttgccacaccccagaaagggaaaaataaaaaattgcaagaaagcacagagaagcacggtccgtggatgaaaggccctgcagttcatggtaatctccctcggaacttgttacgcttacagaacggatacgcggacattacgatagcgtaatctagcatcgtagcgcctatcgatttgccccggggcttaagctcgtggt

SEQ ID NO: 16082 - DNA, 392 bp, Setaria italica
  Peptide Sequence Number=SeqID_82056
ctaatccgatagtcatagaagcaactggtaatacaaccttaggtagatcataatatatgactaatttgtagtaagtggccacaaattctgcggcggataacgagtagggtcaatatactaccttgcaaatgggcacacgacaatgcaccagacgaatccacaaaccaatccaacagagataagattcactgtctacaaaagaccagaggtcggtcataacagcaatgacgcgtccgattttgtagcaatggtaaatgcttcaactgaaactcgtcagcggggatccacacagctgcacgtctgagatgtcggagagcctctgtcgtgagctggatgccatcccaaactcctccaggtccgaaatgctcttccgcttgttcgccgtctcttgc

SEQ ID NO: 16083 - DNA, 375 bp, Setaria italica
  Peptide Sequence Number=SeqID_82057
aggcggaagaggaggaaggcaagaaggaggaggccgagaagaaggaagccggcgagggcgagaaggttgcggctgcggcggcggaggaggagaaaccggcggcggccgtcgtcgtcgacaaggacatcgccctgtggggcgtgccgctgctcccgagcaagggcgacgaggccaccgacgtcgtgctcctcaagttcctccgcgcgcgcgacttcaaggccggcgccgcgttcgagatgctccgccgcaccctccgctggcgcagggactggcccggcttcagcgccggcgccgacgccgacctcccggaggagctcgcgggcgcgtgctacctcgacggcgccgaccgcgagggccacccggtgtgctacaacg

SEQ ID NO: 16084 - DNA, 393 bp, Setaria italica
  Peptide Sequence Number=SeqID_82058
cttaattctttctcaagatcagctatttcccttgttagttttctgtttgattctaagcaaacttgcaggtcacctctacatgcttctaattcttggctggtcctttttaactccatacgtaaactttcagaatcaccttctagatcaatgcaatgctgttgactgtccttggatttggcaggaaagatattttgtttgctcagtttctatcctcacttcaagtatctgtgatacctgatttcgaagttcagaaatttcattcaataagagctccctctccccttcgtcaaagaattgttgggacctcttcagttggcttgagagacgaatattttctagtgcaaagcgagttacttcaggatttttatcaaatcttgccctaagaaggtcaat

SEQ ID NO: 16085 - DNA, 1296 bp, Setaria italica
  misc_feature (799)..(799): n is a, c, g, or t
  Peptide Sequence Number=SeqID_82059
aacggcctttgtaagatcaacaaatcgaatgacgtgtgggaactttttgcagacatgataaaaaggggatacgttcctgatgctatcctctacagtattattattgatggttttgtgaaagctttggagttgcaggaggctttcaggctgtatcataaaatgttggatgaagggataaaacctactatttttacatatactagcctcctaaatgggctgtgccatgatgatggacttcctagatttaggaaattgatgagggatatgattggggaggacctggtacttgacaagattttgtgcacatctattattgcgcactattgtagacgttcaaatatgaaggccgccatggaaatgtacaaaaaaatggaaagctccggtttatcaccagatgcttttgtatatacttgcctaattagtggcttcagtaaagttcgtgcaatggatggtgcacttttgatgatggaagaaatggaaaaaaggaatattaagcctactgtagtaacctatacagctctcatcgttggataccttaaaacaggggatgagaaacaagctaataagatgtacagaagtatgtgtgaggcaagcattgatccggatgacaagctgagttgtatattgggcgttggcaatgacgggggtgactgatttttattctcggaaacatcaagcaaattcaagcaaattcatagagaagagccaaattcagattgcagattaggaatacaagtatcaaggattacaggtatcttcaagcaaaccaaaagttcaaattgagcaaaggatatgttgntaaaaaaatggtgatgaatcaaccgttgtaagaagtggttgggatccatattggctagccatctgcccatcatgggcgttactcttcagattgtttccagatgcagtcatgcagtgcaaggaatctctatcctggaagattatcatccatagccctgctaattggattggtgttaatggttctagtggattggtttaagaatggagctgcgtcaatttggtgggtaatggattgaaaagctatttgggttgttttagtttgggctgcagattagagagggttggttaggcattgaagtagtttcattttatcgggttggtatcaggatccaaaccaggggttgcaggccaattaggcactcgggctgtcgggcaggtccacacgccactgcaccaggctgcaagcgaaggagcagagactcacgcctcccctcccgcggtcccgccatcgccgccaggactccctcacacctccacctccgcctcgcttgcgccgct

SEQ ID NO: 16086 - DNA, 379 bp, Setaria italica
  Peptide Sequence Number=SeqID_82060
gcggcgtcggcgtcgtcgtccgcgtcctcgtccgccaagatcgcgccggcgcagcagcacgaggcggatggcgatcgcgaggatccccttcacccgcacgaggagccggagcccggggtgctgatgacgctggtgtcgcgcggcgacggcaccaaccacctccgccggatccgcttcagcgaggactacttcggcgacgcgtgggcggcgcagagctggtgggcggacaactgcgaccgcatcgtcgagctctacagcgtcgtcgtccagcccgagcacccctcgcacggcgaagacgacgacgacgacgatccggcggcgcccgtcaccccgtgccaatccgaggacgacgaccaccaacctccggatgggattgggg

SEQ ID NO: 16087 - DNA, 1311 bp, Setaria italica
  Peptide Sequence Number=SeqID_82061
ccagtcaaggatggtggttgggctgtgggtgtaacacgaggaaccgttttacagggattgcagacagatgcacattatgaagaaagaaaaggcttgtacattggtcaagggactgctgcaatgtcaagatctggaatatttcgtgttcctcatgggattgcagtagagatgactgagagggtatacaagctcccatctttcaatgatgtgcttgaaggggagatatttcttcaaaatttaccaagtgttgtggctgcttgtgttcttgatccccagccgggagagcgaatactagatatgtgtgcagctccaggaggaaaaacaacagcaattgccctccttatgagggataaaggagaagttgttgcccttgatagatctcacaataaggtgatggatattctgaagttggcttcagagatggacttgaattgtattaaagcttataaacttgatgccctcaaatctgtacggaagactgatgaggcaacagttgttggcatggctgatggtcactgtgaagcaattaagacattggctgaggactctgacccttgccatgccacagtagatgacagagctactaatgtagttgaagacagctcaacaacaacagtggcgcagtctgaaacagaacaaccttttctgatagatggcaaaaacccagaatccaaaagatatgttagtaaggcagaactaaggaagaatttaaggcggatgaagaatggaccaggaagaaataattgctctggtggtagagttgagaagtcaaagggatttttcctaatagctttgatcgagtcctccttgatgctccatgctctgcacttggcttgagacctcggctctttgctggtgaggaaactctagagtcgctgaaaactcatgcaaggtatcagaggagaatgtttgatcaagctgtcaagctagttcgcccaggtggggtgattgtttattccacgtgtactataaatcctggagagaatgaggccttggtgagatatgcattggatacctacaaatttctgtcactggcatcacagaacccaaaagttggagggcctggtattgttggttcatatgagctattcaacaagacatataccgaggaatggttgacagagcatgaagctgagcttgttcagaggttcgatccatcttcaccagtggataccattggtttcttcattgcaaaatttaatgtcggagagaaagaggactaaatggaccgggtgaaagtttttgtgcgtctgacttcatatgcttgaggctgcaaaatcatggcacggatgtcagctttcaacttcgcag

SEQ ID NO: 16088 - DNA, 275 bp, Setaria italica
  Peptide Sequence Number=SeqID_82062
aatacatctaagaaattattccatcgaacgtactcccccctggatgcgggaatagcaacatgaactaaatgtcctgtccaagccaaagaacttaccccgaaaagtcctgacaaatgatgattgagacgagattccgcatttttgaaccacgaaaggcttggcttccatttgggttgtagatgtaaccaaccccctattaaggatagcgtagaaagaaataatagaaaaagagctccagtataaagatcttcattggtgcgcaatccaattgtata

SEQ ID NO: 16089 - DNA, 413 bp, Setaria italica
  Peptide Sequence Number=SeqID_82063
ggtttagtcagaaggtaaacgccataccaacccactgtttccagagggaggcacagaacatacaaggacagcaccagcaagctttggatgaagttctgaaccttgcaagcatgatatatattgctgcacaatcaaacctccaaatgaatgtccaattagtacaggtggtgaggggatctccttctggatgaaatcagcgatatcgccagtatgcgtctactcgagtgtgcctgctactgcctcctgtggaacactactttcaccctgcgcgcggagactgagggcgtagcaggggaacccggcccgcgagaagaagggaagccagtgctcggcccagcaccaggccgcgtggaagctcccgtgcacgaacaccagcggcgggcgctctccgggcgccggcgggggctgggcga

SEQ ID NO: 16090 - DNA, 674 bp, Setaria italica
  misc_feature (13)..(13): n is a, c, g, or t
  Peptide Sequence Number=SeqID_82064
agtttaccttgtnacacacttcaacagttatacctaacaaaaaaaactccaacagtttacatcaacatcagccaaatcagatccccacaataataattatactattccaaaagcaactgaatgcaaaaaattgaattaatattgctaatcaactctctggaggtattctagcatagtttttttgtttactcatctaattgacatttttaaaaaaaaaattaaaccacgttctctactatcgttagttcacatttagcagtagcaacagaacatgaaaaattcctgtaggcgatagatgattgaataccagaaactccaatggaccaaagagaagtatagttcttgaacgagttatgtaagagtcagagaggaaagcccctatcaaagcaaacccagctgtggcaccaaggacattagtgactgtagttgcagagctcgaaactcccatatgcatcgttccatggagataagtgaccatattcagcatatttgggacattcacgatgtttgccacaactgtcagaaaatatataaaccatgctgccctgactcctccgtgcacccctctattgatggggtttcctctccagtccacaaagcctctaattgccatggtacttatatcaagattttgccttctccctcttcactactggctgcctgctgagtccctc

SEQ ID NO: 16091 - DNA, 1364 bp, Setaria italica
  Peptide Sequence Number=SeqID_82065
ccaacccccctcgagttggttgcctcgtctttcggacaactcctattaccattttgtgttagcatcagataacatccttgcagcctcagttgtggtcagatcgacagttaaatcatcactgaatcctgagaggatagtcttccatgttattactgacaaaaaacctatcctgccatgcattcatggtttgctttgaattctctctatcctgctattgttgaagtaaaaggtgtgcaccaatttgattggttgacaaaagaaaatgttcctgtacttgaagctatagaaactcagcgcaccgtcagagatcgtttccgtggaaatcaccttgcaagaaccagtgctagtgatagtccaagggtctttgcagccaagctgcaggcaggaagtccaacatatacttctgtgctcaatcatattcgaatatacttgcctgagttgttcccaagcctcaacaaggtcgtatttcttgatgacgacgttgttgtccagcatgacctatcaccactttgggatattgatctagctgggaatgttaatggtgctgttgagacttgcagaggtggagacagttgggtgatgtctaagaggttcaggaattattttaacttttctcatcccctcatcgcaagtaattttgacccttcagagtgtgcttgggcatatggtatgaacatttttgacctgaatgcatggaggaagacaactatcaaagataaataccatcattgggtcaaggagaatctgaagtcaaacttcacactttggaggcttggaacattaccaccagggcttatagcatttaaaggccatgtccatccaattgatccatcttggcatctgttaggcttgggttatcaagaaaagacagatatcagtagtgttgaacaagcagcagttatacattataatgggcaaagtaaaccatggctggagattggttttaaacatcttcagccattttggacaagacatgtgaactactcaaatgaattcataaaaaactgtcatataatggagcctcagttgtagattgtcgtgacaaaataaataaaagcatatattaagtgaaattaaattcgttatttggagacaggcatcaaagagtttgtgaaggtaacggggagcttagtaatcccccagacagttacatgcgctgatggaggatattcgatgaacagaaaggaaatgtttttttttcacccatttactctaggatccctttcttttaatttattccatttgtatcatagctcatgaaattacaatattgtttaggatggttcttttgtatttgatggagcaatatataagttgcctgatttggcagaactgatggtagccccatccctattgtaattgat

SEQ ID NO: 16092 - DNA, 3141 bp, Setaria italica
  misc_feature (70)..(70): n is a, c, g, or t
  misc_feature (3082)..(3141): n is a, c, g, or t
  Peptide Sequence Number=SeqID_82066
gcgatgatttcagtggagcaaatcattttccatttcctttctgtatgcgacaatagccaatttggttgangttttttgtcactaggaatatcatcagacaaggaagctttgatgtgatagatatgcaagatggtgatgcttctgttatcaacacaatatctgcaactatcaaagaatctgatgaactgtgtgaaggctttcgtaaatcagataaagcccgtcaatatgttgacgagttggtaaaaaattcaagatttcctccagcggagtcctttgatgactatgttgataggtttctctttcctgatattagtggacatagaaacaaagcacttttcttaggttacatggtgaaatgcctgctaatggctttcactggaaagcgcaaatgtgacaataaggatgatttccggaataagaggttggacctggctggtgaattgcttgcaagggaacttcgggcacatattaggcttgcagagagacgcatggttaaggccatccagagagatttgaatagtgaccgcgaattacaagaccttgaacgttatcttgatgcatcgattgttactaatggtctaaatcgtgccttttccaccggttcttggtgccatccctacaaaaaaactgaacggtgctcaggaattgttgcaactttaaggagaacgaatcctcttcaaatgatatctgacttgaggaaaacccgtcagcgggttgcttatgctgggaaagctggtgatgctagatatccgaatccatcctactggggaaagctgtgttttatgtccactcctgatggtgaaaactgtggacttgttaaaaatctagctgttactgctattgttagctctagggtggagcagcctttgattgagagcttcatttcttgtggaatgagtaagctgaatgaaattcctactgagaacattcaaagaatggataagatctttctgaatggcaattgggttgggtgttgtactgattcagcttcatttgtattgcgattaaggtgcatgagacgcagcagtctgatccatccacaggtcgaaatcaaaagggacaagcaccaaaaggaggttcgtgtgttttctgaagcagggcgaatcctcagacctctcctggtggttgaaaatctaaataaaatcagaaaaccaaagggccgctcatactctttccaggaattaattcaacaagaaataattgagttcattggtgttgaggaggaggaagatatacaatgtgcctggggaatcagacatttgtttgggagtgaaggagagatatctagttatactcactgtgagctggatccttcttttctgctgggattaagttgtggcatcattccttttgcaaaccacaattttgctcggagggtactataccaatctgagaaacactcacagcaagctattgggtactccacgacaaacccacacatcagagttgatactctttctcatcaactatattatcctcagaggcctcttttcaaaacagttatagctgactgtcttggcagatcagattatactattggaagaagagatgactttgctagaccagaatatttcaatggccaaaatgcgattgtagcagttaatgttcatcaggggtttaaccaagaggattccttggttatgaatagggcttctcttgaacgaggtatgtttaggactgagcacctcaggagctataaggcagatgtagaaaacaaggatgtaaccaaacgactgaaaatgaaggaaaagatagactttggaaaaatggaaagcaaaagaggacgtgtcgacaatcttgatgatgatggcttaccttacattggcgcaagtcttcagaccaatgacattgttattggtaaagtctcggaatctggagaagaccacagtattaagctgaagcataccgaaaagggaatggttcagaaagtattgctttcagcaaatgatgaagggaagaatttcgctgttgttactctaagacaggtacgaacaccttgccttggagataagttttctagcatgcatggccagaaaggtgttgttggctttctagaatctcaggagaactttccatttactcgcgacggaatagtcccggatattgtgataaatccacatgccttcccaacacgtcaaactcctggccagctgcttgaagctgctttggggaagggaatagccctcggaggtacaatgagatatgctacaccattcaccacggcatcagttgatgttatcgcagagcagttgcacaaggctggattttcaaaatggggagccgagagcgttatcaatggccgaactggtgaaaggatgcaatccatggttttcatgggccctacattttaccaaaggctgattcacatgtctgaagataaggtgaaattccgcaacactggaccagtgcaccccctcacaaggcagcctgttgcagacaggaaaaggtttggtggagttaagtttggagaaatggagcgtgattgcctcctcgcccatggggcagctgccaacctgcatgagcggctgttcatgcttagtgatttctcacagatgcacatctgccagaaatgcgagcgggtggcaaatgttatcatgaggtgcgtcccaggaggtaaaaagatcagggggccgtactgcggcttctgcaagtcttcggagaacatagtgaggatcaatgtaccctatggtgcaaagctgctctaccaggaactcttcagcatggggatctgcctcaagttcgagacagaagtctgctagaactcctgagcctgtttgttatccagtcatgtacataaacctctgtggtgctggcatagcaaggatggcaccgccggcaggatatctccagccggtggggggatctatatctagtttgagaagaaaccctgttaaaactaaaccttgtagcgtttatgtgctgtttcactcagctcatctggtaaactatgtccaagtgaatggactctcgtttcgtgtttccttcctgaatttctctgttgcatgccgcctcgtttgaacaaaaatgagttgcatgccgcctcgtatgaaaaaaaaactgcgttgcatgccaaaaaaaaacnnnnnnnnnnnnnnnnnnnnnnnnnnnnnnnnnnnnnnnnnnnnnnnnnnnnnnnnnnnn

SEQ ID NO: 16093 - DNA, 1241 bp, Setaria italica
  Peptide Sequence Number=SeqID_82067
tcaagtgggtaatcaggtaaatgccagccggtgaaaaccatatttgattgtgaactgcccaatcctgcagatgacattatattttgcacaaggacatggcattctgactcatcgtcatctacatcagacataagagaagtccttggggtgctcagtaaccgtgattctgaggcggagtcatcccatgatatgaaacgggcgacagtctcaattgctgaagatcttgatattgtattcttggatgttcttccagatgtattgtgttcattacaactgctatcttcagagggagcatcaagaactgaggtagggctgggttgatcacggttactatttaggcctttatttactcctagtttatccaggcttcctcttggacagtccaatgatacaattacaccaattgaagatctctctgacatactggttgatatttgtgtggaaaactatcaatcctgtcctcacaatccactgattttgcattggcatccagcttatgattgtaagccagtctactacgaatgttacaagcttcaagcctctgaacaacgcaatcagatgaatggtaagttctcttctgccttgttggctttttacttctagacaaggaaaaatctgaaactcttcccttcaaagaagattttcctttatttgacacaaccaccattttcagtttgcgactctcaggatttgaagcttgcgcatccaccaccatgtttccaaatgtggacgaaatcactggaacagaatttgaccttggcagcttcctaggagatctctccccattttcatcattctttctggaagttacatatgtagaccatgtcgtcgattcattatccaagctacacgagcggttgctagaagcagacagtatctcagtgctgacatcttctttcttcacttctttgatggagagcatttcacctaaggtgcacgttctcctcaacggttgaacttgctcttgactgatctcatcacaggtcaccactgcccatcgctctgaaagctgttcttggcttccctgattactgatgactcagaaaagtgggagatcttgctcaaagatgagcttgagtatggaccttcatatcttctgcaattccatgaatgttttgacaagggactacctccttctgaatcaccgagggtaccacgatcttcaatacagtcgatttcagaaccactgctataatcaacttctgaatcacttgaatgtagtcttttcttatttctttctt

SEQ ID NO: 16094 - DNA, 1028 bp, Setaria italica
  Peptide Sequence Number=SeqID_82068
agtacccccaacaacgactgacacatcgacggccatgtaattcacaatctcaccactcgtgtggctctgccgtgaggcgttcgacagtcggagccccttcctatacaccatggcggtaagcccagacttgacatggattcccatgatgtccacacccaggtaccactgtcgagcagtgagtgtctcaagcaattttgcaacgaaaaatatggaggcaaggatgtaaccttcatgggggaaagcgatgttgccactgagataatccacaaagtagctgatcaggtaagggccaacatatgacacaattgtgttgacagcagcaaatgcaccattgaccgcagcctctcgccaaaatgacttcagtattgcccatgtcagtgatggctccctgtaaggattctccagcctctggcgctcgtagtgagcgctcatcgccttatagcatgattttgcacggtccttgtgcgccaacaagggtatgtcagctagctcaagtggccgctgcgcaccaattgagagcaacgggctaagccatgacagtgttgcaaggctgaggatcccagcatcagcgtagggagtgaccctcaaacacccgggctcctcctctgcctctcttcgctgcctaccaagcaacagcggctcatgcacgccgttctcatccgtgaactcaaattccaaaccggtggatcccatgacaccaaccaagcagaggaagcccagggccgggacggacgcgaagttggcaaccatgtgcgcgtaatccacagtgcgcggctcgtcgcgtatgaggcgcctggagtcgtcgtacgcgatgccaacgcagagcgcgaaggagaccacccaccagacccgtaccagcgccgggaacctggcccaaccgagggcgcgggcctgcagcgcgagcaccagcagcgccgcccaggccaccgcctgcaccgccggcagcaggagcgcccccgccgagacgcgcgagccggccacggccacctcgtagctcagcgcggcgacctgcgcgagcagcgcgtacg

SEQ ID NO: 16095 - DNA, 1712 bp, Setaria italica
  Peptide Sequence Number=SeqID_82069
cctcgttccctttcctcctcttgaacagtacgtttcttcttacgctcctcattcttcttctctccctttattccccgtgtcttagatggttgaccattttcgtgcaccttgtttttcaggttatcaatattactaatgcttggtgtcaatcttttgttaggaatagaagaagaaactgtatctccatcagaatcttcaaaaatgtccatggtttcaatagcttccttatgagcggaaaccaaagcgttgaagtcagttccagcttgcagaagatcatcgtactttccagcttgggtgatatggccatccttaagaaccagtatcagatcagcagctggtagaaactcaacttgatgggttacataaattactgttttggttcgctaatgcactcagtatgtactccttaaatagttcgctaccggtatgagcatcgacagcactgaagggatcatcaagcaaataaatgtcagcatcttggtagagtgctctagcaagctggactctttgtttctgacctccactcaaattaatgcctctatcaccaataatagtctgatctccgtattggagcaactcaagatctttcttcagagagcatgccgcaatgactctcttgtaacgttgtctatccattggactgccaaaaagaatattctcttcaatgtttccagattgtatccaggcagtctgaggaacataagctgctgtgccacttatcctgacatggccacacaatttgggtatctccccaagtatagatgatagaagacttgattttccagaaccaattacaccacagactgccactctcatacttctcactacactaaggtgtataccagaaagtgtaggggttggagagtatgggttccaagagaatgtaccatccttgatatcaattgccttgtctgtactactttgtggaacatttatagttgcatcatctggcagttcttcttgctgcagaaaatgagacaaacggtccaacgacacccttgtctgtgccatcatagagataagatctgggaagttcctcagaggttcttgaaggatccgaaacgttgctaaagcagaaagaacccctcctgcagtgagctggccaccgagcaatatgcaagtcccaaaagttatgactgagacaaagataggcgaactccagaaaacgaatgtgactgcagcctgtgagtacagagcccagcgaagccacctgcattccacattcctcatcgtttccaactgcagccggtaccgatcttcccatgcctgcagcttcagaatcctcatattcttcaggcactcagaagtcttgcgcatgcgctcatccttggatgccatcaacttatcttggtagtgctcctgcagctttgccacaggaacagaggctgcaatcgatagcacagttgctatcaatgttgaaaccatggcgatcccaacgttcttgtacaggatggcgagggcaagaatgatctgcagtggaagcatccagatgtcatgaaagtaccatgcatagtcccccacacgctgcacatcgacggccatgtaattcacaatctcaccactcgtgtggctctgccgtgaggcgttcgacagtcggagccccttcctatacaccatggcggtaagcccagacttgacatggattcccatgatgtccactccctacgctgatgctgggatcctcagccttgcaacactgtcatggcttagcc

SEQ ID NO: 16096 - DNA, 1971 bp, Setaria italica
  misc_feature (1956)..(1956): n is a, c, g, or t
  Peptide Sequence Number=SeqID_82070
tagaagtagacaattaagacgaaccaaaaacaagtaaatttatgtaacccaatcaagttgagtttctaccagctgctgatctgatactggttcttaaggatggccatatcacccaagctggaaagtacgatgatcttctgcaagctggaactgacttcaacgctttggtttccgctcataaggaagctattgaaaccatggacatttttgaagattctgatggagatacagtttcttcttctattcctaacaaaagattgacaccaagcattagtaatattgataacctgaaaaacaaggtgcacgaaaatggtcaaccatctaagacacggggaataaaggaaaagaagaagaatgaggagcgtaagaagaaacgtactgttcaagaggaggaaagggaacgaggaagagttagcttaaatgtttatttgtcgtacatgggggaagcctacaaaggtacactgataccgctaattatcttggctcaaaccatgttccaagtgcttcagattgcgagcaactggtggatggcgtgggcaaacccacaaacagaaggagatgcacccaaaacagatagtgtggtccttctggttgtttatatgtcccttgcttttgggagttcattgtttgtgtttgtgagaagccttcttgtggctacgtttggtttagcagctgcacagaagctttttgtaaaaatgcttaggtgtgtctttcgagctccgatgtcattctttgacaccacaccagctgggcggattttgaaccgagtttctgtagatcaaagtgttgtggaccttgatatagcgttcaggcttggtggatttgcatcaacgacaattcaactccttggaattgttgctgtcatgagcaaagtcacatggcaagttctgattcttatagttcccatggctattgcatgcatgtggatgcagaggtattatattgcttcatcaagggaactgactaggattttgagtgtccagaagtctccagtgatccatttgtttagtgaatcaattgctggtgctgctacaataaggggctttgctcaagagaaacggttcatgaaaaggaatctttaccttcttgactgttttgctcggcctctattttccagccttgctgctattgagtggctctgcctacgaatggaattgctctcgactttcgtctttgctttttgcatggcaatacttgtgagctttcctcctggcacaattgaaccaagcatggctggcctcgctgtcacatatggacttaatttaaatgctcgcatgtcaaggtggatattgagcttctgtaaattagagaacaggataatctctgttgagcgcatttatcaatactgcaagattcctagtgaagcaccactagttattgagaattgccgtccacaatcatcatggcctgagaatggaaacattgaactgattgatctcaaggttcgctacaaggatgatctaccattagttcttcatggtgtaagctgtatgtttcctggtgggaaaaagattgggattgtagggcgaactgggagtggtaaatctactcttattcaggcccttttccgcctaattgaacccactggagggaagattataattgacaacattgacatttctgcaattggcctccatgatttgcggtcacggttgagcatcatcccacaagaccctacattgtttgagggtactataagaatgaatcttgatcctcttgaagagcgtgctgatcatgaaatttgggaggcactagagaagtgtcagctaggagaggtcattcgttccaaggaagaaaaacttgacagtccagtgctagaaaatggggataactggagtgtgggacagcgccaacttattgcactgggtagggcgctgctcaagcaggcaaaaattttggtgcttgatgaggcaacagcatctgttgacacagcaacagataatcttatccaaaagntcattcgtatgaatt

SEQ ID NO: 16097 - DNA, 339 bp, Setaria italica
  Peptide Sequence Number=SeqID_82071
gactcgaggctgggcgtcgggatccggaacgacacctccagggggagcaggctggacaccggcggcgccgggcggtgcgaggtggtgtcggcggagtacctcggcgtcgcggagccggcgtggctcgggttcgagcgcgatgggggccgagggtggagtacgacatcgggcgcgtgatcaaccgcgtggcgaggatcctgccgcgctcggcgagggagcggctggccaagctggtggagaaggtgctcgtcggcgatgggccgacggggcccaagatgcacggcaactggaggaacgacgagagggaggcccggtgaggcgcagagtcaacttcctttc

SEQ ID NO: 16098 - DNA, 510 bp, Setaria italica
  Peptide Sequence Number=SeqID_82072
ggaaaactccgccgccgcgtagctcgcactttctcccccaagccagcatctccgcctccatggacgcgtatcaccagcagcgccgcttcgccggctccggcgacgcgcctccgccgccgcacccctcccacccgaacgcccactggtacccggcgcccccgccgccgtaccctccccaccccggccacccctaccctccgcaacaccaccaccagtggggcccgcctcccgacctccagcaccagcgtcatcctccgcctccgcaacagcagcactacgggtatcaacagcctcccccgccgatgccgatgcagcagcagcagccaccgccgcctgggaacccctggcctcctcaccacgccgccggccagcccccgccgccaagctaccctcctccaccgccggggcaggcttggaccaatcattcatgggctcaaaatcatggatacccaggtcaacagagggaaacaaaccatttgttaggtacgagtatgttattgtcccttcgct

SEQ ID NO: 16099 - DNA, 540 bp, Setaria italica
  Peptide Sequence Number=SeqID_82073
ctgggtaataaaaaggtaggaaaatataacgggagtattgaaaaaaaaaaaactcacccctgaggaaacttgctatcagcccgtgcttcaacacgaagccaccacagtaggaccttcttcccacagtttcctagtggctcaacagaggacggatcattcaacagagtaagtgggttctcaatctcctctccattctcacccacagcatcaagatccttcacccagtcaggcttgccctctgcctccttccacagcattctcgagttcaacacaaagccagcccactctaaaccccttggggcagaacaggggctgcctcgccaaccactgtggcagtcttcccagaaaacggcaatgagttgaatgtgtgccatccagcgagatgcccagaggagttacaagctgggccctggaactaggaaagaaggacaataattactagacttagtacctacctacgactagaaggacgtaggttagttactagaccgactaccaagtagtagtagacaaaggaattaccaaacggaacaacggaca

SEQ ID NO: 16100 - DNA, 884 bp, Setaria italica
  misc_feature (1)..(11): n is a, c, g, or t
  Peptide Sequence Number=SeqID_82074
nnnnnnnnnnnttttttgtaattccttttctttctagtaagtctttagaagcatagacgattttccataattcagcccccatctcagtttccaatgcagttgtatattacaacacaacagatacaactactgaaaaagtgcccattctacagaagtatggaccattgccacatgagcaaaaaacatcagaaaaatgaacgcaaccaccaccagattaaccagatatatgcttcctactgtgttttgcaggtgtaagagatatacattacaaggccagtacaattctcatcagttctcttgtccttgaaggtcacccttccgttttgtggtgcttcggggccgagatgatttgttggctcttgacaaccgcctgtcctcctggtctttcttgtcattcaacaactcggatggaagctcattggtggtttcaggccacggagtgcgttttgcaggaacaacgatgtccaaaggtggctctatcacccacccctgaggaaacttgctatcagcccgtgctgccaaagaacacatttagttgtggaaaaggaagaaaaggacagccattgtgcagaaaaattaaagagacacacgagcaaacagctaacagtagccatacactctaaacaatccagtatcttggctaacggaagcaatattttcactctttgaaggtttcagtaaattagctgttttccttacaagaccatttccttgtcaaggtaccagaagaagctacttattgcacatggttttcaaaggcactttttctaggaacctggtatttgttttttcacttttttttggaccaacaaggacctggaattggcttagatgctacaatcatgccaaacaaaacatataaaatgttaacaatgatacaatta

SEQ ID NO: 16101 - DNA, 345 bp, Setaria italica
  Peptide Sequence Number=SeqID_82075
ggacaagtgcctgaggcgtgacgccagcgagcggtggacggcggctcagcttctggagcacccgttcctggcaaccgccggctgcggcgtcaaagcagaggatgcaaagcccatgtgggtgtcccccaagagcacgctggatgccgcattctgtgagtctgacgccgacgacgaggacgacgagatgccagagagcgcagccgacaggatcagggcattggcaggtccatgctcggccttgccggagtgggaatccgacgacgattggatcgaagtgtgcggcggttgctctgaagtttcggacgcagcggcgctgcccaagaagtgaactttccggccacggaa

SEQ ID NO: 16102 - DNA, 275 bp, Setaria italica
  Peptide Sequence Number=SeqID_82076
ggggtttcggatcggggtcggaactgaaacgggcgaggccaaaatcagcaaggcgggccctgaggtctgcgtcgagcaggacgttgctggccttgacgtccccgtgcacgaccggcggcttgacgacggagtggaggtagcagagcgcggcggccacgtcccgcgcaacggcgagccggcgcggccattccgccacgaggtccgggcggcggcgcgaccccgtcccagcagcgcgtcctgcagcgacccgttgggcatgaggtcgtagacaagca

SEQ ID NO: 16103 - DNA, 888 bp, Setaria italica
  Peptide Sequence Number=SeqID_82077
tatgataagtaaaggaactcctgtaatgtcatattggaagcttgaagctagcaaactgcgtgcagcatcaggctttcagttccatctctctgagcgactatgatcggcgatggtttatttggcctcctagagcgaccagtccgttgtgttgctggcctggtcgaacgtgcttgtggagccgtgatcgatgcgaggcgctggcgccggcctgtttccctgcagggcaagctcgagctcacctgagaactggccgtgatggctgctagagccagagtgcacctcatcgagggggacgtcaggtggcaactgaggtggcacgtcccgcccacctgcatggccccgagagccagtccaggggcttggcgcaatgtagctactcgccatgagggagggtgccacagggttgccatcaaagcccgctgttgcaggcattgacgcagcacggctgtggccagcgctttgggtagtatcccattgctgagttgacagaagagagagagcacagctagagtccgcggggactcctgcaagacatccacctggagggagctccggaccagggaacaccggtggccctgatgaggagctaccatggctaccatatgaatgggcaccatatcctgtgatcgcactgtgctgatgaggatctaagcttgcttgccactggatactagcaggcaccctttcaccaggtcgagctgccggccacccatccctcatgctgcttggaacccttgggtaagtgaaatccaacagaaagctcctgaacctgccgggttcttcgccaaaggatgtagcaaggcgaccatagcgtgatgcaagaggtccagcaggcggcctcctccggcgttcattgtggcccgtaaggcgtctgcggcactgcgtttt

SEQ ID NO: 16104 - DNA, 327 bp, Setaria italica
  Peptide Sequence Number=SeqID_82078
taattttactaaatgatgcctcgtgtatgaactcctaaaacggatatgcttggcagcgcaagcatctgttatttgatagttgaagtggtgaaattagaaaagattgaattaacagtacttgatcctttatcctttttttaaatgaaaaatgcacttcttcgtttgaccttttttggcatatggttgcatcttagcaatctatctttcaaatgggaccgcagaattcccatctgctcattgttgctagttgctgcaccttctattatctgaatttctcattatcttaatgctatctaactcaaacagcttcctgtgcatgaaagaaag

SEQ ID NO: 16105 - DNA, 260 bp, Setaria italica
  Peptide Sequence Number=SeqID_82079
atttatgtggaatggatttggtcagggcgttttctggccaaagaagagaaccccaaaactggggtgaagaaattgtgcaggtcaaatagtatctcactgtattactatccatccggtgtgcagatggttcaggaaaaaaacttgtggaatgctttaacaaatatcgtatcatttttgagacatttaacatgctttacatacccccatcgtctgcaattagtttgtaaatgagattgtgcattggagtaatcaatatcagt

SEQ ID NO: 16106 - DNA, 304 bp, Setaria italica
  Peptide Sequence Number=SeqID_82080
tcacggacaccgccaccatcctgcccatgccggcacccggcgagaagcggcaggaagtgggagcagccacttcggttcgagccggattggtgccgctgctgcttgggctcatcgtcatgatggcgtcttttgggctttaagctctggtagatccgtagatgcatgcatgcggcttgaactttaaagtagtcctacctagcactgtagtagagataaagcttcttcctttcttctctctcgttcttgctttctgcggcggctaaatcctctgtaaacaaagctcgtcttccttttatctgccacg

SEQ ID NO: 16107 - DNA, 780 bp, Setaria italica
  misc_feature (1)..(5): n is a, c, g, or t
  Peptide Sequence Number=SeqID_82081
nnnnntatgggggccacagatggatctcacatgccagagctggtacaaaaggacaattaggtgtgtttgatcccaacatcaggactgacacaattaggtacgagtgcacggaatcagttggtgcgtcaaaatcaaagcttaatgccatccgcgatggttgtatgggatctttataacgttttatctttcttcccagagggacaactgagctacatcccacatcctagagggaccaacatagagcaagcagcaggatccgctcggagaaagcaccctggtccccctgtagatatgatgaactgatcttcatcacgatgatgacatgaaatcctctggcctggcgatgaaaacttcctcaaaatcatcatcatcttttctcagtgccaatgcaacaacggaatcattttccaccttttggtccgccaatgtctttgagtcttccagcacatcattgttagccaacaagaccaactgctgattactaggaggctgatctattagcaaatgcaacttctgtttgatgctcaaagttgtctctgttggttcacattgaatgaagtaggtactcttgttgcgcttcactcggatatacatgcttgcaagcctgcggagcgccgatccgtcctcccctgcggcagcgcgcgtgtcggcggaatcgaaggcggggtgcgcgggtcggcggtgggagcgcgcgccggcgctggcgttgacgagcgagacgccgaggaaccgggacccgggagaggggagacggacacgagccggcagccgcggctgatc

SEQ ID NO: 16108 - DNA, 795 bp, Setaria italica
  Peptide Sequence Number=SeqID_82082
gtaatgtctactgtcttgtgtctatcgtatttcactatttctaaatcctatttggttctctctctgcattttgtaatgtatgtatagatgcgaaaaaatgttgccaggctgatggagacagagaatgaacggatgtatagctactgctgcgtgtgggtgttctgctgtagtagagccctgcacacggcctccagcgagtccgcgagcgcggccgagaacgcggccatggcctggaacacggcgggcagcttctcctgcccgcaggtgacggtggccgtcctggtggcgtcgatggccttggcgtgcctcctcatctcgtcctccaccatcttccggcacgcctcgatctcgtccctccgctgcgccacctcgttccgcgcgtcgcgcgcctgcaggtggtcctccctcaacatcggcctcccccagtgccacagcgacatgcccccgggcaggtacgagtcgtagtagctcttctccacctgccgcagcatccgggacttgcggtccagctcccgggagcgccgccgcatgcgcgccgccacccggagctcctcgccctggagcgcgtgcaccgcgtgggcggcggctgcgaagcccttgatggccttgagcacatccacgcagtgcgcgcggtcgagcaccttcccccaccgatcggcgaacgcggcgagctccgcggccacgggggacgacaccgccgccccggtgccgccgccgctgaccggcgccagcgtcagcttcagccagccgtggacggcgtggacgtagtcgcgctggtgcttcgccgtcgcggcc

SEQ ID NO: 16109 - DNA, 495 bp, Setaria italica
  Peptide Sequence Number=SeqID_82083
tggcaggcaaagacaatctctgggtagagattctacaatacatggtgatgaatctgatctgatgtctccagataatgaggaaacaatggtagttgaacgtgagatacatgtaaattacgaggagccagttaatattactgccgtgccagatacatctgaacagtcactgcatcctgcaaatcttgaccatgaactagatgcagtaggtgttctggctaccagttctgcaatccctggcagtaatagaacacctctttcttctactgcacagaaccagcaaatgcttaaacagacagcagcagcagcattagatgaatgccttctcgaccctaatcttgatgagattaaggatgagccgattgaataccatcaagctgatgattacccaaccatttatgatcccatgatagaatcagattctcttgtggggattgatcatcgccaaggggatggcaatcaaaccctttgtattccacctaatggatccgaatcgcc

SEQ ID NO: 16110 - DNA, 336 bp, Setaria italica
  Peptide Sequence Number=SeqID_82084
gtcccttcttgtttgtctggatggatttcttctagtcgttgcggaaaaataaaaggggggaaatcgcgttactaccgagatttttgtcgatttttcgggcccaagctagaaagattcggcaagtacatctgatcttgtagcacagtacgctgtcctccgatgccccaacagtgaatgtctccacctttactttgctgaggccagcagtaatgtgatggccaaatctcgattgcccaaaccacaaccacttgaaatttgtcaagtgaactcacatccttatcccactcgaattttagcgagaattattatgcagcctcattctctcaccaatttccc

SEQ ID NO: 16111 - DNA, 401 bp, Setaria italica
  Peptide Sequence Number=SeqID_82085
gtcgaggagcaggcgcgccctcttcgcgacctccccgccggcgcagtcctcttccggacccgaggcgaacccgacgccgccgctcgcgccgcctgccccggaggccccggaggaggagacgaggcggcgcaggacctgcgggtcgccggcgaccttgacgaggaaggcgagcatctgcttgggccggcgctccgtctcctgcacgcggcgccacatcgctgccacctggtcctcgatggcgcgctgctcccgcttcagccggaccaactccatggccaccgcgtcctcatccacggccccggcgtcgccaccgccgccgcagccgtcgtccttgcgcttgccgccgccgccgccgctgctcctgcggacgagtccggggcagggaggtgcgtctgcccgcg

SEQ ID NO: 16112 - DNA, 563 bp, Setaria italica
  misc_feature (1)..(76): n is a, c, g, or t
  Peptide Sequence Number=SeqID_82086
nnnnnnnnnnnnnnnnnnnnnnnnnnnnnnnnnnnnnnnnnnnnnnnnnnnnnnnnnnnnnnnnnnnnnnnnnnnngttaagattacaccccattctccacaagatagaatagaaatagtacatgtcaaaatatagtcttacactccagcatatattagtcaataaaaatgctatctaatataaatcgatacctcatcttgttttatcgtgcttctaataaaaaatgacggccatattaatcttaacagtgctaccaatgaaaaaagataagtacttagtgaaggagctagagggggattgcaatcggccaatcgcaacttgctagcctgctgctgctcgtcgcagcaggccagtccgttgaacaaatcgatggcagtcaaaacaagaaaaaaagaatgggattcctatctgctactcgagtggccgcagcgatgattccactcctcggtggtcgtctgcttcctctgtccttcatttgtttccttttcccttcccttccgctgccgcaactgcttgacaggagattcttcagatctgcacgctcggggaaaaatcgatggtg

SEQ ID NO: 16113 - DNA, 259 bp, Setaria italica
  Peptide Sequence Number=SeqID_82087
cagatcaaacggtgatgccagcaatcagcaggtagtgttctgtcttttgtggcggcgtttaaggtcgtacccgttggagaacgacatcatgcattcatgcgtaccgtggatgcaaggcgaaattcccaaatcactcaacttggacttggatacataacactgaattcaaatgcgcgtcacagtcgccattgaactcaagcaatttccatccaaactcaccaacgcaaacgcgtggaacctattccaagatggattatcg

SEQ ID NO: 16114 - DNA, 307 bp, Setaria italica
  Peptide Sequence Number=SeqID_82088
gctgcgtccccctttttcccctattgttttaattttctcccctgcgcatgcgcctgttgtccgtaggattctgttgcgttgattagctactagagcatgggaggaaaaggtcgagtcttgcgtttcaatactaggcactgtcatttctatattcttgatgcttctacgctgatcgcgcacgccgcagccgtctttacctccagaccgctcaatctgctcggaggaatatatcatcgtgtataaagtaggtgctcggcgtcgtcgcgtcgttccatttgctggatcaagttaggttcaaaatcgtaaa

SEQ ID NO: 16115 - DNA, 707 bp, Setaria italica
  misc_feature (684)..(684): n is a, c, g, or t
  Peptide Sequence Number=SeqID_82089
cctccatttctcagggaggtgatttaagaactatatagcacgttgtatcaagataaactctgtacaagcatattccccacctagaaaactttcagtaatatgaaagataggagtattttctacatgaataagtctacataaccccctgaggtactaaggtttgcctacttaaacccctgaactactaaccacgtattgagcaccccgaataatgtaaaacttctatataacctctataatgtcaacactgtgatgtggcatgttatgtggatgctgttgtggcagtttcttggtgaatgacatgtgtgccatcctccgtatcgctcagtctacgtcacgttgtgattatcagtgaagagatagagagaggtgaagggagtagagaaatggtgagaaaaacacattaatgtgtggttccagaatgatgcggcaatgcaacatgcaatattctaaaggagttaaggcaacacgtggcaacccatccccctcatatctcttaggcacttaaggcgggcaaggcggatgctttagtcatatgaatattagagaaatacaagaaaatagagtatccgtgggccacagctacaatatgcagtgtgatcccactagcctaattaggcccaatcaatccaacagcccaataaaacaccttaccccctgacccctcgcttaccctagccccanagaatcccctcagctgcacgccg

SEQ ID NO: 16116 - DNA, 219 bp, Setaria italica
  Peptide Sequence Number=SeqID_82090
aaacagtcagtgtgtgtgtccacaccacactgcgcgagtggcgcacgagcaccgcggacccctcgctcgcgtcgactttgacttggtgcgccacactgcccagtgctagcctcgtcgtacttatatatacggcggcgcgccacggcgatccagcagcagcagcactgcagcagctggtagcggtggtggagcatggcggagacggcgatcacgacggtg

SEQ ID NO: 16117 - DNA, 339 bp, Setaria italica
  Peptide Sequence Number=SeqID_82091
gcgtcatggcctcgatgctgctcccatgcgtcttctacctcaagatcttcggcgtggcgcggcgcggcagggccgaggtcgcgctgatcgccgcgatcatcgttcttggctccctggtcgccgccacggggacgtactcttctctgaagaagattgttcacgagttctgaagaagacatgcccctgtgtcgcagagttgtgttcttttgttatcgctgtgcagttcggtatcgcaagatgtgtagtcgaggcaggggaacagggctgtgttgaaaaagacacaagaggagcaggttgcctgcatagatatgggcatatgttgctaacttgctatgccgt

SEQ ID NO: 16118 - DNA, 231 bp, Setaria italica
  Peptide Sequence Number=SeqID_82092
caattcttgaattgctcctggcactatgccactttctttgtatgcagctagcaaggcagtgtcaaaaagtggcctttgcagatacatttctgccaccatgcaccctatagaaaatacatcatttgcatgaagctcattttctgaatgggacttttgattccacagcagcagttcttgataacctgcaggaccaccatcagattcgaagcattcaagaaaggaaccaaaata

SEQ ID NO: 16119 - DNA, 581 bp, Setaria italica
  Peptide Sequence Number=SeqID_82093
ggccgaggtgcccgcctcgccgtccgcgctcgccgccgatcaccggacgtacagcaaccccgcgttccaagcagtgtccgggagcattgaggaggcatggtacgactccttggcgatgagcgagtcggacgccgaggacgacttccacagcgtgcaagatgatgcttgttcattgaatggctttgagaatgaagcggcattgagcactagagatggcaacagtgggagcttcaaggaagctgcacaatcaggcgagcatcaccatagaaagccaaagtccagtgaactgtcaaagggaagctcggagaatggtgtgaggacctccttgagccatgacgatgtgctgagtgtttctggcgaggatagcacgcacggtggaggaaggatactggatgattgcgggcttctgcctaataattgtctcccttgtattgcctctgctgttggagtaaacgaaaagaaaagagctctttcctcgagccctactcattcaatgaagatgccttctttgaagctctcgttcaagaagaaatctggtgaagctcatccatcttccacactactatctacgaaggatttcc

SEQ ID NO: 16120 - DNA, 1602 bp, Setaria italica
  Peptide Sequence Number=SeqID_82094
ttttttttttacgcaaaattagtgatatatttactaaatctagaacgttgagtggcaacaagggaggcaaccggagctcttgagcaatgatttacagatttacatgtaccgcagtctcccccgtttttacagtttcagaaagaaacctctatatatagcaccacggattctgatggggccagcctgcggtcactgagtcactcccttgctctcctgttaatgttacttatatgcaatgtcacacgatcacagctccattgactcagatgagggcgtttcaacagcagtggtgctagtcagacgcggctcccagtctgaaatctccaggagcctggtccaggcatggttacatctcagcagccagccatctgttagctgattcttgtaagcgtcgatttcaggcaccatgtgtcaaaagctgctgatatttggtgtaatcaatcccattcaacctaacacagcacaagatctgctcgggcagctcttcagctttatttccctgaatagtcagcccaacgtctaaaacgcatgcttttagcctgtccaaaaatgtttcaaaacctttccttgagatgtagctaaatctgtgcatgtcaatgtcaatctcaaagtagttatcacccaagtaaaattcatgctgtggcctagaaagcacaggcttctcattgtatgcatgcattagcttcctctccgctgcactcaaaggaagatcctccagattagccacccggccaagtatctttagccgctctcggaatggtatacttgtttccattggaaaagcctttatcttctctacatgatcatcaaccaaccttctgatactttctatgaataaaggtggaagctcttttgagtaaccatcagaaagcctaaaatacagaacaaagctcatcccttccccatcagtttcattctgaaacaatgaagctggatatagtgggacctgtacatttaccaccaaaagaggtgggagtctgctggagagttgaatatcaggaagttggacaaatcgagatatatgattgagtttctgtggcgataagtacacatcaactccaaatggataatatgcagcataattcggagcaagctctttcttcttatccctaaaatagtttgctccacggactcggaaagtaccaggatcaatatgagaccagctgttgagtagtttcgtatccaacaagcataactgtacttgtttacctgctagaggcctttcaaggaaatccttcgtagatagtagtgtggaagatggatgagcttcaccagatttcttcttgaacgagagcttcaaagaaggcatcttcattgaatgagtagggctcgaggaaagagctcttttcttttcgtttactccaacagcagaggcaatacaagggagacaattattaggcagaagcccgcaatcatccagtatccttcctccaccgtgcgtgctatcctcgccagaaacactcagcacatcgtcatggctcaaggaggtcctcacaccattctccgagcttccctttgacagttcactggactttggctttctatggtgatgctcgcctgattgtgcagcttccttgaagctcccactgttgccatctctag

SEQ ID NO: 16121 - DNA, 476 bp, Setaria italica
  Peptide Sequence Number=SeqID_82095
ccgtggagcaatatgagaccagctgttgagtagtttcgtatccaacaagcataactgtacttgtttacctgctagaggcctttcaaggaaatccttggcgatgagcgagtcggacgccgaggacgacttccacagcgtgcaagatgatgcttgttcattgaatggctttgagaatgaagcggcattgagcactagagatggcaacagtgggagcttcaaggaagctgcacaatcaggcgagcatcaccatagaaagccaaagtccagtgaactgtcaaagggaagctcggagaatggtgtgaggacctccttgagccatgacgatgtgctgagtgtttctggcgaggatagcacgcacggtggaggaaggataactaggaatagaattagacgggacttactgcctaataattgtctcccttgtattgcctctgctgttggagtaaacgaaagaaaagagctcttcctcgagccct

SEQ ID NO: 16122 - DNA, 610 bp, Setaria italica
  Peptide Sequence Number=SeqID_82096
cgcaactagaagctcttcctcctcccacgcaaccgccgacgcctccaaccgaagcgcgccgcgggccgccgcgagatcttcctttcctctcctcggccttgtccttctccttgctgctggacgccggagcggacgtcgaccggaccggttgatttctcctgtgctggcaatcaaggtagaaaaggaagctttctgctcagtcatggctttcacaactccagcagcagttcttcttgatgagaacatgcatatacatggaggcaagagggcggatgcaccaagggccaaaccactgaagccatcagagaagaagcctgggcttcaagagcggaaggctcttcaggatgtgtccaactttgccaaaggcactgctttgaaggacaggtccgtgaaagagaggtcccaacagcggaaggctcttcagaatgtgaccaacacaattcaaagcaaggaaaggcccaccttgaaagaacagaggtccaccgtgaaagaaaggtctgatttgggcaaacatgaagtggttaacccattgaacatattaactgatgaagagatacaaaaagtgtcatgaatgggctaaggatgggcggagggccgctcacttccatga

SEQ ID NO: 16123 - DNA, 434 bp, Setaria italica
  Peptide Sequence Number=SeqID_82097
tttaggtacaatcatgaagatttgtcgtgcaatccctctttctgattgatcagttcggttggatacatgacacatcgaacatgtactactttttgcctagaaacctcttctgtattaattatatgctgataaaaagaaaaaaatggaaaatgtagaactcactcaacttgctttttactacagaggatggacccacgaatggagttaccagagcagagcatggtgataagagaagagtagaggatgagaccttcaagcttggatcatcgtctcatccatgcatcttcccgacggtcgggtccaccgtcaaggctgccggcggcgtcgcccatcggccatcagtagcagcggtagacgacgtacgagttccggcggggcggccgcacgtggcagagcatgaagagcacgagggcgatcatcatggccagcaggaa

SEQ ID NO: 16124 - DNA, 475 bp, Setaria italica
  Peptide Sequence Number=SeqID_82098
cggatgtttatttcttggacacctcgtagtcccatgttttttgtttggatgacccaatttgtcattctttttcactagccttgttcttatgacttatgaggattgagggataggggtgagaaaccagctgtttccatttttaaagtgaaataaaaagagaacaaaagataaccaatgggctgttgctaggataatcccattcctcaaactaattgctctgcaagtggaggaattgcatgtcagcatatccgacgttgaaaactgagtaattctcaaaacagaatgaacactgcagcactaattctggaagtttggatactcttcattactttgtcttatgcagttgatgggttaatctgaattgtcaaaactttgtaagttggcagttcatgttaatctcatatcctgaatgttgttatctctgttactctcttctgacagataagaaggccaacaagttgcccaaaactactcg

SEQ ID NO: 16125 - DNA, 593 bp, Setaria italica
  Peptide Sequence Number=SeqID_82099
cgtcgcatccggccccgaccagaatcagatgagcatggtgccccacgccagcaattctcagcaaggtgcctaccggatgctcgccaggcactggagaagctggagggacacgctggagggcctcctgcaatcccctgcggtcagccagggctctggagggattcagagctgcattcgtgatgcactcagacataatagctgccagcccctggaaaatgggagcctaggtgagggccaaggcagagagggaccaaggtggagtggtacatgccatagagaataatggtgccttggttaaggcagaagatgcagccgcaaacaatggcgccttagttaagttagaagatggaactgcagcatcattggaagccaacaaggcaatctgccataatgctctctttgacattctagtctctgagaagtttgccttgttctgtgatttgctacttgcaactttcaatgtcaataagcctgatgaagatgtgattggcttgacaaaaaattgatgccaagatgaaaaatggagattatgcacagaatcctgcgctgcttgaccatgatatcaaacagatatggaaagtaagtttgaaacg

SEQ ID NO: 16126 - DNA, 314 bp, Setaria italica
  misc_feature (175)..(175): n is a, c, g, or t
  Peptide Sequence Number=SeqID_82100
aacctcaccacgtcgctcggaaaggcggcggcaagggggtacaggttgggagttctaggttccacgtggtgcgcgacgacctcctccacccgctcgccaacggcaacaaggcgcgcaagctcgatgcgctcctgcccctcctccgccgccacggcgccactgacatcgttacgtncgggggttgccagagcgcccatgtcgccgcagtcggccacatatactgctgagaggcgagcaactggatgttcccacagggtataatctgatctctttgatgttcggcaatgtgacatatgcctcgcggtcagtgtatt

SEQ ID NO: 16127 - DNA, 515 bp, Setaria italica
  Peptide Sequence Number=SeqID_82101
atctagcatctcccgccgccgccgccgcggtctcgtcccatgcgtccaacgccggcgctcgccgctggcggacggacggtcgcgaacctcctctccgccacggagtggatgctgccgtccccagccagccaagtccacaccatctccgtctttccctcccaatcccagtcacccacccctcgtcacgagttcgccttctccaacctcaccacgtcgctcgggaaaggcggcggcaagggggtacaggttgggagttctaggttccacgtggtgcgcgacgacctcctccacccgctcgccaacggcaacaaggcgcgcaagctcgatgcgctcctgcccctcctccgccgccacggcgccactgacatcgttacgtgcgggggttgccagagcgcccatgtacgaccgcagtcgctgttcattgtgccgaatggggtatcaggccacatatactgctgagaggcgagcaactggatgttcccacagggtataatctgatctctttgatgttcggc

SEQ ID NO: 16128 - DNA, 702 bp, Setaria italica
  Peptide Sequence Number=SeqID_82102
tcctggtgaggaatgaggagcattttggtgcattgcagcgtgccatgaggcaggacttcgagtgggttcgaccggaagggtgcccggatagcctcccgctctacaggctgatgaaaggggattgccaaaggctggcaatgcagatctcatgctttcaggaaattgcttcacatggatgttttagccttggtatggttgctagattcgagcctctgttgcatgataaaggtgaatggatgtatcctcgtttgttctgggagactggcgttcttggtcaagtgctttacctggaagcccatgcttttggaatatctgccacagggattggctgttactttgatgatgctgttcatgaggtacttggcttaagagatttggagttccaaagcttgtaccacttcactgtgggtagtcctgtgcttgacgagaggataatgagtcttccggcgtaccctggtcccggaatcgatgcatgatttttgcttcggggttattgtccattcatgcatcaacaagagaactgaggaacctgaccgtgtgggagttcgtttatggtatagtggcatgccgtgctatccctgtatacaccggcattaccctctcttatttctgtagtggttagccgggttgattttatgatggtacatggcactccctccgtagctcgttttgatttttctaggttcataaatattatcatgc

SEQ ID NO: 16129 - DNA, 409 bp, Setaria italica
  Peptide Sequence Number=SeqID_82103
accaacttacaactagtagggtaagtacctagtagacttagaacgaagaaggataatgagtcttccggcgtaccctggtcccggaatcgatgcatgatttttgcttcggggttattgtccattcatgcatcaacaagagaactgaggaacctgaccgtgtgggagttcgtttatggtatagtggcatgccgtgctatccctgtatacaccggcattaccctctcttatttctgtagtggttagccgggttgattttatgatggtacatggcactccctccgtagctcgttttgatttttctaggttcataaatattatcatgcacccacacatacactatatttagtttaaaaaaagctaaaaacgacctacaatttggaacggagggagtgggtatgttggggatggg

SEQ ID NO: 16130 - DNA, 569 bp, Setaria italica
  Peptide Sequence Number=SeqID_82104
ccttctccggcgcggacctcgtcgccgtcgcgtctgggcaccacgacaccactcgtccccgccgacgaccacaagagcctcctcatcccgtgctcgcagcccggcgccgtggacgggcatgtgcagcctccgccgccgcagccacagttggcgcagggggaggagcatgaagggatgctccagctgccttcggcgcacaccaagaagaagaagaaggtggtgaagaaatggagggaggagtgggcggacacctacaagtgggcctacgttgcggtgcacgacaacaccaccaggattttctgctcagtgtgcaaggagtacggccggaaacaccgccggaacccgtatggcaatgagggaagcaggaacatgcagatgagtgcgcttgaggagcacaacaatagcttactgcataaggaggccctccgactgcagatggcctccaaggataagttgcagccccccgagattgagaggccggtctatgtcaaagctttgtcgaaaacagctgcatcaatactcgaatctgttctaaggagggatccccatgaagctgaatttatacagta

SEQ ID NO: 16131 - DNA, 591 bp, Setaria italica
  misc_feature (4)..(4): n is a, c, g, or t
  Peptide Sequence Number=SeqID_82105
gtcnctttttagttttttttttgttccggaagccacgacatatttctcattaagatgtcgagtagtacagtttaggtttgagcccatgagctacttgtcactacagttttccttttgcaagttcatcagctatcttgaacccatagtctcacagtcctatcattatcaaggccaccggaagcaatcttgttctctgttggatggcaggatactgagatgacagtgtcagtatggccttccagtttctgaagaatatttctcccttgcagatcccatatgtacacacaattgtcttctgatccactcacaatgtacttcccgttcgtaacggaaaacgcagactggatgcagtagactctgttcacatgtccactgtataccttcaagaacttgccggtagcaaagttgcatagtttcagtgagtcatcgagcgcggcgacgaggatgaacttgccattgggcgagaacatggagaaggagacggcgggcttcttgtcgtcgatgacagtcttgaggcaagccccagtcttggcgtcccaaaatcttgacaagactacccgtacaataggacttacccgaactaacaaatta

SEQ ID NO: 16132 - DNA, 283 bp, Setaria italica
  Peptide Sequence Number=SeqID_82106
atgaatggagccctaggttagtaggcgcaagttgcttgacagcctcgcccaaatggctgttaggactcaatcttggggtctgctcccctgaagttctgttgcatgatgagacactagaagacggctgagagctcaaaaggactgatcttggggatcccagtttctgcttggatgtgttaaggatgcgtttaggagctccaaaaaagttggccaaagatggcagacaatcttttgtatctgcaaaacgagagagcgccacatccttcagccacagttccagtga

SEQ ID NO: 16133 - DNA, 257 bp, Setaria italica
  Peptide Sequence Number=SeqID_82107
ctcctccgttacagttagcaatagagcaaagaaacataaaacggctgctcataacgaccagctactttgcatggtagtagatccatcacaaaagtgtaccaagaaagaacataccttcaaccggggaccaggacatcaatgcattgaatataagatgtgcgccacatgactcacattcaattttgtccaggtcaaagttcacccaacctctttgagcacaggccattgaactagccgcctggaaattggaacgtagg

SEQ ID NO: 16134 - DNA, 412 bp, Setaria italica
  Peptide Sequence Number=SeqID_82108
actaggtacaatacctcaatgttctcaattgcagatgatgcgatcacaggaagagaggtaaactgtaaaagcccatcacagcgatctttaaaacctccaataagagctgattgtgtaagggggagctggaccaagctgtcagcacagctattgcctctccagggacaactattctggtgtgcggcatcaagctgctcggcaaaggcttctccagcatttgcaactaatagaacatacaaagaaaagtttcacagctgaacaaaattcagtttgcaaagagagacgtaccgatctatttccagactagcacaaccgtaagacaaaagtaataacagtcagactagtgaaagtagttatgaaattgctgactagttttttaatttggtgatgtcagatgttacttaaccaataa

SEQ ID NO: 16135 - DNA, 3003 bp, Setaria italica
  Peptide Sequence Number=SeqID_82109
ttgtaaatggaaatggtattgatttaaagttcaagttcgccataaaatatatagactgcgtgagcaaattcctgtcatatgaatactgtgttgaatcagctatttcggaataaattacatatattgatgcgacggcccaatgggtgacaacaacctaaagagactatcttagatggactatattatttggtttctcctgttacaccaatctggaacttctggaatgttatttgtgtctacgaaacacttgggctagaggagttccgatcagcattttccatagcttctgctcacagaaggccttctccctagcttgcggttatgagttatctggtcatccatatatagtgaagctgctgagtcagattgcattatttgattttgagcttgaccaagtgaatggaacgtgtcaagtgcatctattgttaactgccaaccggagagtgctgaactacttgagctggagccaatgttgttacagcaagccgctgcaacaattccgttcacccaaggacagtaactattgtgatgcttaacaggatcaaattccagcagacccgattcatagtcattttctccattagtagctcctaatccattcccaggatcataatctagccccattaatgcatcatcagtggtaagtattttgccagcctgtgtcacgtcatctttagatggatcaaaaccggcacacatccctgcgttgcaagaaagggaaggacgcatgttgctttcaataccggtggcatgacccatcttttctccactttcaacggaatcagctttggtacagccatatattttcgaaccactgtcagcttggcccactgaccgagacaccatatcttgactgtctccatgaggttctactcgatttacttcttcaggtacaaattcaccagtctgccccattgtctcagtaagttcagcaataggttcagcatcacctacaacactgtcagccctatgcagagaagcagcatttccatgaatttcagcctcatggctagctcccatgccaacacttccgccgctaattcctaaactaagttgatcccttccaaaagcaggtgcagtttcagcattaatcacttcctccccctcatttgtactgctccctcctatttctcttgcatcacttccagcagcagcatgtgcattagcactttgctgtgcctgattgctatagttaagatccaaggcatcattcatctcaatgttcctatgtgcactagaagaaggcatatcaatatcattaccatcacctggataatactcaacactctccatagaatcttcctcagaagtacgaacagtatccattgcaataacagaagatgccctcgtagaatctctagcagccggatgctcaataactgccaagtcaatagctctagagtgactgaacataccagcacccacatcagggtcaaaggacaagtttctactggggccagcttcagaagatggacggtaggcatcaaacagatcaaacccacgggacttcttacttggtacatctgaatcttgtgcggcatcatcaacttcctcaccatcacgatcaatataatttccttctatgctgtcagcatgatgtagcctgtcctgtggattgtcagctgtgctcccaccttcctcaaggttacgcttccttgaactcggaccacgggactcatatgaggtctcacaatcacctacttcactgcctgtaggttgtccaatcatcagatcccttcccattcctccattattgaaccgctcggatgcagcaggtgtggcagatcgtggtgatggtaatcctccagtcattgttaggtttaggtctactccaacaatagatagtgatttcccctcatttgttgctgcttcatcacgcccttcatcttgacctctttccaccccatcattaacccactcattgatcccactggcagcactaatcccacgtgtcagtgttagctttctgcctgtttcaggcacatcaatgttatttggactgagacgagaaggacgtagcacaggcctgaagtcccacattctggctgtagctccacacaggctgcaatctaacagaggtgacctcatgctgcatccagaatctctaagggggagtttgcctttccccttatctttctttgctgatgcagaaaacgaatttttgttatgttcaacaaaatggggataaaacggttcatcaggtccaactgagggtgcatttttagctgaatgagtggagttttcttcacagtcttgaacatttggaagccacctaggctcccatccacacaggcctataagcttctgcgcttgagagtagctacaagaggaatcttggtgggtatcaactcctgcggtactctctgctttgcaacccagcacaccagataaaaaggtaattgactgggataatagacggtcaatttgtgtgctcctggtcatcctcatgttctcaattgcagatgatgcgatcacaggaagagaggtaaactgtaaaagcccatcacagcgatctttaaaacctccaataagagctgattgtgtaagggggagctggaccaagctgtcagcacagctattgcctctccagggacaactattctggtgtgcggcatcaagctgctcggcaaaggcttctccagcatttgcaacttcaaccggggaccaggacatcaatgcattgaatataagatgtgcgccacatgactcacattcaattttgccaggtcaaagttcacccaacctctttgagcacaggccattgaactagccgcctttggcttggaagcccaagttgaaggcttaaatgttgccagtcgacgaagtaagtctccacgttcccatggtctacatgatggtgcagaatccatagcagttccagcagcatcaaaactgtgggaaggatgataggcatgtgcagcaacttgtgatgacgagtcaactctggaagcttgtctgccaatgttagtttgcatagcaggcgatgagcaccagcggaactgg

SEQ ID NO: 16136 - DNA, 530 bp, Setaria italica
  Peptide Sequence Number=SeqID_82110
gcccggtcacctctgaacgagaagaaactccttgttcttgatcctctagatgcctgcgaccggacatagtcaagcgcccggaggaagaggtcgtagcccctctcagtgaagttcttgaggtagaacacaaggatgtcaccagcgttggcgcgcaggtactgcagtctcgcctcgatgttgggctggtactgcatcaccagtggctggaggaacgtctcgtacacgatgtctgttccccttgtctttgggtaccacaggtacacgaggaaggcaagcttgagctcgtagtacattggaatcttggaaatcagaacaccggcaatttcgtcgaacatgaccaggaggactaggataatccaatactcgcaccagaaccggagctggtcagcccggccgggccgctgctcgatcgccttgaagcactccagcgccggcatcgcgtatccgaacaacaacgtgaggaatttcgtcaggagttccgtcgacatctcgaagccagcggggaattcaccgcaggaagaggaggaggg

SEQ ID NO: 16137 - DNA, 397 bp, Setaria italica
  Peptide Sequence Number=SeqID_82111
atctggggcagcccgtcccctaatgccatctatgatcgaggaagctcttccttcttaacatccaatttcttcaatgcctcagacaacaacaatggggagatgatgtcaaacacatcatttacaaatttgtcaacactggtagcgttggtaggtttatctactttgttctgcgatgtttctgggcccttgctctgaactttaggcttaaccttcacttctgatcatggacaaattgtcatgcttgactattaaaatttaagagatcatataagctcagtaaaagttacaaatgaaattcatatgtatataagcatacaccgaacaataagcaacaaactgttgcaaactccttgcaatatgatggttatgagccaaggacaaagaatagaaactaatt

SEQ ID NO: 16138 - DNA, 430 bp, Setaria italica
  Peptide Sequence Number=SeqID_82112
aaagatcaaacttaaggatatataacattatccaggtcagggtatatcgtttgtgcaactacacagaagcatcatgggtggctaacatacagtttgcattgatatcagtagctacgaattatcagtagttaaagtaatggaataccataagcaaaagaagcattgatattctgaaccataccaattgtcacatcatttgtcagtggatggaagtagcagctctgtttagacttgaaaccttgatcaagtaatagtgaaacggtacttgcagactcatttattaatgcaaagggggtaacacaccctaagggcacctgaagtacttgtagaagattttcctcaggagccattcgcagaccgccttttcccaaaccaagacgttgggaaagaattttcatgtcgactttggtgccagcgagggcagaaacaa

SEQ ID NO: 16139 - DNA, 895 bp, Setaria italica
  Peptide Sequence Number=SeqID_82113
ttttttttttttttgttttcagaacttgcaaacacatgttctatatgtaactttgcccgtttggttgaaatttttttctcattgatctctcaatttctcataaagaaattgagcagataataaaaaaaatacatgggagtttggatgtcataaggagcatcatacataacaggttgatttcattcaatagtcaatagcatataaaaatgtaaatcagattcccgtctcttgtatcaaactatcaaatttagtttcgagagggtcgggcgtttaaaacatggttcaacatgctttcggaaccagcgtgaaaccctgaggtgtatgatgcattcttcagactcgtcgttatactctccaaatctggggcagcccgtcccctaatgccatctatgatcgaggaaagctcttccttcttaacatccaatttcttcaatgcctcagacaacaacaatggggagatgatgtcaaacacatcatttacaaatttgtcaacactggtagcgttggtaggtttatctactttgttctgcgatgtttctgggcccttgctctgaactttaggcttaaccttcacttctgtctctttgggcacattattttgatgaggaacattagtaggtgtagtgttctcaactggttgttctgaggaatttgggataccagatggaaccagatgtgctaaatcaggaggactatccttacccacagctggtgtatcctctaagttcacatatgccggttgtttcccaatggagatgagaaacttgtccagattgcttgagctaagagcaattgtcacatcatttgtcagtggatggaagtagcagctctgtttagacttgaaaccttgatcaagtaatagtgaaacggtacttgcagactcatttattaatgc

SEQ ID NO: 16140 - DNA, 583 bp, Setaria italica
  Peptide Sequence Number=SeqID_82114
tgtataagcaaggaaccacacaattagatagatcaagtaaattcaaacttctaggtcaatatgaaatcgaagaacacaacaagcacacgagataaggatttgttaccggagttcactctcacagagaaagctacgtctccgttgaggagctcacaaagagtcggctcctcactatccctttacctccctcgatcaaccacaaaggaggattgagtcacttactataaatccaggaaagatgggtaatacaaacgttcccgggcgcaccacacgaagagggcgctcaaacgggcgacgcctagccgtctaaaagatggcttcaagagtaacaaatgcgaatcgaaggcaaagatgcttgaggtgctcttgagatggacttgttgaacttctcactcaaaacctcaagtcaaacaccctcaatcttgctctcaacccaatccctagctcaagaactcaaggatttagctcaaagaagtaaggaaagggagtattcaaagctctagaggtgttttgcctcgagttaggtcagcagcaatgaagtgggggctggagggggtatttatacccgacgaccccaaaaact

SEQ ID NO: 16141 - DNA, 288 bp, Setaria italica
  Peptide Sequence Number=SeqID_82115
gtcccgtttgatggtcagttgtgtaggttgccgcctgatggaccttgaacttttaagttttttttggtttttgccctcgatttgggctcggagttacagcatccgcaaggcagatcttacggccgatgacgaagttgatcagccatcaggggaagacaatgccacaatcacaaatcgatcgcaccgagcagcctccgccaccggctgtcgtccgcctgggtgcgccgcgcggggcgccctcgtgcttcgcggccgccttcgacaccatgatcatggccatgcacgtcg

SEQ ID NO: 16142 - DNA, 565 bp, Setaria italica
  Peptide Sequence Number=SeqID_82116
ttaaagtgtggatcaggacacagtattgaaacaagtgacaaggggccagggtatgacgatatgattttctcaaaagacaccgttgcatttgcaaacataaaatagatgttcctaagccccaattcattcacccaaaattgtgttcgctccaacaacttttcccggatttccagcccaaggtagttccgcctctggcctgagttctttgcatgccaaatcaagaacctcccactcccgcagccgatgtcaaccatgagggcagcagggggtcctcgaacacttccttccagtctggtggctccgtgggttcggagaaggatgagctgagcgggttcacgtgctgccggatgcgcaggtgctggcccctattggtgtagagcggccggaggttgaggtcggcgtactccttgtccaccgcgtcggggctctgcgtggcaaagcaccgggcccgggacgggggagggcggcgggcggaggggaggcggatgaggcggcagcacagtgtggccgtggccgtccaagccatactgcgctatggtcccggctgctgccaccgccgccgccg

SEQ ID NO: 16143 - DNA, 217 bp, Setaria italica
  Peptide Sequence Number=SeqID_82117
catccttgcagcagcaacagccagcttcctgtttggcgggtgattgaacttgcaggttgccccgaatctacaaagtccagtcctcatataataactacagtcaggctctccaattcgttcagggaagggaccatgttccatagattctcgttacggcatctgcaagtttggtccaaattgcaaatttgaccaccctatgccaactggtaatgcatgg

SEQ ID NO: 16144 - DNA, 485 bp, Setaria italica
  Peptide Sequence Number=SeqID_82118
aaattttgtcatgttgctccaaacttgcatgtcccggtcttcagataatattgacactcaggttgaccaactctataaggatactcccctttcatccttgcagcagcaacagccagcttcctgtttggcgggtgattgaacttgcaggttgccccgaatctacaaagtccagtcctcatataataactacagtcaggctctccaattcgctcagggaagggaccatgttccatagattctcctcctcctaaagtcatttgccacatggcctcttccgcggacccgtggtggtggggcccgatcgcgacgcccgccggggaggaggaggacccctccccgcccccggttcccccgccgccgcccgctccagctcccgccgccgccatcagggcctccccggcatcagatcagagggcgccgcgagggagtggagtgggggagaagcgacgcgaggcgagaggaggaggaggagcgcaagccaagcg

SEQ ID NO: 16145 - DNA, 1923 bp, Setaria italica
  Peptide Sequence Number=SeqID_82119
ggaaactgatattttccattcctttcttattctatgcttgatgaagctccctacattttaactgtatgcgaaattgtgatagcttttattctaattttaaaggcattcaattttatccgttgttactttctacttgattttaattgtggtcttgacttcagttacttttggttaaattaggctgttgctgctgcaaggatgaaaggggagtatccttatagagttggtcaacctgagtgtcaatattatctgaagaccgggacatgcaagtttggagcaacatgcaaatttcatcaccccagagaaaaggctgcaattgcaacacgagtacagttgaatgttctaggttacccaatacgaccgaatgagaaggaatgtgcttattatttgagaacagggcagtgcaaatttgcaagcacatgtaagtttcatcatccaccgccctccaatacgatggttgctgtacgcggctctatttattcacctgggcaatctgcaacatctcctggtgcttatcctggggctcttactaactggactttgtcaagatctgcatcatttattgcaagtcctcggtggcctggtcattcaggctacgcacaagtgattgttccccagggccttgttcaggttcctgggtggactccttatgctgcacaaatgggctcatcttctccggatgaccaacaacgaacacctggaaccaatcaatactacactagctcacatcaaagtgaaacaactggtatgggtgaacatggaatgtatccatcataccaagcaggttctgttcctgttggactttacgcagtacaaggcgagaacatatttcctgaaagacctgaccagcctgagtgccagttctatatgaaaaccggagactgcaagtttggtgctgtttgcaagtttaatcaccctaaggagcggctgattcctgctccaaactgtgcattaagtccattgggtcttccacttcgtccgggagaacctgtctgcaccttctattctcgttacggcatctgcaagtttggtccaaattgcaaatttgaccaccctatgggaacccttatgtatggaacttcaacctcaccgacaggtgatgcgccaaccatgcattaccagttggcatcatcaccagggcattctgaaagattgcttgacggagggtccggaaggtctcataggatttcccaatctgattcccagcaaataccctccggcaatggaagcactgagagagaggcatcataagccgccctcctcagccttccttcatgcttattcccattcttgtctcttcagtaattatatctcaacacattcaaagagctgaagctgtacaggtcctcacccatccttcctccgctgttttgagcttcccgtaatcccgtgctttgccgtgtatcacaatcaggcaggaaaaagttcttgcttaccccaccctggttcccgtttggcctctgaaaataaaaatggggtaaccattcttatttatccgtacctatacacacaagatacactcactccctgatccctttgttgtagttatacaggtgacctgcggtggacaaatcttaccaaactgactgtactggggatgcaacatctcttcctctctttcctttctctcttcttcctttttgggcaggttgtgagggcaggacgtgctgcttgcgcaagtgtgcatgttgaaaacagcggaaataataccctgccttctatgtaataattgtaatctatgtattactcactgaattatttctgcaataagagacgccgagcgcggttgcggcctgaggcatctgatctaaccatgaaattttgttatcactcggccaattcctattggtgcttcttggagacctgatgtgatcttgcatttatataaacttcgatgtggacatcgaaatcttcaaatgtttc

SEQ ID NO: 16146 - DNA, 269 bp, Setaria italica
  Peptide Sequence Number=SeqID_82120
ccggcggccatggcgaagacgaagcccatggcggcggcggcggcggcggcgggcgagaagaagaagagcaaagggaaaaagaagggaaagaacggccccgccaaggtggccatgaaggcgcgcggcgcggcggcggcggcggaggagcggagcaacccgttcgaggctatctggtcgcgccgcaagttcgacgtgctcggcaagaagcgcaagggcgaggagcagcgcgtctcgcgctcccgctccgaggccatccgcaagagggagaa

SEQ ID NO: 16147 - DNA, 473 bp, Setaria italica
  Peptide Sequence Number=SeqID_82121
ccgtgtggatctcagagttgtagaacttcaggggcctttttgattttgtagaatactcatcctcttcaatgttgaagacggggtgctggaaatcaacagtgggcccctcggttgagcaaagcatgaacccaatcactccactaggatatgtaggtactgttgtccaagcatagttaaccgagcctttgaaaacttggcgacaattagcaacgatgtcttcaatgatgtgcatatgcagccatatgctctctgcctgggtgcatacaactccgcccgggcgtaaagctctggccacggactggaagaaaggcttctcaaaaagctcttgggccggacctatcggatcagaggaatccacaatcactgcatcataagtaccctctggtacatttttcaaaaaggcaacccgtagaagtgttgaaaccaaaagttgcacatcctattgattgtgataaaattgaagctatattttt

SEQ ID NO: 16148 - DNA, 1438 bp, Setaria italica
  misc_feature (1)..(77): n is a, c, g, or t
  Peptide Sequence Number=SeqID_82122
nnnnnnnnnnnnnnnnnnnnnnnnnnnnnnnnnnnnnnnnnnnnnnnnnnnnnnnnnnnnnnnnnnnnnnnnnnnnnagttttggtttcagatcttcgcagcaaaggaccggtcgtggttatggaaccggaaactcgatacatgatgccaatactcatattgataaatgatctgaggactgccgataacagctatcacaaaatgttttcacggctgcactgcctggtgcagccgagacgtgcaactaacagaatcatatagatcgacaaccccgataactgcttgcatctcatctccagcacttatttcaaaggaaaaaagggggaggggctcccccttttcatgctacaacaaattttgtgttgtgcctaaggtacttggtccaactgactaggcttagtgaaatcccttgaagtctagttggcctttgcctcgatgaccctcttcgcaaaagatggcaaacaaaatgatgccgtgtggatctcagagttgtagaacttcaggggtccttttgattttgtagaatactcatcctcttcaatgttgaagacggggtgctggaaatcaacagtgggcccctcggttgagcaaagcatgaacccaatcactccactaggatatgtaggtactgttgtccaagcatagttaaccgagcctttgaaaacttggcgacaattagcaacgatgtcttcaatgatgtgcatatgcagccatatgctctctgcctgggtgcatacaactccgcccgggcgtaaagctctggccacggactggaagaaaggcttctcaaaaagctcttgggccggacctatcggatcagaggaatccacaatcactgcatcataagtaccctctggtacatttttcaaaaaggcaaccccatctccaatgtttaatgacacacgagggtcctcaaatccaacagccagatgagggaaaaattgcttggacacatctaccaccatcttgtcaatttcacaaatgtcaatttgttccacagaggaatgtcgtgaaacttcacgcagaacaccaccgtcgcctcctccaataaccaacaccttcttgggatctttgatggagcaaagggaaaggtgggtaatcatctcttggtatgcacactcatccctctcagtaacctgaatcactccatccagcacgagcaccttgccatatgtagatgacttgaaaaccatgacattttggtagtctgacttcccttggaacagcaccttctccaccttcaaagagtgcgcctcaccaggccacatggggctaatctcggagaaccatcctgggatgacggcggagatccccgcctggtcgccggtcccagcacccgccacctcggcccccgcccccgcccccgccgccacggcgtcctccgcgctctcccgcgccctcttggccgccgcctcggcctccatcccgaaaacccgaa

SEQ ID NO: 16149 - DNA, 251 bp, Setaria italica
  Peptide Sequence Number=SeqID_82123
gagcaatggcgcggccggatcagatcacagggtgctgggcatgggcacggaagaagaatggaaccaaatggggcggggggaaggatcaatcaaatcgagcaggcgctggtttgccttgccctcgcctgtgtgattggtttgggaggagaggaggaggagaaggaccaggggggctgggccaagggcaagcaagcagaggcggcgagatgatgggtgattaggagatggcggaggaggaggagagagcgcaa

SEQ ID NO: 16150 - DNA, 929 bp, Setaria italica
  Peptide Sequence Number=SeqID_82124
atgttgcctcgatggttacgatgactcacccactatgcttgtgcgcatcttcttcgccgtcactgtattgatgagcagtgtcatatgatgaaacaaacccctgcgaacgaaggaacttgtaaacttggccacgtttacttccgttccaatccccgcatagaatgattggcattggaccaagtttattctcttcctggtaagcctctatatactgaaggatcttatatacctgtctcaggcggactactgaaaggctgtggtcatgagggaataataaatgggtgttgacaatgaggctctgctgctggacacatctggtgcttcggttttgcaagacgggcatcgctgactcaacatgcaacagctgagccactcgatcaccaaagtcattgaagagaagctcccgataattcaaaacattgaagtagctgctatgtacagcagtaagtagaccatctccacgattgttggtgcgtgcaagcttaaagagcgtgtaattggcgtcacccagccgcttctggtacatgtccaccagctcatcgtttcccaaccaaacctcctgaagacagatgatggacgagctatcagcaagaagacggtcaatgatcttctcgttgcggctgaaccagtaggccctgtactggctctccctgcaattctcagagtccatgcgtttgtagatcggcgcgagaatgttgaacgtggtgcaggagacgcagcgttcgtcccgtggcagccaccggtcgtggtggcggtcccggcgccgcctcgcgctcgcctccctacgctgcttcttcgccattgcgatgactcgtagggcgtggaatctgaggcgcggaggtcgtatggtctcggctgcttctcgtcgatttggcggctgctaggggagatggagaggaatggaattgatgattcttcctggccccggc

SEQ ID NO: 16151 - DNA, 253 bp, Setaria italica
  Peptide Sequence Number=SeqID_82125
aataaaccttttgaactccctctgtctacactggaacggagaaaatccatatgggaaataacacaggtttgtaaattccagcactcacggccagcactccgctaaggccaagcgcaggggccaagcagcaggggcagctggaggccaagcagcagacggccagcactccgccaaggccaagcgcaggggcggttggaggccaagcgcacggccggccggaggccaagcagcaggggcggccggaggccaagcg

SEQ ID NO: 16152 - DNA, 223 bp, Setaria italica
  Peptide Sequence Number=SeqID_82126
catagaaggtgaccgcctgaccggcggcggcacatagacacagctcgggatctctggcgatagctagctcgacgttgggcttggacgacgattagcctggtcagagctcccagcatgcagcagcaggaggccggaggagctgacctgcagcaggtgagagcgaaggaggaggaggaggagctggtgttcgccacgtgggactgcgggagcccgctgtacgact

SEQ ID NO: 16153 - DNA, 1079 bp, Setaria italica
  Peptide Sequence Number=SeqID_82127
cgtccccgttccattacaagaaaagatcgtggcaggaagcgatccaattctcaattagaggtcgagaactttagcatcctgagttctcgaattgagggcaacctgctgggattcggagcatttgggggtcggttttgcgcgatttgaggcggacagggggcaccctggtgagctcttgatcgaatcggcggtgcttcgggttcaatccgagaaccattctgctccctgcgcatgtgagcttcttgccttgtgcagccgcgctcaccttcatagaaggcgaattggcggtttcttctacaattgttcggttcttatcttgaagggcgggcaaatctgaggtttcttctccaatcggaaaggtgtggtagccaaattcgccaggaaggctgcagttatccgtgcgagaggctccctctcacggattggggctggcgctgtcccggcgtcgaagtgctcgggggctccttggaagcttcgatcgtgtgtgcctcagaagagtgatcctgaagaactcggccttcaccttcccaattcaatccttctccaaggcggcgattgggttgtagatgggggcgggttcgagcatcctgggcgcggacggggagtggggggagacgtccctcggcgacatgccggagagctgcgtggcggcggtgctgctctacctcgacccgccggagatctgccaggtcgcccgcctcaaccgcgccttccgcggcgcggcctccgcggactgcgtctgggccgtcaagctccccgccaactaccgctaccttgcggccctagccgcggccgccgatgacgaggtccgcggcgatggagatgacaatgacaagcgtttctttctagcggcgacgaagaaggagatttacgcgcgtctgtgccgacccaccctctttgatgctggcagaaaggaattctggattctgaagaacaagggaggtctttgcatcagtatatcatcaaaggcgatgactattaccggtattgatgatcggaggtactggagccaccttgccacagaggaatcaagattccatagcgttgcttatcttcagcaaatttggtggcttgaggtg

SEQ ID NO: 16154 - DNA, 420 bp, Setaria italica
  Peptide Sequence Number=SeqID_82128
ttgagaacttaggtcttatgtgcttgcatggaatgaatggttcagctacagaaataaaatcatgacaccactaaaataattttgtggtaggatgtaatcgtctatatatcttgtttctttgataatgatcagaggagtttgttgcgcatgcttccaatgtgaattgtgccaaatttgggaggcggacatcaaggatcctcatcactggtggggaggatctgcaggtcaatctttgggctgtagggaaacccagtgccctcctgagcctatcaggccttacaagtccagttgagtcagtgagctttgactcttctgaacttaccataggtgctggtgctgcaagtggaacaataaaaatatgggatgttgaggaggcaaaagttgtccgaactttcactctactcatagtcgtaatttgtt

SEQ ID NO: 16155 - DNA, 870 bp, Setaria italica
  Peptide Sequence Number=SeqID_82129
ttttattcacgttaaaaggtggtatgcattcacacatacaagggccatacccggcgaattgatgtgcttaaatttactccagatggtcgatggattgtttctggaggggctgataactcagtgaagatctgggatttgacggctggaaaactcttgcatgactttagtcttcatgaaggtccagtcaactgcttagattttcacccccatgagttcttattggctacaggttcaactgataagactcttaaattttgggatcttgagacttttgagttgattggttcttctggacctgagaacagccgagaatactttgagccggtatggtttctcatcatcaatttcttcataccatcatatgtcttggattcgtgtgtggaaatggatgagagtgcttgttggaaacaaggcacatgatccgtaatcagataatcgattgcttaatggcagctgtcctcgattttcaggctagtatagttcgttctaatgaaattcaacagtgatggtaaaacacttttttgtggattacatcaaagcttaaaggttctttcctgggaacccatcatatgtcatgatgtggttgatgtaggctggtccacattggccgatctaactgttgatgaaggaaagcttcttggttgctcatataaccaaaactgtgttgaaacatgagccatatgctgatagttgtgctggatcacacttaaatggaactgtagataggctaattgaatcagataatagcataccatcagtgtttggtagactatcagtttccagaagcccagccaatgaaactagttcggatactctgcttgaacgctcaatgtctgtctttctaaaaagtaaatttccttgttcttcctt

SEQ ID NO: 16156 - DNA, 624 bp, Setaria italica
  Peptide Sequence Number=SeqID_82130
tccacctaacaactgcggcgaagttttagcgccagcgaagaggccgcgggcgggaggatcctgagagcgagcgaggcaatccgcgtccttctctcccccgcagcgggtgtccatgctattgatgacggcggccgtcgcagatggccaccaagcgagcctataagctacgtatcctgtaaattgccggtttaggaattctggatcggaattttccaaatcggatagctcttgcctgcttgtttcaatcggtgtagcgctaggtttcggttgggttgtgtacttgggttcgctcgcagtgatcgaattcgtgcctgcttctgggtgactgggtctcgggttgttctggtgttcactgttcatgttggttttgtacttttgttcttgcaacttgcgagcctgtgatttgaggagttgcgatggcagctaggaacctattcaagaccatccgagctgccttgctattgctacttgtgaagttggggatagaatgaaatttcaaaacagtatcgtgaagtttcagacctagaataatacagttttctgcataagatcaaagctaaactaatttcggtggtctgggttagccagagacaggagccttgttctattgtctgccaggaaaaa

SEQ ID NO: 16157 - DNA, 1710 bp, Setaria italica
  Peptide Sequence Number=SeqID_82131
acacttatgtgttgtactgttgggaagaagtaggtggtagcatagcatggacagtgagttgggaagaatcagttcaggatgtccagatgtcatacttgttatttgtttccattgagaacttaggtcttatgtgcttgcatggaatgaatggttcagctacagaaataaaatcatgacaccactaaaataattttgtggtaggatgtaatcgtctatatatcttgtttctttgataatgatcagaggagtttgttgcgcatgcttccaatgtgaattgtgccaaatttgggaggcggacatcaaggatcctcatcactggtggggaggatctgcaggtcaatctttgggctgtagggaaacccagtgccctcctgtgattgtcattgtacattgcagagcctatcaggccttacaagtccagttgagtcagtgagctttgactcttctgaacttaccataggtgctggtgctgcaagtggaacaataaaaatatgggatgttgaggaggcaaaagttgtccgaactttcactgggcacagatcgaattgtgcatcgcttgatttccatccttttggagaatttttggcctctgggtcttcagacacaaacatgaaaatatgggatatacgaaaaaagagatgcattcacacatacaagggccatacccggcgaattgatgtgcttaaatttactccagatggtcgatggattgtttctggaggggctgataactcagtgaagatctgggatttgacggctggaaaactcttgcatgactttagtcttcatgaaggtccagtcaactgcttagattttcacccccatgagttcttattggctacaggttcaactgataagactcttaaattttgggatcttgagacttttgagttgattggttcttctggacctgagaacagccgagaatactttgagccggctagtatagttcgttctatgaaattcaacagtgatggtaaaacacttttttgttggattacatcaaagcttaaaggttctttcctgggaacccatcatatgtcatgatgtggttgatgtaggctggtccacattggccgatctaactgttgatgaaggaaagcttcttggttgctcatataaccaaaactgtgttggtgtgtgggttgtggatttgatgaaacatgagccatatgctgatagttgtgctggatcacacttaaatggaactgtagataggctaattgaatcagataatagcataccatcagtgtttggtagactatcagtttccagaagcccagccaatgaaactagttcggatactctgcttgaacgctcaatgtctgcttcaaaagaaattcctgtctcctcttcttctgtggtaaggaagagattggcaaagccacctggagaaaaggatctctggctcacgagatctgattctgcacctctgctttctcctagagttagattgaacccaaatttcgttgatgacctgaagagacagccagccactgttgtaccagcagctcccatgtataaatcaatgtcccacatttcagggtatggcggtaaggaatcatctttcatacctgttcttgccccaaggcatagctcaaaggggaatgctgatcccattctcaatgaagctgccacaggtgagttaccagttattgagcctcaaaatatagaaaaagtaggtttatctgctaatcatggcaaagaaag

SEQ ID NO: 16158 - DNA, 550 bp, Setaria italica
  Peptide Sequence Number=SeqID_82132
ctaaaaaattgggagaaaaattgtgcttttttcgaaagtaaaataaaagctggtgtcggatgaacgaacaacacgaggaaagtagcgaaaaattttgaccccaggagagcacgattccacccctaatctggactggaactaaccgatattccgaacagattgaaactaggagggggaacgactgtagtggaacgaagtcggaacgaatttagcaataaatgaaaagggccggcaaaaccagcaagaaagaatgaacagcagcagccatagacgatggagaatgaagagcagcagccacagacgatgggctccggctcgacgggattaatggggaagaacctcgagctggaccggcgaaagccacgagaatcgccggcgtgttcgaggggggaagctacgagaaatctttaacctttatctttatttcttttcagtaaaacaaacgaggaagaaggagaagtacgtcccccgttcttcggtattgatttaacaatccggcggtcgccgtcgatgtcgctgcagttcccttgccgggtcgccgggacgggac

SEQ ID NO: 16159 - DNA, 252 bp, Setaria italica
  Peptide Sequence Number=SeqID_82133
ctattgtttacaccatgtgaagttgcttccttatcatcagcaatataccacataaagcataacgataacggatggaaaatcatcatatactgtgcataactaggtagcatcgtcatttctagatgatttcaaatgataaaagagctaacaccacgtagaaagcaaggagcgagaaactttgtttatccataataccgatagatgtatagctgtttacggttgacggagctggaattttcttttctacgtagt

SEQ ID NO: 16160 - DNA, 367 bp, Setaria italica
  Peptide Sequence Number=SeqID_82134
ctctcgtcaacactaccaagaacttgcttgatgtacttgaagttcttgacgtgagtgtaggcacgcagcgttccctgcaaggaactatcttcagctccatttccttccctaccagcaaggaaggtctcaatgtgcccacgaccgatctccagggcagtggggtcgatgtccatgccaacgtacagctccatctccgggtgtgcctccatcatggcgagggagtgcccggcggcgccgacggtgcagtcgacgaaggagcggagcgagcggggccggcggaaggcggcgaggacctcgccgagcaacacggggacgtggtgcgcgtggccgtggcggccgtagaggtcggcatcgaaggcggccgcgg

SEQ ID NO: 16161 - DNA, 376 bp, Setaria italica
  Peptide Sequence Number=SeqID_82135
agtctgaagggaacactgagcaatacaagaagcaactctgcaagtcagctgggagatgttggtagctggcagcggcgcattccaagaccacatttccatggggaagttcaggagaatggtccagtaaccggtgccagaactcgtcggtgggaaggtaatcaatgtacgccggtagctctggccagagcatgtccgggcgatggattttcttcttgtcagcgttgtccagtaatcctggccagaacccagtgtccagcggctgggaaaagatcatacgcgcacagtccagcagcagcggtatgccgccgcatttgtcagcaatcttggtgccagcttctctaacaagctcagcaggccagtcacagtggcatgtcgg

SEQ ID NO: 16162 - DNA, 624 bp, Setaria italica
  Peptide Sequence Number=SeqID_82136
aacaccatgaaacagtcttcctccataccatcttttctttcttgagttggtcagtacaaggaggtggaatcaggtctctcaaatgatacattgtcctctcctcctctaggctcatctgccatacaagcaggctgccatcgtactaaatatgcttgattttggctacaacttttttctaatcaggagagctgtgtgtcaatatattacgaagaaaaggggctttagaaacccaaggtacagccaggttttttaaggaaaaaacctgagcagaaaaaaccatcaccttacaaaagaactaataacctgttaccaaatggaaagaccagaccctaactagccctaagcaaaaccgtcaaaggtgccagggcaaggagatgagaaactcctctagctccagccaaactccacagatgcatctcttctctcacaactgacagaaattttggctacaacttcaagctgccttgtagtgaaagtcatcgattgttgagtaaatgtgcccgacatccgcattataaacaatagcctccctgatcttgctctcaggcaatttgaaccgcttgattatttcatcaatatgcaccccatgctcactctcaatgtttgctggctcattaaaaatat

SEQ ID NO: 16163 - DNA, 826 bp, Setaria italica
  Peptide Sequence Number=SeqID_82137
tttttttttttccatacaccatacatataataggataatcttagctagggttaacaccatcagtcagtcttttctcacaccgctctttccttcctaacttagtgcaacaaggtggaagcaggtccctcataccacagatggttattaacatgcccccctctaggataatctgccttgcaagcagccagccaggatactagtaaacatgcttggtttcggttgcaacttcagtcagtcaaagctgacttgaagtgaaaatcatcaattgttgagtaaatatgcccgcaatcctcattgtaaacaatagcttccctgatcttctcctccggcagtttgagccgcttcactatctcatgaatgtgcaccccatgctcactctcaatgtttgctggttcacggaaaatattcagcacctgtgtgttcaaatcagtgtcatttccatttgctccaccagtcacaggtgctggattggatttcaaagatgttggtgtgcttgattcactgaatccatttgagacggacagtcccattgaagaattggttcgtgcgggactgccaaccttagatttagtgttctctatatgcatccgaacacactgaatgaaatgcagtgtaacctcattgaaatcagttatgggcctgattgagaaagcagtagcacgctttcgctcctgaagtcccttgaggctaccaatgaccgagacatacataccgttctgaatagcagcagtttcagaagaatctgaagcatcattcacccatctgatgaaatcgaggcggccagtgccgtcgtcgagcgtgaatgacacatcggtggtccgctccg

SEQ ID NO: 16164 - DNA, 1643 bp, Setaria italica
  misc_feature (1)..(89): n is a, c, g, or t
  Peptide Sequence Number=SeqID_82138
nnnnnnnnnnnnnnnnnnnnnnnnnnnnnnnnnnnnnnnnnnnnnnnnnnnnnnnnnnnnnnnnnnnnnnnnnnnnnnnnnnnnnnnnnaacaatccagaactaaattttcagaaattgcaaacatttcattcaaacaggaccagttatagcataatacaagcttctatccaccaacagctgggcaggcaccgaggggatagaactgagccatccaattctcataagttacatgccaaaacgacaaacttacaattttctcagcagggattaatatgcaattttggcaatataaccttaagttcgtccaaaaaacatcaagtcctgttaaaagattgctgtgagcctgatggaggctgtgtaggtggaggtgggggaagtgacatctgcatttgcatttgcatttgcatttgcataggcatctgtgctagaacaccccttccatcgcctcgatctgacatgcctggattcatggagccatctggaatgcccccaaaaccagcctgcatgaaggccataccgccaccaccctgaggatcacctgcaccatcagccattccctgcccaagggccattgactgaaatggaccacccatcagtcccatagcccatgggcgctgaagcccctcagggaagctcataggaccgcctggaggttgaacgcctgacatggaaccttggtctgacccagtatcttgtagttgcatctggaacggggcagcaaaatactgggggtttccatcttgctggagagggtaattgaatggcgcattggggatcataggctgattcatattcatgggcatcataaagtttgcctgatgaggaggaattggtggaaacataaagggtgcattagccatcaattgttgcttgtcctgagtactatggtctggttcttggcgaagtggagttgccgcaccagggctctcctggcgtgactgagaagcccagttgtagcggtcaaatccttgaggtgggttgttctcggcctgagtgtcccctgatggatacgagtggcgaccatggaatgatggcggttttgaaagcattggaggccttagtggggtttgctccctggactggtggtaacgggagcgttcttcacgatcttgcatgtgaggagttgaagtgggtgaaacgcctggccttggaggagctcgtgcagtagacatttcaggcatttgagattgtctttgagtatcccctgcagaagcacgggagatgttaggagcatctgactcgttacgttcttccttctctacattagtttgtaggaggttagcatgggcttcaggcacatgagactcaaaatctgctttcttaaggaaagatttgagacacatcggtgcagcacagataaaaatcccttccatcattttcacactctgtatcttctgaatacgctcatcacatagatagcagctggaatcacttcttgcacaggttaaacaaaaagcatgttcacaagggatgaggcggccgtagatggcgatggggaattcgcagcgggagcagatgtggacgcgctccccgagcgggcggcgggagcggcgtccgatggcgcgcgcggccgcggcggcggaggtcgtgacggcgccgaggctcttcgcgacggggaggtccgctatgatcaggtggtcg

SEQ ID NO: 16165 - DNA, 256 bp, Setaria italica
  Peptide Sequence Number=SeqID_82139
gtagaccagtgccaattagttgtgcaaaatcttcctcattgacttttcatcatcattaagagcatagacattgatcttgatcaacaccttgccattgtcttgtttgtgattacccaaaggatatgttgtcaatgcgtgtagacctaaccttcactctctaacaagaaacagaaattgacttcgtgcgataatttcacaagcatgagtcagacaatgttctttttagttttggtcatttcaaattcttacacaatta

SEQ ID NO: 16166 - DNA, 303 bp, Setaria italica
  Peptide Sequence Number=SeqID_82140
tttgggttaaagttcctttcttatttattttcctattcttctttcttttgggtccaaaactatgctgtaagaacccaaagcatgcttctgaagggataaaatttgcaaataaagccatgaagtcattcagaagttgtgatatgcatttcatcagcattgtgaaccattttctcggtgtttgttatggacctttttctaggtcctccacctcacacttggacaaatcgagattacaagacgatgcactgaggctgctgcaggatgctgctgcaatggcagagtataatcctgaaatattgtaca

SEQ ID NO: 16167 - DNA, 273 bp, Setaria italica
  Peptide Sequence Number=SeqID_82141
tcagcacgccaagcaccaccacccagggacggcgccgcacacgcgcttccgcagccaggtccaggtgctggaggcgcccctggatcccggatccgatcctgagtaccaggatttccagttccggttcgtcccggaggtgttcgagctccagatgggcggcgtcggcggtggcggttgcgggggaaggaatggggacggcaaggcggcggagaaggtcctcgggttcgagttcgacaaggtgaggatcagcattgcgtccagcgacgacgaggc

SEQ ID NO: 16168 - DNA, 823 bp, Setaria italica
  Peptide Sequence Number=SeqID_82142
cgaccccctgttccacctcctccgagtgctgcccttctccttcctcaggccgccgcgcacccgcctcaggctgccgtccaacctggcgctcccctcccccatgaccgtcttctccctcatcctcctcacctacttcgccgtcgtctccggcctcgtatacgacgtcatcgtcgagccccccggcatcggcagcgcccaggaccccgccaccggcgccgtccgccccgtcgtcttcctcccggggcgcgtcaacggacagtacatcatcgaggggctctcctccgggttcatgttcctcctcggcggcataggcatcatcctcctcgacctcgccgccgatcgcaccagaccccggagcctccgcgtctccttcggcggctctggcgcagtagccgtcgtcatcgcctacgccatggccatgctcttcctccgcatcaagatccccggctacctatggtgaggctgatagatcttactggtttaattagaccagatccgttgcaagatctcgctacatctaaatagatctgcgtgatgtgtttgatggaactagcgaaccccttttttaattatgttaatgttacatcatagtatattgtatgatatcatcatcaactctgaattgttggatgccaattaccatttcgcaatgttactaaacggggcagtattgtgattcagtgctttcgttagattccaattgctactaagtggatcaatttgttgtagttggtgactactgttttttaactaagtactttgtatcacttgttttccttaactttcttggacattgaactctagaaaaaaaaaaaaaaaaaaa

SEQ ID NO: 16169 - DNA, 585 bp, Setaria italica
  Peptide Sequence Number=SeqID_82143
agcggtcaggggcggccggcagatggcacgggcggcggcaccgatcaggggcgccggcagatggcaggggggcgggcggaggtcaggagcggcggaggatgtcagggatggcggaatgtaggggaggcggcggcgcggtcgatccgctccgagacgtgaagccccgccgaggccacgtcggggccgatggcctcgtcctcccccatgccatggtcggagcgccgcggcacaacgcggcggtgcgggagagcggcttacctcccacaatactatcaaccaggagcatccgaacccaatacagttcaaatatcaaccaagtcaagcatggtgtagactttccttaccttggagagcaggggacacggcggtggcggatggcaggggtggcagagcttggtacgggcggcacttggtaggggaggtggagcttgacaggggcgatgcttggcaggggcggcggtaaatggcaggggcggcgcttggcaggggcggcggtagatggcaggggcggcggcagcggtcaggggcgccggcagatggcacgggcggcggcaccgatcaggggcgccggcagatggcaggggg

SEQ ID NO: 16170 - DNA, 252 bp, Setaria italica
  Peptide Sequence Number=SeqID_82144
aagagtagcctgttccagtcagagcgaagcttaccacccctgtccatgtcagcaccataccatatgtcgcgacggttggatgaaacttcaaaataaccattgacatgcacagataaccctgtccttactggcaaaggaagaaaacagaatgcatgcccctgtctgagaacagtatcctcgagccctgcttcagagatgcaagcagcaacagaagcccaaggcagtaagtgaagatcatactccttggcagct

SEQ ID NO: 16171 - DNA, 669 bp, Setaria italica
  Peptide Sequence Number=SeqID_82145
gtggctattgctaaataaatttcttgatctctttccatcctcatcatttctccctagtgcaatgttttccagctcatggatatctgcctgaggtggaagcccaacaatcactatgctctcaaacaaatgtgatggttctctgatgcacctattacccaatgacttcagctggaaccttgaccactgccgtttttgcgttgtaagcacttctggattgtaaggtccagacaggtctggtgaggatgaaaaacctttcatgattttcgaaaattgctgctgaagcttctgcattgggctgccactctcatctttggaagaatacacaacagatggccgtgtagactgtgtagtggcagctgaagccgcagcgataaatgctcttgcgacctcttccgttgtttgaatcaggtgcgacgtgttgaatttaagaccctctgacccatcattcttgtccaccatcctaaatgccagtgatgcccgcggcggcggctgctgcggagatgggtttgacgcttcgccccgcgctgatctctgcctgctgcgtgtgcggcgccgcccgaatggacccgaaaccagcccgcgaatgggatggcctccctccctctccaagtctcgtcctcgtgcctgctcccctccctcttttttttcctctctttttttccctggttt

SEQ ID NO: 16172 - DNA, 710 bp, Setaria italica
  Peptide Sequence Number=SeqID_82146
gccaaaggacagatacttcatctctgctggaggatttggaactgactgttgccacaccctcccaacaaaacatgaccaatatgtcttcccagaatgcggaattggcgcaagcttaactgatcattttcgctgcgtttgtatgccggttggaatctgagtgcagttcatgtgcacgcatggttctccacattaggtccagacagaaggtatattatattattcaatgttgagaaagtgactgaaaaaggtgaggaaaacagaatgctgtctggcactagcaccattattggctttccacctgatcctgatgtttggtacttggtacaagaacagcttggtgtatgtctggtgtatctgaaagtgttgatttaggtacctgaatgcatgtctccttgaagtttctgggtaagtaatagttggtgcagattgcagaactgaaagctatgaacaagggaaatccttgaccatattaaatgtaaatctgagcatcactggtttaaagaaaaaccataggcttggatggatgttagtaattcagcatagaaagttagacacttaaggtctcctagtgtagtgcaatactcttgacgctctgcagtctcacatgtaccccaagactccagtctccccttggaacattggaattacagtttccattccctacatggatttatcctattataatcttgctacaaaaaaatcagaaagtt

SEQ ID NO: 16173 - DNA, 1219 bp, Setaria italica
  Peptide Sequence Number=SeqID_82147
tttctttaatttatttttcgtttcgtttcccttagttccgggttatttgttcgttccttctttcggtagttactccgaacgcctcctaataaaacgccaccgccccactcgccggagcccggccgccgggatgcctcaagattcgcgcccagccgggatgcgcctcttcggcgtcaccatcgcgccggcgccaccgccggcgcccgaagcggatccgccggaccgggatccaagccccaacccgcccgtggcggtcagggaggacgtgatgcgcaagtgcaagagcatgggcaacctcgcggcccttggcgctggcgcggacgccgtaggagctggcgctgacggcgtaggcgccggcgatgggtacctctccgatggcgggttgatgcagtcgtccgggaagcggcggagggcgcaggagaggaagaaagctgttccttggactgaagaagagcataggacatttcttgctggtcttgaaaagctagggaagggagactggaggggtatagcaaaaaattttgttactaccagaacaccaactcaagtggcaagtcatgctcagaaatattttcttagacagactaatccaaacaagaagaagcgcagatctagtctttttgacatgatgccaagcgagctgtcaccagtaccaaattgccccatcttaccatcatcaatggcaaaagtacatgatgtggtagctatgacaagacaactccaaaatagcaacttggaaggaggctcatcttcaaacgcagctaatatagcacctcaagttggaagagatcttcccccagttccgtcttttagggcaacaaatattgattcaagtgtcagcaaactgaaccacatggaacccttatggagaacaccctatccattcagaccaattccaagggcccctgacgggacatcttcatcaacttccgttgctgccaatatagcttctccggatgccaaagctaacctgactgcatgtactagcacattcttgagcccgcgaagtgatacttcatcagtgccgccaaaggcagatcctccagcagagatgaaggatttggaactgactgttgccacaccctcccaacaaaacatgaccaatatgtcttcccagaatgcggtaggcgtgattcaagtcatctaagctaataattattttttggaaattactatttttattgactgttgaccaaataatcattaacattctattagc

SEQ ID NO: 16174 - DNA, 244 bp, Setaria italica
  Peptide Sequence Number=SeqID_82148
ccacgccatgctcgcgcgcacacgcatagaagggtgttcatttatctccgccgtttagtccacgccatgctcacaactgagtcccatttccacaccgcccccgcggtcgcctcaggcaaagagggggcgcggctgcttcacaccgagatcgagcccgcgcgcaccatataaacgccaccgcgccacgcttcctgaccactcaccggccagcatcagcagcaacagcggcggcggggagaggagg

SEQ ID NO: 16175 - DNA, 789 bp, Setaria italica
  Peptide Sequence Number=SeqID_82149
ctcccgagaaccctctcgaccatcgccatggccgctcccaacggcgccgccgccaccgacgccgtccacgagcctccccagaagatctccaagatcgcgcccctgctcaaggtgaagaagctctccgacaaggccgtcctgccgtcccgcggctccgccctcgccgccggctacgacctctcgagcgccgcggagatggtggtgccggccgcgggggaaggcgctggtgcccaccgacctcaccatcgccatcccggaaggcacctacgcgcgcgtcgcgccgaggtcgggcctggcgctgaagcactccatcgacgtgggcgccggcgtgatcgacgccgactaccgcggccccgtcggggtcatcctcttcaaccactcggatgtggactttgccgtcaagcccggggaccggatcgcgcagatgatcatcgaggtgatcgcgacgccggaagtcgcagaggtggaggacctcgacgccaccgtgcgtggcgagggagggtttggatccaccggcgtctgagccgtgacggccctcttcgctcgaaggagggatggtagtttcatcagtctctagattaggatggcgatgcaaccttggtgtctttagttggctggaagcgctcctgaagtcgtggtgttagcgtgcgtttggttcagggacatcctgcaactgaacatgtcaagaagtttaggttgggtcggtagatgaatgcaggaactgttaagaacttgtttcttcagtgatcttattgtgcacctagtgtgttggtcgtttctgaatataaa

SEQ ID NO: 16176 - DNA, 516 bp, Setaria italica
  Peptide Sequence Number=SeqID_82150
catgatgagcagcagcagcaaacagagcaccaccgcccgccactgcaccagctaataccacggacacgccatccacctcacgtacgccacaagtaacatacgattgatcgatcgatcctcccctctagctattttcttgatccgggggggattatgttagttgttcccatcagctaatcaatcaatcaaccaatcaatcataggcttgataggttagtcaaaatagccgtagcttattcctagtagcacccacccaatccatccatgtatatttttgtgcatgcatgctgtaattctgtccctctcggtctgcttgctcccttttcgacaggagtacgtagtagcagcttcttttctttgggttttctttctttcacaggttgtattgatcaatcatcgatcagagggcaagtaattattaagtggtagtattagtagtattgttactgtacaaatcgatcataattagattgagatgcttctagtccatctgctctttactaataaaaaaaaaaa

SEQ ID NO: 16177 - DNA, 269 bp, Setaria italica
  Peptide Sequence Number=SeqID_82151
cggcgtgccaccatgagggtttccgtcgctgcgctcctcgtcgtcgtcgtcgtgctccacgtcgcggacgccaccgtcctccggccccagaagctcttgttcccggccattttcagcttcggtgactcgtacgccgacaccggcaactacatcatagaggtggatcccaggccgttcaacttctcaccttacggcgacaccttgggccgccccaccggccgcgcaagcgacggcctcctccccgtcgagttcgtcgcgaatgctgtggg

SEQ ID NO: 16178 - DNA, 236 bp, Setaria italica
  Peptide Sequence Number=SeqID_82152
gcacctgtagcattgagtacatgacccatgtatttgtctacaaatcacacacatctggagaaatagatgagaatgaagcacacgtagattgtcatagttcagcacatgaaatgatgttgtactagttggtcaatccacttaagcaatttaaatgatagaatgaaagataaacaaccttcataaatagcaaaggttgaatgttcaatatcccaatagcaggttccatgagctcatcg

SEQ ID NO: 16179 - DNA, 2536 bp, Setaria italica
  Peptide Sequence Number=SeqID_82153
ttcatcagcctcatcaggatcaaacagatagtcatacgttagctcatcaccggcacgaacatttttcttggctattagaacaatacggctttcatcatgcccaacactcataatccttgcgtagcagtttggtgtgcaagaatgattgatcaggcgtgccacgtttcccttgtctgtggcatcaacaaccacttcctcactgattttgaaaagatagcaatctttgccttgcacccgatatttttcttcccgtaaatcagcaacacttcgtctgacctgctcaccgcgatactcaaggaccatttctccttcttgaatgtccctacgagcaaaaagtccccatctatgaattcctgatctaccaaagcatactctactatgctccgttttctgtaaataacgtagacgctccttaaaagtagaaaaggattctgggtccctctcttcccttggaggattcagattatcaatttcatcccagcggtgttgacaaggtcctctcacacgatgtgcaattgctccctctctagatcgctttaggtctttcctaacataaacccgacatcttgcagctgacaagttctctgaaatttcaacttcggatggtgattccatggggacatctttcctaatcagtcttgatgcagctactttgccattactctgaacaagcttctttgatgagaaagttccagcagaagtttgaattattaaaacattatcagggttagggttcctatgctgagcacagtaagaaatcttctttgtcgtctgtttgccatttttttccaagcagtgcagctccatttgatagcctgcccttgatgcacaaatggcatggtagtaagtcgagcacctgtagcattgagtacatgacccatgtatttgtctacaaatcacacacatcttcataaatagcaaaggttgaatgttcaatatcccaatagcaggttccatgagctcatcgctagcaaaggcaacctgtggctgaaaccatgcacatgtcacgtgaacccacaaattatcaacatttgttggcttcaaagcaccacctcttacagggcaaagacagcactccctcttttgttcaggtttctcacaagctcgacaaacccatgaggtaaagtcttgcttacccctcacaccataacattcttgatgaactgctatctgacatctgttacaaatcacaattttgttgtaatcccagtcttcaacccatctacagaccgcacatctttctgttgtccattttacatttacaggatcatatgggtcatttagcaaatcaattaacttctgtttcttcattttctgagatgagcgttttgaaggatttgtgggacacactcctggctgatgtcgatctatccattttccaaatggcgtcaatgagcccttaagcttaatactggacctccaatttttacttctgcagccagcatgccgctcccattcattgaacaaaaatttctgtcccttgcaagggccacaatggcaagaaattaattccgagatctggtaagtatgttccttccatgtcaaaacagacaagtgcaactttgtcaggtttgcttcctttctgtgcagaactatcttttttgacatcagaaaatttggcagtcttcccagggagagatgaattcagtttaactctacagtaagggcagcaataactggtgtctcgtagatccttgaggttgctgcagatttcatcgcattctgcatgaacccaactttcacaaccatgacagcaaacccatcttacaccatatttatgttgcaaacttttcaaacaaattccacagtactgttttgatctcaagatcctggaacaaggtctgcaagcaagttgctccatcacatacaccatcttgtttgcatccttgtttggaaagcaatttccacaactctcacactgcagtgctcttctgtaccgcttaatctgtggctggcactccaactcatttgaaccagtcacttcacgtaaatcatctgggaaagtgtgacacaccacaggttggcccttggtgctacaatccatcgggacttcagagaatccctgatcagccaaaaatgcctcttctactgccctctggaaatcagcaggtttgcaactgcttagttctgtctgcccttgaaatcggtccatgtagtcaacaaatggaaatatcaacccctgcttcacccacacgtacttcttctcatcactgaactctgtgcaccagccaaatagcatcacacaaagcacagagacaccgcgaggctgtggcggcaatgcctcagcagcagcctcctgagttgggtcaaccaccactcctggccacatcggttgccgcttgccaagctttgcccacacaatgtctccatacacaaactcttcagtacaaagtaatgcatccttctcctcttcctcatattcatactcttcatcctcttcttcctcatcctcctcatcttcctcatcgtcttcatcttcctcatcgtcttcttcgtagtaacgcctaagcattacttccttcctgtgataattatt

SEQ ID NO: 16180 - DNA, 309 bp, Setaria italica
  Peptide Sequence Number=SeqID_82154
tcgacatttgtgccaagtataaatgtcgatgcaattacagtcataggataaagcagggccgccgatggacggcagcccaacaagcgtatacacacagatcagaaagctaagcgaggaagaagaggccatccggccggctcgctggtccggtttcctcgacgcggatgggagcccaacaagcgtatacacacagatcagaaagctaagcgaggaatcagaggataaagcagggccgccgatggacggcagcccaacaagcgtatacacacagatcagaaagctaagcgaggaagaagaggccatccggcc

SEQ ID NO: 16181 - DNA, 418 bp, Setaria italica
  Peptide Sequence Number=SeqID_82155
ccgtcaaggcgctcgacgcacagatcgcctcgctcagcgacgagatcgtcaagaaggtgctcccatccgcgtgaggaaaccggaccagcgagccggccggatggcctcttcttcctcgcttagctttctgatctgtgtgtatacgcttgttgggctgccgtccatcggcggccctgctttatacttggcacaaaatgtcgatgcaattacagtcataggataaagcagggccgccgatggacggcagcccaacaagcgtatacacaactagatcagaaagctaagcgaggaagaagaggccatccggccggctcgctggtccggtttcctcacgcggatgggagattagagctgggctgtaggtgattcagcagagtccatcttgtcatggtgactctatagacaggcatgaacactt

SEQ ID NO: 16182 - DNA, 438 bp, Setaria italica
  Peptide Sequence Number=SeqID_82156
cggcggtgatccatattgaaccgggtgcactgatggccatgggtcttggtgatgcggtggagggggtgatgcgtatccaactgggtatgttggtggcaatgggccggggtaatgcggcggcggcggtggtgatgcgtatcgaacaggatctgtgggtggcaaggggccggggtaagatggcggcggccatggatgcgttggcgtgcacggtggcggtgggggcagaatggggcatggagggtaatgtggagcgggcgggggtggcggtgggcggtgaactggcgcgggaggaggcggtgaatgcggcggcggtgatggcggtggagatggcggcggtggtgatggtggcggtggcgatactggcggtggcgatggtggaggtggtgatggcggagaacttcatggccctggctgcatcactgttgaaggaaaacacca

SEQ ID NO: 16183 - DNA, 584 bp, Setaria italica
  Peptide Sequence Number=SeqID_82157
gcggcatctactactactcctcccacctacgtactaccggaacgggacgaataactactaccgaatacaagacccccctccgccgagatcgagcgatgctccggtggcgaggtgaggacgccctgattccgcgctgttgccgtacgtgagatctcggggtggccatctcgcggcggcgacatgccgtctctgcagctgctgcagttgacggaccgcggacgggggcttctggcttccaggaggaggactctcgcggttgtttctggcgcgctgattgctggtggagctttggcctatgcccggtcaagtcaaagccagcggagcaggcgttcggaggcaaattatggcagcgaagccagtgaattggccaccaatggggatgggttgagtcaaaattgtagattggctgcaacaaagcagaaaaagagtgggcttaaatctttgcatttcctaactgctatcctgctcaagaagattggtcccaatggcacacgctaccttctaggcttggtattaacagcggtgctgcgtactgctgtggggcatagattggcaaaagttcaaggtctttttgttaaagcagc

SEQ ID NO: 16184 - DNA, 251 bp, Setaria italica
  Peptide Sequence Number=SeqID_82158
agatgctgggagttctgagttaaagtcattgcctgatatgtcaagttccactaagcttctaagaccaccaattgaccaagggatggtgcctgataagctgcattcagtgagagagagttcttttaggtgcttcatgttaccgatctcttttggaatccctccagtgaaatgattgaaccccaaagctaaacgctccagcattttcagatgagtaatctcattaggtattggccccaccaaactatttgaag

SEQ ID NO: 16185 - DNA, 2688 bp, Setaria italica
  Peptide Sequence Number=SeqID_82159
atacctgttgttatcaggagtgttcatccttgtctgttgaaacctcgaggtatgaagggagtcaaagactggtacgagattctttgaccttgattctatgttatgggtctggattttttctacttcaacttcccctgaagttatatcaagattgtctgcttctaaagtttcaccctccataacttgaaagtgtatcccagatctagaccagagtggagtttgcacaacatgagtctgcaactcactctgagatatatagaaattacgattttcatcagcactgagctttggtctttcagcagcagcagagtcaaatggatagatacttgttcctttttttcataactttctggaaaagtttattattttctccattctcaaaatcattatacgcaaaactctcagcactgtctctcctatttcttttatgacaaacatcccacttctgaagagcttcaataacaaattttgtatcagtctctctttctgatccataagaaatggggcctgtggggaaatcaaacccagaatcctgttcagttgagagatggagaacatactgtattatgcttcctgatggagaaaatactagtaaatagtacttcgtgcgtgaactgtctgaattaaggtcagcatccttgcaattgtgaaatgttgaagcgatagcaccagaaattggactggaagcaccagttgcaaatgctgcagcaccgtggacagcacccttaaacaagttactcccatttcttatcctactaacaacagacaacgtgagagggggtccagatacaaaaagtgtcttctgactgagactcaaagaaggggttgacttctgggaccaatgagcagtatgattaactgatgaagaatccaccacgtaatcattttctgcaggattgttatcactgtaacggaatcttgttgatccactatatggagatattgaaaacagatgactagttcctcttgaagagctaatcattatccactcactatcatcactaaagctgatgtcttttatgaccgcattggtgatgcctctttgcaatttgtacagatgaacataggttccaatttgacctgcttctgatgtcccatgtggaggaggtataatgcggaaaacattgatgttttgaccatgaacagatgctgtcaccagcaaagttccacttggatcaaagcaaagtgctgaaatgggactagtgtgtgccctgaactgaactatcaataatttagagacaatatctcgcacaatgaccatcccagcatattcactgtcaatgaggtgcccatttattgctccgtttgctttgtaaatagaactcctttgctttaccataccattaccatttggaatgaaatctgcacaatacttggatagcttcttatatccaacatcgccaagtgtcacaatgccggcagccagttgcttgcttgattcttttgcatagtacgccaccacactgccattcgaaccaggaggtggaacaaagggagacggactaagaagctgagggctaacccgtcctgtatctggaactggaaccggaattccagagtatgcaatccatctatggcccagtccaagtgggccataacctgaaatttgtgcgactgtaggactggtgaggacagtgtattctctctccattgtcgcagcatcaaaacaatgtatctgagtagcctgtgaaacagctacaactctcggactgcaccttattgaataaacagctgacctgaacctcaatgtatgcacatattcatgggtcctcaatgaataaaatcgaatgacagtaggaagattttcacttcctgtattgtggaaagcaccattggttccatcaaaaacaggaacattagtgtcatggttgtttccacttccagtgtaatttccttcacaggcaagtgctagcaatggccgtgcatctgcaaatctgtcttgagattttgttgtgaaaattggatcctttagcagctgtatgaaagaaacagcaccatcgtgtctggattccagctgtcgtacatcatcagcattttccacatcccatacttggaagccagatttgtaagctagcaacaagacttgtcgtaccaccccacccccacattcgagtttatcaaacccagcccattgtacctggtcgcggctcccatcctcgtcgtggctggcgatggagttcaccagcgacgccccggcggagcgcagcgtggaggcggccgtggacgcccccgacgacacgatccgtatgtagttggagagcgaccgcgccgagaagaagcccccgccgccgccgccaggcgcctgcgcgccgtcccgcatgaagcccggcgaccagaagaaccacccgtgcacgctacctacgcaccgccccccgcgcctcctcagatgcaaaaccgaacaaagcaagccccaagcctagatcagacgaggaggaggaggaggaagccgaggccgagacggaaccgcccgccaatcagaccgaaccgagccgctccgctctgaaccgatcgctgatgcccccgggctgtttctgtggggactcggggggactctcgcaaagaaacagcccactgaccgtatctcaggtgctcaccatggccgcgcgcggaggggtggggggaaagtcggcacgggcgggcgagaggcctagatcatccggcgcgcgggcgggggagggggaggggagg

SEQ ID NO: 16186 - DNA, 918 bp, Setaria italica
  Peptide Sequence Number=SeqID_82160
ttttttttttttcaaattttctacaatttacgtgctattattggaaatgcaatgaacaatcatgttatgtacacattcttgtaagatagaaaccccaactcacagcaccaaagcttcaatacccatagggccataattcaacctccctttctatcttttctcacggtaaaattttcatgaattcctatgaatagaactatagaagagaggtaaaagaactccggatggagaaatgaaagaattcagctacacacacacaatgaagacttcagcgagtaaagaggctcctccatcacatcgacgactccaccacatggatcatcttgacagagacacaaagagtcaatatcacaagtctgggagttgctcttcatcttcaccatcccctttgctatgtacaaatccgagctgggcctctgacttaaggctcccggtattatttacaagctcggtatgtaatttaacacttggattgttatttacagcagcactactatcatctactacatatttactgaaaccaccatcatcagagcttttgggcccttcagacatgcagtccaaagaactacaactgcttctgcgcgagagtctaccatcttctgaaatcccagacttctgtcgctgaagcagttcatacctgttgttatcaggagtgttcatccttgtctgttgaaacctcgaggtatgaagggagtcaaagactggtacgagattctttgaccttgattctatgttatgggtctggattttttctacttcaacttcccctgaagttatatcaagattgtctgcttctaaagtttcaccctccataacttgaaagtgtatcccagatctagaccagagtgagttgcagactcatgttgtgcaaactccactctggtctagatctgggataacttgaaagtgtatccc

SEQ ID NO: 16187 - DNA, 412 bp, Setaria italica
  Peptide Sequence Number=SeqID_82161
ggccggaatcccacggcgcgcgggccggctcaatctcgcatccgccggtgcgggcagatcacagccccgccgcagcagcagccacccgccggaaccctaaatccgcgccgcccggctgcttgaggtagagcattccccgcgcggaccacggctcccccgcgaatccgagcacggaccgaccgaccggtccccccgaggctcgcggcgagcggtcccgcgaatccgggagccggggattccggggagctcggcgccgatcgcgagcggaggaaatggggaaatttctgcgggggggaggaggagagcgaggccgtgaatgatgaggagattagtcgatttcgctttcttttttttcccacctctccggggtccctgcgaaatccgtgaggcgtggaggatggatgcccggagg

SEQ ID NO: 16188 - DNA, 295 bp, Setaria italica
  Peptide Sequence Number=SeqID_82162
tcgtcttcgtcttccttccttcagatctcgccgccggcggacatgctcccctcctcccgcgccgcccgtggccgcggcctcggcctcggatgcctcctgctcggcctcgccctcactctcgcgtccctgctcgccctcgccgccgcctccgaggccgaccacaagtacaaagctgaagagccagttaagctctgggtgaataaagttggcccttacaacaaccctcaagaaacttacaactattacagccttccattttgtcaactatctgagaaccctatacataaatggggtg

SEQ ID NO: 16189 - DNA, 552 bp, Setaria italica
  Peptide Sequence Number=SeqID_82163
gcactttttaccgacttcattttttgggacagcacacaacagaaatattgtttagcttgtatcagtgtgcactaacttttccagttagttcctaactgtgctctatttgtcagacgaggagctatcatcacaacctttattgtatgttatgctcttacatccttcatctctggatatgttagtggtggcctgtattcaaggaatggtggcaaaaactggattaaagctatgatccttacagcatccctcttccattcctgtgcttctcaattggcttcgcactgaatacaattgctatcttctaccgctcattagcagcaataccattcggcacaatggttgtcatgtttgtactttgggctttcatctccttcccttggtgcttttgggaactgtcgttggtaggaactggagtggtgctcctaacaacccctgccgagtaaagactattccacggcctattcctgagaagaagtggtaccttacaccttctgtcattcttcgtttgtattgggttggtacttgtctttcccttttggttcttagttctta

SEQ ID NO: 16190 - DNA, 525 bp, Setaria italica
  Peptide Sequence Number=SeqID_82164
tttgttttcttttaactttaagtttattttatttgttatttgttgttaactagtccttctatcagcaatgagcagagtaatacttgattctgattaactttgaaccacacaggaggtcgctctccctctgtttactcctttttggcttatctatttcctccatggaactgccctgataaatgtatacctattagttggggaattagtcttgaggactggaaagtacatgtaggttcttttttgtgaggcctcttttggtcagttgtaggagttcattgatgaatattaccgcagtgcagattccagtgggctagatttgcccctcttatgaattgtcacatccagttttcatacccccttgtagtataagcaagctaatatattgaagttacatatattcttaatgggtttgatttgctttgtgttgctgttgcaacttgtatattgaggcagacatcagcagatgtatgtttcagctgcttgggtttacttcctcgctagtttttttttggaagccatatgcca

SEQ ID NO: 16191 - DNA, 1069 bp, Setaria italica
  Peptide Sequence Number=SeqID_82165
ccattgtaccgaatggtatagctgctaatgggaactgtagttggcagaaactggagtggtgctcccaacaacccatgccgtgtgaaaacaattccacgtcctattcctgaaaagaagtggtaccttacaccttctgttatttcattgatgggtgggcttctcccctttggcagcatcttcattgagatgtactttgtgttcacttccttctggaactacaaggtgtactatgtttatggtttcatgctgctggtgtttgtcatcctcataatagtcaccatatgtgtcactattgtgggtacttatttcttgctgaatgccgagaactatcattggcaatggacttcgtttttctctgcagcatcaactgctctgtacgtgtatctatactccatctactactaccatgtgaagacaaagatgtcaggcttcttccagacaagtttctactttggctacacattgatgttctgccttggtctaggcatactttgcggtgctattgggtatgtagggtcaactctctttgtaaggagaatctacagaaatatcaaatgtgattaaattcctgctactcactatcatacgcaagcaaggcctcgaaaatggatcatatgtattgtcagtgcggaagcaaggcctcgaaaatggattaatggtagatcctgaataggtttttgaaactacagaggacatgctccctttgttcactatcatacgcattttttgcttgcctgcttattcctgtggaatcgtcgtcgtaatgtatacctatgtagttgaggattagcctgaagcaccggtttttatccttttctttttctttttttttgttatttttattcggtaggatgtaatcagtgaatcttcatgcggcgcaagcacaattatcgggaattctccatcctatgcatcgtgcatcttcaagtttgaacgagtgaccacgggcagcaacttagattatcaacaaattgcaagtatacatgtataactgtctctgtctggccgcactttggaggggcccgaggcctattacacgtatactcggtttgtagtcgtagttctggac

SEQ ID NO: 16192 - DNA, 2345 bp, Setaria italica
  Peptide Sequence Number=SeqID_82166
tttcctccgtatgaggtacctcgtgctcgttcggcactgagacacacccgcacgctcgcggccgcctccctccgcccagatctcgccgccgacgatgctccgccgcggcgtgctcctcctcgttgccgtcctcctcgccgtcgcgcgcctgccgcacgcgtacgcctccgaggccgaccacaagtacaaagcagaagaacccgttaagctatgggtaaacaaggttggaccatacaataaccctcaggaaacgtacaactattacagcctcccattttgtcaaccatctgaaaaccccacacataaatggggtgggctgggagaggtcctcggtggaaatgagctgattgatagtcagattgatataaagttcttaagaaatgtggacaagggcttcatttgcacaattgaacttgatgctcaaaaggttcagcagtttgctgatgctattgagaactcatattggtttgaattattcatagacgatctgccattgtggggttttgttggggagactgacaagaacagtgagaacaagcattatctttacactcacaagaacatccttgttaaatacaatgagaacaggataattcatgtaaatctcacccaagagtctcctaagcttcttgaagctggtaagaagctggatatgacatattcagtgaagtgggtcgcaacagatgtgtcatttgcacgtcgttttgaagtgtacctggactatcctttctttgaacatcagattcactggttctccatcttcaactcctttatgatggttattttcctgactggtttagtgtcaatgatattgatgcggactttgagaaatgattatgctaaatatgctcgtgaagacgatgacttggaatctcttgagcgagatgttaatgaggaatctggatggaagcttgtccatggagatgtatttcggcctcctcgtggcctgatgtttctttctgcacttgttggtattggcactcagctggcagctcttatcctacttgtgattgtgttggccatcgttggcatgttatacgttggacgaggagctatcatcacaaccttcattgtatgttatgctcttacatccttcatctctggatatgttagtggtggcctttactcaaggaatggtggcaaaaactggattaaagctatggtccttacagcatccctctttccgttcctgtgcttctcaattggcttcgcactgaatacaattgctatcttctaccgctcattagcagcaataccattcggcacaatggttgtcatgtttgtactttgggctttcatctcctttcccttggtgcttttgggaactgtcgttggtaggaactggagtggtgctcctaacaacccatgccgtgtgaagactattccacgtcctattcctgagaagaagtggtaccttacaccttctgtcatctcgttgatgggtggactgcttccctttggcagcatcttcattgagatgtactttgtcttcacgtcattctggaactacaaggtgtattatgtctatggtttcatgttgctggtcttcgtcatccttctaatagtcaccatctgtgtcactattgtgggtacttatttcttgctgaatgccgagaactatcattggcaatggacatcattcttctctgcagcatcaactgctctgtacgtgtatctatactccatatactattatcatgtgaagacaaagatgtcaggcttcttccagacaagcttttactttggttacaccctgatgttctgtcttggattggggatactttgtggtgctgttggctatctgggctctactctatttgtgaggagaatctacagaaatatcaaatgcgactaaatttctgctcattgctgatagaggctgttcacaatcatatcttgttgcagtctggtgcagagtaatacttgattctgattaacttttgaaaccacacaggaggtcgctctccctctgtttactccttttttggcttatctatttcctccatggaactgccctgataaatgtatacctattagttggggaattagtcttgaggactggaaagtacatgtaggttctttttttgtgaggcctcttttggtcagttgtaggagttcattgatgaatattaccgcagtgcagattccagtgggctagatttgcccctcttatgaattgtcacatccagttttcatacccccttgtagtataagcaagctaatatattgaagttacatatattcttaatgggtttgatttgctttgtgttgctgttgcaacttgtatattctttacccttaggtagacttttagggaaactagtacgttaggtaaggaaactaga

SEQ ID NO: 16193 - DNA, 276 bp, Setaria italica
  Peptide Sequence Number=SeqID_82167
ttaattgtacgtattcctattgttatttttacttcttttttttaaaaccttctttccacttgggaaaaggcccagctctacaagactagaagagctagcaaatggagcaaccacttcctcctccaccagagacagcctccccgatcggaaacggcccggcagcggattggtgcggcagtcagctcgtctcgtcacacggcgcggcgctttgacaagcgcctccgtggcgacaggatgacagtagtagttctcctctagaaaagcagccgggagaga

SEQ ID NO: 16194 - DNA, 262 bp, Setaria italica
  Peptide Sequence Number=SeqID_82168
cacgaacacgagtccttgagaggaaagaaagagaaacgcggcgagtcgacagcggcggccgccatggaggacagagcgccgcttctgctgccgcagtacacgttgcgggaggagaagtgcggcggcgccggcaccggcgacgagaggtggcggagggacctggcgcgggaggccggcaaggtcgggtacgtggcgctgccgatggcggccgtgagcgtgtcgcagtacgcggtgcaggtggcgtccaacatgatggtcggcc

SEQ ID NO: 16195 - DNA, 697 bp, Setaria italica
  Peptide Sequence Number=SeqID_82169
tttattttggtttctttaatttgttactatttgtaagtaggatggtgatgatgatgaggttgatggaggcgatgaagctgaagcagatggagatgatgaagatggtgaggaagagcaagaaggaaggaggagatatgatttaagggatcgttcagaggttcgtagaccatcccctcgtaaggaagggaagcacagaccacaatctcctcgaagagtactagtccatggaattggtccaaagaacaacaagtatttaaaaaaaggtgggtcgcgcatgcataagcgccctcgtttctctttgccagatgattcagatgattcccttcttgtggatgagccggatgaaggtccatccatgccatggatgcgtagtgggaggggaggtatgccgtggttgatgggtggattggacatgcacagtccagcagcatggggtctgaatgttggagcgtctggatggggtcaccagggtgacagttctacttcactcatgcccggggtccaaactgccggacctagttccaagggaggagctgatattcagcctctgcaggttgatgagagtgtgagttttaaagatattggtggactatcagagtacattgatgctttaaaggaaatggttttctttcctttgctgtatccagatttttctgagacacgcaaaaggggataggcaaggcacacaggggatagg

SEQ ID NO: 16196 - DNA, 1162 bp, Setaria italica
  Peptide Sequence Number=SeqID_82170
ttcccctctatctcgctcttgctctatccattcgccgggcagcagagatctccacccttattacacactactgagctcatccatctatcagcttgcttggcatatacctctttctctttctcccttgttgccggcgattacgatcaaaattaaactagacacatacagctgattgcatctgtaccaagagcgagcgacctggctagcaatttagtagagcaggccaggtactgattgttgcttgccactactgctagatcgaagcagctagcctgtgcagcagcagcaggttgatcgtcgtcgatgcttgaggtgtcgagccttcggagccctagcaaggcggcggatcagcgcgggttcgtcggcgaccatgtcgggttcccgacgtccgccggcaccgacgacttcatggtggacgacaacctgctggactacatcgacttcagcagctgctgcgacatgcccttcttcgacgccgacggggacatcctccccgacctggaggtcgaccccaccgagtcgcttctcgccgagttctcctcgccggagacgagcccggcggcggcagacggcggcggcggcgctgaggccaagccgccggacgagaagcaagaacaagtagcggcgaagacagcagcagcagaagagacgaaggcagacgatgacgaaaaagcagcagcaggaggtgtagtagtgacgaggaagaggaacggggatgaggtgacgacgacggaggaggattctgccggcgccggggccgggtccggacaccaagtcgtcggcggcggcgggtggccacagcaagaagaaggcgtcggcgggcaaggactccaacggcaagcggaaggtgaaggtggactggacgccggagttgcaccggcggttcgtgcaggcggtggagcagctgggcatcgacaaggccgtgccgtcacggatcctcgagatcatggggatagagggcctcacacgacacaacattgcaagccacctccagaagtaccggtcgcacagaaagcacctgatggctcgggaggcggaggccgccacctgggcgcagaagcggcagctgtacgcggcggcgccggtggcgaggaaggtggaggcggcagctgctgcagggccgccgtgggtggtgccgaccatcgggttcccgccgccgccg

SEQ ID NO: 16197 - DNA, 260 bp, Setaria italica
  Peptide Sequence Number=SeqID_82171
gtcgatcgctgcagtacaattctccatcacctggctacgccgagaccatttctcattctcacgctgtgtgacttggcctcgtgcgaaagctagctgttacacactaaacacaacgtgaagcaagctagctatagtctagagaccaattcaatcatcgcttgtattttatttactagtcaccagcatatattttcttccctacttttttctccagacattccaaacccccaataatatttggcttggtcacacacacacac

SEQ ID NO: 16198 - DNA, 430 bp, Setaria italica
  Peptide Sequence Number=SeqID_82172
ttgtggtgttgctgattgtcaggtctccaccaaacattcctgaggtgaaaatctcagaggatgtggccgttaacgttgcactctcactgagatatgagatcaacaggggcttcgctaccttgagggaaattggacatggccgtgatctaaagaagttcctaatcgtatgtttgttgtttctttggaatttatgtgcccagtgtcatgaaattcttggtattgtgctgatacacagtgcttgttcttctgtttattgcaggttattgcaggtttctggcttctttcagtccttggtagctgctgcaatttcctgacattgttttacattggtaatgactgtgtgccctatgctcctcaaatatttcttaatagctttgatgcaaattatgaatagaaaattgttctgttcccattgcagttctttgtggtg

SEQ ID NO: 16199 - DNA, 332 bp, Setaria italica
  Peptide Sequence Number=SeqID_82173
cttggactgatgcgatatttgttaaaaatgcgattgcagctgctgatcttgtcctatggaggaacaagaagatatccggcggtgtccttgccagtgcgacagccatctggctcctgttcgaggtcatggagtaccatctcctcactttggtgtgccactgcctcatcctctcactggccatcctcttccttgttgtccaatgcctccactttcatcaacaagtgagcttctgtgattcttaatgttcaaatgaaagctgaaacacatcgaattcattctggacctggagctgctgattgtcatgccaggagctaatttcatgcgtattttaa

SEQ ID NO: 16200 - DNA, 951 bp, Setaria italica
  Peptide Sequence Number=SeqID_82174
cgcagatgcacctatcgtccggagtgatctctcctgaaatggtagacccaaggatcaagtccggtgttgacatggatcagctgcatctagtgattggcattgtccagtggtgcacccagagggaagggcggcagaggccatccatcaggcaggtgctgaggatgctatccgagaggctggatcccgggaatggcagctttggtgagggaatggaagacgcagaggggggcttttatcctcggagcagcaaaagtggcgctcagcacaggaacgagctgatcccccacagcggtgacatgaggtccctgcattcgtcatcgagcacaacgagatcctactgcagccgtagcatgctacttgaaagtgggcagactcagtcgcccccagaaactctgtaacgtagtctgctttctgtttcgacacagcttgaggcagtttgagtacgtttggaagcaactcgcggtgtagtgcaagttatatgccaaggtagaggcgcctgttgatgggaatttcagttttgtgaggcagctatatttgtcacaagaactaactggtgtaatatagaacctgttgtgcgtagcagaaaaagaaaaggatacctgtaatctgtgtggcagttgaagcgaagccggaaggcgggagcaagaggtattgtttgatcctgctggaagcagaagaatgcaggtctggttttgcagagactgtttgtgtttgagaaggaaggaaggcagcagggttttgcattgtttatcgaacctaccaagtgttgctggtattagcatgtcggtgtggtatttttttcctgtccctaatttgcatttggatctcgcctgtgttgcattgcatggtgtgtgtcggtgaatgggtttggccacgtggggacagtgctgagattccatgcatcaagtagtagctgattggtgttttatattatttattttattctttttt

SEQ ID NO: 16201 - DNA, 397 bp, Setaria italica
  Peptide Sequence Number=SeqID_82175
ccgccgccgtctcctcccgcgttctcgcttctccagccaccaccgctagcaagggccccttctcatggcggtggcggcggcgtcgacaggcggggaggggggagcagtagaaggcagcggcacgggcgctctgctgcgtatcttcgtgggcgggctggcggagagcgtgggcgcggccgacctggaggccgtgttcgcctcggccgggcgcgtcgccggcgtcgagttcgtgcgcaccaacggccgcagcttcgcctacgtcgacttccactgcccctccgacaaggccctcgccaagctcttctccacttacaatgggtgtaaatggaaaggagggaagcttaggctggagaaggccaaagagcactaccttactcgcctgaagcgagaatgggag

SEQ ID NO: 16202 - DNA, 335 bp, Setaria italica
  Peptide Sequence Number=SeqID_82176
aagaagaggagcttatgtcgaaccttcattttgcctattgttttcttgggttttgatgcagctccttcactaactagctctgatgcgcgcttcgacataagctcctcttctgattgtaacaagacattttgcaagctgaatgtatttctcaagagtgtgcattcattttccagaaaaactggagcttccatacagcctctagcccatgcatgaaggcacaggcggacacaggcatcataagcaagtacagaataccagggcccttgcagactggcatgaaaggttgggactcgaagaggaatcgaagaggatggcttgcttgtgtgtcctgcatt

SEQ ID NO: 16203 - DNA, 944 bp, Setaria italica
  Peptide Sequence Number=SeqID_82177
ggaaatcaacagcaggatcactcaaaaattgggctggaattcaaaggttagcttatggccgccatgttgttttctttacagacatgatgccctccttgtcctttcggaatgtcatgacaatttcccagtgtagcgacttcaaaatggtctccaatgggtcaaggatctcaagtttatctcggatgatggcccaagctccaggcctcaaaattcgatccatctcaacaacaatcgccacaggttgcctacatctgatcttcaagcgtgagaataaatggtcagcatgtaaaagatcataggaccttggatacgtgctaaatggctcacaccaatcgtgatatacaccaatcaggccacgctcatagattatgggtagggtgtctgaagcatgcacaggaacgacattcatgacccaaacctttttagatgccaatgcagctgcaaatcctccatatacagccctcatatccatcacatttctgatatttgaccagtcaatgcccaatccatccagatatgatttctcaacaacagccttccagtggttatgatcagcagccacccttgtttgcaagtccccaagccactcagggtaactgtcaagcctcttgggccactcctgcggccagtcactacctctttcttcaataccaacaggtgctttgtgcaggcaatgtttgatgtgagtataccatgcattagctttgttctgctcttccttgcaaaaatggagggtccttttttgctctcagatcatattcctcatttgtggctggtcgctgaaatatctttactccaacctcactgacatcatcaactattgtaagctattgcattccaacaaagtgcagtcatagaagctgatattcttcttcgctctccaggtcagcacttttgcttgatataatgaagtatcctcctggcgaagaattctatttatcttc

SEQ ID NO: 16204 - DNA, 2515 bp, Setaria italica
  Peptide Sequence Number=SeqID_82178
ttttgaagaccagaacagctcaaaatgagagcaaaatacacattgcaaaactttgctgtttacctgcattttacacagcaaatgttcaggtgtttgaatctttacaaattgttgcaacttacaacaacaccaagcagttgattcagtgttacaatctttacatattgttacattttgaaacaacaagaagcttgtatcttgtacaacactgtctacagaataagaatcctttctccgaacctgacgttgcttcagaggaactgatcaatgtaacgccaaccacatccaaccatcagtttgggctaaaacttgccaactgattagttgtagatggttagcatattgtggcatgcaacgaatgaacaaatttttgtacatatatccctgattcacaactgattatatcacacacccaggggaaatcaacagcaggatcactcaaaaattgggctggaattcaaaggttagcttatggccgccatgttgttttctttacagacatgatgccctccttgtcctttcggaatgtcatgacaatttcccagtgtagcgacttcaaaatggtctccaatgggtcaaggatctcaagtttatctcggatgatggcccaagctccaggcctcaaaattcgatccatctcaacaacaatcgccacaggttgcctacatctgatcttcaagcgtgagaataaatggtcagcatgtaaaagatcataggaccttggatacgtgctaaatggctcacacctatcgtagatatagagttaggaccttaagaattcattgcaaagtacatgtgttccaagaactggatgagatccagaacaaataagaaaaatgccacaagaagacaatgaattcctgattttgggtgcgaaaaccatgtcaaattgtatgaaatcaaagcaaggctacttttcaatggcatacctgatcttcaagcgtgagaataaatggtcagcatgtaaaagatcataggaccttggatacgtgctaaatggctcacaccaatcgtgatatacaccaatcaggccacgctcatagattatgggtagggtgtctgaagcatgcacaggaacgacattcatgacccaaacctttttagatgccaatgcagctgcaaatcctccatatacagccctcatatccatcacatttctgatatttgaccagtcaatgcccaatccatccagatatgatttctcaacaacagccttccagtggttatgatcagcagccacccttgtttgcaagtccccaagccactcagggtaactgtcaagcctcttgggccactcctgcggccagtcactacctctttcttcaataccaacaggtgctttgtgcaggcaatgtttgatgtgagtataccatgcattagctttgttctgctcttccttgcaaaatggagggtccttttttgctctcagatcatattcctcatttgtggctggtcgctgaaatatctttactccaacctcactgacatcatcactattgtaagctattgcattccaacaaagtgcagtcatagaagctgatattccttcttcgctctccaggtcagcacttttgcttgatataatgaagtatcctcctgggcgaagaattctatttatctctaggaggagtttcccaccattagaatgccatggtatgttgcattcaccacagtgtatagcatcaaatgcaccactagggaatggtaatctttgtgatcccagactgccaactgttgcagggattccacgttcaagggcaacttgcgcaaggtctgtttgatcatttgtaaggcctaaagatagtgttatcacatctttctcaagtagagcaataccaaagccagcacttttgcatttgatgtccaatactatccgaatatttttaccccagtcaatgtcaggagccatctcatcaattgattccacataatgccttgctccacctttgaattcccattcatctagtgggaacatcaagtactcaccactgtggttcagccagttgtggcccttaacataatttgacagtctaggatgtgcaacattcgcataccaaaccttgtccttcctctccggccatggtgcgggctgtttataatccttgggcagtgacaccaggcacgtcacaggcgaccttgggcagctgcgttcatggtgcctctggctcccatccccatcgaaatccacacaaggaatatagtggtagccgctcttggcaccacaatgcttccagtggtaatgcgcactggagctgaacaaaggcgggagcctttctcttcttacttggagccgccttcttcgccacctcaaaatcctcgtcgccatcaccctcaccgggctcctcttccaattccagctgcggcggcttctcctccccccctctgcaggcgccttccccgagttgtctccgctttcctcgggcataggcagctcggcctccttctccggctccatctccatgtctggctcctgctcctgctcctgctccggttccttctccttaggctctgggtc

SEQ ID NO: 16205 - DNA, 351 bp, Setaria italica
  Peptide Sequence Number=SeqID_82179
gcggcggcgaaatcggagagaaggctgagatggtgaagcggcggattggacgagctgcttgccccggatcagcttctggcgtcagggattggtgatttggctgtgaaagaggatgtctcagagggagcggttgctatggatatggctgccgcccctgctgatgttgagatgaataccgcggtgtcaggcggcaaggtggagcaggaaagcagcgaggaagagtcggagagtagtgaagaggaggagtcgagtgaggcttcctcgagcagtgaggatgaagaacaggtggacaagaaggatgaggagtcgagtgaagcctcatcaagcagcgacgagttagagctaggagcc

SEQ ID NO: 16206 - DNA, 578 bp, Setaria italica
  Peptide Sequence Number=SeqID_82180
tttagaaacaatagaaagggacaatactatctcacaggtatattcaccgcagatgagtttggaacaattacacgtattaccacgataaaaagtgaaaacaaaattaatcgctcccgtcagcagcgagggacgagtaggacgacatggccacaatcgaacgtccctactcggcgacttcgcctccggggagctccaggagcaatcaggatgacggcgaggaatcggatgaggaaatggtggaggaaccggcggtcatgggggtcatgtccatggggtagctcccgagcacccggaggaaggaggtgtactcctgcacctcggccagcgcgttctgcgcgcggggctcggcgagggacgcctggaagtcgacgtagaacatgtactcgaagtgcttggcggtgccgacgttggcgtcgtcgacgaggcggatgggccggtgccggtgcggccggctctcgatcttggtgagggagatgtcgcggaaggcgaaggccgagagcaccttgaagaggacggaggtcccttccttgtcgtgcgcgaagacgatgctggtcttgaaggggcggtcggtgcgcggc

SEQ ID NO: 16207 - DNA, 2309 bp, Setaria italica
  Peptide Sequence Number=SeqID_82181
ttttttttttttgtatttcttcaaaggtttaaacaagtataagaatatactgtacttacatacaccagcagcgtacaacaagagcccctctaccgcctctctggatttgatgaacacaaatcgaaaagggagctaggagcatcgaggagaaagcatcgaccaaacgcgatgcagtttgatctcctccaaaacaaaagcgaatgaaagaaccaagaaacgtttcgtgcgtccttccttcctaattgaaagaagtggcaattcaccattgattgattgatcgatcgatccgtggctaccttggctgattgattgatcagcattcagcaatctctacaagtgctggctgctgctattgtcgacgcgcgaggaccacgaggacggcgcggcgtcccacggcgtcatgtccatggggtagctgccgagcaccctgaggaaggatgtgaactcctggatctcggcgagcgcgttctgcgcgcggacgtcggccatggacgcctggaagtcgatgtagaacatgtactcgaagtgcttggcggtgccgacgttggcgtcgtcgacgaggcggatgggccggtgccggtgcggccggctctcgatcttggtgagggagatgtcgcggaaggcgaaggccgagagcaccttgaagaggacggaggtcccttccttgtcgtgcgcgaagacgatgctggtcttgaaggggcggtcggtgcgcggcacgatgggctccctggccagcatcacgaagcgggtgacgttgccggagtcgtcctggatgccgtcggccagcacctccatcccgtacagctcggcggcgcgggaggacgcgatggcggcggtgtcgcggaggccgttggcggcgacgtactcggcggcgccggccgtgtcgtcgaaggcctcgcggacgacgttgaggcccatggcggtgagcgtgtgctcgcactgcgccagcgcctgcgggtggctgatgacgcgggtgaggcgttccttgcgcacccccgggagcgccagcaggcagtggtgcacggggagctggacctcgccgacgatgtggaggcggtggcggaggaggaggtcgtagttgcggtggatgctgccgccgagggagttctcgacggggagcacggcgcggtcggcgatccagagctcgacggcctggaaggcgacctcgaactggtcgcaggggatggcgtcgcagcccgggtaggccttggcggccgccgcctcgctgtaggcgcccgggacgccctggtacgccacgcggagctgggacccgtgcatcggcgccggggacaggtcgctgatgctgaggggccggggcaggttggagaccggcaccagatccagctccgcgggcaccggcgccggcgtcgcctccagcgcgggcggccgcggcggctcctgcccgttgacccgcggcgccggctgcttgctgctgctattgctgttgctggcgtcggcgctgctggtgctgccgccgttagtgcctccgctggagcggttattattggtcttgctcgcccccctgctgatgttgagatgaataccgcggtgtcaggcggcaaggtggagcaggaaagcagcgaggaagagtcggagagtagtgaagaggaggagtcgagtgaggcttcctcgagcagtgaggatgaagaacaggtggacaagaaggatgaggagtcgagtgaagcctcatcaagcagcgacgagttagagctaggagccatgaagcctggtggtgctggtgagggcaatagcttggaggccctccttgaggagggtgaattgatggttgggagcgatgaagaggatgaggaaccaaagggccgcagcaagtcaaaacatgaagtagaggtccttcctccagtcccaaagattgaaataaagttggagccacatcatcagactcttccagtagggactatctcagctattatgggtgagagagtgattgttgaaggatcagtccaacacaatcccctgaatgagggctccattctttggataacggaaagcaggatgccccttggtattgttgatgagctgtttggacctgtaaaaaatccgtactatctggtgcggtacaactctgaggaagaaattcctgcggggatcagtgcaggaaccagtgtctcttttgtagcggagtttgctgatcacattctgaatatgaaggaactctatgcaaaaggttatgatgcatctgcagacaatgatgaacaagaagatgaacctgaattctctgatgatgagaaggaggttgagtacaaaaggtcattacgccaagcgagaaggcagactgatagacagcatga

SEQ ID NO: 16208 - DNA, 951 bp, Setaria italica
  Peptide Sequence Number=SeqID_82182
gagtgagtaagggtaggcactcttcgtgtacgtggggaaggtgatgcaggaccaaaaaggtaggggcctccaggagatctttatgtttgcctcgatatagaggagccatcagatatcaaaagggatggtataaacttgtattcaactgtctcagtaagctacattgaagctattttgggcaccactaagaaggtcagaactgttgatggaaccagtgaacttcgaatacctccaggtacccaacctggtgatgtaattgtcttagcaaagcaaggcgttccatcattgaataagccatctatacgtggtgatcatctattcactgttactgtcacaatacccaaacgtataagtgggcgggaaaaggaattacttgaggaacttgcatctttgagtggtggtggttttgctcgaacagccgccaagccgaagccggccaagccaaaacccgttcatgaagagaaagaagttggcacaagtcaagaagatgcaggtaaatccaatgaaggagagggtgggtggttgaagaaacttacagatttcgcagggtccattgccaatggcgctgcgaagtggctgaatgacaacctgtaggctgtaaatatttactatagtccaatctgcaatttttcgattcattccgatccctacatccattttgttggagagcgtagagattctcaggctggaactgagggcatgagacgtgtcaactaatatagtcggcgcaataatatgtttctcccttgtaaaggaatgatttttatgtagttgcagttattccaattctccaagtgcatgtagcagcctgaagttgcgtgatgctgatctgaaacccagagattcgcaatgttgtaaatatatgtttaattcctgaagtagggtttcatgaaaccttgggttctgtacgtgaggtttttggttaactaaattcaggaccaacggatactc

SEQ ID NO: 16209 - DNA, 688 bp, Setaria italica
  Peptide Sequence Number=SeqID_82183
ggatggacattcccacggcttgacgaaagatttagtatacaaatacatttcatcttacagattgtgttcagttcaagcaacaaagtctggcatccatcacctagacatgccaagggatcttgggatggacagggaccggacctccggcgccgagctcgggaacatgacattgagcctgtgcatgaggacgtcggccttggagggtatctcgttgagcaggaactgctggacgatcggcttcttgaaccactccagcaccgagtcgccaggagcacgcaggacgaccttgctcacctcgaacggggactccagcgacgccagcacctgcgccaccaccatcttcagcgttggccccgtcaccagcttgatgcgccgcggcacgaccccgtagtagagcatccgcttcctgaacctgtgcagtgtgtgcaccgtcgccacgagcgccgcgcccacggacaggctccggacatcccagggaccaggcgatgtgctggtcgaagacgattgccttggcgaacaacttgttctcataggagaccttccacacacagcgggcacggttcatttggcccatgagcactaggtagttgaggaggacgttcacgaagtacctggccgcgctctcctcgttgtcgtagtcgatgccctggaagaactcgcgcacaaacgagagcactggctgcttacg

SEQ ID NO: 16210 - DNA, 302 bp, Setaria italica
  misc_feature (284)..(284): n is a, c, g, or t
  misc_feature (296)..(296): n is a, c, g, or t
  Peptide Sequence Number=SeqID_82184
aagcttttgagtgtcaaagagcaagatggcgggattggagtgaggtcatatctgaaatcagcattcaccaagttaatgatagcaagtgaagaagcagtttctgaagcgattgcgaaacttaagagtcgcttgaatgttgagagtaaggttagaacattaacaaagaaggagaaattggttttatcattggagaagcagtacccaggagatgttggcgttctggcagcaatttttcttgaactatgttaaactcagtcctggtgaagctacttttatggtgggtnccaatgaacctnatgcat

SEQ ID NO: 16211 - DNA, 513 bp, Setaria italica
  Peptide Sequence Number=SeqID_82185
ggcaatgcatcatcaaagctcaagaagcagtcctattcaacagaggtgatagcatcttcccctagtatggagatagaacatacagtacaagcacctatcgtaacacaattgaaatgctctccaagacctttgcctgtcagagttgctgcaatgtctcaaatactggttccaaagctgcttgataacaaggagggcagctacttgctgtggcagtactagtattttcccgtacatggatctctgatcgtattgcttcattgaatgggacaactgtgaagttcgtcttggagcaggataaagttgcctttattcgcttgattggtgtcagtattctacaaagtgctgcaaattcttttgtggcaccatctcttaggacccttaccgctaaacttgcccttggatggcggattcgcatgaccaatcatttgcttcgaataattaatttagaaaaagaaaatagacaattactaacaaaggtaattacaaacaatagtacaaggtaaaaagtaatta

SEQ ID NO: 16212 - DNA, 732 bp, Setaria italica
  misc_feature (697)..(697): n is a, c, g, or t
  misc_feature (714)..(714): n is a, c, g, or t
  Peptide Sequence Number=SeqID_82186
ttctttattttcttttgttttactttaggtttctttgttcttaacttaactatgggcataactgtgatcacttcctcacaaaggccagctctgatacccttccatgccttggagctgaagctcattgatggcgaagggaactgggagctatgttcaatccgccagtgagtgatgccacacctgagctgatgctatcatatgcgccgtcagctgcatgtacaaaagcaagcagctatcgcattgccattgtgtatgataatagacagtggcagtgttggtgtcctgaaagacagctatattcttgtcagaatctgcttggcgtagaacaacaaatcactcgtagtttagcttacatcaaggagaagggtggtgcgtgattgtgatccatgaatgatgtgtggcgaggtttcacttgtagaggtgtttcagagttgcagtagttggacagctgcagagcagaagagaacatgtaaattagcagatacctactgattcattgtattagattatgtgtagtgtagtagatatatatatgctatcgcaggcaaagcaataaataatgtggacgctgcaagggctagcggcattttagagcagaggctgtactgtaaatgacaataatttgtaaaagtgtcgttcctttttgtccatcttttttaagaaaggaatttgcaatccatgaaatcctaaaaaaaanaaaaaaactaaaaaagngaactagaccaaaggaca

SEQ ID NO: 16213 - DNA, 2898 bp, Setaria italica
  Peptide Sequence Number=SeqID_82187
ttctttatttatttgttcttttacttatttgttttactttgggtttttgggtctttccttgtagtagcagtatcccctgactttggtcgtctctcaggccaagaacaagaacttgaaggaacattcaggttcatgcactcaagactgcggacacatgctgaatcaattgctttttttggtggtggttcaagagaaaaagctatggttgatgctcaactatagtggcatggtggacttcgaatgttgatctagaatacctagaacgctatcctcttgataaggaagttaactggggtgatgaattgtctcttggcgagcagcaaagattaggaatggctagactgttctatcataaacccaagtttgctatcctggatgaatgcactagtgctgtgacaattgatatggaagaacgtttctgcaaagggttcgagcaatgggcacatcatgcataacaatatctcaccgtccagcattagttgcatttcatgaaattgttttatccttggatggtgaaggagggtggaatgtgcaggacaacagaaatggttcatccttctcccctgaagtagaggttgatgtgttgaagtcatcagaaactgatcgcaaatctgatgcacttactgttcaaagggcttttgtcaccagcacaaagggcaatgcatcatcaaagctcaagaaccattcgtactctacagaggtcatagcaacatcccctaaggtggaaatagaacatgcagtacggacatctcgggttccacatttgcgatgccacccaagacctttgcctctcagagtagctgcaatgctcaaaatactagttcctaaactacttgataaacaaggcgggcagttgcttgctgttgctgtacttgttttctctcgtacatggatctctgatcgtattgcttcattgaatgggacaactgtgaagttcgtcttggagcaggataaagttgcctttattcgcttgattggtgtcagtattctacaaagtgctgcaaattcttttgtggcaccatctcttaggacccttaccgctaaacttgcccttggatggcggattcgcatgaccaatcatttgcttcgatattatttgaaaagaaatgcattctacaaggtattcaacatgtcaggtaaaagtattgatgcggaccaaagattaacacttgatgtagacaagttgaccactgatcttgctggcctagttactggaatggtaaaaccagtagttgacattctttggtttacatggagaatgaagctcttgtctggacgaagaggagttgctatactatatgcttacatgttactgggtttgggcttcctgagagcagtatcccctgactttggtcgtctctcaggccaagaacaagaacttgaaggaacattcaggttcatgcactcaagactgcggacacatgctgaatcaattgctttttttggtggtggttcaagagaaaaagctatggttgatgctaaatttgtaaagttacttaaccactcaaagattctcttgaggaaacagtggctttacggtattgttgatgattttgttacaaagcaacttcctcacaatgtgacatggggtcttagtctattatatgctttggagcacaagggagacagagctttgacctcaactcaaggagagctggcacatgctctacgattcttggcttcagtggtgtcacagagcttcatagcctttggcgacattcttgagttacataagaagttccttgaactctctggtgggattaaccggatctttgagcttgaggagattatatgtgccgctcaaaggaataccgtggtgtcttccaatgccatcagtgcatcctcagaagatattatttcatttcatgaagtggacattgtaacaccatcacagaagctattggctagcaaactgtcatgcaatgtggtacaagggaaaagccttcttctgactggtcccaatggtagtggaaagagttctatatttagagtgctcagagatttgtggcccaccttctctgggagagttatcaagccctctgaagggatgtttcatgtccctcagcgtccatataccagcctaggtactctgcgggatcagatcatataccctctctcaagggaggaagcagagatgaaagttctctcgttacatcaagctggaaacagatctagtgcttccatcctgcttgatgatcacctgaagacaattctagagaatgtgcggctggtgtatcttctagaaagagaagggtgggattctacaccaaactgggaagatgttctgtcactaggagaacaacagaggcttgggatggcccgtttgtttttccatcatcctaagtatggcatcctcgacgagtgcaccaatgctactagtgttgatgttgaagaacatctgtacaggcttgcaactaacatgggcataactgtgatcacttcctcacaaaggccagctctgatacccttccatgccttggagctgaagctcattgatggcgaagggaactgggagctatgttcaatccgccagtgagtgatgccacacctgagctgatgctatcatatgcgccgtcagctgcatgtacaaaagcaagcagctatcgcattgccattgtgtatgataatagacagtggcagtgttggtgtcctgaaagacagctatattcttgtcagaatctgcttggcgtagaacaacaaatcactcgtagtttagcttacatcaaggagaagggtggtgcgtgattgtgatccatgaatgatgtgtggcgaggtttcacttgtagaggtgtttcagagttgcagtaggtatctgctaatttacatgttctcttctggtaaattagcagatacctactgattcattgtattagattatgtgtagtgtagtagatatat

SEQ ID NO: 16214 - DNA, 2016 bp, Setaria italica
  Peptide Sequence Number=SeqID_82188
tgatcatagaaaaccttatactatgtttcctccaatccacattatatcagacatcaaaatacttgacagggtctttaagtttgcgtttcaagaaaattttaaccgatatcgctcatgctgattactttgagaatatggtttactacaaaatgtcacatgtggatcatcgagtatcaaatccggagcaaaggattgctagtgatatcccaaagttctcttctgaactaagtgagcttgtacaggatgatctggctgcggttgcagaagggctaatatacacctggcgtctctgttcgtatgctagtccaaaatacgtgttctggattatggcatatgtactagttgctggtggggcaataaggaaattttctcctgcttttggaaaactgaaatccacggaacaacaactagaaggagactatcgtcaactgcattcacgattaagaacacatgctgagagtgtggcattttatggtggtgagaacagagaagcatctcatattatgcagaggtttgatgctcttgttgggcatctgaatcttgtgcgtcatgaaaactggtggttcggcatgattcaagatttctttctgaagtattttggtgccactgtggcagttgtccttatcattgaaccattcttctctggcaaccttagacctgattcatcaacccttggaagggctgaaatgttgagcaatcttcgatatcacacaagtgtgatcatatcattgtttcagtcccttgggattctttctatcagttcaagacgtttaaatatccttagtggctatgcagaccggattcgtgagttattggatgtttcacgtgagttgtctggtattcgtgataaatcattgaatcacaattcttcttctggaaattatatcagtgaagcaaaccatatagaattttctgatgttaaggtagtcacgcctgcaggtaatatcttggttaacgatttgactctccgggtagaaactggttcgaatcttttgatcactggtcccaatggtagcggaaaaagctcccttttccgggtccttgggggtctatggccactggtatctggccacattgttaaacctggtgttggttcagatctgaataaggagatcttttatgtcccgcaaagaccttacacggctgttggaacactacgtgaacaactaatctatcctcttacagaagatcaggagattgaacgtcttacctatgatggcatggtggaccttctaaagaatgttgacctggaatacttgctagaacgctaccctcttgataaggaaattaactggggtgatgagctgtcccttggtgagcaacaaagattgggaatggccaggttattctaccataagccaaagtttgccatccttgatgagtgcactagtgccgtaacgactgatatggaagaacgtttttgcaagaaggttcgagctatgggtacatcctgcataacaatatctcatcgcccagctttagttgcatttcatgatattgttttgtccttggacggtgaaggcggctggaatgttcagcatagaagggaggactcttccttttccactgaagagtctgatttttcttcattagaaactgatcgtaaatctgatgcactgactgttcaaagggcttttatgagcagggcaaagagcaatgcttcgttggggtccaaggaccattcgtactctacagaggtcatagcaacatcccctaaggtggaaatagaacatgcagtacggacatctcgggttccacatttgcgatgccacccaagacctttgcctctcagagtagctgcaatgctcaaaatactagttcctaaactacttgataaacaaggcgggcagttgcttgctgttgctgtacttgttttctctcgtacatggatctctgatcgtattgcttcattgaatgggacaactgtgaagttcgtcttggagcaggataaagttgcctttattcgcttgattggtgtcagtattctattaatttacttaacttaaaaagtttaag

SEQ ID NO: 16215 - DNA, 394 bp, Setaria italica
  Peptide Sequence Number=SeqID_82189
tatttttgtttataaaggtaaaattaaggatgtaaagtgaagatttcgaacttgggtacaacagtcggcacaaacatactcacatgctattataacttcagctgtatacttcttatcccatatcttgcattctaaactctaatgcttattttagcaacaaaaaatgctaatatgttatgagtggttaatatactaaaaacttgactggccggggaaacaccgcccccgctgcatacaactgagaagaaacctcaccaagctggccgagaaaacccgagtccccggtttcacccgatagggctgcaccgtaacctgggccaaccatgacccattgggttggtgatcactgcaactacccctggtaggagggcctaaaccaaccacaggtgccacg

SEQ ID NO: 16216 - DNA, 1141 bp, Setaria italica
  Peptide Sequence Number=SeqID_82190
tggtaagagagaaagcgagcctgcctctgcctgcctgccttctcgaaccaggcggccgccccaacggccggctcgcgagaatccgagccattttgtgcacgcgcttccaggttttagctgcggcggcaccagggcagggggagagagagagttcgtgctattggaagaggaggaggcggcgagatggggtctggatctttcctcaaggtgctggccaagaatttcgacgtgctcgccggaccaataatatcacttgcttatcctctatatgcttctgttagagcaatagagacgaaaaatcctatagatgatcagcaatggctcacttactgggtgctgtactcatttatcactttgtttgagctaacctttgcaccaattattgagtggcttcccttttggtcatatgcaaagctgttcttcaactgctggttggtcttaccttggttcagcggtgctgcttatgtttacgaccattttgttcggccaatgtttgtgaaccgccaaatagtaaacatatggtatgtcccaagaaatgataagccaagtaaacctgatgatgtactgtcagctgcagagagatatattgaacaaaatggaccagaagcatttgagaagctcatcagcaagtctacaaagtcttctaaatcaaggaccacaaggcggtcgatcttggaggatgctgaggctgaaagagaatcctggggtgaaaatcctttctacgacaaaaactaccggcactaaactacttcgagtttaatcagcagtcttgttgggtcacagcctggagacgaccttcccatgttcctgactcgaggactgtaccttgttgcatccactgctactaaactacgatgagttgtagagcaattgtggactactgtaaatggaagtagatgctagtgttgctcgtttatgtggggttttcgatggtgtaatatcgttattactcgttactagatctttagcaggatacaagcctagattctcagtccgcctccgccgttgcatttcctgcgttgctccgttctacgtgtgctctgcaggaatttcgcacgctcctgaatttcattcttaccgtgcacacatgggggctccgcttgaattcttaccaaagtaaattaactgttttttgtgtttt

SEQ ID NO: 16217 - DNA, 532 bp, Setaria italica
  Peptide Sequence Number=SeqID_82191
taggcggcaaggggcgaaagcgccggagcatcattcaggaggttgccgtgttcgtgcctactgtccgcataccggtggcttctgacatagtccatccgctcagggggatagtttctaaggatctcgttgatcgcctttccacactccgtgctcatgtggtggaactagccgaagaaatctattgtgcggatgtatcagctgtttcagaattgcaacacgcgctggaggagtacttgccagtagttcttggtctaacagtgaaagagagccgccttgaaccatccgtacaattcagatggaagaccttagatgatgatcaggagtgttgtttggccagcgcgtggtatgaggtgctgtcggtcgtacacatgatggcgatgcttgcattatttgaggccaatttaacactcattccgaagaacgctcaagctggcagtgaaaggaggtatcagaagatgcaaagaaggatgttgtcaatgcattgctcagggcatcaggatgcttagactactccgtacgtcgcatacttgtt

SEQ ID NO: 16218 - DNA, 364 bp, Setaria italica
  Peptide Sequence Number=SeqID_82192
aactttctgctcaaatttgtatctcagagcggtgaatcggatatggttgtcaccacttatgatcaaatgaagtgctttcagttgacgctggatgctcattcattaaacatagtcaccaggtcgcttttccaagcaaataaggctaatgaagcattccaagtgtgggttgggatgattgaaatgggagtgaaaccagatgtacacggatactcgtcatttataattggtctttgtgattgtggaaagtatgaccttgcttataacatgataagcagatatactgttctacaagaaatcacccaggagagggttccaattgaggccatggcttataacatggtaattgatggactatgcaaagaaa

SEQ ID NO: 16219 - DNA, 709 bp, Setaria italica
  Peptide Sequence Number=SeqID_82193
cctggtgataccgttctggtgtgtgtgatcatccgtgtcatcatcggtgctccctgagtcggcgagcccggccgcggttccttgctcagcgccggtggcttctttggccgtgaagtgtggaaggattctcaggtgggagttaagatcctggcctacgacctcccactcgaggctgaagctctcgacgagatccacttgggaggcgatgatgcttggcggtctcggcagcagctgcacgctctcgcctttcgggatcaccacttgctcgattgccagcctcgcctcctccagagcatcagtttcctctgatgatctcgcttcttccttgtcctcataatctatcaactcgtccatgtgatcgtcgacgagggcacggagtgctctagtgatttgtgacagggagtttgtcttcacaaaaaaaaccggtatatcttgagatttcaccacagcctgaatctgagaattcttcttgagcttcgaatgcaacgcgatcaccgcatcagcttcgctgatattgtaagttaaagcaacaacgtcctccaactccagctgtttaatggcttgcaaggcagtcgactcggagatcccataagcgtatagattcaagcttgactcagcttcatctgacttctctatatgtccttcagcagaatcaagattaaatgcagagtccaaacttcttctggcattccttagagaattgccgtca

SEQ ID NO: 16220 - DNA, 595 bp, Setaria italica
  Peptide Sequence Number=SeqID_82194
gctttcgatcaagtagcctagatatcctgacccatgcacagaaattatgacttaaaacataagagcgcgaggaaacttatagcccactaacatgatggaaagcggattactgcagcatgattatatccattttccggattcaaacagcaacctgatacaataaaagtacaacatcagaggcagttacttgagattgtgggaaaaaaattcagtaagaaaaaactgcacatattaataacaatacatgtgaaacaaggtaaataggttgtacatcttcagcctcggtaacatgtacaggggattcaaggttgcagtggcaatgcgaaagaagcatatgttgtcttaccacaggttgcttgcacaataagaactgcattggctgatcaaactctgcagagaagatgatgcatcctccattgcctctcgtgatgcagtttccaagaaagatatcagcagcataaactcgacaccatagttaaaatcctgccaaaggaccaggttttctgtttaaatgcaaatgggtattttacagagtaaacaatggtatcaaattttaacgtccggtaattaaggtttagtctttgtagtttaccta

SEQ ID NO: 16221 - DNA, 659 bp, Setaria italica
  Peptide Sequence Number=SeqID_82195
caacaggatggaatttcgctgcccacatatccttgtactcgatgctctccctgaacaacttcaagtcatcagctgcatgagacgataagttgagtaagtaaacatagctcagccaagctttcgatcaagtagcctagatatcctgacccatgcacagaaattatgacttaaaacataagagcgcgaggaaacttatagcccactaacatgatggaaagcggattactgcagcatgattatatccattttccggattcaaacagcaaccacaggttgcttgcacaataaaagaactgcattggctgatcaaactctgcagagaagatgatgcatcctccattgcctctcgtgatgcagtttccaagaaagatatcagcagcataaactcgacaccatagttaaaatcctcacccctacgaaagagagggataatgtcatcttccacctcggactcgaaatatgctgaggcgtacataggaaacaggttttacgtgctcatcaagaattttggaatagtatgcactactctggaacttcgcaatgtcttctttctgctgaaaacgcatgaagacagcatgtgtgaagttctcgctattggggtcctctatgcggccttgtctaccctagttcttagttatttatttcttactttaaatttt

SEQ ID NO: 16222 - DNA, 1104 bp, Setaria italica
  Peptide Sequence Number=SeqID_82196
agtagggaaaaaaaattacaagtaaagaaaaaaactagacaacaataattaaataacaattacatgtgaaacaaggtaaataggttgtacatcttcagcctcggtaacatgtacaggggattcaaggttgcagtggcaatgcgaaagaagcatatgttgtcttaccacaggttgcttgcacaataaaagaactgcattggctgatcaaactctgcagagaagatgatgcatcctccattgcctctcgtgatgcagtttccaagaaagatatcagcagcataaactcgacaccatagttaaaattcctcacccctacgaaagagagggataatgtcatcttccacctcggactcgaaatctacagaaactgagccctgtaagttatccaaattgtgactatcatggtgctatgaacattaagaatcaggatggtgcaggtactggaaagaagattacatgctgaggcgtacataggaaacaaggttttacgtgctcatcaagaattttggaatagtattgtcactactctggaacttcgcaatgtcttctttctgctgaaaacgcatgaagacagcatgtgtgaagttctcgctattggggtcctctatgcggcctgcacccagtcagtatatcacaaataccaaactcaagttcataattctaattgattctacggctgaggtggatataagcctctcacctaatgagactgcgagtatccctctcatctggtactgtgatgtatataggtaatctagcatatctttttctcagcatctgagatgttcggcttggctctaagcagaataatgtgctccacaacctttctttttctcacaaggccaccggacggtgcaccattgctggattcaagcacaccacgagtggaaagaatcgtcttctttccagtccctggccatctgcaatatcggtccaaattcagcacagatcgttgatgaagcccaaagcagcttgcaacggatcgtatggtgtgatgcacctgggctgatgctggcgccaacatcctgaaaattcagagctgcatttcagcgttgaccccgtggggaaccagctgatgtagagcgttcatgaatattcatgaac

SEQ ID NO: 16223 - DNA, 437 bp, Setaria italica
  Peptide Sequence Number=SeqID_82197
cggaaaatggatataatcatgctgcagtaatccgctttccatcatctgatgacttgaagttgttcagggagagcatcgagtacaaggatatgtgggcatcgaaattccatcctgttgtggagaaatccctggagctgcatttcagcgttgaccccgtggggaaccagctgatgtagagcgttcatgaatattcatgagcagctgagctgaccatcaggctccgagtaaagtttgctgcacgccatggccggtgttctgtatttgttgagttagtagaagatggaatctgttggagttggacaagatggacatggatgggtcttgctgggagttccatctccgctcatttttgctgaaatgtttgtgtaccgaattatcttcattgccacctgcttaattaattactcaagatatgatggatgttgatacaaaaaaaa

SEQ ID NO: 16224 - DNA, 334 bp, Setaria italica
  Peptide Sequence Number=SeqID_82198
agcttatcttccaagcaaacaatgaaagaaactgaatccctaggaaaactcatccaccaattagtgttcttcacatcctgcaactgcacacctgtgaatttactataccaattggcattttacatgaaaagaggttcttgagatgataaaaatggcaagtgtttaaaccaaaagcatgtttctaaagcaaaaataatatagccttttctgagcatgactgctatggactcctatggccacaaatatcagcgtcgcaagaaccacaagacggcagcttcgtcttcagtttgagtttgtttagattgctgcacattaactcagttggttagctaag

SEQ ID NO: 16225 - DNA, 570 bp, Setaria italica
  Peptide Sequence Number=SeqID_82199
tcaagaaattgtagaagcctgtccacaatggcattaacatcatactgctggagtgctatttttccaactgcccggatagactcccttgcaattggtacatcaacatttccagcatattcacacagctcagtcacaatttcataggtgttgctttcattcgctatagcagtcaacatctcaagtttcagcttcttcacataagacggatcactatattggcagtagaaacttttgtagtcagatgaaaataacattggagcacgcatcaccagaagatgtagatggcatagcacagagtacgactgttcaggactcccagcacccaccaaggtaagcaagggtgcttttatacgctcataaacctgttgatgaacatcagtcatagacattgtcaaatggagaaaaactttaattgttgacagaacaacagctccatttgcatgctgaagtctatcctccagcaggttcattatgtcaaaaatttcgttattatcagatggtaggaactttgatgccaactcaagaacaaggcactgtgcccactcactgaactctttgatcttgtttagc

SEQ ID NO: 16226 - DNA, 1820 bp, Setaria italica
  Peptide Sequence Number=SeqID_82200
gttggaaaatagcactccagcagtatgatgttaatgccattgtggacaggcttctacaatttcttgaaatggataaggattacgtgactgctgaaactctagtcttggtgaaagatcttctgcgaaaatatcctcaatggagccatgattgtatagctgttgttggaaatatcagtagcaaaaatattcaggagccaaaaggaaaagcagctctcatttggatgttgggagaatattcacaagacatgcatgatgctccatacgtacttgaaagtcttgttgaaaactgggatgaagagcactctcctgaggttcgcttgcatctcctgactgcagtgatgaaatgtttcttcaagagaccaccggagacacagaaggcgttaggagctacattagcagctggtctatctgacactcaccaggatgttcatgacagagcgctcttctactacaggcttttgcaatatgatcctgctgtggcagaacgagtagtaaaccctcccaaacaagctgtctctgtatttgcagatacgcagagcagtgaaatgaaagatcgcatatttgatgagttcaacagtctatcagttgtatatcagaagccatcttacatgtttacagacaaggagcatcgtggaccatttgagtactctgaggatcttacaaacttggctgttggggcagaggctcaggaaaatgtaatttctgcccaaagataccaagaaaatgataatgaccttttgcttagtacgtcagataaagaggacaatggtacaagagccagcaatggttcatccacctctacatacaatgctccttctgacttgattggcttaagttctcaaacaccagctgaaacctcactaataagtactggtgggccagcatattcctcacaatccaacttcagccttgatgaccttcttgggcttggcgttactgaagctcctgcacctgcgccaccaccagcactgacccttaactcaaagcctgtgttggatcctggtactttccagaggaaatggggccagctagcactggcactgactcaggagtgctctttgagtccacaaggagcagcatcgttaatgaacccccaatcactcatccgccatatgcaaagcaatcacatccaatgtattgcttcaggtggtcagcctccaaactacaagttcttttttattgctcagaaagatggggctactgctttcttccttgtagaatgtattgtcaacacagcatcagcgaaggcacagctcaaaatcaaggccgatgatgggactgctgctgaggcattctcaactttgtttcagtcagccttgtctaagtttggtctttcttgatcctgagcattttctacctcagtgattcactggtccacagtttttctgccttgttgcagtttgtccactgcctgcagcccttagcacttcgagtaagcttgtccagtacacattcgatcaaaatattggagaatgagatgaaactttgctgtttgagggcgcagcaatattattaggttcatcaaggagagaacactggaattttgtaggggtaatctgatttgttttctctggatgaagaactggccacctgtatatgtcaattcagagaaacagctggtttgttcagggatctgctggtttgatgttgcctattgtggaggtgcacatcacccttttccctaaaggatgtagaaagaacagacgcctttcatgtatgttatttacttatttttacttgcacagatgaataaaaatgtcatttgcctgtttcgatctcgtcaaaaaaactgccatatgtaatagctacaagttgtatga

SEQ ID NO: 16227 - DNA, 744 bp, Setaria italica
  Peptide Sequence Number=SeqID_82201
ttctttactttggtttcttagttcccttttgttctttcccgtttcgtttcgtttccggttaagttgtctagtatttctaccttttaaagtcagcaggctcctgctcggccttcggtagcctcattaggctgcctctgcactactgattcattctcttcatcactgtacgaacatcggacttactagtctgtaagccttgcagatgaaagggaggttgaaccaggacatcatcaggaggtgtctgatgtgagcagggtggcagagcacttccagtctgctgattcacacttcttccatcgtctctcggtggaatgctctcagaaggagaggcagcggaaggtttcttggggtggtgcaatggagatgcagcgttctccatcatcactagatatcggaatggtatctacttcccatgagaagccaaatcgctcccagagagtcaggaacaagagttcacagtttgaagatccattttcatctgagcatgagccaaggttaatttacattaatgatcctaacaggacaaacgatcggtatgaatttactgggaatgagatcaggacaagcaagtatactttgattactttcctgcctaagaacctcttcatacagtttcatcggctggcatacgtatacttcctagtcatagctgctcttaaccagctccctcctttagctgtatttggaagaactgcttctcttttcccgctgcttttttgtgttgtttgtgactgcttattaaaa

SEQ ID NO: 16228 - DNA, 255 bp, Setaria italica
  Peptide Sequence Number=SeqID_82202
tcctcttctctctctcctccgacgcgggattttcttgcagcaccgcgccgccgccgccgccagtgaccgcctcgccgcgtgaaccgtacgcaaccgccggcgtgagatggcagcttcctccgcgttcgagccatccccggagatggagcggttcctctgcgagcggctgctcgacgcggagcagcccatcgccgagcgcttccgggcgctcttctccctcgcaacctccgcgggacgcccgcgcagcgccctcct

SEQ ID NO: 16229 - DNA, 236 bp, Setaria italica
  Peptide Sequence Number=SeqID_82203
agtatatactatatcaaggtctaaaggcatacatgagagcatacaagcctatactatgatagcaagggtatatgactagcatacgagcatgtaagccaagcatataaacatagcaaggatataagactactcatgcatataggaacgaagtataacgctacaagaagaaatcacgaatactaacttactttactctgaaggaagccaacatccatagaggtacgagctaagaggag

SEQ ID NO: 16230 - DNA, 1150 bp, Setaria italica
  Peptide Sequence Number=SeqID_82204
gaaactcagaataaaaaagaaaataataggaaaatcaaatccatcgcctccagcacctccgtgagcttcccctgctcctcctctggatttcattttcgctccccgcaccagacgacaggcggcgaggggggcgatcgcgatcgagctgccatgtcgacgtcgcggaggcgaaccctcctcaaggtcatcgtcctcggcgacagcggggtcgggaagacgtctctgatgaaccaatatgtccacaaaaagttcagccagcagtacaaagctacaattggtgcagatttcgtcacaaaggaggttctcattgaagacaggctagtcacgttgcagatctgggacaccgcggggcaggagagattccagagtcttggtgttgcattctatagaggggcagattgttgtgtgctcgtctatgatgtcaactctaacaggtcattcgatacactcaacacgtggcatgatgagttcctcaaccaagctagcccatcagatcctaaaactttccccttcatcttgcttggtaacaagatcgatgtagatggtggaaaaagcagagtggtttctgagaagaaagcaatggagtggtgtgcttccaaaggcaacattccttactttgaaacttctgcaaaagaggactacaatgttgacaatgcattcctctctgttgccaagcttgctctagagcatgaacgtgatcaggacatctacttccaggctgttgcggatccggtcccggagactgaaccgagaagcggatgtgcatgctagtagttagtcatcatcctcgtcccttccagattttgcttattgattgtggcattcttttcgagtgatgccgagcaggcattctttttaagtgatgctggggcaggcattcttttagttttcacaatgtacactattgttccagacttcagtcatccaactcttgcttttgtagcgattgtactatatttagcgacggttgtttttttcttctttgcgagccctgtttcttggtttgggcaataagaatgcacggaggtagacgattcaggatgtggcctgtgaaaggtcaaactcctagcctcggttgtattcgtccggttgtaacttgttgacctcaaatgcgttgagctctcgttgatgcaagcaaaaaactttaaaa

SEQ ID NO: 16231 - DNA, 463 bp, Setaria italica
  Peptide Sequence Number=SeqID_82205
tgtcgggtaggtttttggggtcttttcttcttgggggtccttcttggtctaggttcctaactttctaagttgcccaagaggtcgtagaaacgaattttccatagcagcatcaccaactgcaagctcaaggtcatatcttccagaaaggtagtaaaatttctccaccaaacctaggaagtctagaacaagtttaaactgccttgcagaaccaggcaccacaaataagtgttcaacattgctttcatgcttcaatttcaagaacacctggtgaggtttaaacgtgtgcccaagcggtgtagttagttgaaaagataagcgcaacttttgcagatggtttgcagagagagacacttttgtatctttcagaagatctaacctgaaaagcaatttgatggtcccagcgttcaggtaagttgttccacaacaaaaataaaatattgaacttccaaatctaccgtatagt

SEQ ID NO: 16232 - DNA, 438 bp, Setaria italica
  Peptide Sequence Number=SeqID_82206
atccgatgaaaggcagaagagtgagacccgtgaatgcaagcgagagttcctttggtggcctcttctctggtgcacggaatatgtgtgatatctctgcctttggcccaaattttgagaatgggtcaacagcttgtgcgggaggttttggggctttctctggggcctctggcaggtccaactccaagtgcccaagaggtcgtagaaacgaattttccatagcagcatcaccaactgcaagctcaaggtcatatcttccagaaaggtagtaaaaatttctccaccaaacctaggaagtcctacaagaagccaaaaaggcatataaggaatctcttcacggcaccaaggacttaaaagatgcattaaggcaagcaaattatgctgcgtatcccacttcatcgaacataatctattttcataaaaaaatgcaactggattatg

SEQ ID NO: 16233 - DNA, 1113 bp, Setaria italica
  Peptide Sequence Number=SeqID_82207
tggaggagcagcagatctgaaaactgttgtgacttcaaccttaagctgatctttcgaagtcaatgaaaatactttggaaggaagtgacagtatcaaaggaatgaagaccctattgttctccaggaatgacaaagactcaatctgattaaagcaatcctttgcgctaccagggagccctataccaaggaagaactttgccaatccaagtattttctcaccagggatattcaatttcccagaggcaacagttgcaaaagaggtaacaccacgcactactgaagcagaagtcgttattgggcccttgtactcagtagcatcaacatgcttctcgtcaaagtagaaggtgccatcatcataactcttgatagtgtcaaacagcttcacgatgtcattttttaccactcctaccatggatggatcaacctcagcatctgctagagaaacaacacccgccaaagcttctagcgcgataccagcagcaaatgtgctagattcagcactgtctgtgtcataacgccatctcccatcgctttggctaagtgccttaatggcgtgaaatgtgctttctgcatcagatagaacaacattgtggccttgttccttgatgctaagcagacctcctacagaatagtagaattccagcagggagtttgtgtccttaatcactgccttaagccttgccacgacaccatcatacacgccggcatcaacactgcatccgagcgcgccgctgatccgggccgcgtggaacagatctttcgcagcggaagaggtgggggaagccaacttctctgcggcaaacttgcacgccttcccagtctcactcttgtacttctccaacccgagtatctggaacgtccttaccgcctcatacgtcctctccaaatcgccgaaggatccgtcggcggagggggcgaagagctcggcagccgcggatctgtgcgcgtcggagaccgggcggacggcggtggagatgggagcgaaggctgcggcgacgaggaggatgaggagggccgccggggatgggcgcctcccggccatggcgatggcaattgccgtcgccgagagagagatgagtagggtttaggagactgggcgtgtggggatggccag

SEQ ID NO: 16234 - DNA, 1828 bp, Setaria italica
  misc_feature (1)..(13): n is a, c, g, or t
  Peptide Sequence Number=SeqID_82208
nnnnnnnnnnnnntttttttttttttgtgtgcatctggaagggcgaatctcatattaattctatgattaaacatccaatctattcagaaatcatcagtgcatcatcatacacgaaggtgaggtcctactacatttctagtatcaggattcttgaaatccaactgaaataaaccaagtctttactcaaaactcgagtcgctcaacaaaatcttgggagcagttaaagagtaccaagcaaagactgagaacccaaggacctgcaatggccacctcaaaaattgatgatcctgaaacctctgttgcattgtccactcatgcagtcttctgttttgtcgacaccgaggagaggtaggatagggtcctatggcccacaaacacaaggaagatgccgaggaagcctaggtacttcagggttgtgaaaagatccaacttgagccagaagagaacatagagcagcaggactgctcctattccagagtggaaaagcgaggcaaatgcagccggtcctggcaaggatgggaagttcttcaagttcactccaagacgcatcagcccaatcaagaatccgatgaaaggcagaagagtgagacccgtgaatgcaagcgagagttcctttggtggcctcttctctggtgcacggaatatgtgtgatatctctgcctttggcccaaattttgagaatgggtcaacagcttgtgcgggaggttttggggctttctctggggcctctggcaggtccaactccaagtgcccaagaggtcgtagaaacgaattttccatagcagcatcaccaactgcaagctcaaggtcatatcttccagaaaggtagtaaaatttctccaccaaacctaggaagtctagaacaagtttaaactgccttgcagaaccaggcaccacaaataagtgttcaacattgctttcatgcttcaatttcaagaacacctggtgaggtttaaacgtgtgcccaagcggtgtagttagttgaaaagataagcgcaacttttgcagatggtttgcagagagagacacttttgtatctttcagaagatctaacttttgaacagactccatggtcccagcgtcattatcagaaattccaatttctgccttgtcaactttgatcagtcctgtgataaatacattctcagtgtttctccctccagtagaataaacagtctcatgctctggctcctgaagtgaaatctcaaaaactagagagtatttcccaacatctattttcaacggagcaatgtccaagtaatgaacattgttgtcaaggtcaaattgaagttccttgttctcactggtgatgactttagaatcagaacccaacacttgtaccagattcactttgagtggaggagcagcagatctgaaaactgttgtgacttcaaccttaagctgatctttcgaagtcaatgaaaatactttggaaggaagtgacagtatcaaaggaatgaagaccctattgttctccaggaatgacaaagactcaatctgattaaagcaatcctttgcgctaccagggagccctataccaaggaagaactttgccaatccaagtattttctcaccagggatattcaatttcccagaggcaacagttgcaaaagaggtaacaccacgcactactgaagcagaagtcgttattgggcccttgtactcagtagcatcaacatgcttctcgtccttaggagagttaaaggcatataaggaatctcttcacggcaccaaggacttaaaagatgcattaaggcaagcaaattatgctgcgtatcccacttcatcgaacataatctattttcataaaaaaaatgacaactggatt

SEQ ID NO: 16235 - DNA, 263 bp, Setaria italica
  Peptide Sequence Number=SeqID_82209
tgcctcccaaggtcccaacgaaggaaccactactgttgctgttccatactcctgacaagcttacatcataaacacaatacaccaagcacatggatggaaacaaggattgaaaccacgcacctaaaataaaacaaaagaatcacaggattgcatctgatccaatgtcctcagacaacacctcacggaaatgacagttctagtagcttgtaatgcacgagaatcgatggaacgaaagcgatcagataaaaggacggttggggggg

SEQ ID NO: 16236 - DNA, 686 bp, Setaria italica
  Peptide Sequence Number=SeqID_82210
ttttttttttttttgtctgataccagagtcattatcacctacccaaataggtgggcttcccagatgtgaatcaccaagggagggaaatcaaggcgtacagtaaattgtaggtacagccaaagtaggatttccaaacacagtacaggaaggtctgcctacaacatggcaacccatacacgctcctcctgcttttaggtgaatcgaacctattctttttctgccaaacaactcacaatggagaggggattgccgaactcacactcttcagcaaaggactgtgcagcctaaatccccattaaaataagcagcaagcagatcagtattgcttaaatcgttctaatggaccatgccagaagtgccctcatcaggcatggcatcctcttccttcctcagcttcccacagagattgcattcaaacacatgggacagctcaccgttcggtgatggtggcaatggcgcaagcatgccccagcagccctcgctgtcacaaagatacctcacaaagaagtaggcatgcgggaaatcatcatcgccatcaggaccaccttccccatcctccattccatcatcaccatcgtcatctccaccatcctcaccctcttcctcttccatggtgtcatcctcactcccctcatctccattgttatcatcatcgtccttccaccggctctccacctgacagcgat

SEQ ID NO: 16237 - DNA, 937 bp, Setaria italica
  Peptide Sequence Number=SeqID_82211
gcggtctttttcgaagatttcttctttgacttagagcatggtttcagtgagaagtctgcatccttcgaagcatctaaatcctcattgccatcataaacataaccatcaactcttggcggttttctttttctctgtccaggacccctgcgagaaaggggatcttgcaattcacaagtagaacctaaaacctctgtctcttcagtatttgtattcttcggagaagtcaaatgaggaccattatcctcttcaaagtttataactttgtagtggttaaaaagcaattgcgatatatctgcaacctcaacccactcatcacaaaattcccaaattggtgaccggtaaagcttcacacgaccatccacagtgcaaacagccagcaaacacccataattaggtgcaaatccttgctgagaccatgaaattgaccgggcacatggttcagtatcacgcgctaagcatgtaggcaccaaacatggctcaaagagatcctctctgttaaccactcctataggaaaaggatcactgcgacgaagtccaaccagtccacgaggcccctcaagcgcagctgcagaatagtgacaatgtgaccagatgcgacagccaccaaattgtcacttgaccaagcaatagcatttggataagatggagaagcaatcagcgttgcagcttggtagtgcggagccatggcactcatgcccaagcatatctggcaacaaaattaagctgtagctctcaatatcttgctgcagtcctgcagtttctgtgtcgatggagcttgaatcttgatgcctgcctttgccggaggccggagcacggaacagagaagggagaaggcgaaggaatggagcgctccctgctccagcacggccgctgccggccgacgcgggccgggacccgtcgctgtggcgctgcgcgcgcaggtcgccgtacgcctgcg

SEQ ID NO: 16238 - DNA, 323 bp, Setaria italica
  Peptide Sequence Number=SeqID_82212
gatgaagagcgcgtcgctctcgatgcccgagaccctgtcgatgttgggcgggatggccttcccaccgacacccatgcgcgtgcagtcgatccggtccccgtcgtcggcgaagacgaggcggccgacgacgacgcccttctcggaggcgacgacatggagcgaggaccgagtgcatccgagcatgcaggagacgtcgtcgaggactgcatcggactgggactggtcgccaaagagcttgacgtcggtgtagaagaggtcacgcttggtgacgtggatgcccctgcggaggacggcgtggacgagggagaggacgcgggccgtgg

SEQ ID NO: 16239 - DNA, 353 bp, Setaria italica
  Peptide Sequence Number=SeqID_82213
tacccatcctttcattgttcccgtttgccatccacaaaagaggttgccaatcttgatctcagcagtcctgaactttttcgctgggatctcctggacgaatcgatcgcaccaacgaatccagaggcagatggcgctcttcgaaactcagacggtgcacgcaggcaaccaaaagggaccgcctttcttgcccactgacaaacaggctcctttgcctgcagcgcaaggattcctcccggctcactgaaccatggcaggctcgcccggtggccccctggatcggcaaccgacgagcagccaatcgtggacggcggcggcggccctatggcttgtctcccccacctgtttctctcgcg

SEQ ID NO: 16240 - DNA, 1772 bp, Setaria italica
  Peptide Sequence Number=SeqID_82214
catagatggaatcttagccctgctattggaaagaaaagtaagaaaaactgaaatccagctttctgagcttggacactgtagctgccagtatcatttctcaagaattcaaggaatgcttctacaaatccattcaaaaccatagcatatgaaacctcattttcataatcaagaacattcttcagatctttaattgacttttcttggagttctaatggcagcatggacagctcatgaaagaacctcaggaacatctcctggttgaagttgtggaatgacagatacttttggtagtcagcattccaagagaactgagaaatatcttttggatcctccatgtccctagcattggatgcattagagacataactggcatcagataatgcaaaagatgtattgctgtggtcaatgacaaaactgttgtcctttccagcaatgagaggtactgaaacattgtgcaaacttgacacagagtaaccgtgcaattgctcaggtaagtaactgtaagaattttcgcttggaggaataaaatgggaaactgtaaaaccatgctctttgcaccaattgcaaatgagatctctcatgcaggtatttgggatcatggagaagttctctagcttcatatgtgtcctaggacacgtatcatatccttcattgaaccatctctcaatatattctctttcataagtctgtccagatgatattataacaggatcatgcattagctttgttgatattgggcagcagaactccacaggtggagtagcacctccagacatactactgtgatcctcgtaagtctgaaagtctgtcggtgtgtagcatttttcaggagggctggcatcactggaagttgtgcttggagttgaagactgactttcaggttgtgaattctcattccgttcaccagagtctgatctgatgctctttccatacttcttaatgaggtacagaaagaacttaaggactccctccttttttggatcattaccattaaccttgtcaagcagtttcttgattgctcgtctttcaattaagagagctttaggagatgtcaggtccaactttgaagcagcctgcaggaatgtctcaagttctaattcttcacttgcgtcagactgccggagcatctgtaaaatggctttgccagcctccttttccaccggatcaagaataaatttgatgtcccggagatcattgtggacttcagcaatctgattagcaagtgctggtggaaccatattctgaataaggaacaaactccgcctaagtgaatccctgatcctttcacatcttgctacaatcgcctctccagtaatagccaagtagagcttgctacactcaatgcagtgtagagttatgagatttcctttctcaacaacattatacaagttgcataattcctgtatgcctgctttacaaccaggtcgagctgcctctattgatggaagaatagaagagaccttatccaacatcattgtaagctcactacacattgagctatgaacctttgggcaagatttacgctgagatatacccatcctttcattgttcccgtttgccatccacaaaagaggttgccaatcttgatctcagcagtcctgaactttttcgctgggatctcctggacgaatcgatcgcaccaacgaatccagaggcagatggcgctcttcgaaactcagacggtgcacgcaggcaaccaaaagggaccgcctttcttgcccactgacaaacaaaacaaggactaccagaacacctagacaagacgacaaaga

SEQ ID NO: 16241 - DNA, 445 bp, Setaria italica
  Peptide Sequence Number=SeqID_82215
aatctggagtggctagacccaacatgaccagctgcactagtggccatctcctctgactgaatttcttcaaaacagcacaatagcacacatttgtatgaaagcatgttttaaatccacatgattcggcagcagattcaattctaatcagtcggcagcaacgaaggcctgcataatcatctctgcatagaaatgaatctcactgaccatggaagtaatggaggaaaaaacgctaataaggtgttaaatcttaccatatacatgggacacagatttcctttgcaagataaccgaggtcgtcaaaacctacaggttgaataaattggcaagtccaaaattaagtcatgaacctcccaatcacaacatggatacaaacgtttagctaactaatcatgaatacaaatttttagctaacgaatcatgattcataaacacaaatttcaagcag

SEQ ID NO: 16242 - DNA, 1095 bp, Setaria italica
  Peptide Sequence Number=SeqID_82216
atttaggaagtagggatagtgcccagatttcagaaaactaactaaaggctagttcggttagcgaaccatggcatcaatactctgaacaactggtaatcaataaaaaaagctagttgaaccagctatacaggtcaggtcacagccaagctaattacccagaactgtaaagatggaactatacacctctttttaatgtaaattcagaagtgtacattacacaagagcataaacattattaattgagtataaaacagaccagaagatatgtgcttgagatttattataaatggtgaagaacaaggatagtacaaggttacaagtatagatacatactgaatcattgcataccagctataatcgaagtacttgatagagaaaataaaaaatttaaatgcatacgaaaggctagttcatatagaaaccatggaatcgactttccggtccaccatttacttcataacttcaactagtgggtttgcaggacccatctcatggaagggacaaaacaaaatgaacaggagctaaggacagaatgatgacagttggataccgaatcaaagctgcaggcaggaacctaactcaagcgcatggaagtttcgcaagaagatgacccttgcgctcacacctgtacagagggtgctccgcaggttgtgttcatgtaggagccaacataggttgggtgattcacggtacattatttgctgtctgcttgtcgccaccagcctgtcggtcaggatgggcattggcagcaggatccatcccatcatccctgcgagacagcagcagcagccaaaccatgcatccatgtgaagcatcatagaagctaatctggagtggctagacccaacatgaccagctgcactagtggccatctcctctgactgaatttcttcaaaacagcacaatagcacacatttgtatgaaagcatgttttaaatccacatgattcggcagcagattcaattcaatcagtcggcagcaacgaaggcctgcataatcatctcatatacatgggacacagatttcctttgcaagataaccgaggtcgtcaaaacctacaggttgaataaattggcaagtccaaaattaagtcat

SEQ ID NO: 16243 - DNA, 463 bp, Setaria italica
  Peptide Sequence Number=SeqID_82217
ttctttgtaggtcccgggtaacttcgtctacggtctacccttggttgaacttcgatgtcgatgatgccggagtggcggagcttgtcgttgaggccgggcttggcgagcctgccgaacgccgtgccgctgaggtcgaagtggtacttggacaccgggtagtagttcatgtcggtgatgatcaccgtttccgccttgccggagcaggacttgtccttggtgcaacgaatcttgtagcaggagccgcagcccttgccgtccttgaacaatggctggttgccgcaggagcccatagacatgaacgggtactggttggtgtgcttgaagccgcacgcaccaccgttgtcgtcggggcctgcgccgttgggctgaccgtaccaggtggcccgggccttctgccaggggccccagtacacggcggcggaggggagggaggaggggactcccatggctgccttggccgttt

SEQ ID NO: 16244 - DNA, 411 bp, Setaria italica
  Peptide Sequence Number=SeqID_82218
cggatgcggatcgagaagggcgcctgcatgcggtggttggtgtccatgcgccagacgttgccccaggactcgcgcatcggcgtccaccgccccgtcggcgggccgtgcgccgtcttcgactccatgaggtccacctgcaccacgtcgccgtcgccgtcctcgtattcgacgagtaccgcgaagtagacggggttcgagtactcctccacgtggaacccgatcttgaggcccgggaactcgcacggcaccctgcacaaacaaacatccaccgcgtttttttagacacacgaaacagggcatcacactgctgctaatcttgtcatcggaatatgccggttagttgtttagcctaatataatcctgctgcaaggaatttctactctttcaggcagtgccaggggccgggacgcg

SEQ ID NO: 16245 - DNA, 1484 bp, Setaria italica
  Peptide Sequence Number=SeqID_82219
tttaaggtctagttctcgaaaagcctggtctgcccaagctggggaaatggcgtttatacattacaatatactttttcgattaatcaccgatcgaaatgaagatgatgattgatgattataaattataaagcgagagtgggcgggagggcgtaccttgtacgcctgcctcctccattttcccacacggcttaaatttttttccttccctcatgcccgttcgcaattagggtggcacacatcacgtgccagcctcactcacacaaacactcgcacatgacgctccacctaaaagcgcgcccccaatgcaacgactccatggacccatgatgctgatgatgagatgatacaactgcaacgaacacgatgaccagagacaccgacgactagccgttccgttccgtcccgccacgccgtactagtagtagtagtctagtggtagtagtgttgtggtagagatcagaagaagaccggaccgggtgttgccagctccaattgcggtcacccggacacggacgggatccgatccccggatcagcagctcagctgtactggacgaaggagcggtagaaggtgttgggcctccagttggccgggatgacgttgtgggcgacgagcgtcttgccggactcgttgcggatgcggatcgagaagggcgcctgcatgcggtggttggtgtccatgcgccagacgttgccccaggactcgcgcatcggcgtccaccgccccgtcggcgggccgtgcgccgtcttcgactccatgaggtccacctgcaccacgtcgccgtcgccgtcctcgtattcgacgagtaccgcgaagtagacggggttcgagtactcctccacgtggaacccgatcttgaggcccgggaactcgcacggcaccctggtgaactcgatgtcgatgatgccggagtggcggagcttgtcgttgaggccgggcttggcgagcctgccgaacgccgtgccgctgaggtcgaagtggtacttggacaccgggtagtagttcatgtcggtgatgatcaccgtttccgccttgccggagcaggacttgtccttggtgcaacgaatcttgtagcaggagccgcagcccttgccgtccttgaacaatggctggttgccgcaggagcccatagacatgaacgggtactggttggtgtgcttgaagccgcacgcaccaccgttgtcgtcggggcctgcgccgttgggctgaccgtaccaggtggcccgggccttctgccaggggccccagtacacggcggcgtcgctggcgttgtagttctcggtgccggccgcgtcgaggtcgccggtgtcgagctgggcctcgcggcagtgcccgccggcgaggagggccaggagcacgagcgccgccgcggcggcggaggggagggaggaggggactcccatggctgccttggccgtttcccctttcggcttcctctagctagttaggcagtgggcggcagtgagtgaagagtgcgagcaaga

SEQ ID NO: 16246 - DNA, 542 bp, Setaria italica
  Peptide Sequence Number=SeqID_82220
actaacgtacgcggtaggtactacgggacgaaggaaggtcgtcctcctcctcggcaacctcaagaaggaggcgttccggcgcaccgggtcgcggccatcgctccaggacgcagtcctcgtgtgcaagaaggagcacgtcttcagcaagaagcggttcctcaccaaggccaggttccacgagaagggcaagctgcacgacatcagcatcgagtgcagcagcggcaacctcaacggcggcgtcgacgtcgacatggtgatcaagatcgacggctccgtgaacgtcctcgtcaggcacctgcagtggaagttcaggggcaacgagtgcatctccatcgaccagctcaaggtgcaggtgtactgggacgcgcacgactggctcttcggcacagggatgaggaacgcactgttcatcttcaagcccgagctgccgtcgacctctgctgacttccacactgacgagtgctctgatttctgccttctttctgtacgcatggaaggttgagtgagtgaactaggatcctacacttgttactacattacag

SEQ ID NO: 16247 - DNA, 859 bp, Setaria italica
  Peptide Sequence Number=SeqID_82221
ggaaggcagaaatggcgacgaggtgtgtcgcgtctcttcccctccaatccgcatccagctccgcggccgccagggcgcagcctgcctcctacgcagccgcgacccgccgcgtccgcacacgcctttcggtcgccacaggcggggagcagcagctcatcaccgcgcaggagccggcccaggagcctgattatggagttgttagccttcatcatgttggaattctgtgtgaaaatcttgaaaggtcaatggcattctacaaagatctcctaggtcttaaggtgaatcctgctaggccaactgacaagcttccatacagaggggcttggctctgggttggttctgagatgatccacttgatggagctgccaaatcctgatcctctgacaggacgcccagagcacggtgggcgcgatcgtcatacctgtttagcaatcaaagatgtaacgaagctgaaagaaatatttgacaaagctggaatcagctacacactccagcaaatctgggcgcccagcgatcttcgcaagagacccagatgggaatgcgttggagttcacccaagtgtagcaactgaaagatgccttttccgctagaacatctcatagactttactcttgtcagagtacactatacctagaggtcctaaaccttgcttgtagctaccaagatccggcaagggaatacagcttgtacatatggcatatcagtcaagtatttgaggttgacttgtttcatggtttctattactcagagggcgtgaaacttgaaaccgtaatcacgtaatcatttaccaaattatacgactaataggttactaggaacaatactaggacaatttagaataatactaattaaaaaaaaa

SEQ ID NO: 16248 - DNA, 379 bp, Setaria italica
  Peptide Sequence Number=SeqID_82222
tacataggatcggatgttacatcacttgtgacacttccagtcatcatttttgaaccaatgacaatgcttcagaaaattgccgagttgatggaatactgtgagttgttagacaaagcagatgaatctgaggatccatgcatgcgtatggcttatgcttgtgagtttctccttccctcacctgcaacaccactctaatgccgtatcatggttgacttagcttttagtcaatttttcagctgcatgggctgtttcggtctactttgcatatcagcgtacatggaagcctttcaatccaatccttggagagacttatgaaatggttaaccaccagggcattacatttcttgcggagcaggtaagccatcatcctccaatgggt

SEQ ID NO: 16249 - DNA, 639 bp, Setaria italica
  misc_feature (43)..(43): n is a, c, g, or t
  Peptide Sequence Number=SeqID_82223
aaattcattggaagtttacccagttggaaggactagagtgacncttaaaaaatctggtgtcgttttggatttggtgccaccaccaacaaaggttaacaacctgatatttgggcgcacatgggttgactcacctggagagatggtcatgacaaacctgacaactggagacaaagctgtgctatatttccagccatgcggctggttcggggctggccggtatgaggtggatgggtatgtgtacagtgcagaggaagaacccaaaataatgattacagggaaatggaatacgtttatgagctgccaaccatgtgatcaagagggcgaacctattccaggcactgagctgaaggaggtagtttctttcacttatcatttctagttaggacttctgctatattcatgcaatgccagtcccatatttgcggatgtcagatccacttaactgctcatacattaaacgtactgcagatctggaggattgctccaaccccacagaatgacaagtaccagtacacacactttgctcacaaaataaatagctttggaacaactcctaagaagctgttgccatctgattcccggttgaggcctgaccgatacgcgctcgagaagggtgacatgtcgaagtctggcgcagaa

SEQ ID NO: 16250 - DNA, 649 bp, Setaria italica
  Peptide Sequence Number=SeqID_82224
ctcagtccatccatcgcagcagagacacgaagaggaggaggatccatgggggaaggctggggttgtagccaacaacaagttctgcagaaggccgcttctcctcgtccttgtcgtcgtcgtcgtgctcgtgggaagctgctgcgctgaggccgccgccaccgccgcggcagatgagctgatcagcagcaaggacggcgccggtggcggcagtagtaggacgacgaggaggaggaccaggaggcgtgccgcggtggcggcacccctgatggtgcccatcaccgtcctcaagtccgccgtcgacgcgggagccgtgtgtatggatggaacaccgcctgcttaccacttggatcctggctcgggggcgggaaacaatagctggattgtaaaccttgagggaggcggttggtgcaacaacgtgagggcttgccagttccgcaagaccagtcgccgaggctcgtcggacctcatggagaaggagatccccttcggaggcatcatgagcaacagccccgtcgacaatcctgatttctacagctggaaccgggtgaagatccgctactgcgacggcgcgtccttcgccggcgaaggcttcgacaaggagaatgggttttacttccgggggcagcgcatctgggacgccaccatccgg

SEQ ID NO: 16251 - DNA, 1127 bp, Setaria italica
  Peptide Sequence Number=SeqID_82225
tttcgtttgtaaaggttttacttcttggtcttcctagtaagtctaacggtccttgtttctattctaacttccttgtcttctagtccccgttcgacaatcctgatttctacagctggaaccgggtgaagatccgctactgcgacggcgcgtccttcgccggcgaaggcttcgacaaggagaatgggttttacttccgggggcagcgcatctgggacgccaccatccggcacctcctctccatcgggatggcctctgcagacaaggtgctgctcaccggctgctccgccggcggcctggcggcgatactccactgcgacgagttccgggccttcttcccgccgaccaccaccgtgaagtgcctcgccgacgcgggcctcttcctcgacgctgctgatgtctctggcggccgcagcctgaggtcctactattcagacatcgtggcgatgcagggcgtggctccaaacctgccgccggcctgcacggcccgtctcgacaccacctcgtgcttcttccctcaaaatgtgatcgatggcataaacacccccatcttcctgctaaacgcagcgtacgacgtctggcagatccaggagagcctggcacccgatggagctgatcccagcggcgcctggcgaacctgcaagtccaaccgctctgcttgcgacgcatcccagctaacgttcctgcaagatttcagggaccagatggtggcatccgtgaaaggtttctctggctccagaagcaacggcctgttcatcaactcctgctttgcgcactgccagtccgagctgccgaccacctggagcaacgcagcaggcggctcccctgccattcaaaacaaggggatcgcaaaatcagttggcgactggtacttcggccgagctcaagtgaaggcgatcgactgccgctacccatgcgatggaacatgccgcaacatcatatgacaaagatcctgttgttgtaccttgtggtttttgtgttgtgcacacatcgtctgcgttcaagagagtagagagtgtacatcacgttgatttgtgaaacagagaaagcaaatgaatgcaaccattaaaaggaacgatatcttggataaccaaatagatgacctgcatatatgcgatgaaaccgattta

SEQ ID NO: 16252 - DNA, 893 bp, Setaria italica
  Peptide Sequence Number=SeqID_82226
atgaaaatacaataccctggggttgcagatagtatagaaagtgatattgagaatgttaggctacttctaacttacacaaatctcatccctaaaggtctttttctggatagagctatgaaggtggcaaagcaagagctagcaagggagtgtgattatgtattagaagcaagtaaccagaaacgttacaaagaattgctatctgatagtgatggctattatgtcccaaaggtcattgatcaactatctagcaagaaagtactgacctcagagtttgttccaggggttcctattgataaggttgctcagttaagccaggaaacccgcaattatgttggttgtaaactgcttgagcttacagtaaaggagctatttgtcttcagatttatgcagactgatccaaattggagtaattttctgtatgatgatgctacaaggaaattcaatctgattgactttggggcagctcgtgattttccaaagcgctttgtagatgattacctacgtatggtcgttgcctgtgcaaacaaagatcgggctggtgtcttagagatgtcccgcagacttggattccttactggtgaggaaccagaagtcatgctggacgctcatgtccaagcagccttcattgttggtgtgccgttctcaaagccaggcggccatgattttcgagcgaacaatatcacacatagtgtttccaatctcggggctaccatgttgaagcacaggctgaccccaccaccggatgaagtttacagcctccatagaaagctcgtcaggtgccttcctggcttgcatcaagataggggcagtcgtgccctgcagagagatgttgttccaagtttatgagcaatataatttcagtaacgattataccgatgtagctgctagtactg

SEQ ID NO: 16253 - DNA, 545 bp, Setaria italica
  Peptide Sequence Number=SeqID_82227
atatagttgaagtgttgaagtaatatcgaatgcacacgtctagctagcactgctagtcatgttccatacggttccagttcggtcgccccagagtgaactccaggctagggctagggcagctcacttcatggttggctacctgttgcaagccaacagacccacaaggctccatatcctcaatggtggatgatatgccaactgaattatgggtttccgcattgcatgcacctggtggcaaccattgatctctgaagagaagttttgtttggaaaatttgttattacaccgtataagtgtgtgtatatatatatttttactgcatgtactgccgctaccttttgccatgctttaaattaagaatagtgagggacagcgatcaacacaaaatgcctagggtcacgtacagctccttaatttctagctaggcaatatgtcattaaaaagggttacagtgttggtatacaattgttttcagtacatgaacagctccagtagtcacatatataggagttaggaaataccatgtgcctagctactgcggattg

SEQ ID NO: 16254 - DNA, 776 bp, Setaria italica
  Peptide Sequence Number=SeqID_82228
cccatgatgtacataatttttaagctcccttctctacattatcctcatgaacaaactaccatatatatacctttgtttcatgtgcccaagaaaggccaaaaatgtaacaaaaactaacggtaaaagccgaactgccaaagcaagactatgatgtgttcttctgaccaacacaaaactaatatcccatcttttggctcatcacattgctaaaaatcttgacgttgcaaagaccgattgaagtatcgtaagtagtatatatagttgaagtgttgaagtaatatcgaatgcacacgtctagctagcactgctagtcatgttccatacggttccagttcggtcgccccagagtgaactccaggctagggctagggcagctcacttcatggttggctacctgttgcaagccaacagacccacaaggctccatatcctcaatggtggatgatatgccaactgaattatgggtttccgcattgcatgcacctggtggcaaccattgatctcttgatgaagcgccgctgcgcggctggccgccgtcggaatcgtcggctgaggagcactcaacgtcgccgccagcatggctcgccgcgccctccgaggacgccgaccggtgtccggtgatggtctgcgggctggtgtccccgccggctgacggagcctgcccggcatccgggaccgggagatcgtcgtcgccggagccaccgccgtccaccggacctgaggaggtcgcaggcttgtcagtgctcttcacggtcctattacattcttgcaaagga

SEQ ID NO: 16255 - DNA, 1581 bp, Setaria italica
  Peptide Sequence Number=SeqID_82229
ttggaatgaataacccaacaaaatttcacaatggcttagttcatcgaacaaatacagaattacagaacaaataacccaacaaaaattcacaatcgcttagttcattgaacaaatacagaattacagaacacatgttccgcgatcaccattctcagctagcagtttgaacaactgcaaagaacagttttgtacaactttctacaaagggaaggcacctcaagagatttgcaaccgaatttacagcaggaagacataaatgagggaatgtgaatgcatgctaaatcaaaaggaccaaagtttccgataactatgagattttttccttttcagtcacagctccaagttattgaggatgaatagctcaaattaaggcggcctatatacagatatctgaaatctgatcttgagacctatgaaagaggaatgcttattccaacaaatcgcttccctgtttgatttagagaagaaaagaatacagcctctgacagatgttcatgactggttgcgattaagcatgttctggaaagaaatgtataaatctttgtgctctgctccaaatatctcttctgcttttgacagggtgtcctctcgtgattgtttctgagcattgaactccttgatgttcgccaaaaatgctccaaattgctcataagaaagtctcgtccgtgcttgtcgaaagaattcctttccatctatacggggccgccctgtgagagagcggcgttgaggaggagaggtaggtgctgaatactgatgacttgatgatccttgccatgatgaaaatgttgactggctctcagatcgagatcttgtaggagaagttggaccagataagaacttgggagaggatgggccagttgaatatgctcggggggaaccggcggaggatgaaatcataggtgttgaaccaggagctagtttttgaggtatgtgtggtgtgatcgagaactggtatcctccaccatgagtggattcagtctttgtagatctgctggaagtatctgaagaagagtgactgcttgaaacctcatctttccaagagggaactcgggcagtcagattatcttctgcatcatgatcctgaccagtttcagacaattgcaatagattatcttcactcaatgatttcatcgactgtttcttaaatgcctccaactttgccaagttcctcgccagcttcttggccgtcacggcgagcgagtccctctccttcgccagcttcgcgttctcttcgagggcggcggccaggcgcgcgtcggagtcggcgaggcgggcgcggagttcggcctcggtgcggtcccggtcggcgaggtcacggcgtaggcgcccggcgtcggcctcgaggcgggagacgcgggaggcgatggccatggaggtgatcttgcgcgccacgtccagctgctcgtacgggtcggtggggatcacggccaggatctcgtccgggaggtggaagtccacgcccgccgccgacgcggacgcctcgtgcctcgccatcgccgccgccggggacgggttggtgggctagttcgtggtggtggtcgccggcgtcgaggaagaataggtgtggaaatttaaaggttt

SEQ ID NO: 16256 - DNA, 692 bp, Setaria italica
  Peptide Sequence Number=SeqID_82230
gagatcggcgcacgagggcacgtaaagatcactccgcgcgcgagccgctccccctggacttgaatttgtccatgtccgacgaccatatcgacgccatagacgacagcggcggcgagggatcacggaactcgtcaagcgacctcaccgtggatcacgaacaggactacggccagcccgctccggcgaggtgctcggcgccatcgaacgtgaccgagctcatcaaagccgtggacggggtggtcgtgttcaagccagtcaactcggagcctctgaagcggagcttctccgacctggtgccggcgaagttgggagacatcacgggcggcggcgggtggccgtccgttcacgtcgatgacggcttgctggacaggctagccgccggcgccgtgcggacgacggccacgccggccctggatgcgtgggcgggcgaggtgctgtgccctagcctacggcagttcaagcgaagcttgagcaccaacgacgtggacggagcgacggtggaaggcagcggccggaggaagggcggcgaggtgttccctatgccggtgaccgtcgacggcaactgatttttttccttttttgctggtcatcaaaaagcatgatcaagcatgaacggtgtacattagtacattcatgtaaattttcagccatcagttttttgttcgtcggaaaaactgcagtcatgcataatg

SEQ ID NO: 16257 - DNA, 545 bp, Setaria italica
  misc_feature (530)..(545): n is a, c, g, or t
  Peptide Sequence Number=SeqID_82231
aggagcggctgccgcgtcgccagcggtggggggcggccgcgcgccggaggatggcgaggggcaccgcgcggagctgctgcgcaagtacctccaggaccagatggagctcgtcggcgccgacgccggggccggggacgacggcggcggcggcggcggcgaccggcggcagagctccggacaaagccatccgcagtggtagcgtggggtaagagaggtagctgctgattgtgattgggcgcaaggaacagagcacgccaatcttggagatgaaggctcattagaggattttttttgttttgtttcttgattctccatttgtgtagctgcagatgcggaggggatttttgcttctgtgagtgtgagagttgtattgacatgagagttgtattgacatgaggtgagatcatctcatggtttgctgaatactgatggatcagatagatgtttcaggcagatgaatgattggatttttcagtaaaaagaaaaaaaaaaaaaaaaaaaaaaaacaaaaaaaaaaaaaaacaaaaaannnnnnnnnnnnnnnn

SEQ ID NO: 16258 - DNA, 419 bp, Setaria italica
  Peptide Sequence Number=SeqID_82232
ccaatgggttgccccgtgaaggcagcaaacattttattcaactttctgcatgcaaaacatacgagaacttcaaaccaaaactggcatcaagttagtttggttcttggcataatctaccatctgatgggaaaatgaaatgatgaaaatatatcactcattcataattgcaaatacttacatcacgagcataaatggtttccccaacctgtcgcctcacctcctccacattaccctccgatccaccttgaggttgatgaatcattactctagtatttggcattgcatagcgcattcccttctcaccaccagcaagaatgattgctgcttgactagcaacaacaccaaaagccactgtcccgactttgggttttatctgattgcgataaacaaaaaagtcacaaatcatgtttcatgcagca

SEQ ID NO: 16259 - DNA, 1282 bp, Setaria italica
  misc_feature (1)..(9): n is a, c, g, or t
  misc_feature (15)..(15): n is a, c, g, or t
  misc_feature (32)..(32): n is a, c, g, or t
  Peptide Sequence Number=SeqID_82233
nnnnnnnnngttctnttttagttttttttttnttttttttttttttttttttactttttcgaatatcacttgcattagggttgattcccaatccattctatcatattcgaatatccaaagctgccacatcatatggagatcagtagatgcgatgcgcctataggcgcggctacacatcacatgcagcggacctcagcctcgccgtgtggtgtgtacatgatggatgcgcctacaagcttggctatatcaaaataccagttttctcatctaggcctacgcaaaacattatacagaacaggcaaagccccaatcaacagagtggacggcgaatctgagtcattagacaagatgggcagcaaacatctaactccagcttcaattccgcagtatctccaagtctctgctcacagaatgtgggtctgtgtaccttcgctagtatcttgtttccagtaaggcatcaactagtccgaaatccatggcctctgaagaagacatgaagcgatccctctctgtccactgttgtaccatgtccaatggttgccccgtgaaggcagcaaacattttatcaactttatcacgagcataaatggtttccccaacctgtcgcctcacctcctccacattaccctccgatccaccttgaggttgatgaatcattactctagtatttggcattgcatagcgcattcccttctcaccaccagcaagaatgattgctgcttgactagcaacaacaccaaaagccactgtcccgactttgggttttatccaggacatgcagtcgtaaatagctaagatggagtagagacttccaccagggcagttcagatagatcagaatatcagcctcttcatcaacagcagcaagtgtgacaagctgtgatatcacacgttgtgccacctgggagttaatatattggccaatgaatattacacgatttcccagtagtacagtagcgagatcaagagggccagcaggagtcatgattgccggcattaaaggtggattttcattctcagatgccacaattgtgtttagcctgagagaagaatggcaacgtttcctcttgtcctgctgtgaagcaacaccacgtgatgcaaattgcagtcctcggagagcaaggcgtgctctggctccattctgccggtgcgagaggagcccgaagggagcggagcgggcggcgagcggcgcggagatggtggccatgggcgccattggaggcggagggtgggggagagggagaggggagtgtgagggggtgaggttggaactacgggacgga

SEQ ID NO: 16260 - DNA, 366 bp, Setaria italica
  Peptide Sequence Number=SeqID_82234
gcattcatcgccccttgcccctcccacccctcgctcgcttcctgcctgctcacatcaccattcaccacctataaatccgggcctttgtttgactccccctccctgccccattcttcttgttgcttcttggagagagctcgtcggctgctgcgtgtgcgactcgagagaggagcgagaacgagctggaggatccatggcgccggagaaggaggagccctgcgcggggtaccggcacggaccgccgtgggtgttcaagggcagcgcattgtaccagctgcatttggtgaaggcgtcgacggcgcgcgcctttgtgccccggggcctgcgcctcgtcgaggccttcggctacacgctcggcggcatgtt

SEQ ID NO: 16261 - DNA, 330 bp, Setaria italica
  Peptide Sequence Number=SeqID_82235
acaaacaacctacaacaaggacaattcaacacctcacaggcatcgttcgtgccaaccactgcattctacatcgacttggcatctgccaaaactaggagctcacaaggacccagcagctatggcggcgatcacgggtggacgggcgctcgcggtggcggcgctcctctgcgccatggcggcgatggccgctgcgcagtcggcatccaacgtgcgcgcgacgtaccacctgtacaacccggcgcagaacggctgggacctgaaccgcgtcagcgcctactgcgccacgacagcggcttgttggcgtcccacgtggcgcagtaggcgctgacg

SEQ ID NO: 16262 - DNA, 870 bp, Setaria italica
  misc_feature (835)..(870): n is a, c, g, or t
  Peptide Sequence Number=SeqID_82236
ttaacgttttacgtttagttaccttaaacctacttgtctatttcttactattcgtactaccaacacctcacaggcatcgttcgtgccaaccactgcattctacatcgacttggcatctgccaaaactaggagctcacaaggacccagcagctatggcggcgatcacgggtggacgggcgctcgcggtggcggcgctcctctgcgccatggcggcgatggccgctgcgcagtcggcatccaacgtgcgcgcgacgtaccacctgtacaacccggcgcagaacggctgggacctgaaccgcgtcagcgcctactgcgccacgtgggacgccaacaagccgctgtcgtggcgccagaagtacggctggaccgccttctgcgggccctcgggccctaggggccaggcctcctgcggcaagtgcatcaaggtgacgaaccgtgctacgggcgcgtcgaccgtggcgaggatcgtggaccagtgcagcaacggcgggctggacctggacttcgagacggtgttcaagaagatcgacaccaacgggcagggctaccagatggggcacctcaacgtcgactaccagttcgtcgcctgctgaggaagctcccgcacgtacggacggatgaaaatatgaaataagcgtcgcttagatgcgtggcatgatggaataagattaaatgtaacaaaaaaaaaagacccggccgatggtactagtaccactgaataaatggaatcgcattggaataaaaagtgcgctatttggatgtttatggatattgaactaaaaaaattgcttcattttcacttaactaaaaagagactgccaaggcacacaggggnnnnnnnnnnnnnnnnnnnnnnnnnnnnnnnnnnnn

SEQ ID NO: 16263 - DNA, 352 bp, Setaria italica
  Peptide Sequence Number=SeqID_82237
ggggcgggcggggtggccgcggagcaggaggggagcggcttggcgatgcggccggaggggcagatgttccccgccgggagcgcgttggtgagcggcgaggtggcggagctggagcaggcgctggcgccggaggtgaagatgagcgggccggagccggtgcgtcggtggcccgggcgcgcggccccgcgcggggcgcgtcggaggggagcgggatctcgccggagtggctcctccgcgaggcgaggccggaggcatgggcgggcggggcgcgggagacggagccggaggagcccgaggaggagctcggggtggggtgcttggaggaggagtacgggagcggggagacgggcga

SEQ ID NO: 16264 - DNA, 258 bp, Setaria italica
  Peptide Sequence Number=SeqID_82238
gggggctaaacttcgcatcttctccgcggctgcggcggggggattaatccttctcccgtcagtcgtcgccgccgtatcgccgggcggcatggggctcggcgtggtggcgcagctggtgcgcctgggcgtggtgggctcgacctccgaccacgcgtcggtggtgtccatcaacctgttcgtggcgctgctctgcgcctgcatcgtcctcggccacctcctcgaggagaaccggggctgtgcaccggcgtggtgatcctg

SEQ ID NO: 16265 - DNA, 718 bp, Setaria italica
  Peptide Sequence Number=SeqID_82239
gagcgctcgcgcgaaaccaaccgagaggtctcgaggaggaggaaagagatagccagatttccaagccgattcgccatcccagcccagccagctcgccgtggttgccattcgcgcgacgattctgtgccctcttgctctgctcgcccgcctctgaatcttcttcccttcgccggattttccggtttcctcgggattccttgcccccgggaacggcggcgcacgaggggaaacaaaagcttcgatttttcccctgccgacgagttcccgctatcttgagcagcctgcgcgcggccagcgtcgccgtgggagtttttcccggccaaaattagccatttccccggagctaaaggccgagctcggcgggggctaaacttcgcatcttctccgcggctgcggcggggggattaatccttctcccgtcagtcgtcgccgccgtatcgccgggcggcatggggctcggcgtggtggcgcagctggtgcgcctgggcgtggtgggctcgacctccgaccacgcgtcggtggtgtccatcaacctgttcgtggcgctgctctgcgcctgcatcgtcctcggccacctcctcgaggagaaccggtgggtcaacgagtccatcaccgctctcatcatcgggctgtgcaccggcgtggtgatcctgctgacgaccaaggggaagagctcgcacatcctcgtcttcagcgaggacctcttcttcatctatct

SEQ ID NO: 16266 - DNA, 746 bp, Setaria italica
  Peptide Sequence Number=SeqID_82240
ggaagattcagcggttccttagccagcctttccatgttgctgaagttttcacgggtgcacctggaaagtatgttgagctgaaggagagtgttaaaagtttccagggtgttttggatggcaagtatgatgaccttccagagcagtcattctacatggttggaggaatagaggaggttattgctaaggcagagaagattgccaaggagtctgcatcataagcaatcgccttcacaggcaaccaaaatttaacttttggggatcgacatgtgtgttttattctctgttagccaggacatgtatttacatgcaggaggcccggtcctgccgatggatgtgtttccccctccaccttttccctaataaggatttgcagtgaccgttatgtttggtttactgccatttgaggaagaattatcttttttgatgacggcgataccataaacttgttaattctcaatggaatactggaagtggaatgtctcccatgttcatactgcatagctgttttgaggtcacatgttcacattgagtcgtttgtgaggctttcaatttgttcagagctgaatgcgtagtttgttatcccagcatgatttgtggttcgtttccctcaccttatttcttcactggctctggtagctaggatgaataaatagggaacctctatggtctacatgaagttttgcatatgaaattatgctagtttgtaaattggatgaactatggaggtttgcttttgggtttggggt

SEQ ID NO: 16267 - DNA, 690 bp, Setaria italica
  Peptide Sequence Number=SeqID_82241
cagaagagttctagtttctactattgatcagttttttttctgtacatactagtcatgcgcattgtaatgcgcatgcaacttttctctggaaaatcaaaggtggtgtcatgcagagaaaggtcataatgaggatgccaagatcatcacaaagagaagtagaccactgaagcctaacaggaggctcagggggtgtacatgatgctaacccagccatgttacaccatcaaaaatagttctgctggttagccgagctatgttcccattgcctttgggatgatggttggtctacattcggaaactggattgcactttagagcgtaattcaagtaacattgtaggttagcttcattgatagcacctagctgatgtcaagcaattgctctgtttttgaacatgttaactgggtggtaggaattctttgaaatgtatggacaagggcataaaaactttcatggctactgatgtccctgtattgtatagcaataggccaatagtatatggaaagaagtgcacaagcctttaaattccaatatagacagtcgtatccgtagtctcaagtatgatggacgtagccctgacttaaagaggttacgttctggaactgttccttccagaacccttgtgaaagcaaaatttatgttctgaaatcagttttcgtctagtttttgtcctaattaacttaaaaaaaaa

SEQ ID NO: 16268 - DNA, 1405 bp, Setaria italica
  Peptide Sequence Number=SeqID_82242
aggaatcttgctagctggaatatctgccctataaaagcaggcgttgatgcaaaagagttgttccatttatacattgtattatggattgaagacaaacgtaggatgttactggaaaattgcagactggataaggtcaaatggtcaggagttaggactcagcatatgacaacaccttttgtggatgagatgtatgatttgctgaagaatacattgacagagtatgaagttatcatttgccgatggccagaatacatattcgttcttgagaatgccattgcagacgttgagaaagcggtgattgagtctctggaaaaacagtatgcggatgttttagctccgctcaaggattgtattgctccaaagaaatttggcctcaaagttgtccagaaactcacaaagcgcaattcaacggtgccctatattgtacctgaagatcttggcattctcttgaatacattgaaaagactacttgatgttttgcggcctcggatcgagagtcaccttaagtcatggagttcttgtattcctaatggaggaaattctgcagccatcggagaaaaacttagtgaagttactgtgacattgagagctaaattccgaaattacatgcaagcagtggttgagaagcttgcagagaatacccgtatgcaaaataccacaaagctaaaaaagatcattcaggattcaaaagagttggtgattgaatctgatatccgcaacaggatgcaggcattgaaggatcagctaattgaggcaataaatcatgtgcacaaagtctccgaagtacatgtttttgtagccatatgccgaggtttttgggaccggatgggacaggacgtgctgagtttcctggagaatcgcaaagaaaataaatcctggtataaaggcgcgcgagttgcagtctcagtattggatgatacttttgcctcccagctgcaacagctgctcggcaatacaatcccacagaaggacctagagccacccagatccatcatggaagttcgctctattctctgcaaagatgcaccccgccagaagagttctagtttctactattgatcagttttttttctgtacatactagtcatgcgcattgtaatgcgcatgcaacttttctctggaaaatcaaaggtggtgtcatgcagagaaaggtcataatgaggatgccaagatcatcacaaagagaagtagaccactgaagcctaacaggaggctcagggggtgtacatgatgctaacccagccatgttacaccatcaaaaatagttctgctggttagccgagctatgttcccattgcctttgggatgatggttggtctacattcggaaactggattgcacgtctaagctaaattacaaagtaaacaaattaaagtaaaaggttaaaagaaaacttaaaacaaaa

SEQ ID NO: 16269 - DNA, 1031 bp, Setaria italica
  Peptide Sequence Number=SeqID_82243
cctgatgttaactcaaatgatgctgagcagagagaagcaaagtactgcagtaaagcatgcttgaaaagatacctagaagcccgtaactggaatgttgccaagtctagaaaaatgttggaagaaagtctcaagtggagggcagcttacaggcctgaggacattcgctggccagatgtttctgctgaaggggaaacaggtaaaatgtacagggcaagtttccgagacagagagggcagaactgttgtcgttatgagacctacaaagcagaatacttcatctcatgaagggcagatacggttccttgtacatactttggagaatgcaatcctccacctgcctgaaactcaagagaaaatggtatggttgatagatttcacaggatggacaatggcccatgcctcgcccataaagacatccagagaaactgcaaatatcctgcaaaatcattaccctgagaggctggccattggatttctatttaatcccccaaaagtatttgaagctttttttaaggttatcaaagttttccttgacccgaaaacaatcgagaaggtgaactttgtgtaccagaaggatgaagaaagcatgaaggtcatgtacaagtacattgatccggaagtccttcctgtagagtttggagggaacaacaatgtggcctacaaccatgaggagtactcagagtcgatgatgaaggatgacatcaaaacagctaacttttgggcagatgatgcaaaaactgaccatgctaactctgccatcaatgggaccttggttcctgaagttacaccacagccatcgctgcttgctgctaaagctagttgaggatccgcttgctatgctgagagttgtctttgtagctctgtatcaccaaattgacgagttgaaacatcgttcatattaatgaaataagagacatggttagcatggtcaatactcgaattcattcagtataaggtacgattggatatcgtcatgggtgatttgatgcccaaagagatggtgtacaaggtactgtccagatattgtacttt

SEQ ID NO: 16270 - DNA, 335 bp, Setaria italica
  Peptide Sequence Number=SeqID_82244
tcacgaagtacccatctccgacatcacctatccctgtgtttcgtggccgcccattcagagtgtggttcttgcagaggcaacgccgaggtgctccggcgccgctcgccgtcgcctttcttcggcgccttgcgttccgagaccttccagagcttgacggtgcggtcgttcgcggagagcatgcacagggagcggtggttcggccgcgcgcaccacctcaccttcttgatcttctcgccgatctccaggctgtgcagcacgtcaaactccggctcgtggctctggaactccatcgcgaagctgtacctcggcggcggcgccacggcgtagtccgtgcg

SEQ ID NO: 16271 - DNA, 381 bp, Setaria italica
  Peptide Sequence Number=SeqID_82245
cacggccacacccattgccgcaaaccctaaccctccccaatgtccttgctgccgccgccggcttcgcccatggctgaggccgaggccgaggcccgcgactgggcggagatgccgtcggacgctctcgccgccgtgttcgggaagctggacgtggccgagattctgacgggggccgggctggtgtgccgcgcgtggcgccggctcgcggccacggaccccacgctgtggcgccgcgtggacatgtgcctccagggggacctcctggagaccgaggaggccgaggccacggcgcgcggcgcggaggccatggcgcgcgccgccgtcgaccgcgccgcgggcaccatggaggcctttctgggccgacgacttcgtcaccgaccg

SEQ ID NO: 16272 - DNA, 325 bp, Setaria italica
  Peptide Sequence Number=SeqID_82246
acgacgggcggtggttgatgcgctcctgcggctcgagcgtgttgtctatggtctcgtcggggaaatagtcggtgctggaggccccgatgcagtggaggatgcagtccatggagggcttgtcggagacgagggcgcccccgaggcaggagtacacggcgtggtccctctcgcgggtcctggactcggcgtcgcggctggacccggaggaggcgcgcgccgcggcggcggcggccggcggcgatcgggtcaccacgaccgcgcgggtgaagttggcgacctcggggcatatccgtcggcacaggctcttgcagaatccgttgtcgat

SEQ ID NO: 16273 - DNA, 338 bp, Setaria italica
  Peptide Sequence Number=SeqID_82247
gccagagcatagccatcagcacagcacacaagtcaaaccaaactgatacaatttaaaagtactattctcctggacacttgccaaccccagtgagaaagttcaactgctcaaccagcgtgcaaaaatgaaattcctaagttcgtgtggccctgtgggctagcataagaaagtaagaaacaaatacaagtatacaacatcctgatcactagaaagaataacatctgaaaccatgtagcaccttaatttgggatttggagcaatgaattgattaagagcaaatactgcatcaatggggacatggcaacaagaaaccagagcatacctgaacaaggacgggg

SEQ ID NO: 16274 - DNA, 405 bp, Setaria italica
  Peptide Sequence Number=SeqID_82248
gggccactggccgctgttcgtgcagttcgtgcgcgctctggagtgccccgaggaggcccacgaggacgacctgccgggcggcattgccggcggcgagcggctcaccgtgccgtcggcctccgccgtgcagggcgacgccagggccgtgcagaccgtgtgaatcgacacggcattatcgcgtcttctatatgtacatatgcagtatagggtatagcactgctgcaataatagcattattagtatagcatgatccactcagtaggattaagcactaaactttcgctgcgatatgagatgagttgatcgttgtatcagcgggaaccatgagcgggagtggaccactatattgtactactcccatctgtgcatcttttagtcgtgtcgtaaatggtgtatcttttcgaa

SEQ ID NO: 16275 - DNA, 1238 bp, Setaria italica
  misc_feature (1)..(13): n is a, c, g, or t
  Peptide Sequence Number=SeqID_82249
nnnnnnnnnnnnntcggttgtccacttttgcttaaggatcaggactttagaggtcaaacggtcaatcaagatgaagactgacaacagcataagtcacagtgcaaacccactacaagcggcagcacgtttcaggcttccattcactgatccttacaaaaagaaaaaaaaaaagaaagggaaaaactgctccactgctctcgtcatctacattaaaaagcctccatacaaggtgtttattcagctactactacaatgtcctcaaggagatgcaagctgagaaggaagtgacaggttcccagaatttgaagcggcataatagcagatgtgatggcacgctatcgcaaacatacagaaaacccattcaccctagaaggaaaaatgaccttatataggtcttttctctacagactctgggcagcgtcactgtacaaccagtccttgcatcacacaggagttctcacagatcacggggagcttctttagatggcattagtcctcccatttgattagtgaaccaaagaggaaatgctgcatgatcggcactttctcaagcacctcggccttgtacatcttgagcagcccactattcaccttcttccaatttggcacaccactgatatcatccaacatcggtgaatgctcagcaaacggccccttctttatcttcttcacatatgcaacacatgccaggtacatgtactccttggagaagttctccaagatatctggattgtgaatcgacttgggcttcatgtacttgtgatcaataagctgcgcggccccaaatatgaagggcaggaaatggaaatcgtcaaggccccacacgccatgggagcccgcaggctccagctggtacgtgtcctgcagcgtacgcatgaggttgaggtactctgcaaagacgcgcaggacgacggcagggtaatcaggctcggtgatgagcccgagcctcgcgaggcagtagaggaaggcggcgaagttggtctcgtgccccgtcccgtagtcgatgcgggtggcgttgccgaaggagtcgaggaggtacggcacgagctcgacctcggcgccggcgaggtccgcggggacgcggcggtggatgtgatccgcgcgatcaagtcgttggcggagtcggtgagcttctcgtgccagaggcgaaaggccgggttcccgtagcgggagttgtgcgggagcggcggggtggaggcgacgagtgccgcgagcgcggagatgaggccgaggagcgg

SEQ ID NO: 16276 - DNA, 231 bp, Setaria italica
  Peptide Sequence Number=SeqID_82250
ctaagagacacaagataatcctccttggagatcatctgcatctcttcaaggtctcttgcatagtcagagactggaaaatttatttgtgttccagctccccagtattttaatgcagcaaggtcataggcccttgctgcagcctcttcgtcgtcatatgcacctaaatatactgcaatagcaattgtgcgatgtagtttcccatgcaaaagtgtcaattccatcaaatcataa

SEQ ID NO: 16277 - DNA, 541 bp, Setaria italica
  Peptide Sequence Number=SeqID_82251
atcgccgagcctgcgccaaagggatccatggggactagcaacacggcgccgatcgccggcgccggcccttcgaagcagccgccgccgccatccaaccacccgtcgaggccgactccggcagcgctgaaggacggcaagccggcaggcgtcaagagagaagggagcagcggtgccgccacgggcagcgggacgccgtcgacctcgaaccaacaggagggccccagaacgccggacgccaagacgctgagaaggctcgctcagaacagggaggcggcaaggaaaagcaggctcagaaagaaggcctacattcagaacctagagacaagcaggattaggctgtcccagctggaacaagagttgcacagatccagaaatcagggagcagtgtttggtggtggagctctttctggcagcaatggcggactaagcccagaggcggcctggttcgacatggagcacgcgcggtggcaggaggagcacggcaagatgatgcggcacctgcgggcggcgctggaggcggccgatcagcagcaccccgcgg

SEQ ID NO: 16278 - DNA, 475 bp, Setaria italica
  Peptide Sequence Number=SeqID_82252
gacaccatctcgtgtcagtcttctgcgccaatccggtcgcctccgtgcaatcatcacggaagaacgaaactgccttgcctgctcctagagtttcttctcgcaagcaagcgacatcgacaagccaaaagcctctccagagtccagcatcgatcacttcacttccatgaacgctgatggcacacaatctctgcaaaaggaagatccgattaagcgaagtagctaaaggtttgtggaaaaattcgttgcaatttccataaatcacaagctgcgcgtgaatctgaatcgcgctctgttttcctgatgcccagcttccttccttcagtacagctttcgatttgccggagcccacaagtgaaccgtcgatgtccggcacggcctccttcgaccgtggaagagccccgcgacatgcgatctctcattctctcctcccttcggcggggccctccaatccgccgcagttcagttccccattccg

SEQ ID NO: 16279 - DNA, 650 bp, Setaria italica
  Peptide Sequence Number=SeqID_82253
gatacattctggacacttaaaggctgcaggcagtcatcagggtccagagagaggatacggatggtgttatcataggatcctacagcgagaaatctggacctttgcctcccctcagggaccggtgcaatggccaggcatgcaacatcgccagacatgtcctgcttctccacctccatgagctgaccagtcatgtccatctcaaaatagatgagctctccaccactgagagcgattaccacctggagccggtttgatccaacctttgtaatagttttctttccaggcgtcctccactcattgacacggccatcctccctgatgtgcctgataccacttggatggacctgcatgagagagtcctcaccaaggagcgtgactgcaagggagtgtgtggtatccaggaactggctgtcactgacttcttcaatggtctcaccaatagagagcacaagcgtaacattagcaaaggacacgacaatgtaggcatcaaacatgtcattgatattcttcttgacagtccacacagcaataggctctgcgggcagcatcgatcgtgccatctcactaatggcaaggccgggcctcaggatgcgcagcgtggggcgtggaccacggccacaggctgtgaacaactggggtgtttcctcgta

SEQ ID NO: 16280 - DNA, 334 bp, Setaria italica
  Peptide Sequence Number=SeqID_82254
ttgacgaaggagaatggaggtcttggtgccgacgtcggcggcgtatcccgcgacgcgggcgttgttgaggcggatgacgaggtcgtgcgcgtcgatctgcgcgccccggccggagccgaggaggatgccgctgttccccacgacggcgcaggtggggaagcgccgcgggcggccgagttggcccgcgagttcgcccatgacgccggcgacatcgccgccccggcggcgacggtgcgcgaggtggaaggagcggagggaggcgcggaaggcggcgaggagggactcgtcgctggggagcgtgtcgaaggggacgcggaggcgggagacgacccgc

SEQ ID NO: 16281 - DNA, 879 bp, Setaria italica
  Peptide Sequence Number=SeqID_82255
taatttgttacaacaaacacattacactagctaacaattacaggttactgacctcaccggtcaccagtagagcttcactggcggcatcttgaagcccggtgcctcgtcgaggaatggcacagcctccggccgcgcctggaggtcgcggtagaactggtactcggcctcgtagtcgtgcaggtcgagctccttcttctggttggtgtggtaatggtgcttggctcccaccgccttcccgaacccgaacaggctcacctcgtcgcaggcccccagggccatcaccaccgcctgcagccccgaggagtagtggaagtacctctcgtcgtgcctccgcgtccagttgcccggcggctccccagtcgtggagacgagccgccgcatcgagtagtacttggcgatgcgcgcgcacagcgcgtcgaggcgcgcgtcggtgacgagcagcgggaacggggacgccggcgtggcggtggcgttgcagatgagtgcgtcgaggaggtgcgccggctggcagacgtacatggccatggggaccgtgcggccgtaggggtggcaggagcagccgccggtggtgattgcagagcggacggcgcagtagtggaggatgttggagttgacgaaggagagcgaggtcttggcgccgacgtcggcggcgtaacccgcgacgcgggcgttgttgaggcggacgacgaggtcgtgcgcgtcgatctgcgcgccccggccggagccgaggagaatgccgactagttcccgacgaacggcgcaggtggggaaccgctcccgccgcgggtggcggtcgaggaggtccccaatgccgcccatggcgacgccggcgacgacatcgtcgtcgtcgccgccccggcgccggagctggcgtcgcgc

SEQ ID NO: 16282 - DNA, 799 bp, Setaria italica
  Peptide Sequence Number=SeqID_82256
tcctttgtagcatcaccttaatgctcccaacaccacgatcctttatgccgcagggatctatcagtttgatgggggttaagtcagtcgtgacatttagtgctagaccatgctaaactataatacgggtgccacgaatccctagcggtgcaacttgctaatcacctgaaagctgcaatcaagcctggtgtctaaatcgagttgaaaaagttcagcaaactctttgatcatagaattatatgccatatccatcagtaatgtgtcatcaatttctgttccgtgagatgcctcctgaaatatctgcttaatgctaccaacgccccggtcctttatgccacagggatcaatcatttggaatggggtcaagtcagttgtgacgttcagcgcgaggccatgataaactatcatacgggagccatgaatccctagcgctgcaactttctgatctccaacccaaacaccagtaaggccttctacccttgatgccttgatagagaatgctgatttcagtgcgcggatgatcagttcttcgagtgacctgtccaaccaaatgatacgtcacttccccaccacgattgatcttatgaacctcaaaaggagcatcttcctttttgaaatggaggtactcctccttgctgacggagcccaacgtataaacaggtggatgctgtaaagcaatcaaggtgtccgagtggtcttcgcctctgtctagcaaccctatcctcctcttaataatagccttctgccaagcgtaagcctccgcataaggaacgagctgctgatgcaggtcgaagcactcgca

SEQ ID NO: 16283 - DNA, 962 bp, Setaria italica
  Peptide Sequence Number=SeqID_82257
tttttattagcgccgggtcgtatactcgtatggaagaattggtaaatacactgttctttacaagaaaagagcactacatgatgctataaacactgaagatcatcaagagagacgccgaataaatccaatccagaaacctcctgtacctgaaaggtggatgtgctgctgctatacagactggactgcagcaaatacggcaaaattcatttcgaatggctgcagcacatgcagcctccaaataaaacatcatgcagtaggttgagaatgagattgttatctcaatgaaaactgcaacgagggctgatgcctaaactgttgctgtatccatcagcaatatatcgtcagtttcccttccccttccatcggattccttttgtagcatcaccttaatgctcccaacaccacgatcctttatgccgcagggatctatcagtttgatgggggttaagtcagtcgtgacatttagtgctagaccatgctaaactatcatacgggtgccacgaatccctagcggtgcaacttgctaatctcctggagaagaaatggagaggaatcattagtgatgcctaggtaccatcaatttcacaagcattagaaaattttgacaaacgaaaacaaaaactggaaacttggtgagagaattaaaaatttcctaaggatagtacataccaatccaaacaccagtaaggccttctaagagaacatggattgcagtgcacggatgatcacttctgaccttaggtaccaatcaagataccttccgtgatacacattgataattgggtgcaaaagctgtttgttcagttaagtcagggcccggcccatgaagggtcaacgttatcacagcacagcgatgcagtgtactctcccaagaggtcaatctagattattcgtgaaaacctaactagctatgtgaaactggtatacacattaccctattgagttcttgatgatatagagac

SEQ ID NO: 16284 - DNA, 356 bp, Setaria italica
  Peptide Sequence Number=SeqID_82258
gacttgcatttcgtagcttgcatgttcaccttactacttgctcagttgcatggttatcattcaggtctttcaagttttggaatgataggttaaattacttgatttttcctattatttatcattgggactatttggaaattttttgcctttattgttgattaacagttattctcatgttgaaattgctttgtttgtatcatgtcttggctgcttgagtgtaactttcctatttactatttaccctgcatttcttttcgaataaattgagcttctggtgatagttggtaggttgagaggagattcaacattcaagaacatgtaggtgtagtgcaaatgtatttttttatgtcaatgat

SEQ ID NO: 16285 - DNA, 501 bp, Setaria italica
  Peptide Sequence Number=SeqID_82259
ggtaatctcagatctgatcctatctgtcctcatgtgagtgaccgagtgactgggaggggactgctggctgggctttgatgatggcttcgtcttcctcctgccgccaaccagctgccctgcttcgtctgatcccatcaccgtctcatctctgatctctctctccgcccaggcggctgctcctgctcactgcactagtacggcaagagaagggagggacatgagcggcgaggaggccgccgacaagggagggggctacggcaccttccagggcccgcccagctacccgcccccgcgcccgccgcccctcggcttcccccagcccgtcccgccgccagccctctctgctgcccaccaccgcgccgcctaccacaaggccgccgctcctcccgctcaagattacgaatcaggtgtgcgtggacacggtcatgaccgcctcccctgttgcggcatcggttttggctggttcctgttcgtaatcggcttcttccttggtgctattcc

SEQ ID NO: 16286 - DNA, 250 bp, Setaria italica
  Peptide Sequence Number=SeqID_82260
agccggccaggggcagaatatgactggctagctcctctcgtaaacgctaccttacatactagtatatgacaagctctgggctgttcaattacaattcacaactctttgttgaacctgctcccttctagcatacagacgctgctccagtctccagatgagaaattttcggctgagacatgttatcagagaaatcaaaactatccgataggatccattccacctagaattcaggcccatcctatttatttga

SEQ ID NO: 16287 - DNA, 1537 bp, Setaria italica
  Peptide Sequence Number=SeqID_82261
tttttttttttttttttttttttaatcagttgcatatcaccatggatttacagtttgtacacgcataacgcataaacatcatatatggactaaaatagctggggccagccggccaggggcagaatatgactggctagctcctctcgtaaacgctaccttacatactagtatatgacaagctctgggctgttcaattacaattcacaactctttgttgaacctgctcccttctagcatacagacgctgctccagtctccagatgagaaattttcggctgagactgcaatgtgatttggtaagaaacacatgaagctcctgatgcaaggtcaaagcaccatgttatcagagaaataaaaattctcaccatgtcagcaattccatgaagctgcagatgcaaggtcaaagcaccatgttatcagagaaatcaaaactatccgataggatccattccacctagaaatgtagcccatccatttatttgaagagctttcttagcccattgaacaatgacagagctctaagttcgccacctctcatgtccctcaatcttctacgcaatatatattgtgtacgatacaagattctccgttcactgatgcatagcttgttcgctagctgttttaacagtaatgtcctgtttgcttgcttagcatttattgaaacttgtggagagccattgccaccctctaggtacttcgtatactttgctatattagattcgcagcagtccaggataaactgaagagcctgttcttccaattcaggataattgaatccaggtttggatgaatttttattcgacgcagcaatagccatctcctcaaagcgttgactcatgtcaggaggactgaccacaaggaaggcataagccatcagctcaactggccatcctgtaacccgcaatgggaaactttcagatgctgacaaaccatttcgctttagggcttgtagtttctctttgtagcacttatcagatttgtcaagagacaccagcaactcaactgaatcatttgggtttgttccctcttttggaacaaaaccatatgaaagcaacagctcaccactggatttcttcccataagatataaaaacctgctcacctggttgatatgagcggtcagtggtgaaaactattccttgtgatgacttatcgaagtccaagaatgtttccacctcaggactatggttaagcatatctgcccaaggaactaatgcaacccttccatccattgatggcaaacggaccaggcgcgagaagagaatgccgaaggaccatagaaatgtctctatgttatacacctcttcagggaataaatctgaatgtttagaaaatatacggtctcgaaggtcgttgtatgtcccaatcacatcggttatcctctgaattgcacgttccctgattggcgaagccaccaggtatgcatctagctctgcacgagtccagtacaaaagggagtaaggctgccttggcaacgctgctatgtagttgctccacttcgaggagccctctaaactggcttcacttatgaggtaagg

SEQ ID NO: 16288 - DNA, 342 bp, Setaria italica
  Peptide Sequence Number=SeqID_82262
ttcttcttgaccatcatgtcttctggtgcctcaatctcacacttcataatgtagctgtgatatgggggtatgcccgatttccacaccaggacgtccagcttcccatgagcttttgcacttgtgtggacttcatgcaacattattttcggaacatcattcagaggggaacgtgtttgaaaatgaagaactttgaccctcacggaaatgttggacagagtccaaacatatgcaatctggctcttccaaagaagagactgtggatgttcaccaaagatgaggatattcctctctatattgtttctctgacattcaaggatcatgttccaaaaccaattgtggata

SEQ ID NO: 16289 - DNA, 411 bp, Setaria italica
  misc_feature (379)..(379): n is a, c, g, or t
  Peptide Sequence Number=SeqID_82263
acaacgacctacacgcccacatgcagacatatatgtgatgtgttctagttagatagagaatgatcatccatgacctcaccttcacttcgcttcttctgagatgatgcaatagcaacaagatgcatgtcacaagggagacgactaagctagttggatcgacctcagctcaccatcagcatctgctactactactgccttattagcttgttgatgcatcctgcatccatccatccatcgtgcatggaggcaagtggcaaaggcttggacagctctactatggatcatcagctgcagtcgtctagcggcgaggccgaggaggaggaggaggatgctgccgccgatatgcctcccggcggcggccgtgacgggagctccgccngcaatagcagcacggttgagctgctggatgag

SEQ ID NO: 16290 - DNA, 493 bp, Setaria italica
  Peptide Sequence Number=SeqID_82264
ccaattcggaggaaacaacccctagcaatcgtagcagccgagccaaccctgcaggccaggagctctgctgcgaagcatgggctccctgggacctagcgtggtgaccctgcggcagcagccccaagccggcaagctcaccgcagcgacggccgccggcggcggccaccacgatcagcagcagggcggcggcggcggcggttgggttccggatgccgctgcactacccgcggtacaagaaggcggactacgaggcgatgccggagtggcacgtcgactgcctgctccgcgagtacggcctccccgccgacggcgacctcgacagcaagcgccgcttcgccatgggcgccttcctctggcccgaccagtactgatgatcgctgccgttggcgtacgccgtccctcacatcactgaagcacggatggagattcattctccacgattcgtcccgtgatccaatcgaatctcctgcggaatcatcatcatcgtgaaata

SEQ ID NO: 16291 - DNA, 743 bp, Setaria italica
  misc_feature (732)..(732): n is a, c, g, or t
  Peptide Sequence Number=SeqID_82265
actaacacaacaacacagacatctcctctccctctcactcacgcacacgcctgcacgcgcgtgagctctcacacacagaaagcatgggttccctaggcccaaccaccatcagtagcatgagcatggcgaaggcggccggcgttggcacgaagaacagcgcggttgctgccaccgatcagcagcaagctgcaggccagaagaactgcagcagctacgccttccagatgccactgcactacccgcggtacaagaaggccgactacgagaccatgccggagtggcgcgtcgactgcctgctccgcgagtacggcctccccgtcgccggagacctcgacagcaagagaaagttcgccatgggctccttcctctggcccgaccagtactgaagcgctgaattaccaatccgggattgacaggagaccaagaaattttcagtagcaggaggccggagcttagttatccgcagtggtgcctctggcgacctgaattctagcttctatccctggcgagaacactcatatcagaaaagaattatgcgcggtgttgctgtcttgctgatatgccaagtatagttcttgttctacgcaccggcagcaatctagcattcctgttctgttttgcacaatcatccgctcatgtaaccaggatcgtatatgcatgctgtgctgcaattgatacatgtgtgcatctatcgataattcaatatatgaatcagtaagaatatggatggtnccagttctatt

SEQ ID NO: 16292 - DNA, 640 bp, Setaria italica
  Peptide Sequence Number=SeqID_82266
agccaagcaacatcaacagcagcttcttgctgtctctccagagtccctgcgcgccatgggatccttgggccctaccgtgaccgtgagcatggccaagcccaacggcggcgtcggcggccagccgccggagcaggagaggaacgagggcggcggcaggtgcggcgtgttcggcagcggcgtctgcggcttccggatgccgctgcactacccgcggtacaagaaggcggactacgaggcgatgccggagtggcgcgttgactgcctgctccgcgagtacggcctccccgccgacggcgacctcgacagcaagcgccgcttcgccatgggcgccttcctctggcccgacgagtactgaactggagaaggaagctcaccgccgcccgggcgtgatttcaccctgccaccgtatattcagaggacgaggctgcatctatctgcacgcagcttcagtaataccacatagtatactacatagcagtagcaacctgattatgtatctcgtcacactcactatttagaaagagggtcatcttaacttaatcatctgcgtgtaatatgacacagaggcggtgaatgcgtgtttcttgcgccctgtatggctatggaataagatgtgtttattatatctaaaaaaaaaata

SEQ ID NO: 16293 - DNA, 707 bp, Setaria italica
  Peptide Sequence Number=SeqID_82267
ctttcactacagatctgcgaacatgcctgcctttcccgggccatgcttgggagctctatgtcttctcaacttcttacaaccccctaatctccgccataacttcccctctttcttcgtttccgcagaggcccttgggttaccatctttgccctgtgctattttttggcccagaactgacggcacttcgctgcagcttgaagtttcagatggaacagaagtacacaatgtagactccctgctaccatcaccctctaaagagcagactaaaccattcttcaagcttgccctaggatggcacttcctccttacattgtccgcaaagaacccacagcatgtgacaacagcattgcctacgcgcctgtgatccccaacataaccaacaccaacaggcaccagtgaagaactaaacccaatcaaatctggccccagctgcgctgggctgctggcaagattgcgccttctggggtccccaggaccggctggcgtgcggatcctcagggcagccattcggatttgcaaacgggcatggatctcacacaaatacgataaaagaagaaaccaagaagtatctcagcgccactccaatcccgcacaggtatatagggtgttgaaaacagaggcggcgacggcgcctccggacgagagaaggctctagtgaaggattcccgctagcttcggctgcgccccctcgccggcgatgagtcgca

SEQ ID NO: 16294 - DNA, 517 bp, Setaria italica
  Peptide Sequence Number=SeqID_82268
gttgataggtcagcacagcgaattcagggaagtcattttcacatgtgtgaatcctgttagctttctgcaggcgaacgttattacttatatgtccccagtttctacgtatcagaatataaggtaacaatagactactcgcaacgacatgcttttgctaaaattgaactgcttcagcttgtatgacttccacaaaagattcagtattgatgataattccaacattgcagtgtatttctaagttctgcctgttttgattttacttaattacattgcagttacttggcaacataaattttcaataacggcacttcttgcagtgccctattctgttattaatatgcgccctgataaagctgcagtatattttttatttggcttatgttcaataaatttgtgttcccttgttggtggctcatgttgggtacttgggtttcagctctagcctattgcaacttcaccactaaaagcttcaggtgccctcaaacaataatgaagttccaaattttaacggcaagga

SEQ ID NO: 16295 - DNA, 1049 bp, Setaria italica
  Peptide Sequence Number=SeqID_82269
ctgttcttctcttctaacaactctttttccattttagttgcactccttgatcattaaagacatcgttttaactttctgcctcctattagggatgtatggtttgtaagcaaaagacactcttttggcgctgtgggtgttgttcagttgcagcacatacggagtatgcaccataaccagtgattcatctaaaagacaatacaaagtgcaatttgctggaggcgtccttctgattggcttctgcaaaatgaggtctatccttttttccccttaaaattggtcacttcatgttgtcatatattaaatgaataataacagcttatccagtctaatttgataaacaggcaagagggaaactttctagtataagtattaaaataatttatgtgcatctagtcattgtattttctccaagctcagtgctgattcctccatcacatttaatatccttttgtttcatccctagatccttggaagattaatactgaacaagaataagttatctttgaggtttagctaggacaatattatcacaatgcatccatacacccttttgttaatatttgtaatggttgaggtggctgacaggaatactttgtttgctggtgacagaatgctgactttaccaacagtatagaggtgtgtgtatgcatgacataactgtacatttgctatcttttcttctatgattatttcattcatgtaaactgtgcatgttgttttcttgaataaatcattttcagagcttcttttgcagcttgtctttaactctttataatgacagtgctgggtaggtttcagaatgtgtttttattactcttaaagcagaagaaaagttaatctaaaataatgttttaggacttgtaccaccatttgtttgcacggttgaccactaatatgtgtattaaaatcgccgcatgaaaatgttattagtagatattattaccatttttggttttggtgtttatatataaaaaaaatgaccatgttgcctctttgagactgggaagtcgaaaacaccacattcttagaagtgatgggctattgttttt

SEQ ID NO: 16296 - DNA, 417 bp, Setaria italica
  misc_feature (352)..(417): n is a, c, g, or t
  Peptide Sequence Number=SeqID_82270
gtaaaaacgtaagtagtaggtagaagaagagagagagagagagagagagagaggtttctatgattttccccccttttgtgtttggtttgaaattgtaccagtgagtttgaaacgccacctgtgctttgtttgagcttgaaaaatgagtgtgaggttgagctccttgtacatagacacatgtttgctcaagtgccttaccttggaattgtattgtactgtatttgtggagtattgtaactgtacagttgtgtgcatgggaggtctggttgttagagtgtatctgtcccagctttttggtattaaatcgcctgtcaatttcttggtgacccccagaaaacttaaaaaaaaaaannnnnnnnnnnnnnnnnnnnnnnnnnnnnnnnnnnnnnnnnnnnnnnnnnnnnnnnnnnnnnnnnn

SEQ ID NO: 16297 - DNA, 312 bp, Setaria italica
  Peptide Sequence Number=SeqID_82271
cgccgtcgccacgtcctgcacccatctccccatcctcgacccaccaccaccagtccaccacagcacacctgaaaaccgcaaatcacttgggtagttcaagaactcgcacatctatgcgattgttgaatctgtgcctcctgaaattgcttcaagaacctttggcatgggaggcacatcgaccttaatcaggccctcaagaatccggactacttctcccatagtcagtctgcgggactcgtgatcctgaatacaccaacaagcaactcggcaaggccctttcaacctcttccagattgatgccatcgtgcatgt

SEQ ID NO: 16298 - DNA, 994 bp, Setaria italica
  Peptide Sequence Number=SeqID_82272
cactgtcttgcaccaggggcttgtccgataagtgctttgagattttttcatattctcttaacagatccgtagcaccacctaaaatacttaactcaagattttcctctaagtgtccaagatttattctagaggaaacagatctaaaaaattcaatcatgctcaatacgagtcgttcttcaagttcaaggcgaacaggtgctacacttatgtttatacactggtaggaaacaaatgagacatctctggttctccatttagctgcagcaaaccgcagcacaggttctgtggtattggaaagattgtcacttgctgatctcagtttagtatctttactcttaaaaaattcatggatttcccttttgactgccctcgaatgacaacatgacagggtgtgggctatcagggaactgattatcgatttgcatagattgtatttcaactgtaaatcgctgctgatctaaactctgcatggcaacgatcgtcatatccttggcagaaacaaacaacaattcctggggagaagagcttattaaagatatcgcgatgaatggtatgtgtatgttgataacttcagcaaagttcatctcaagctccagtttctgatcagcaactttaggttcctttggttcttttgtttccgtattgtgacagtttgaatcaataacacttagcaccttaattgctccttctgcatgtactgacatgcaaaatttcctttcaggtttctcagatgtggatggtagcaacacatgaacatcatcattgagaatgtccagattgaatgtacccaaacttcgttctccaggaatctcaacagtaaggcgatgagaatagcaaggctcatcccaagcatattcacaggatgtgtagggataaacaattgttcaatagattcacatctctgctgatatatccgcaatttctccatcgaaaaattgtcgatcctgtaaggtaacaaaaccaagtcttgtcatcagaagcagaatcagtactg

SEQ ID NO: 16299 - DNA, 1906 bp, Setaria italica
  Peptide Sequence Number=SeqID_82273
aatgtgtttcgacaaaatttcctatacctacatgtgtacactagtctgcaaaaccgaagcgcgtccagctgcgccacggtggatcacctatgaaacactgggttacttacaaaatcacactagctcccccatgtggtagactaaaggaggagacatttgtcatctggcataaactgtacaagtcgcgtgcgcataaagacctcaactgatgttgcttcggtgtaggatgttcttatcccacctccgtgccctccccttgtcgatgagtgcctctagcacctgcagtgtgccttctgcatcctcaacgtttggcacctcgatgctgaggtgaaacagggggacaaaggccgagttcatgaccctgtttctcacgccgcctcttttgtccctcggcgaagtctctccattgctcccaacaatattcacaacctccagagacctgtccagatgaacaacgctcttgaggtgcatctccgtgtcaattgaccactgaggatcaggaggaacacccacaaactgaggtgaccctagatccaccaaatatgggcttgagactagcagaagaagcttctcggtcagcacgaggaacttcccaggctccttgagtgttttgcacatgacaaatgtctcctcctttagtctaccaccatcagctcgggcaagcaatgatatgccgatggcttcttcccaggagtacggaaacaaaggacgatctctggcaacaggcctggggaaacgaacacgcaagcggttggattcatgagggttgcttctgtttcttatgctctgggcagttctgcctgtggcttcaagaatgctagccataggccgcgccacaagcccagcggttcccattgctaaacctgagatgaccccaggaagaccatgtttctcagcaccccggattggtgattggaggagcccagtcagaccctctagaaacccattcagtactccttccccatgcaaacctagctgcctttcccgttcttccatttttgaagtagcttgctcatcatacgtaaaggcaacaaggcccttataagcagttttactgaagtgagaagtggcgctgctgactgcataaactgtacttccaataagagtttttgaaccttgtgctaaaccgtttaatagttcaaccggactctgtaatttccctttccttgaggcagatatgaagtcctttaaaccaaacccaacattcctagcaaaacccataggatttcctataacgccagcagaacctaaaaccttgtaaagttcatggaggatttgcctgctataatgcctcacaagaatgtcctgaacagattgccaactggccataagattttccaccattatttctccaaggtgaactggtactccttcaacatctaagagggccataagacctctctggatcgcagtagtgttgttgaaacctgtgctgggatccgaaccacattcattcctactgagccatggtgtgcttgtaaaactgaaagtcaacttgacaggagtcaactgaaacaattcaatgtgcacctttttctgctttctcgctaataggtgtatctgttgccatggagcaccaactggaacaacagaaggcaacaattcactgtcttgcaccaggggcttgtccgataagtgctttgagattttttcatattctcttaacagatccgtagcaccacctaaaatacttaactcaagattttcctctaagtgtccaagatttattctagaggaaacagatctaaaaaattcaatcatgctcaatacgagtcgttcttcaagttcaaggcgaacaggtgctacacttatgtttatacactggtaggaaaacaaaatagaagaacaatactctaggttactaccaattttaagactagacaagacaaaaccgacaagacaacaa

SEQ ID NO: 16300 - DNA, 367 bp, Setaria italica
  misc_feature (356)..(356): n is a, c, g, or t
  Peptide Sequence Number=SeqID_82274
gcggaggaggccaccgtgctcgccgaggtgctctggggcgccacgccgtagctgaaagctcctaccttgaccgctgactttcggggtccacgtgccccgcacgctgtggactcgtgtggttggcgtgcgccttcttctaccctttttttcctttagttttttcgttttgtttttgtgaatattagatctcttggtgtagtgtagataggacctggtcgtagagacgactccgatccatgtatgtacatggattctgtacaggagagtcaagaggtgacaattttgtaaacctgtggaaaagaaaactggcagaaatgaacagatgattagtgatgacaaaaaaaaaaaaaaaaaanaaaaaaaaaaa

SEQ ID NO: 16301 - DNA, 325 bp, Setaria italica
  Peptide Sequence Number=SeqID_82275
gaaaggcgggctttggtgtacagctctgaattgggcatggccaattttgatgtgcttgttgcaatgaagttgtcatcagtgatgttgtcatccatgaagttcccagtgctgctgaatgcccagtttgagcctgggcttacatacagcaatgaagcacctttcggtgttgtgtcagcttcgtatttggtttggttaataattacttctttgtcaccacaattgatatgcaaagaagtttgatattctccattcagagcaacacatgggaaattccttttcaagcatggctgaactactattttaatctgtttctattttctagtta

SEQ ID NO: 16302 - DNA, 1138 bp, Setaria italica
  Peptide Sequence Number=SeqID_82276
agaatagactaataagttgagggttgtgactgtgtattccacacagcttctccgttctacaataacccaaaagatccccaggttgagttgatcgacccagcagttaaaggaacactgaatgttctgggctcctgcaagaaagctgcttctgtgaaaagggtgattttaacatcatcaatggcagcagttgtattcactgagaaacccttgtctcctgatgttgtggttgatgagacatcatattccattccagaactttgtgaaaaagcaaaggaatggtacgtactgtcaaagaccctggctgaacaagcagcatggaagttctcaaaggacaatggaattgatttggtgacaataaacccagcagtggtcattggtcctttgctgcaacccacacttaacaccagtgctcagataatcctgtatctaatcagtgggtcgcctgtatatctcaactacagctttggctgggtgaatgtaaaggatgttgctctggcgcatgtacttgcatttgagaccccttcggcaagtggaagatacggcatggttgacaaagttattcacttctccgaggttgtaaagatcataaaagacatgtacccttctcttccagtgcctgagaaatgcgtggatgacgagctgtttgctccgacataccaggtctcaagggagaggatcacgagcttgggagttgagttgaccccgtttgagacgagcctcaaggagaccatagaatgcctcaaggagaaaggttttgtcagcttctaaagtcatcccacccgtccttgaataagcaccggagaaataaacaagattgcatagggattcaaacatactacttagcaatggaagtgctaccggcagtttggtgattgctattgcctcctgactccagtgcagtgtcagtcaaataagcctagcactctagcagaacaggcagcgcacttaaattctctcccctttgttgcggaccaaagaggttttccataattaatccatatatatactttccattctgaattgaataatagtagtggcgtccagtgctctggtcaaattaaggtcctgtttgttttagctttcgcaaactgaaagctggcctactcacactgagtcgaaaatgttagctttccgaaag

SEQ ID NO: 16303 - DNA, 683 bp, Setaria italica
  Peptide Sequence Number=SeqID_82277
ttaatgttcctgctgtctgttcatgttcgctgaatttctttactacaatctagagagtagagagggctggattgccttgtggagactatttgtacacactttagaagctgtctgttgagacttcctccctctgtttccctgacagcatcatctttttctttaccctgataaccatgagctagtttctatcctgtgtgttgacttcctagaaatgaaatcattgcagggctcctatcggtgaggaagtggagggcagaagaaaatttgttattcgcccgtatacgcctatctctgatccagattctaaaggatattttgacctattgatcaaggtttatcctgacgggaaaatgagccagtattttgcaagtttgaagccaggagatgttgttgaagtcaaagggtaaagaaacatgacatttttttaaatttcattagctaactctatatgctactgcctcttatcgctgaagcactttttatgctttcgttaggcccattgaaaagctcagatatagcccgaacatgaaaaaacagattggcatggtaagatagcctgaatttgacccagtagtctaccttttgattcatccccacaatgataatggcagatgaattatttatgttagttattcatgtatttttcagcaccggatgctaccttttttattttttcattgtta

SEQ ID NO: 16304 - DNA, 244 bp, Setaria italica
  Peptide Sequence Number=SeqID_82278
ttaagggctatcctaaaaaatcctgatgacaacactcaggtctctttaatttatgccaacgtatcgccagatgatatcttgctcaaaagggaattggatagacttgccagtagctatcctaacttcaaggtgttctatacagttgataagccatcaaaagtatgtcagcagaatctactgttctctcagaacttgtataccatctctgcggtgtatcctagatccttcagaaggccggagagct

SEQ ID NO: 16305 - DNA, 514 bp, Setaria italica
  Peptide Sequence Number=SeqID_82279
caacactcaggtaagttttcatcacaaaagcctgaagctttttcaaaatttgctcatgcatttaagcagtgctttggcatctttctgagaaagttttgttttaactctcaaaacaaaacatttcccctcaacaatattcacatagcagtatgtctcagtctgtcagataggcattctgccagaggccagatctgattcgtctttattttcaaaaatattctcaacagcaatagttttattgtggattacgtttttcccttatggattctaattttgtgttcgtttggcttcttcatttttcttatctaggtctctttaatttatgccaacgtatcgccagatgatatcttgctcaaaagggaattggatagacttgccagtagctatcctaacttcaaggtgttctatacagttgataagccatcaaaagtatgtcagcagaatctactgttctctcagaacttgtataccatctctgcggtgtatcctagatccttcagaaggccggagagct

SEQ ID NO: 16306 - DNA, 676 bp, Setaria italica
  Peptide Sequence Number=SeqID_82280
ctccccccgccgtcgcgcacatggaggagaagggcgaggaagctgctgagaaagctgcacttaaccctgataagtggttagagttcaagctccaagagaaggcaaatgttagccacaactcacagttattcagattttcatttgacccaaatactaagctgggccttgatgttgcctcgtgtctcatcacaagggctcctatcggtgaggaagtggagggcagaagaaaatttgttattcgcccgtatacgcctatctctgatccagattctaaaggatattttgacctattgatcaaggtttatcctgacgggaaaatgagccagtattttgcaagtttgaagccaggagatgttgttgaagtcaaagggcccattgaaaagctcagatatagcccgaacatgaaaaaacagattggcatgattgctggtggtactggtataacaccgatgctgcaggttgtaagggctatcctaaaaaatcctgatgacaacactcaggtctctttaatttatgccaacgtatcgccagatgatatcttgctcaaaagggaattggatagacttgccagtagctatcctaacttcaaggtgttctatacagttgataagccatcaaacgactggaggggtggtgttggttttatatccaaggacatggttttgaaaggtttgcc

SEQ ID NO: 16307 - DNA, 1041 bp, Setaria italica
  Peptide Sequence Number=SeqID_82281
ttttttttttttcttatgtaactgcgctaaataaacaaaaattcttgaatcgcaatgcaagagaaacaactgccgactgccgagtaacagaatccgagagctttatctgaactgccaaacaaagtacgggtttttctttacgtaaacatcgcaagcacgcacaggctgagcaagcagcgatgtgccatccgcactccgcagcgctgccagcctgccatcttcagctcaatgctcaacgtccagctaacagaaaacctagaatcctcgaacgaacgaacattattcggaggaagcaggtcaaattgtcaaaactgtaatccagttcatgaaccaaatgccgcagcgaaggaaaccaaaggttcaggtgtgttttattcactgccggcgcagcaaaagtatgtcagcagaatctactgttctctcagaacttgtataccatctctgcggtgtatcctagatccttcagaaggccggagagctctccctgtgatctatcctttgccttgtctccagagatgtggttcatcattcctggtggaccacaaacaagaattagagaatcctcccctgggcctggcaaacctttcaaaaccatgtccttggatataaaaccaacaccacccctccagtcgtttgatggcttatcaactgtatagaacaccttgaagttaggatagctactggcaagtctatccaattcccttttgagcaagatatcatctggcgatacgttggcataaattaaagagacctgagtgttgtcatcaggattttttaggatagcccttacaacctgcagcatcggtgttataccagtaccaccagcaatcatgccaatctgttttttcatgttcgggctatatctgagcttttcaatgggccctttgacttcaacaacatctcctggcttcaaacttgcaaaatactggctcattttcccgtcaggataaaccttgatcaataggtcaaaatatcctttagaatctggatcagagataggcgtatacgggcgaataacaaattttcttctgccctccactt

SEQ ID NO: 16308 - DNA, 285 bp, Setaria italica
  Peptide Sequence Number=SeqID_82282
ctggaaccatgtctccattcgagcacggcgaagttgttggttttggtacgacggtggtgaggtggacttggaccttggaaattatgaacggtttctggacatcaagttgactcgtgacaacaacataaccaccggaaagatctaccagtctgttattgacaaggagcgtagaggagattacctgggaaaaactgttcaggttgtgccgcacatcacagatgaaatacaagagtggattgaacgtgtcgcaatgaatccagttgatggcacagaagagccagctga

SEQ ID NO: 16309 - DNA, 255 bp, Setaria italica
  Peptide Sequence Number=SeqID_82283
gaaccagcccgcccgcacctcgcagccgaatcgatcacttgctgtcgttggttgaggtccttgctgttgtcgtcgtctgcaacttcggccgctgcggcttctcatgctggccacgccgccgacgctgctgctgctgctgcgacaccggtggggggcacgctggaaatgtcatcgtcgggcggtggccagcagcagcaaggcgagggcaggccgaggctcaggtggacgagccagctgcacggccgcttcgagctc

SEQ ID NO: 16310 - DNA, 1740 bp, Setaria italica
  Peptide Sequence Number=SeqID_82284
gtcagactgcagatttacaaggtccggcttctactgctcactaggaaccttaaggttgcaaaacgagtacttaaagtactgatgaacatggcacgtggtagggattcatctacagagcttctcttgaaatctcagctggagtatgcccgggggaactaccggaaggctgtgaagctattgagcacaccaaataatcgaactgaaccagcaatgctagctatgttctacaacaaccttggatgtatactccaccagcagagatctaatcacacctctatatggtgctttagcaaagcgctgaagtacagcctatctcttcgttcagagaaaccactgaagctgactgcattatcacaagacaagtcttgtcttatttcgtacaactgtggtatccaacatttgatgtgtgggaagcctttgttagcagctcaatgttttcgtgaggctatgccactcttctacaaacgaccccttttctggctccgtttttctgagtgtagtctgctagctgtagaaaagggtctactgtgtgcagctggtgcttcttcatgcaatgatgagattgaagtcaatgttgtggggtcaggacaatggcggcagttgatcgtcaaccctgtgcactcgagaagtaattcagcttctgcacgtgtgacttcagatgaacataaaaatttggtatcacttggatttgctagacaatatctgctcaacgctcagctattattggatgcttctgagcaggaaaatccggtgaccgcatccgatgcagaggatggcaaccaaggagtagtacaaggacataaaagctcaggtcagaagaacactgtaagtacagattttaaagcaccttctggcccaaccctggcttttgtaaacggagaacaaaaaggaacgagcttgaatgccaccttgcagagctctcttgctttgtatgatgagatttgtagaaaagagaacctcaaaatcagacaggccatcctggggagcttggcgtttgttgagttgtgtcttgagaatcctttgaaagctttgtcttatgcgaagttgctacagcagctgactgattgctctaggatgtatgtattcctcagccatgtatatgcagctgaagctctgtgtgctctgaacagaccaaaggatgctgctgagcagctgtcagtttatatcaaagatggcaatgatattgagctgccatacaatgtggagaactgtgagaaggccttagatgagaaagacagtgatggtgaagacacggttgctcctgctgtgacaaaactgacctcagaagaatctcagcactcggagagtctcaagcctgaggaagctcggggcgttctgtatattgacctcggcatgactgctgcaatgcagggagaatttgagcaggctgactatatggtgagccgtggccttgccatgctgcccaacaaccctagggcagtgctagcatcagtttacatggaccttctgcagggaaagtcccagggggccgttgcaaagttgagacactgtaggcatgtgagatttagacctagtgtactagctaccagctgagcttagagaagcataccttttcatggtttctgtagtttacaattaccattacaatctttttggaccctgaccccagtgcggatgatgattaaagatggtaatgcccctcctgtgtaccatacataagaagtgaactgtagttctctttttagcttcgccccagattcagggtgtaatgtgttgaaa

SEQ ID NO: 16311 - DNA, 1305 bp, Setaria italica
  Peptide Sequence Number=SeqID_82285
gttccaaggccgccgctactccgagtgcgtcttggtgcttaagaagctcctggagatgaaggagggcgatcccaaggtccaccataatatggcaatcacacaatctttcttggatggttgtcctgatccagagagactgcttaaaattctaggtgatgttaagaaaagatgtgaggagcttgcatgtgcatctagagaacaagctgattctgccaatggcgtaggaagcaatgcatcttcaggatcaagagggagcggcatagtactaccttattctgctgcacataatgcgtcaacctatggggatgagtttgacacaaccataataacattcaacatggctgtcatcctctaccatcttcatgactatgaatctgctctatctgttttggatccattgtaccgaaatattgaaccaattgatgagacaactgctcttcatgtatgctttctattattggatattactttagctttgcaagatgcaacaaaggctgcggatgtaatacagtacttggaaaggtcatttggagtagctaacacaacgaaccagaatgaaaatgctagcatagctcagcagcaattagctcaaccgaagcctcctgcaaaaagtaacacacctccagattctgattcaaatgcttatggtggtggatgtgagaacctttcaacaggaagtttcccagatgaaccaatagaattcgaatctttatactctagttttgatggacatcagaatctgggtcggcctatattgaatgatttccccagggcatctgctgatcttgctgctactgctgctgatttgaaagtcagactgcagatttacaaggtccggcttctactgctcactaggaaccttaaggttgcaaagcgagaacttaaagtactgatgaacatggcacgtggtagggattcatctacagagcttctcttgaaatctcagctggagtatgcccgggggaactaccggaaggctgtgaagctattgagcacaccaaataatcgaactgaaccagcaatgctagctatgttctacaacaaccttggatgtatactccaccagcagagatctaatcacacctctatatggtgctttagcaaagcgctgaagtacagcctatctcttcgttcagagaaaccactgaagctgactgcattatcacaagacaagtcttgtcttatttcgtacaactgtggtatccaacatttgatgtgtgggaagcctttgttagcgacaagactacaaatagttttacgtagaaggactaatagaccaactacttactaacaaaacgaacccca

SEQ ID NO: 16312 - DNA, 664 bp, Setaria italica
  Peptide Sequence Number=SeqID_82286
tgataccggagtgagcaagatctgctcccaggcttgtcttgctgttccccacaactccctaattgggtacatgccattaacatgaaaatttgcagggtcctccctccatttggtgtacagctctggatattgcttcttagcatccgctgcctccaagtaagtcaattacatttaattaatgggcaataagaataaggaaagccacaaggtttattcataccattggtcatgccctctaagaagaagaggtgtgcctcttttagtgaatccagaaaaacaaggggttcttccttcccttgccaaataatttcggacaagttgactttgctcgtgagataggactagagaagcagacgtcaaatttcatgttcgaaagagcatcacgacatttctctgcctgcttggcaccggtctctggacacggctttctgcgttccatgagctcaaaccatgtctaacaagagtaatcttcttggacgaggttagagtcttgctggtgagtgatgtcgttgctccagtgaagctgtaagcagcaccggtgactgctggaagttcattttcagcaaggctctgcacagatacatcgctcagaccactatgagttgctttgatggaaaaagccctgagtctgcctgtggcgcggctgcggaggagggcggaggga

SEQ ID NO: 16313 - DNA, 434 bp, Setaria italica
  Peptide Sequence Number=SeqID_82287
ggtctctgttaacactgacagatttgagctccctagacaaaagcaacgatctcatgaacggatccaaaaggcgctatccttttttctgctcactagaacagatagaaaggtaccccgaacgaacgaataaaatgattgaatcgcaactcttttgcaaccatacatccatctccaacgtaaattaaaagttgcggagaaagcaagtgattgaaatgtgacactaacctggacacggctttctgcgttccatgagctcaaaccatgtctaacaagagtaatcttcttggacgaggttagagtcttgctggtgagtgatgtcgttgctccagtgaagctgtaagcagcaccggtgactgctggaagttcattttcagcaaggctctgcacagatacatcgctcagaccactatgagttgctttgatggaaaagccct

SEQ ID NO: 16314 - DNA, 1217 bp, Setaria italica
  Peptide Sequence Number=SeqID_82288
ttttttttgctatgcaacttgcttcttgcttcaacttgaacatttcccgtaatctttaaccgtagcaatgttttcggtgctgcctcgcaagttttatggatggagattgacagttgctcaaaggttaaatgacattcacacggacaatcacatctgacggggtcagctatggttatgtgcactaaggccacattttaccaaagtcatttaatttcaagaatgacttgtctaacggaagatacaggaaatacaatatagtgcaaaactaagctagtactgataggtgtgatcactgtacatgtgtgctgtcatattgagggcttgaagcatagcttctccatgcttgttaaccgtgaagacacacatgccaccattgtttacatcagtggcacggaacctctcaggagggagacccagtgccgtgcagacgagcgcgcgcaagatggatttgtgcgtaaccaccaagaagttttcacccggagtgagcaagatctgctcccaggcttgtcttgctgttccccacaactccctaattgggtacatgccattaacatgaaaatttgcagggtcctccctccatttggtgtacagctctggatattgcttcttagcatccgcattggtcatgccctctaagaagaagaggtgtgcctcttttagtgaatccagaaaaacaaggggttcttccttcccttgccaaataatttcggcagttgactttgctcgtgagataggactagagaagcagacgtcaaatttcatgttcgaaagagcatcacgacatttctctgcctgcttggcaccggtctctgttaacactgacagatttgagcttccctggacacggctttctgcgttccatgagctcaaaccatgtctaacaagagtaatcttcttggacgaggttagagtcttgctggtgagtgatgtcgttgctccagtgaagctgtaagcagcaccggtgactgctggaagttcattttcagcaaggctctgcacagatacatcgctcagaccactatgagttgctttgatggaaaaagccctgagtctgcctgtggcgcggctgcggaggaggcgaggagggggcgcgcggccggggacgggcaacggcggcgagaacgccgtcggagaaggccgcgtgggcagcgagccggagaccatttcacctccccggcggccggcggacagaaagaacggtaggcgctgttggtttc

SEQ ID NO: 16315 - DNA, 982 bp, Setaria italica
  Peptide Sequence Number=SeqID_82289
tgaaagttggtaagtagtttacgtctttgcaggagccattacccccagcagcatttgttgactggggttgtagtagctctccatgggaaggaaacaagtgctggcaactttcttgtcgaagatgttcttgaggctggtcttcctccccaaacagcattatctagtgcagatgaagacaagtatgtggtatttgtgtcagggttaagtgtaggaagtggcacattcaatcctctgcaattccaacttcttatcgaccatatcacagggcatctgggcgatgagaatgagcaaaccattgcatcaaatatagtgcgtgttgtggttgctgggaattcagtgcatatagcaccaaggtttgtcaatggtcagacggtggcatcaaaagatcaatccaggatagcagaaccaatcaaggaactggatataatgcttacacagcttgtggcatcattgccagtagatgtcatgccggggtgtcaggatccggcaaatttttctttgcctcagcagcctttgcatagatgccttttctcaggggcatccacctacaatactttttcttcatgttcaaatccccaccaattcgagcttgacagtgtccagtttcttggaacatctggccagaacatagatgacctctacaagtactctgatgccaaagataagttggaattcatggaaagaacactaagatggcgccatcttgctcctactgctccaaacagcctcggatgttatccatacacagacaaggatcctttcctcatcgaaaagttgcccacacgtctactttgttgggaatcaagataaatatgaaactcgattgttggaaggtccagaaaacaaaagtgaggctaatctgcattccgaggttctccgagagtggagttgctgtgatgctcaatttgaggaacctggaatgcagcacattgagtttctcaactagttttgatgcctgaatatgctcttatttggtaattcc

SEQ ID NO: 16316 - DNA, 470 bp, Setaria italica
  Peptide Sequence Number=SeqID_82290
tgatggtatgtactgttatgcatgactacttgggacaggagtttaccctttgctttattcttgttcttttccttgttacaattggttcttgtcggatataatgagattaattggtaataaaaatatctgtatgctaatgcagctcaatttgaggaacctggaatgcagcacattgagtttctcaactagttttgatgcctgaatatgctcttattttgggaattccaagacacttggagcatgtggattggcacaggagctgcagctttcctggaaagacccacctcaaaaggatgtagttgttccaggacagttctttattaggtatatgatggccttagatttttgccgattagatctgttgataaattgccgaatgcagtttgttgtaggtgaagctgaaactgatgctggacggtatgtagttgtacacttgtaccaatcaaacaggagctgacgcttctttccca

SEQ ID NO: 16317 - DNA, 372 bp, Setaria italica
  Peptide Sequence Number=SeqID_82291
ttgcttagctaaaatattcttttttctttttggattttgaaagagagcttggggtagactggtagcgtgattacaaccacagccgagtagctccctaacacaagttgttcttggttccctccagactacatggtgcaccatatgcttagcgaaattagcaagttcatcagctaccatattacactctcttatcatgacacgctgcaacctctggaagaaggcacatcaaagccattatttccttgaaagaatatctatcttctgctagcaagtgtgcagagctaatagaatcatcaaacaattagattctagatgttgattaagcggtttagtaatttaattagtacgtttacttaagttacctttaattta

SEQ ID NO: 16318 - DNA, 240 bp, Setaria italica
  misc_feature (230)..(230): n is a, c, g, or t
  Peptide Sequence Number=SeqID_82292
gcctctcctgctcctctggtgttatccgcccaaaacttcagatggctcagaaggtggtgctccgggtcccggccatgaccgacgacaagacgaagcagaaagccatcgaagctgttgctgatatctacggaatcgattcgatcgcagcagacctcaaggacaacaagatgacggtgatcggcgacatggacgccgtggcgatcgccaagaagctgaagaagatggggaanatcgacatta

SEQ ID NO: 16319 - DNA, 671 bp, Setaria italica
  Peptide Sequence Number=SeqID_82293
gctcgacctgcccctcgcatctctcgcgggagccgcgacgcttatcgatttctcctccctcacaaaaccctaggcctcaaccaccaacccagtcatggcgacgccggcgtcggtcgtctccgacgtggccgagccacaagccgaagaatcccctcaggttgaggcagccgccacggcggaacaggaagggcccaagtcagaagcggccgccgcggcggaatcggcaggggcatccaatccgcccgccgtcgcggcggcagcccctggagacgcctcctccgctccctctccctctcccgctcccaccaccgcttgcgattctgtggtggtgcctcctccggcttctccagctacgcccgcagcaccagggccggcgcggccgcaatttgcaggctccccggcctacatggcgccccctgggccgtctccgtcgccagccttttcttataatgtactgccgagggcgccaccagcccagcaagttggcagcggtgcagcttcagtacagccaggctcttctccggcacccatggctgctcctatgcctgcagcagctcttcagccaccagctccagggcaattattttgggaacaggccttctttctcatataacgtagtctcacatgctaatgctagattgcctactggtcagctagtttcaacctggcac

SEQ ID NO: 16320 - DNA, 414 bp, Setaria italica
  Peptide Sequence Number=SeqID_82294
gaccgtcctgagggcacgcgttttagtacgactgtatgaaagaggcagacagactcctgcttcagcttatttaaccggcttatcagctacccaacagtgtttttctctcacaacaaatcagccgttttagcttttcagctggcttatgcatgcctctacgcatgtcctattccacatgtgaaaaggaaagtttcctgtcaaatctgatgttcaaattacaatgagaatattctgataacctgatgtctcaatgcgtgatcgcaggccatcattcatagctagtttccgcatatatgcttatttcttttttgtctacaccctgagaaactaagtagcttatggttatcagttgtcaggctgacaggtacataacgaaatttaaaggtagcaaaggaatggaaacattcataaact

SEQ ID NO: 16321 - DNA, 397 bp, Setaria italica
  Peptide Sequence Number=SeqID_82295
tcaggttgtgctcctgaatcactaccatcaaactcttgagctgtgttgatatagactgcatagtctgctccattgcggaacatattagcattgcatatatgatgctttggaaggcctccaccaagaactattatccctgtcttcctcggtgctgcgtggatggcttccccattcatcagccgtatatcttgtacaatgtcaataataaggccaggattgcggactgcatgacagaacagcatgtctccaagtgatccatcagtcaatgctgggcagtatacaggaatgttattcttgtatgcccaataaagataggagctttcgtcgtttatttctttgccaagacgagctatcacctttgacggtgtccaaatattctgcaggcaacctaagttta

SEQ ID NO: 16322 - DNA, 348 bp, Setaria italica
  Peptide Sequence Number=SeqID_82296
tttagtttcgtttagtttcggtttcggttcggttcggttcgtcgtagcgcggtggaggcggaggcgaggagttgctcgagctcgcggtccgcgagcgtgcggagggagtcggcccgcgcgcgcatgaggcgcaggtcggcggtggcggagtcccgcacctcgcgccaccccttggagaggaacgagaaggcgctgtcgtcgccccgcgctcctccgaagccgccgccgacagagaccgacgggggcggcgacgcccgcgcctccatggcggattcctgattgggctgcggctagggttttgccgttcgggagtcgcgagtagtcgagacttgagaggaggaagaggaa

SEQ ID NO: 16323 - DNA, 286 bp, Setaria italica
  misc_feature (93)..(93): n is a, c, g, or t
  Peptide Sequence Number=SeqID_82297
gggtgtcacctgatgtggaaagcaacctcaaattacaccatctccaacctccaatacagatacatcaaaggtaccgcctcccaagtcaaaacnctagaattgtttcatatttttcttctcgaaaccatacgccaatgatgctggtcgtattgcagggctggaagttcttcgtattataaatgaaccaactgctgcatcattggcgtatggttttcgagaaagaaaaaataatgaaacaatacgccaatgatgcagcagttcttcgtattataaatgaaccaactgc

SEQ ID NO: 16324 - DNA, 793 bp, Setaria italica
  Peptide Sequence Number=SeqID_82298
aagttgtcggtcagtgatctagatgaagtgattcttgtggtggatccacaccgaatccctgcagtgcaagaacttgtgaggaagcttactgacaaggatcccaatgttacggtcaaccctgatgaggtgtttctcttggggcagctgtgcagggtggggttttggctggagatgtgaaagatgtcgttcttctggatgttactccattatctcttggtttggagacattgggtggagtgatgacaaagattatccccaggaatgccacactgcccacctcaaaatcagaggtattctcaacagctgcagatggacaaactctctctctccctggagaacattgatctcaacactcgtctgtccatctgcagctgttgagaatacctctgattttgaggtgggcagtgtggtattcctggggataatctttgtcatcactccacccaatgtctccaaaccaagagataatggagtaacatccagaagaacgacatctttcacatctccagccaaaaaccccaccctgaacagctgccccaagagaaacaacctcatcagggttgaccgtaacattgggatccttgtcagtaagcttcctcacaagttcttgcactgcagggattcgtgtggatccacccacaagaatcacttcatctagatcactgaccgacaacttggcatctttcaaagcattattgacaggagttttaagcctgtcgataaggtctgaacatagttcctcaaatttggctctcgagagggttgcctcaatgtgactactcacactgagtcg

SEQ ID NO: 16325 - DNA, 2419 bp, Setaria italica
  Peptide Sequence Number=SeqID_82299
ctcgcgactttatgtacttcaacagcatccagtcatccaccacgttcgatgcctaggcaataaatggtactagccatttacataagccgttatcagaagcaaaggaagcagtagagcaaaaaagggcctatgtatttgtttgacagtcaaatctgaacctccccgagctcacctcgtgttcaggtgccaatatctaccaaaaaactacaccccacatcctacataatcttgtggaacaaatgcctctgcaacctaacataccctcatttgctgtcggtaaaatcagcgtcaatgacatcgccttcgtcggctggcttctcagatgaaccagcactggcgtcagctcctggggtagggccagctcccggggcaccctgctggctgtagagcgactgcccaagctgcatgacttcctggttcaatgcgctcaaagcatccttcatcgtctgtgtggagccaccagcaacagcgtccttgagctcctgcagctttgcctcgaccttccccttgacgtcgcctgggaccttgtcaccaagctccttgagttgcttctcagtctgatagatgactgactcagcttggttcttggtgtcaatggcatctctcttctccttgtcttcctttgcgaatttctcagcttcatcaaccatcctctccacctcatcctttggcagtgtgctggccccagtgattgtgatgtcctgcttcttccctgtgcccttgtccaccgcagtcacagagaggataccgttggcatcaatatcaaacttgacttcgatttgtggaacaccacgaggggcaggaggaatcccatcaagacggaagctaccaagagacttgttgtcccggacaaactctctttctccttggagaacattgatctccacactggtctgcccatcagcagcagttgagaagacttctgactttgaagtgggcagtgttgtgttccttgggataatcttggtcataacaccacccaatgtctccaaaccaagtgacagaggggtgacatcaagaaggacaatgtcgctgacatcacctgacagaactcctgcctgcacagctgctccaagagcaacaacctcatctgggttgacagtcacattggggtcctttcctgtcattttcttgacaagctcctgaacagctggaattctagtcgagccaccaactagaattacctcatcaatatctttgaattgcagctttgcatctcgaagtgcattgtccacaggggtcctcagcctgtcaaggagatctgagcatagctcctcaaatttagccctggtaagagttgtctcaatatgcttggggccatcagcagtagctgtaataaaaggcaaactaatatttgtctgggtcagggatgatagctccatctttgccttttcagctgcttccgtcagtcgctgcagagcttgcttatctttcagcaagtcaataccctcatcgttcttgaagtttccagccagccagtcgacaattctcttgtcgaagtcatcaccaccaaggtgagtgtcacccgatgttgacagcacctcaaaaacaccatcaccgacttcaaggactgaaacgtcaaaggtgccacctccaaggtcaaaaaccagaatcgtttcattgttcttcttctcaaaaccatatgctagcgatgccgctgtaggctcatttataatacgcagaacctccagcccagcaattcggccagcatcttttgttgccgtcctttgtgagtcattgaagtaagcaggaactgtgatcactgcctttgtgaccttgtcgttcaaaaactttgatgcatcatccaccaactttctcagcacctgcgcagaaatctcctcggccgcgaattgcttgccaatcgccgggcagtcgagcttgacgttgccgttgtcgtccctcaggacgcggtaggagacctgcttagactcctcgtcgacctcgttcatcttgcggccaatgaatcgcttgacggagaagaatgtgttctccgggttaacgacggcctggcgcttggcgatctggcccacgaggcggtcgccggacttggtgtacgccacgacggagggcgtggtccgcgcgccctcggcgttggtcacgatcgtgggcttgccgccctccatggcggccaccgcggagttggtggtgcccaggtcgatgcccaccaccttctcgcacgccacccgcagcgggcgccaccggcggctccggctgtagaccgcggcggagacggaggggcggctccggcggggcccgtggtgggccgcgaagaagggggtcgaggtggggaaggtcgtggtcgccatggccgacggcggcgaagagagctacagcgaggagagagaatgagaaggttacctcttatctgaccagagaggaaggttcgcgaaaccctaggaaggaagagggtggattggag

SEQ ID NO: 16326 - DNA, 2219 bp, Setaria italica
  Peptide Sequence Number=SeqID_82300
ttttttttttgatcaggtcatgattttattgcaagaaacatctttccaatgagctacaatttccatcaaaaccttttgcccttctgtcatctttatagagcattctgataatccctgagtcaaaatcaagcgcaatgtttgcaaaaacactatctctatcagttccacactagatagcctatagtacatttcaaaggacaaaaagggaacaattgtgttcactccctactgccacccatgctcaacacatcgccggatccatcaatcacacctcagttactatctgtgaagtccgcatcaatgacatccccatcattgggtcccttcgcaggtccagcaccaggcgtaggcccggcctcagcatcaggggtagatccagctgcaccaggctggttgtacattgcctgcccgatctgcatcacctcctggttcaaagcagccatggcgtccttcatgccctgtgttgatccaccagaaatggcgtctttgagctcctggagcttcacatccaccttctctttcacaggagcagggactttgtcgccgagctccttcagctgcttctcggtctggtagaccacagagtctgcctggtttttggtgtcaatggcatctctcttctccttatcctccttggcaaacttgtcagcctcttctaccattctctcaacctcatccttaggtagcgtactagcgccagtaatggtgatatcctgtttctttccagtgcccttatcaatcgcagcaactgagagaataccatttgcatcaatatcaaacttcacttcaatttgtgggacaccacgaggtgcaggagggaatcccatccaaccggaagcttccaagagacttgttgtccctgacaaactctctctctccctggagaacattgatctcaacactcgtctgtccatctgcagctgttgagaatacctctgattttgaggtgggcagtgtggtattcctggggataatctttgtcatcactccacccaatgtctccaaaccaagagataatggagtaacatccagaagaacgacatctttcacatctccagccaaaaccccaccctgcacagctgccccaagagaaacaacctcatcagggttgaccgtaacattgggatccttgtcagtaagcttcctcacaagttcttgcactgcagggattcgtgtggatccacccacaagaatcacttcatctagatcactgaccgacaacttggcatctttcaaagcattattgacaggagttttaagcctgtcgataaggtctgaacatagttcctcaaatttggctctcgagagggttgcctcaatgtgtttcggcccatcagcagtagcagtaatgaatggcaagctaatgttggcctgtgtcagcgttgacagttccatcttagccttctctgctgcctcagtaagccgctgaagggcttgtttatccttcagaagatcaatgccttcatctttcttaaagttgctagctagccaatctactattctcttatcaaagtcatcaccaccaaggtgggtgtcacctgatgtggaaagcacctcaaatacaccatctccaacctccaatacagatacatcaaaggtaccgcctcccaagtcaaacactagaattgtttcattatttttcttctcgaaaccatacgccaatgatgcagcagttggttcatttataatacgaagaacttccagccctgcaatacgaccagcatcttttgttgctgtcctttgtgaatcgttgaagtatgctgggacagtaaccactgcttttgtaattttctcattaagaaacttagatgcatcatccaccaacttccgcaaaacctgcgcggaaatctcctctgcagcgaactgtttgccgatggcgggggcagtcgagcttgacgttgccgttctcgtccttgacgacgccgtaggaaacctgcttggcctcgtcgtcgacctcggacatcttgcgcccgatgaatcgcttgacggagaagaaggtgttctcggggttcacgacggcctggcgcttggcgatctggccgacgagccgctccccggtcttggtgtaggcgacgacggagggcgtggtgcgcgccccctcggtcgttggtgacgacggtgggcttgccgccctccatggccgcgacggcggagttggtggtgcccaggtcgatccccaccaccttctcgcaggtgacccggagcgcggcgcccccgcg

SEQ ID NO: 16327 - DNA, 375 bp, Setaria italica
  Peptide Sequence Number=SeqID_82301
ggtcgggggcgggggcgggggcgggggcgggcgaggctggggaggacctcgagcgccggggcatggaggaacggcgggtaagtgctggtggtccggcggtgcgcggcggcccacgcctggaagaagagcgcggcggcggtggggtcgttgtggatgtgcgtgcagctcagccccagcgcgaacgacttgtccgcgaactccgtcagctggatgtagaacggagaccagatgaaaggctcggcccccatgggctcgtagtagaggagatccatctcctcgtcgccggtcgccgtggcgagccactcgtcgagcgtggccgccgccctggcgtccaccatgcgcacgccggcgtcgttgcacttgacgacccacccg

SEQ ID NO: 16328 - DNA, 516 bp, Setaria italica
  Peptide Sequence Number=SeqID_82302
gttagcgatttgcaatttaggatcatgcaaatctttgtgtatccttgaaaaatttctcaatttagaatttacatgatgattagtatttgtaccctacaggatggcatctcgagccccatcgcggcgcacatcctagacttctgcgacgatggcagcggcggagacctgttcgcggccgtgaacgcggcctcggacatgttcacggcgtcctcagaggatgcctcgtcgtcgtccgtgacgacgcctcccgcgccctgcagccacggcgacaacgtgtcgtcgggcgccgcggccgctgcctcggccttctcccccatggcgtcgctggactccaccttatcggctctcctcgaggaagacgatccaccagttcccgacaccgaactcttcctccccatcgattaccagtttgcggcagcggtcgccggggacgagcctcagccggagcagcagttcgaccaggtcccggtggcgctcccggtggccgccgcggcggcggaacagccagctctgcag

SEQ ID NO: 16329 - DNA, 1089 bp, Setaria italica
  misc_feature (1)..(74): n is a, c, g, or t
  Peptide Sequence Number=SeqID_82303
nnnnnnnnnnnnnnnnnnnnnnnnnnnnnnnnnnnnnnnnnnnnnnnnnnnnnnnnnnnnnnnnnnnnnnnnnntttttttttttttactctagcacgccgaatcgtaatatcatcattgaatcaaccaatattgtacaaacaccaatcaagattatctgtaccggtagtgtgatcccaaaacgtacaacactgtaatacctttgtgctctggcaaaaactacttagacagccagtagatgaagatgaggaatgcgcagaccgacgcgacgagggaaagaatgatggtgtccatggatttcttccttctaatggacgagaggacgtggttgatcgtaggaagccggctgctgacattgcttatctttgaagtgatgccaccaaatgttgaccgttgggtcatcagagagcctagcgttgcttgagcttgtgatatcacgttatccatctgtccggcgctcctactaattgcagcttgctccctgagaagagcttgatcagctgagtctgatgcctcttcaacatcaaactttgctctatcaaaatctctcaagtcaagaagagaagcatgttgttgtttcactctgaggcttgatcgaagccgatagaattcctgagtaaggtcttgcaaaatctccatatgacgagtcagagtatgagaaagaacttcagaacctcctgatgatacccaagtttgcatttgcgaatttacttgctgtaattgcttgagcgatctttctatatctgactcaatatcattctctgaaccatctgatttcatagaaaccaatttacgatatgcaatcatttggtcatctaactgagcctccaacctccttgcctgcttgcgaagggcgtcccaggaagacgcctccatggcccccgcttcctcgtcctcctcctcttcggcgccgtcctaccggttcgtcccgtcgggtggacagagatcccgtcggcgcgcgtcggcggcgtctggtctggatctcgcgcgcgcgcgggcgggtgggcgggcggcgaccgagcgaatcggtgggagggacgggttggggagaggacgggcggaaggggtggttggtgcgtgcccgaagac

SEQ ID NO: 16330 - DNA, 1409 bp, Setaria italica
  misc_feature (1382)..(1382): n is a, c, g, or t
  Peptide Sequence Number=SeqID_82304
ggagtaaagaggctgaagatgctttcttgaggatgaagacagatggcattaagccattatcttcttcatacactgcactactttgtgcatatgcagttaatggactgcatgcaaaagctcatagcatatatgtagatatgaaaagagaaggacttaaacctaccttagaaacatatacagctttacttgacactcttaggggagctggtgacacagagaagctaatggagacatggaaaactatgatcgatgagaagattggagcaacaagagtcatattccacatggtacttgattgtttagcaaaacatgggttgtaccttcaggcaagagatgctatatatgaatttggaaagattggtttaaagcctactgtcatgacatataacattttgatgaatgcttatggaaggggcggacagcattacaaattgcccctactcctgaaagagatggctgctctggaactaaaaccagactccattacatattgtacaatgatatacgcatatgcccgtgttcgtgacttttcaagggcattctattaccacaagcagatggttcgaagtgggcaagtacctgatcctagatcatacagaaagctgttgaatactttggatgtgaaggctgcaagaaagaatataaaggataagagtgccatacagggaatcataaaaggcaagtctggcttaaaacccagaaaggaaaagaaagacgagttttggaagaacagaagaaagcggtctatgctgaacccaacttatgggcaccaaagaaaaagatttttgtgaatttatcttcagtgtacatttgattgtgttcaagatttacttgaaatcttaagctggagactgggttatagaatcattttccttttctgttttcagtaacctgagtcaactcaaagggtttgcttttgaacatgattggccttgaaaaccattcaggtaaatgaacagcatctgtttgttatttttatcatgaaaaagctacatttctagacttgatgattggtcatttggtaccaaaaatattgtgaaatgacacttaaaaaagcgatatcattgtaattttatcaaatggtgaatggcattgacctgaacagttgagtcttgtagtctccttttgtcgctgttatcaatcttatacaatgctattttttgactaattactcccctggttccatgttatttgatgttttaggagttgaaaattgttgctttttattcgattttaaggatttcaagaagagctattgctcataagtttgccactccatatttcacaaaaattttcaaatagttaaaaaaggttcaagcatcaaaggtatcagtgtcactcagatggcaagatctcaaaacatttaagacacagcaggaaanctgatacaagttggcatgatatgaagc

SEQ ID NO: 16331 - DNA, 292 bp, Setaria italica
  Peptide Sequence Number=SeqID_82305
cttcttcgcatgtgcgcacgacttgtccgaaacctaggagtgagtggagtgacctggccgttccgatctcggtccaggagcgccacatggctccggcggccgccgccgccgtcgtcgcgctgggcgacgacctcctccgcgaggtcttcgttcgcctccccacccccgccgatctcctccgcgccgccgcagcctgcaagcccttcctccgcgccgcccgcagcgcgccattcctccgccgcttccgccgccgccacccttcctcctgcccgcgcctcctcggctgcctgct

SEQ ID NO: 16332 - DNA, 491 bp, Setaria italica
  Peptide Sequence Number=SeqID_82306
tcaccgacgcctgtcgtccggtcgcaatctccgtgctctccgccgtcggaggactcaaggagaaggcgcccaacctcacaacagagcagatcgtttggatgacggtgggcatcctgttggtcctgttcggcgtgcagcgtttcggcaccgacaaggtgggttacctgttcgcccccgtggtgctgctgtggctgctcctcatcggcggcgtgggcgtctacaacctcctccgccacgacgtcggcgtcctccgcgccttcaaccccaggtacatcgtcgactacttccgccgcaacggccgcgacgcctgggtctccctcggcggcgtgctcctctgcttcaccggcaccgaggccctcttcgcggacctcggctacttcagcgtccgctccatccagctcagcttcgcctgcggcctcgtccccgccgtgctcctcgccgtccttactattgggtcctaggtccgtcctttccttccgttccgttcctta

SEQ ID NO: 16333 - DNA, 697 bp, Setaria italica
  Peptide Sequence Number=SeqID_82307
gttctgaggtcctctgtcatttattcttgcgtcgttatctatttctatttcatttgatacagcttcatgtttttactgtttctgatggatagttcaagagttgtcaccttttttttaaaaaaatataccagatccagatattctatgtgattattgtgatgatagacttggatttatgagattattggggtgcatagactttatgcgattattgtgacaacattacatccttttttggggcatgctatttatttttgccttgagaagtatcttgttctctttcaggctgaggaggtggatatggctgcattgaggcaaatgggagagagcgatctcaaagacatgggggtacctatgggcccgaggaagaagattctccttgcattaggtcctcagtcaaaacaacggcaaagatgagcagcatggtctgggtattggaaacttgaaaacatttgttggcaaccacaaattgttgatgtaacttaagaatgccttattgcagatcttgtatatctagtagtgttttgtcttagttctcccttttgttgctgatagattaagttcgtgcctttgttgacacgtgtaaagtcttatctgtcagctgttaagaatagcaggcttgaaacaggtggagaattaccagtctggaatttggtgggggatatatgagaacggccatggtcgcagtgcatacttt

SEQ ID NO: 16334 - DNA, 258 bp, Setaria italica
  Peptide Sequence Number=SeqID_82308
ctggttctttaagacctcaaagtcttattacaagagatgctcctgacacatcaagaacccaaacttatgctggcaaatccaccatttctgtcgatacagtaccgaaagctaatggaatcactccgtctagtgcagctctgcctacagcccctgttatggtttgtatctgcacttcctctcatagacctgaatttaccaaggcttctgaggaaagaaaggaatttttggatccaacttcattgttttatttgcgcctaa

SEQ ID NO: 16335 - DNA, 1479 bp, Setaria italica
  Peptide Sequence Number=SeqID_82309
cgtcccaagcgccggtaaacttccgtctccgcgcacgccccgatctccattccccgaaaccctagccgccctcggccgcttccctgtcgcggtcgcgcccctcgcctctctgcgcgtgggcggcggcggagatggcctcgtcgtcgtcggcgtcctcgaggcaccaggtcaccatcaccctcggccgcagcggtcaggttgtcaaaaggagggctatatctgatactattaatgatgatgaagtgccattctcagggaaaaagcgatctttgagggagagattaggaactaatgtggctgattctgatttttatgaaagccggcatagaaacaaaaggcaacagacagaaagtaatagctcccttggagatgatggttcagatcgccatgtcggcaaggatgacctgagactgaaacttatgaggaaaggcttgttacagaggagcaatggtggcgcagaacagaatggagtggatctccgtgaaaagctttcccgaaaccataagaatttgccgagatacgatgcaagtggccgtgctccagaatcaagggctaggtatgatatgagagacaaccccgtagagttaaggtctagatattcttcgagggagggtgtcctagcatcaagaccctctcctgttgcaagtcgaattccttctgcaagaagtgtggatgatttgttgaagttggattcttcaagaaaaccttactcctcatggacagccgatggtttgaggcacagatcacctgaaaggcttacaagtgttcggggtgatgcgtctccaccaagagcttttgatcagattaggcccatgccatcccatagatctgctggttctttaagacctcaaagtcttattacaagagatgctcctgacacatcaagaacccaaacttatgctggcaaatccaccatttctgtcgatacagtaccgaaagctaatggaatcactccgtctagtgcagctctgcctacagcccctgttatgacagaagtcccacaaacggttactggattgctgaattctctgggacttgagaagtatcttgttctctttcaggctgaggaggtggatatggctgcattgaggcaaatgggagagagcgatctcaaagacatgggggtacctatttgtatctgcacttcctctcatagacctgaatttaccaaggcttctgaggaagaaaggaatttttggatccaacttcattgttttatttgcgccaatattttcaaaatgtttcctaaatcacatctgccatctggtctacaatgctgctggcgttatgaaattaacattaaaccagaatgtaaagttatgacatagtatctatctctgacagtaaggtccttgttgcaagcttagtcctggtggtatatttgctcatttttgaggttatttgttgcttgtatcaggaatcttcttacaatttagaacaccaacaaccttctgaagttaacatcattgaaacatgata

SEQ ID NO: 16336 - DNA, 439 bp, Setaria italica
  Peptide Sequence Number=SeqID_82310
cgtctttccaaaaggcgtacgagtgcgatgtggaatgctgcgagtacgccgcagccatcaccttcacgggcgatctggcggtccagctcgcggagggcgccgaggaccagcccgactccaagcagtcggccacctccttcgaggccaccgaaggcgtcaaggaggtcctcctcgaccccagcagctccgacggcaggaccgtgcggatcggcgctaccctattcctcaaataggaaagcgcgctcgtcgacttcctccacgcgaacaacgacgtcttcgcgtggaagccctcggacatgcccggcatttcgagagaagtcgccgagcactccttgaacatcaaggccagctccaagccagtgaagcaaggactgcgccgcttcgacgaggagaggcgcaaggccatcggcgaggagctccagaagcttttgacgggcgg

SEQ ID NO: 16337 - DNA, 544 bp, Setaria italica
  Peptide Sequence Number=SeqID_82311
tttccgtactacaaaatttactatcaaacatgctctgaaagatgcaccaattcaatgtccactctagcatctttggaagcatcagatagcttttactcccatggaaacgagaaccgacagttggaccaactccaggcagccaacaggcgatcggaaatgcaatgacgcctttattaaccatcccgatcaagtagttctctttgcgcattaatctcatcatgatatcatgctctgaaagatccttaacaacgcaaagttgttgtgacttctggaggaggacaaccttctcaactactttgggccatgatatagtttgaatctccagatccgtgaccttaaggctgttatagtagaagtcacgaacgttcagtgtgcttctcaattttacaaagaacttgacaaggttaataattccatacgtcgtcaatataaccattgatccaatagtgatcatcttcacatatgtgaacggaatcaatgggtgattcttgatgacattcattaggtcacatggtttcttccctacctcaagtgcttccactcc

SEQ ID NO: 16338 - DNA, 346 bp, Setaria italica
  Peptide Sequence Number=SeqID_82312
ccggtccgcgtccagcgccgcgaaccgggcgtccacgcacgagttgaacgcgcgctcgtcctccacgaagctctgcaccgtccgcccgtccaggatctccacgctcatcttggccgggaaaaaaaccttcagtttcctcacgatcgagagcttgttagctcgctggctagctacgtgcttgtgtttctgtcgaccggtttggagagatgcggcaggaccgtgccggagttttatagcggcgcgctaattgagccgggagttggttttgccgggggcaatatgctgtgggatgtgccgaagcatcagcaacagcgggcggtctaagaagactaataattctaatccg

SEQ ID NO: 16339 - DNA, 306 bp, Setaria italica
  Peptide Sequence Number=SeqID_82313
cttccctgttctccgctcctgtgcggcgacgagcactccggtgagcgcgatgatgaccctggacctgatgggagggtacgggcgggtggacgaacaggtggccatccaggaggcggcggcggctgggctgcgcgggatggagcacctcatctcgcagctctcccgtgccggcaccggcgagcggccgtcgtcgccgccgccagggacggctccggcgcagcaccatcagcagcagctgccggagcagagccacccgcagcagcaggtggactgccgcgagatcacggacatgacggtgtccaagtt

SEQ ID NO: 16340 - DNA, 422 bp, Setaria italica
  misc_feature (415)..(415): n is a, c, g, or t
  Peptide Sequence Number=SeqID_82314
gttgacggtggtcctccttgcaccgaccatctccagcaccatcatgccatagctgtagacgtcggacttgctggtgaccgcccccaacccgacctgcctggcgaacacctccggcgcgatgtagccgacggtgcccctggccccggcgatggacacggggatggtgctgtccctctggggccgcagcttggccagcccgaagtcggagatcttggggcggagctccgcgtccaggaggatgttgtggggcttgatgtcgaagtgcacgatgtgggcgttgcacccgcggtggaggtactcgagcccccgcgcgatgcccacggcgatgcctagcagctgctcccacccgaggtcgccgccggcggtgtacctctccagcgagccgttgggcatgtactcgtagacaaggcccctntggatcg

SEQ ID NO: 16341 - DNA, 261 bp, Setaria italica
  Peptide Sequence Number=SeqID_82315
agaggaacggcgtggtgcaggtgcaggacggctcggatatccgggcgctggtggagaacaaggaggcgttcgccaagttcgtcgacgacaggttcaggaagcttgacgtagacggcgacgggaggctgtcggtcaaagagctgcagcccgccgtcgcagatatcggcgccgccatcgggctgccggcgagggggtcgtcgcggcaggccgaccacatctacgcggaggttcttaacgagttcactcacggcaagcaagact

SEQ ID NO: 16342 - DNA, 264 bp, Setaria italica
  Peptide Sequence Number=SeqID_82316
tttcgtttcgtcgcgtcggggtcggccgccacgccccctccgccggccgccttcgccctcgacagctcggcgttgccgggggacgccacgagggaagcgatgcgcttgcacgcgctctggatgtgggccacgaggacggtgaggtccgcggccgcgccggcctggcccatgtgctcgagcagcgtgggaggcgacgccgccgcggccgcagcagccatgtcgtccgtggccgccgcggcgagcggctggcagacgaaggcgcgg

SEQ ID NO: 16343 - DNA, 323 bp, Setaria italica
  Peptide Sequence Number=SeqID_82317
atcgagtgttcacaatggcaagagctgtcgcctccggtgttgcggcagccgcagctgggggcttcgggccgccgtggctcctgatgctcggcgcggccctgctctccgtgtgggccatcacgctggccgtcctcctctgcggtgacagctcggatggcagacgcaggccgagatacaacgccgccgctgctggcgctgcagcaggtgcagctagcggcggcgccgtctgtggcgccagcggtggcggaggtggctgcggtggtggcggtggcggtggcggtggaggaggggctgtggtggcggcgggggcggaggcggcggtt

SEQ ID NO: 16344 - DNA, 314 bp, Setaria italica
  Peptide Sequence Number=SeqID_82318
taagaaggaagaacgacgaagggaagaagagaagagggagggcgaagcccgcgtcgttccctgctgtttctcccccaccccttccctgccccggcttgcgccttcgaccttgctgaaacttccgacctcagaaactgaaagggtctgtgaagagattttagcggcagttcaatggaggtgaactgctgatctctgattcctttcctatcatcagtggcaagttacaaggggctcttctcattccttgcagtggagactgttaagcttcagctgagcatgctgctttgcagaacataaatcggtgtaagagaagt

SEQ ID NO: 16345 - DNA, 915 bp, Setaria italica
  misc_feature (835)..(915): n is a, c, g, or t
  Peptide Sequence Number=SeqID_82319
ctaggctcaacttattgatatacaaacatctccttttgtatacattaattatccagcaacacgtctgaatataaagtgaagtcaacatagcatgttgtctcaatgaaattgttgcgtattaacaagtttgtttcttttggtatcacgccataacctttgttactggaaataataagccataaatcaaggcagaccctttgctctatgtaaaacaaatgatgtttttgctcttcagactagccgagtgaggaatggtactcttctttgcttattgtgttgtagtatgccgcacagcagtctagtttagggttttaacatcctggatagttgaaatggtctgaagtgcatcacccctttactgcttgtttcatcccttaaagatgatatcatttctttttccacttaattggtgatgttcaggatcctgattgaaaattatttgttctatattttgtacagaacataaatcggtgtaagagaagtttggtgctattactttgctaaatagcttgagaggcaccataactacaacatccaaataggcgaagatgctgcagtttacaaacttaattctgtaacgcagtttgaagagcagctaccatctgcagtttgaagaaatctcactagcctctcaaaggcttctggggagaatccattccaattccatacacttgctttcaccccaagcatggcttgttatgattgtacttaatataactgttataatagtgggcgctttcctttcgcatgaagttttgttggtacccaccaccgcatctgtctgtctatatgaacacatttttgttggctaatggaattgccgatttagaaaccnnnnnnnnnnnnnnnnnnnnnnnnnnnnnnnnnnnnnnnnnnnnnnnnnnnnnnnnnnnnnnnnnnnnnnnnnnnnnnnnn

SEQ ID NO: 16346 - DNA, 689 bp, Setaria italica
  misc_feature (1)..(88): n is a, c, g, or t
  Peptide Sequence Number=SeqID_82320
nnnnnnnnnnnnnnnnnnnnnnnnnnnnnnnnnnnnnnnnnnnnnnnnnnnnnnnnnnnnnnnnnnnnnnnnnnnnnnnnnnnnnnnnctaagtgaaatcttggctgtatcgtgaaatgaacaaatcgtacacatacacaatgatgaattagacagcaactctttaccaaccaaatcagatgtcttgcaaaatattaacccagcggttagcttacgtgcatggactcaagtgcccataagtttcaagatagtgacaggcagcagtcacaagacctaattgtcttattatacggctagtccaacgactcaaacaagataacagaagccattagtaaatgacctacaggtgcagaagaattaccagataacccctgaaggcagtttgaattttgatggcagcaagctcttcccttgaattagcaggcatttttggtgcggtcgaggtaactgctgtgaggcggacaacctcagcagcggcctgggcagcaactgcagcagcttctgcagcaacagcagatgcaagcgcaacagagtaggcatgcttgttctgctcactgtctgtttcaactggcttgacatctctaatttcctgagagtgtggctgagcaggttgtggtggtggcggctgcggcaacggagctactggagcagtccctgacgcagttgaggtttgaaggattcagagttgc

SEQ ID NO: 16347 - DNA, 1561 bp, Setaria italica
  Peptide Sequence Number=SeqID_82321
accgcattttgcggggcttctactggctttcgcgggtgagccgttttgccttctcccgtttggcacggcttcatcaaaagccatcctagaagccgctcgatgagccgtgccaaaggggcccttaaaaaatacatcatggagtgttaaaagagcacgaaacctaacaatcacaaggcctgatcaggcaacaggggcatccttcagcgttgtaggatcgaccttcggagggtcagaatggcgtctcgccctttcctttggcttatctactggtgcaccgctcggtttgtccatgatagggaaggacaggcgcttcttaacaaccgaatggaccagaggtgctcggtccgaaacctcaagcttctcagtcaataagctgcggtatcgagactttgcccttgcagactctgttgactgcatgtaactggggagaggtggtgtgctcgtcaggcttgcatcatccctgaccgagcctccacctgtgctctgcctccttgggcgttcagaacgtatgcttgtgatgctcctcaggtcatcctccttgtacagccagctgccccttggacttgccggcctgatctttcctgaggtagatggggcctttgatggcggagttgaaggtgattgccggcttggtggacggcttgatttgtttggtgttgctggtctctggattgagatggcacggggtacagacgttcgaacagcactggtgctgggattctttgtcagagtacgctctttaggatctttatctgatgcagccaatcggctctcccaaggtcttgctgacatccagcgttccatccagctccagccccagttaggattcccaggttccgtgaaagttggggttatagttcgaccagaattcctccactggtgagaaaatgcatatgcgagtgctctttctcgtcttagtgcagcttcctgcttcataattaggctggcctcaatttgctctttggattgatgactgtgatcccagtcttcatcaatcttcattttctcaagctctctttgatgtttcaattggagctgcctctgaagagcctgtttttcctcctccagcttcacccttctagagtagattttagtttggactcttgccatcgtttgtgtgcaatgcaaagtgtgagcagtttgacgcttgacagcatttccatcaacaagcgacttcaatctaactagccctcttagtgcccgcaatgctctccttgccagataacccctgaaggcagtttgaattttgatggcagcaagctcttcccttgaattagcaggcatttttggtgcggtcgaggtaactgctgtgaggcggacaacctcagcagcggcctgggcagcaactgcagcagcttctgcagcaacagcagatgcaagcgcaacagagtaggcatgcttgttctgctcactgtctgtttcaactggcttgacatctctaatttcctgagagtgtggctgagcaggttgtggtggtggcggctgcggcaacggagctactggagcagtccctgacgcagttgaggttgaaggatcagagtgcctacactttccaaatggc

SEQ ID NO: 16348 - DNA, 312 bp, Setaria italica
  Peptide Sequence Number=SeqID_82322
ttgccctatctggagccccctagtcagttttttgtggaaactttgtgaagccccatacaacaagaccctggattggtccaaatggtacatcttctggactgacgaacgtgctgtagcaaagaatcatgctgagagtaactataagctaacaaaagaaggattcctcgccaaggtacctattcttaatggccatgtctactccataaatgacaatgccacagtggaggatgcagcaacagactacgaattcgtcatcaggcagctggtcaaggtccggacaagtcggggtctcagagagcaacgactcgcccc

SEQ ID NO: 16349 - DNA, 513 bp, Setaria italica
  Peptide Sequence Number=SeqID_82323
ggcgtttcgggtacgaggaggaggcggggcagggcgagtgaatgcacagttccggaatattttggtgcgatagtaacttgatatagagttctagatcaaagaagcaatggaaagggaatcagctaccacatatgagccaaaaaggaacagtgaaataagggtttttgagagttttgatgatatctcaacagatctggctgagtatatctcacaaatttcagaaatttctgtcaaagaaaggggatactttgctattgccctatctggagcccccctagtcagttttttgtggaaactttgtgaagccccatacaacaagaccctggattggtccaaatggtacatcttctggactgacgaacgtgctgtagcaaagaatcatgctgagagtaactataagctaacaaaagaaggattcctcgccaagttacactgattccacattcaacttatgttggcaccaagaatcaaataagtggataagatgcagttgttagtgtcgcatttatgatg

SEQ ID NO: 16350 - DNA, 1519 bp, Setaria italica
  misc_feature (1487)..(1519): n is a, c, g, or t
  Peptide Sequence Number=SeqID_82324
agagtggactttttttttgttctagctctgtttgagatctgagtgtttttattctctattgttggtatgtactgcatgttataaaatactaccatataaattttattgacacggtactcaacggattatctaggattatatgactgacctgtggatttcttttttttttttcattttttcttgtttcaaccaaatgttaggagtatttggtcatttcatttcaggcttcagagcaacaaggcttaaaattagttgttgagaggaccagccagtgggagtcttagataatcaagaattccctgttctttattgcaatgaattgttcaaagaaagagcaggtcaagagtagcggtatatattagctcaaaatctgtgttgctaacattcagtctcctatcattctctttgttcttatgtgtcggttctttgattatatgtatctgttccatgttattcccattcttgccatttcagttacactgattccacattcaacttatgttggcaccaagaatcaaataagtggataagatgcagttgttagtgtcgcatttatgatggttgctgctgctgctgctgattatgggttagaatcttgcaatgcatccttttgccgagttaactatttgacatgaaggattcctcgccaaggtacctattcttaatggccatgtctactccataaatgacaatgccacagtggaggatgcagcaacagactacgaattcgtcatcaggcagctggtcaaggtccggacaatcggggtctcagagagcaacgactgccccaagtttgatctcatcctccttgacatgggctctgatggtcatgtggcctcgctgttccccaaccaccctgcccttgagctgaaagacgactgggtcacctacatcactgactccccgcagcctccacccgagaggatcaccttcactctcccagtaatcaactcggcttccaacatagcgatagtggctactggcgacgacaaggtgaaggccgtgcacttagcggtttctgacggcactgaaggtcctgatgctcccgcgttgctgcctgcaagaatgatccacccgacggacgggaagctggtgtggttcctggacaaggccgcggcagcatccctcgaggctaacaacggtgatgcctcctacgacgagcatgccgagtaccgactttgaagatccaaggtcgttttgccgtgaatgagtggaggcgtgtaagtaggcgggtgggatttgatggaagatgctgggtgccccgttttagctcgatatacttgtagtcttggcattaattttgcctagggtctagttccgggaaatcaaaaattgccgtggtccttttgccatgagatgtgatttagagcgaagaaatgtgtatgcgatgtcgagagcaaaggatgagaacaccggatttttaactgtgatagtattatgctatgcgctgcattctatttctatctagctgaagttagattactttnnnnnnnnnnnnnnnnnnnnnnnnnnnnnnnnn

SEQ ID NO: 16351 - DNA, 443 bp, Setaria italica
  Peptide Sequence Number=SeqID_82325
gcgccgacgccccgagatccgccgcgcggtgcgccgacgcccccgccaccccaggcggcggcgacccgtccgacgccggtgaggcggcgtacgggtgcggcgaggggaagaactggcgcgtcacgacgggcggcgagggcgagcagccctcctcgtcggggctcccgccgagcaggtcgaaccggaagaagcccccgccgccgccagcgacgccgctggagctcgaggtggccgaggccgacccggccgtcggcgactcggcattgagatccagcaccataggctccagctcgagcccggcaggcgatcgagctcgcgagccgcccaccccggcctcctcctcctcctgtagcaacctagcagcagcagcgtcggggcgcgggggcggtggccatggaggagtcgtccccagggcaaaggggacggcgcgatgggacgtgagg

SEQ ID NO: 16352 - DNA, 1082 bp, Setaria italica
  Peptide Sequence Number=SeqID_82326
accggtaggaagataagcccatgcaggaacccaatgaggacaagagccaagtacatttggaagtaatagaccacaaaaacttcagattttgcaaaacgcaggacaataactcccacaagcttggtcaaagtgattccactgaatacagaagcacccatcgtggatagagcctgccttgcacgagtttctctgtccccagtgccaatctataaaataataatagaaacctagtgttaagtcttggtgtgggctgtggaaaataacagccaacacaaacattagttaatatattttagaagcgtgtttatatcatatcaaagcagttctgttgaacgagttgtgtggcattagtatcatccttcttgctacgagaaattatgcagactgtaaagagcatatccaattgaaatacttctgcattaaagtccaaaatggtattatcatatagctgtgcgcatggtactaaatcctactgataggaaggaatgattggcaggttttcatgatcagtacaaatgtgtgcagcaaagatctgtagaattggcctgaaaagtgctgcacagtttcatgccaagccttttacatgcatagcaggaatactttctttcaagaattataaaaaacaagggttagaactttccaataatcacataaatcagcaaagttaaaagatttggagctggtatttccaaatgtacagcacctaccataaaggcatgcgtgatatgaacacagaactcaacagcaattcctattgacataacaaggtttacaacagaaatcgcattgagctgaataccaaggatggccatcactcccatcaaatccaagactatcattgccagcacaattaaaatgattgctgaagcccataaactgctggtgactaggaagcaaacgacaaatatagtaccaaggcaaacacatatgttcatgatagctgtcttccacacacccagatattgctcaaagaatatatagaacacagaatatagggaaaatttccatctgtaaatctttggacatttagaactgaagtcccgagcagctctcattgagttaacatagtccgtctgcttatt

SEQ ID NO: 16353 - DNA, 1381 bp, Setaria italica
  misc_feature (29)..(29): n is a, c, g, or t
  Peptide Sequence Number=SeqID_82327
tttagcatggtctattcctgaatcatcanactttttaggatccagctggaaatactgcaaaacactttgagtagcacagtctgtactgagtggctttaagcaaatgtcagcaagggctactgttgacccggaataacttgcacgcagatcatcaacctttttctgaatctggaatagtaatttcatattgttgtcatttactattgaaggagctgcagacccactggatgcagaagtggctaacacaagctgctcaatcctataaaatggtgcaagatggctgtcaaaatagttcttctcatcagcggcttgacttccagggctaacccaaagcttttctggtcgggtttcaaccttgaagcgaaggagaccaatacataagaggagagggataagcaatgatacacataacacaaggagagggtgtctagcaacaaaaattccatgcttcctaaagaaaattgacatgtaagtttgaacaatagagggatatgatggtttgacagtagaggatgcagcttcagacacctgaaccgagttatgaggactcttgccattttggtttgagtctgacttatcgtctgaattcctcaatggttttgtctgcaaggaggaggcagttcttcctcgtgctctgtgtaacaaaccccacagcagaaaagcgcataataacgcaaggtagatgaccactagtgagaagtctaagcatttggcctttaaagaacccattttaactgaacaggaggtatcagtgttcagctgtggcagcaaggatcccgtgcaaacagaagaagaagggcaatcaccgcatgaacaacccaaagatgggtctccacaagaataaattgtagaatttagaggcttcacaccagatgaatcactaaaatctgatcggaatgttatcaaataaggtgacccaggctcattagggttcgcttgccgcccaataaatgccaaccactctttgtaagttttcgcacctccaccgagaaaatccattgcacgtgtgttcagagttccaaacttaacatccttgcatgagttgtatagctcttcaccatagttagtagttacatagtaatctatgccatcaacagtcatagtgctatttatctgctttactgaagtcacattaatgaataggctttggtttggagaacaagacatctcacagaagagattcaggaaattcctcaagcatgctgggcatccaacaagaaatggcacagcctgttgaacttgttggtgtaacgtgtcaaactgatctgcggtgcaacagacattgccagtgattgttgggcacaaactttggatccttgacgaaaacaatgtgtctggcttaacagctttggttgcgtccgcttcgtctacgccgttttaa

SEQ ID NO: 16354 - DNA, 3151 bp, Setaria italica
  misc_feature (1)..(32): n is a, c, g, or t
  Peptide Sequence Number=SeqID_82328
nnnnnnnnnnnnnnnnnnnnnnnnnnnnnnnnaaatttttgagacatgcatgttatttgaatcaataaatgagggcaaatcagtcattagctcaaggaagactaccttttagctcttgcatccaaacaccccacaaggactaaattttagaggctaaaatttagggactaaactttagcccatcaactttgaatccaaacaccacctagctatgccgcacaatctagacccaatacgcctcttagtttccttttccaccatgtaagcaccaactaacctagttatgcaaacaataagagatggatatgtacagtctttttctatggatctatagcactgctttcaccttcaacaaatgctgtacaactcgatggtactcctgcaccgggagagatggatgttatgtacatggacgcacagaggatcccaaactggcccatttcaattttcaatgatttcactattaactcgaataaaatcccatcaagtccgctcggttgaagctgaaggtggttgattttgttcaactggcttcaccgattttggaggagggccacataagctcagaacgaccggtaggaagataagcccatgcaggaacccaatgaggacaagagccaagtacatttggaagtaatagaccacaaaaacttcagattttgcaaaacgcaggacaataactcccacaagcttggtcaaagtgattccactgaatacagaagcacccatcgtggatagagcctgccttgcacgagtttctctgtccccagtgccaatcataaaggcatgcgtgatatgaacacagaactcaacagcaattcctattgacataacaaggtttacaacagaaatcgcattgagctgaataccaaggatggccatcactcccatcaaatccaagactatcattgccagcacaattaaaatgattgctgaagcccataaactgctggtgactaggaagcaaacgacaaatatagtaccaaggcaaacacatatgttcatgatagctgtcttccacacacccagatattgctcaaagaatatatagaacacagaatatgggaaaatttccatctgtaaatctttggacattttagaactgaagtcccgagcagctctcattgagttaacatagtccgtctgcttattaaggggagtatggtatgttcggaatgctgatgcttgtatgatgccactttcataaccattgaggtccaaacttgttgaataagctccttttccccctttagaacaatcactcgatggaagtgcatcaagaaaccatgggagtttatctttgaattgggttgtggatggacgtccattatccaagtctgagtgtaggaagcacgttgtgcagttactgcaggttctgcttgcgctgcaagtgcctgaatcctgatcgagttggcagcatggaggctgatcatctggagggcagtaacttccattcacaaatttcctacagcatccgaatgcttcaggagacatccaaattaggaagtcatcaagccatgaagcagcaggtttagcaatgtaactagtctcaggggataacgattgtcttgctatctcattcaaaagagaatttgaattacactggttgatcgaacatatctgattcgtatgcaccgatgcagagctgtaattgaagtctttcacaacaaagtataatggtggaccaactttcatgtactttgcaaggtcatcaaaatagtcctgtaaataggaatttcgtggcagaacaatttgctgctccaatcctggttgcagtctagtagacaaagctatgcttgaaaatgccaatcctacaaacacagtgattacaacgaacttcactgcccggtaactgagaattggtccatggatatccctcatatatctagcaagcaagtggagcctctgtccatcaccaccatcaccggcagctggacttgacgcgattctcgcacaagggacacaatcaatcctgccatcctgtgctctcctaaagtcaaatacaataagggctacaaaagctgtcacttggagaaggaaatccataaagaccgccagtgcggcaaacatggaaaacactctggtcgcaggcattggattaattgcactcacagcaaaggctagtacttcagcaaaactggctaatgtaatggatggtccaacttccaccagtgcttcacttatccgctcttccaagtttgactgatctggttggcgtttgacagcatgcacaaggatacacatgttatcgacaccgacagccagcacaagaaaaggaatcacttccataataataagggtagacttcactccaatagcactaaagaatcccattgatcctaaaactgaaagcatcaccaggacgaccccagacaagccaagcagtacctttgatgaaacaaataatgacaaccaacgagaaggccggtctccaagtgtgaatgatatatatgcaaacatcacaatatagctaatcactattgtaatagcatcagctgtactttctctgtttaattcatcttggatagagctctcggacgaaaaggacaatgtcaggttctgtgctaataccatcggaagtatttcctccttaacaagattaataaatgcccgttcccaagccacagccttcccgttctcttgccctgttgtctcaactttgttgttcacaggataagttattacaaatgcagaagcctcagtaaaattgtttcctgaaaaaccacctaaaattgtacttggatcaataggtgactgaaaagtgctcaaacatgtctcttcagaagtgtaatgctgaaaacaaaatttagcatggtctattcctgaatcatcatactttttaggatccagctggaaatactgcaaaacactttgagtagcacagtctgtactgagtggctttaagcaaatgtcagcaagggctactgttgacccggaataacttgcacgcagatcatcaacctttttctgaatctggaatagtaatttcatattgttgtcatttactattgaaggagctgcagacccactggatgcagaagtggctaacacaagctgctcaatcctataaaatgttgctagacaccctctccttgtgttatgtgtatcattgcttatccctctcctcttatgtattggtctccttcgcttc

SEQ ID NO: 16355 - DNA, 432 bp, Setaria italica
  Peptide Sequence Number=SeqID_82329
atttttacatggaaaaacaaatttaagggaacgtacaaacttcaaatatagacacaagtgctgaccatactgcagcattattttttttaacgaaaatactgcagcattattgaagccgagaaatgaacggagagccgtgacaatgttttgactttttgacggtgttttttacggatcttaacaagctgctccctgtgcgatagcgcggttggccacgaggctggtcgtgccgtacacgggcagctcatcggcgccggcgcggcgaaggctctccagctcgaagaggtcggagctggcgtcgctcccctcctcgtcctcctccagctcctcgaggctgcgcaccagctcctccaccctgcgccgcaccaccacggatgccccggcgtccgggccgaaccttaccgtcctcggctccgagggttgcggcgcgtc

SEQ ID NO: 16356 - DNA, 531 bp, Setaria italica
  Peptide Sequence Number=SeqID_82330
cttctcggtcgccgtcacggccatcgtgtacctgcaggacaacgtcgggtggagcgtcgggttcgccgtgccgatgggcctcatgctgctctccacggtgagcttcttcctgggatcgggcctctacatcaaggagaaggggaagaggctgatgttctccgggataggcgccgccgtcggcgcggcgatcaggaaccaccgggcgcggttgccggccaagaccggcgacggcgtgtaccatcacctcaaggactgcaagctcactgtccccacggaccagctgaggttcttgaacaaggcgtgcatgatcggcagcaccgaggagggctcgggctcgcccagcaacagcggcaggaggccgtgcacggtggaccaggtggagcagctcaagtcggcgatccgcgtgctgccgatctggtcgtccaccatcttcctcgcgctggccatgaaccagagcttcgccgtgaagcaggccgacaccatggaccggcgcgtcggcaagggccggttccaggtgcccagctgctcgct

SEQ ID NO: 16357 - DNA, 396 bp, Setaria italica
  Peptide Sequence Number=SeqID_82331
aacatcatgttctccccaggggcatgtacatccctaatctacaccactgaggatgcatcaagatttgtactagcaggagcacgaagcccattgcattctcaatggtgcaattaggggtgcgtgcaacttgagaagcaaataatatgcactcaagaaaattattaaaaaagttcgtttggtagttgctcggccggaaataagtgcctttaagttacaaggagttcatgcagtggctccttagatgaaattaattttcagaaggaaatccagggatatagtaagggacagctggtggagagtctgaagctaagtcaccaagctcccaggttgatgaggtggaggaacaggtacgcggaatgtgggatgccaccttttcaaaatgtggtatgaaggggg

SEQ ID NO: 16358 - DNA, 856 bp, Setaria italica
  Peptide Sequence Number=SeqID_82332
tcagaaccatgattgagaccatgataaggaggaaaattgttccatcagaagtaactataagctgttgcaggaggccatgataaaagtgaaatgccaatttctgatagatggatttccaaggaacgaagagaatcgttctgcattcaagaatgttacaaaaatttctccagcatttgtgctattctttgattgtactgaggaagagatggaaaaacgtcttctggggcgcaatcagggaagagttgatgataatattgaaactatcaaaagaagttccaaagtttttgttgaatcaagtttgcctgtcattgagtattatagttcaaaggacaaggtcaagaagattgatgctgcaaaaccaattcctgaggtgttcgaagacgtcacggccatttttgccccatatgctccaaaggtttaaatagagcgatacaaggaacgctgtcgaggcaccgaacaagtgtgactacatatctgtgattataaacctttttaatatagaagagaagttttagttcctatgagctactccctccatctcaaattactattcgttttggtttttctaaatatatacttatgtctagatacatagcaaaaatgatgtatttaggaaagccaaaatgaatagtaatatgggacggagggagtaccagcatatcagtaggcaattcattttgttaccagcaataagtagatctaactcccagtattcctgctagagtaacattgtaccaatggcgttggtgtatcctttgatattgttgttctaatctgtaattttagtattttactgcatgggcgatcaaaccttgtgacattaccgaaattaaaattgatgtcatattttttaaat

SEQ ID NO: 16359 - DNA, 275 bp, Setaria italica
  Peptide Sequence Number=SeqID_82333
aggtggtgaagacgctcgaggagtgcggcaggatcacctttcccatatccctcaaacagcccgggcctcgcgagcagccagtgcagtgctttgtgaagagggacagggcgacatccacatatctcctctacctagggctcagcccatgtaagttctcatgcctggctgttgatttagtgttcttgttcaagttgttttgttcttatccctttcgtagtagtgtgtctgcatgaagatgaacttattttagttatggctatcttgctctagtcgcc

SEQ ID NO: 16360 - DNA, 1324 bp, Setaria italica
  misc_feature (44)..(44): n is a, c, g, or t
  Peptide Sequence Number=SeqID_82334
tgcgcgtcgccaggtcgtgttgtgtgcgcacgtttgccgttcgnggcgcgaggtcaccaaggaggtggtgaagacgctcgaggagtgcggcaggatcacctttcccatatccctcaaacagcccgggcctcgcgagcagccagtgcagtgctttgtgaagagggacagggcgacatccacatatctcctctacctagggctcagcccatctctgaatgtggagaacgacaagcttttgcttgcagctcgtaaggtcaggcgtgccacgaggacttcttttgtgatctcattggcatctaatgatttctctcactccagtagcacctatgttggtaaactgaagccaaactttcttggcacaaagttcacaatctttgacagccagcctccttctgatgctgtggtgctaccaaacaataaaccaagcaaaaggcagtcgaaacaagtatcaccaagactgccgctaggcaattacaatgttgctacagtcacatatgagctcaccgtcctacgcaaccggggaccaaggagaatgcaatgcaccatgcactcaatcccagcccagtgcattcaggagggtgggaagtgcccaacccctactggcaccatccactcacttgatgagccgtccacattaccgagtaccaaaggaaaggaaccagctgtagaattttcgtcgacaagcctcagtgctgatctgtctgggccagcttgtacgagcgaagcgcctctagttctgaagaataaagcccctcgttggcatgagcagcttcagtgctggtgcctcaatttccgggggcgcgtcacggtagcatcggtcaagaacttccagcttgttgcctctgttgatccttccctcaacgtccccgcggcggagcaggagaaggtgatcctccagttcgggaagatagggaaggatatattcacaatggactaccggtacccgctctcggcgttccaggccttcgcgatctgcctgaccagcttcgacaccaaacccgcgtgtgaataacctaaggaggtgtaaagcagggtgcggatcttgcttatgttcagacttcagatacaacctgcttcatgggcgatgtaaattctctggccttgctgagccactgcctgggcaaaatggtagcttgcgaggtggaaacaggtaaatgacatctgtaccattggaagatttgagcgacctggtgtatccaactgttaatgtattagggcgccctatgtattattgttgggatgtttggctgctaagtatcacagccttatggataatggacgttgtgatcatcttgcttccctgctcttgtcttctaaaaaaaaa

SEQ ID NO: 16361 - DNA, 284 bp, Setaria italica
  Peptide Sequence Number=SeqID_82335
aactagaagatttggttgaataaatgggtttccaacacttgtttcagatgagagcacaggtggctggtgcagcttagaagaactcagacctctgtcgaagctccaaagccttgaaataagttgtctggagaaggcaccttccggttctatggctgctaaagcaaaccttagcagtaaacatcacctgacatggctagacttgatatttaccagcaggctaggagacgaacggggtggtcgaaggcaacattagcgaggaggaacacaggagaacagaggaggtg

SEQ ID NO: 16362 - DNA, 504 bp, Setaria italica
  Peptide Sequence Number=SeqID_82336
cgactcaaatcattagcttacatgaagccctagtggttcaaacagatctgcttggtaagattgacaacggcaagacaaaaagagcctgctgaaagctagcaccaatgcacatgaaaagaggatcactagcttaaagagctatgcttttacaaaagtgacgctgaacaaagcttagcttgaccctggaacagaactttacttaccgtgcctcagccacagatgtgagagaaaagatgctcatgcagtcatgggagttttgtcgctgcataatacctcgccgaggagatgctgaaccgcctcccgggctgccgttgccgggccacatgcaagtcgccgccggggcagaactccatgacgaggcaggcgtagtgcgccgcctcgaagtcagcgtacaatgtcggcaggaaggggtgatcgagcgtgcgcaggatctcacgctccacctccgcccgccgcagcttcttgcggaacgccagcgcgtccttgtccaccaccttcatggcg

SEQ ID NO: 16363 - DNA, 389 bp, Setaria italica
  Peptide Sequence Number=SeqID_82337
ccaaggataaatccactagaagaggacaggctgagagcacaattccagtatttccatcaaaaaggcgctgggttcccttgacagtcaaacgattaattactgggataatggaaaatgtgtgcaacagaactaccccttttgaatccccagtgatggccttagattggcggataaaacaaacatgcactactggtgctgtatgctcaccatatatgacttttgctgctgtagctttttgtacatcccaaattgtcatatgaccatcaccatatcctactagcagaagatccccttgctggttaaagcacatggcagtcactggtgattgagtcttctcaccttggtccaaaagacagcatcttgctctgtatcatcagcttgatgaatgg

SEQ ID NO: 16364 - DNA, 281 bp, Setaria italica
  Peptide Sequence Number=SeqID_82338
agggtgagctggtgccacagcttccgttggtagaggtcggcgagggacgcataccagtcggcgaggtccggccgcgcctgccgctgcgcctccacgtactgcagcgccatcgcaacgccaactccggatgtttccgagccgagctgaggagtcggcgggcgttagggttcgagggagatctgcggcggcggcgtgagacggaagggaaggatccggatcggtcgattagatctatctggtggagtcctggactccactgcgaggaagagagaagagaagag

SEQ ID NO: 16365 - DNA, 631 bp, Setaria italica
  Peptide Sequence Number=SeqID_82339
gcatcttcacgtaagaattggttcattaatccgtgactcccttgtctcacgcaactttgtgatcaccccctctaagaaagtaattgcagcatccttatcaggatactggcgagaagctatcaccgcaaaatgggcaagctttagcagattaatcttggtctcgaagtcagtgatgaaattgttgtagagctgaatgatagtgtctccagtctgtgctgcctggagctgcaggaattggtcgagcttgagggtgagctggtgccacagcttccgttggtagaggtcggcgagggacgcataccagtcggcgaggtccggccgcgcctgccgctgcgcctccacgtactgcagcgccatcgcaacgccaactccggatgttcccgagccgagctgaggagtcggcgggcgttagggttcgagggagatctgcggcggcggctgctgcgagggagacgacgagagagaggagggtaacaaccaccaccagcgacagctatgagaaaaataaaaccctagcgctggcggaggtgaggccggggaggaagggaagggagggggggagatacttgccgtgagacggaagggaaggatccggatcggtcgattagatctatctggtggagtcctggac

SEQ ID NO: 16366 - DNA, 1625 bp, Setaria italica
  misc_feature (1)..(20): n is a, c, g, or t
  Peptide Sequence Number=SeqID_82340
nnnnnnnnnnnnnnnnnnnntaattaaattacggtaattgtcgtcttaactaatttcgcaacgcgacttctaaacaccaaccacaacgatcctttaaagacttggaaagattcagcaagattttcctgcatccatgtccaacatacgagtataatctcagttacaaatcaaatttaactgggaaactacagtaacaccctgctagtatgaaattttcaatccatcagcctcgtctccgtgacactccatgaagttctaaccatccatgtccataggataacaaaaggaaattacaggccctgatcagtaggacgcaggcaggcaaaatgctcagggcagcaggtttcattatccagaagacgatgactacaagtgtcacacagagcatctctcgttttgcaacaagacctcgctgaccaagcgccactcgcagatgtggaacagacgtgaaattacgcagcaacaagatcaggggtttccgcctcaactgaaagcaatgtggtatgcacctttccaacccaggcatccagcctttcacgcaaagcctttacctgtggaattccaagtactctaggctggacccacgagacatgaactgtactgtccacttcatcaattattccctcaataagatgaaccgagaggctcttcataagaagatgttcaacatcactgacagaaagcttagtcctctcagcaataacactcaatgggatagttctatcttctgatggccggctaaagattatctccatcaggcaaagaatattgatcttttcaagcagcttccgttcattctgcaccaaagctggctgtgcagtaagagcagcattgtgaaccctgcaaagttcttggtagagagcaaggttgccggtgttgaacgcttgtaacatatgatagacccactccaccttggttccaataagactattgataatcggatgcgctaacaattccccaaagttgtaaatgttatcacccagcaaggctgccagagaaagatcaaaagccaagtccagcttgaatgactctgagagagattccacagttgtgtaggccagatagagaagagcattcttgtagaactcagcaaattcttggcgggccttgtggtattgagatgatatccagtaaaagctagcatgaactgtgggatcaacatcagtcatactatccagagtggttttcccttcatccaacaaattcttgcactccttttggtttcctttctcaagattaattgctgcaatttgcatcttcacgtaaagaattggttcattaatccgtgactcccttgtctcacgcaactttgtgatcaccccctctaagaaagtaattgcagcatccttatcaggatactggcgagaagctatcaccgcaaaatgggcaagctttagcagattaatcttggtctcgaagtcagtgatgaaattgttgtagagctgaatgatagtgtctccagtctgtgctgcctggagctgcagggtcttgtcgaactacaaagaattaaattagactagacaaatttagacaatacttacaacgtaagtaagaaattagtaaacttagttaacttagttacctaactttacttaattactaaattaattaccttactaaattaa

SEQ ID NO: 16367 - DNA, 275 bp, Setaria italica
  Peptide Sequence Number=SeqID_82341
gcgcagcccgcgccacctgaccgcctctccctcgccggcaacccgcagcgcagcggcgaccggcgacggcgagcgcctccatcacctgccggcggcgagtcgtcggcgagccgcattcaagcttggattcctgaatcttatggcttcattcctttggagattgtaattcagcaagctttatattgaatttgtgaaaatagagatgagttctctgaagaaatccgacaagaaagctgccctggatttcgcagcatggtatttcaatgttactacat

SEQ ID NO: 16368 - DNA, 354 bp, Setaria italica
  misc_feature (310)..(354): n is a, c, g, or t
  Peptide Sequence Number=SeqID_82342
tttactggtgacgcgagtatatcacaaaaaatggaaactctggccttatgttggccgcagaaaggggaactcttcttcccgtctagaaactcaggatcgttatagttacaggtatacagtagtaaagattcgttttctggctctgtgaatcatttgtagcgagcggaatgacacatgtgactatgtgaggcttcaagacagctttacccgggatatagtgttttcattttttttgtttggaaaaacatagccttctgtacgccatgcgaatttgttctgatcactgcatgaggttgttgaattgcaagtnnnnnnnnnnnnnnnnnnnnnnnnnnnnnnnnnnnnnnnnnnnnn

SEQ ID NO: 16369 - DNA, 545 bp, Setaria italica
  Peptide Sequence Number=SeqID_82343
aaagaaaaaagacggtactaggttagacggactaataagactatgtttggagcacagctttccaacaatactatgttcattttctccaaaagaagtacgccctgaactcgttcaacctcctgggccacactgctccagcccaagcagggtccctcctgctagtgggaccatttgtcgattacttgttgacaggcaaaagggtggatcacttcaatttctcatctcttgctctgttttttcctcacactctcatgcttcatcgccatcggtgtcaacctgagccaattcatctgcattgccggttctctgctgtatccttccaagtcctgggccacatgaagactgtgcttgttctgtccctcgggtttctctttttttggcaaggagggcctgaatcttcaggtagttcttgggatggtccttgctgttctcggaatgatatggtatgggaacgcgtcagctaaaccaaggtaggacaaaagaagacggacgtaagtaataattagaccaagtagaaggtactagacaaagtactacaaagggaa

SEQ ID NO: 16370 - DNA, 1640 bp, Setaria italica
  misc_feature (1554)..(1640): n is a, c, g, or t
  Peptide Sequence Number=SeqID_82344
cacaaggaggaggacacaccgcgctcctcctccctctcctctgagacgcgacaacaccccaaatctcagatcaaaacaccacaccgctaccggaggaggagccagggatccactgcctcaatccaagcaatcgagcgccgagagctccgccgccgcagttcaagcttggattcctggatctgatggtgtcggcctcttggagattgtaattcagcgagctttatattgaaattgtgaaaatagagatgacttctctgaagaaatctgacaagaaggctgccctcgacttcgcagcatggagtttcaatgttactacatcagttggaatcatcatggtcaacaaagctttaatggctactcatggattcagtttcgccacaacattaactgggcttcattttgtgactaccacattgatgacaatagtatttcggtggttaggtctgagccagccttcccacttgccgctagcagatctgattaaatttgtgatattttcaaacttgtcgattgttgggatgaatgtgagcttgatgtggaactctgtgggcttttatcagattgcaaagctgtgcatgatacctgcctcatgtcttctggaggttgtctttgatcatgtacattattcccgggacacaaagctgagcataatggttgtgctcataggagttgcagtttgcacggttactgatgtcagtgtgaatgcaagaggtctgattgcggctgttatagctgtttggagcacagctttccaacaatactatgttcattttctccaaaagaagtacgctctgaattcgttcaacctactgggccacactgctccagcccaagcagggtccctcctgctagtgggaccatttgtcgattacttgttgacaggcaaaagggtggatcacttcaatttctcatctcttgctctgtttttcctcacactctcatgtttcattgccatcggtgtcaacctgagccaattcatctgcattggccggttttctgctgtatccttccaagtcctgggccacatgaagactgttcttgttctgtccctcgggtttctcttctttggcaaggagggcctgaatcttcaggtagttcttgggatggtccttgctgttctcggaatgatatggtatgggaacgcgtcagctaaaccaggtggcaaagagcggcgcagtatcctgccagtgaggtctgcaagtctcaagggaagttcagaagaaaaggccggtgctgagaaatagtcttgctatctcactccatttgagagaaccattttttcttcgaggttaaatttctggtggagcaagcaccgcagaagtggaaagcttcatgtttactgcaggagctgaattctttgtgtctagaaactcttataggtatacagtacgacttcatttttgactctgaatcatttgcagcgagtgaaatgacatgttttacaagacttgaggacggggttttaccaaatatagtgtaattgtttgcgaaacattgacttctgtatttcatgtgaatttgtgctgagcctattacctttcttggctactaccnnnnnnnnnnnnnnnnnnnnnnnnnnnnnnnnnnnnnnnnnnnnnnnnnnnnnnnnnnnnnnnnnnnnnnnnnnnnnnnnnnnnnnn

SEQ ID NO: 16371 - DNA, 355 bp, Setaria italica
  Peptide Sequence Number=SeqID_82345
cctccgtggagctcggccacacagcggcctccaagtgctacgacgacgacggccgcctcaagcgcaccgggacgatgtggacggcgagcgcgcacattatcacggcggtgatcgggtccggggtgctgtcgctggcgtgggccatcgcgcagctcggctgggtggccggccccaccgtcatgctgctcttctccttcgtcacctactacacctcggccctactcgccgactgctaccgctccggcgacccgtgcaccggcaagcgcaactacacctacatggacgccgtcaacgccaacctgagtggcatcaaggtccagatctgcggcttcctgcagtacgccaacatcgtcgg

SEQ ID NO: 16372 - DNA, 1534 bp, Setaria italica
  Peptide Sequence Number=SeqID_82346
acgcacactcagacggcagcgcgatcggccataaacggaagcaagaccttcgaagcaaaggcgcccacgggagcacacaaccaggggacagatacacttctggtgacctccctccgaccgccgactgaatctacctcgcttcgcgcctccggttccgcgccgggcccgccgaatcggagctcgggatcgcctcttcccgcggcaatgggggctgactccgaggacgccgtcaagcagctcagcctcctcatggagcaagtggagacgccgctgaagagatcgtttcagaatgtgcaccagggttatcccaaagaaacactgatgcgtttccttaaggctagagagtggaatgtatcaaaggctcataaaatgattgtagattctttgaattggaggattcaaaacgaaattgatagcgtgctggagagacctatagtcccagtagacttatacagatcaatacgggattcacaacttgttggcctgtcaggatacacaaaggagggtctcccagtttttgccattggtgttggacatagcacatatgacaaagcttcggtccactactatgtgcaatctcatatccaaattaacgagtaccgtgatcgtataattttgcctaggctgtcacaacagttcgggcgtcctgttaccagctgtgtaaaagtcctggatatgactggtttgaagctatcagcactgagccaaataaagatgttgacttccatatcgacagttgatgatctgaattaccctgaaaagacagagacctattatgtagttaatgttccgtacatattttccgcctgttggaaggttgtgaagcccttattgcaggagaggaccaaaaagaaagttaaagttttgagtggttgtgggagagatgaacttctaaagattatggactattcatcactcccccatttctgccgccgggagggctccggatcatcgaagcattcatcatcggatgtcgacaattgcttctccctcgaccatcctttccacaaagaactttatggccacatcaaggagcaagcttcgcacagggagctcatcaagatgggatcgttgcacgtcagcatccccgagccagacccaaacgacgcaaagatcgtcgaggtcatccaggccgagttccagaagatgggtgagcaggacggatccaccaacggccacaaggactagcacgcgccgaggctggccatcgatctctggaacgccctgcccggtgccgccccggtgacctctgatgaaattggcaattgatgtccattccgcttttcggttgacggtccccagttgcctggggaatatagcagcaaagccttgcgcctcccatggtgcaagctcgagtttatagctggggaggctgagagataaacaagtcggtgtatattagatggacatggagctgccataaacacctttttgctagtgtaaccccgacatacatttagctggtatatgagaggcgatccatggaagcgcctttttttttacccaaaaaaaaaaaaaaaaaaaataaaaaaaa

SEQ ID NO: 16373 - DNA, 913 bp, Setaria italica
  Peptide Sequence Number=SeqID_82347
taaattgttctcttatcctttttacatagatatatgatgatcttgatataccgtttgcaaaattgcggctgctgccaaaggggggacatggcgggcataacgggtattcagttcttttccagaaccctatcctttctacaagactacaatttcatggctgagcatgaaagggacttgaataaaaatgctgcaatagaattgttatgaattggttgttaaatgcttagacaaagaggatgctcagttacaagccttgcctgcactaagacggtgattgttatgcttcttttttctcccaatggaacttggaacttaaatccttgtgaatcctttgtttcttcaatcaatattctaatgcacaacatagtcatactgcagtgcctcgaaactatcaggctttgtattagacctaataactggatatattgcagatcgtcgggataggatgaggagtattatcgaccattttaaaacagagccgcaatttttccacgtctgaggatgggcattggacggccacctgaggagatgggcgctatcagttttgttctacgatcattcagcaaggaagaaaaggaagagcttgaagtgacgttccaaagaggcttgcaagcagtaaggatcatggtacgggaaggattcaacaaaagtgcaacatttgtgaacactccactgccattagaaatgccattagaaatgttgaatagataaaaattgcttcggattgtattcaaaacgccgtatagattagattcacatagttgctgaccctagggccattgtccctgacgtgtgaagatacagccctggagatatcatagtttctgtaaagatttgattacacatgtcacagctgtatacattggattcacatggctgttttcaggttaagggattatttgaatttctttac

SEQ ID NO: 16374 - DNA, 2985 bp, Setaria italica
  misc_feature (1)..(60): n is a, c, g, or t
  Peptide Sequence Number=SeqID_82348
nnnnnnnnnnnnnnnnnnnnnnnnnnnnnnnnnnnnnnnnnnnnnnnnnnnnnnnnnnnngtaataataacacatttgtattccaccaaaagtgcacccgtaatcttcttccacggatttagctcttaaataaatgaagacgaccagcacgcatatactagttcatccacaatggcctgcatcgccttcacaaaacgaaaacaaaatacaagtaattatccatatccagaggtactaatgacgaccaaaatttcgcctcgtggcacaaacgttacggctaacaccgaaacaaccaaaacatctaagttaccctgtaacagcaacacgttccaggaaggttgtttctttcaataattccattccatcttgttggtaggactgtaggagctgctgcatcaaccgaagtgccaccaacctcacatgctgccgaaacgtacaagggtaatccatctcacacatggtacagctgttcaggccactttgggtatgcgcgtttaaacaagctcatgcacacggtatcatgctgctgtatgctgctgttgaatatgcacttcatagcaccatgagtgccaacagtctccttgatccggccacggcgtccatgttttgtccacaactcaacgggcttgaaccatttgacatcttcaggattgtggaacatgtaccgcacaatcgctttcagttttgagactctctgtggataccccgtcaaaacaattttcttcagtatgattcgatctggatccacactttttagtgaacctacagcagcaatggcaggctgctcaccatctctgttcttcaaaacaattagaggaagtggagggaagcaaatcggagcatatacagaggcaacagaaaaccgtccatgatgtagaaatctctccatcttatgtttattgcagttgatgttgtcggatgaaaacaatggccttgctgtgaattgccggaatccaacattgaaaatcaacggctccttagatttgataggagcttcatatgagtcatgtttctttatgctgaagtgaagaactgacattttcgactcatgttgaagaagaccagaaaccaccacaggtattcttcttgatggatgacaaagtttggaggcaatatcagtaggaacgtttgtcacatagagccttacatacgatcccacaagagcacaatcctttgttcccccatctagctcggcaatttttgcaaggacatgcttttgagtccgtgtgaagttatcaaatgcaaatattcttgcataatcaggtggcaatgattccttaggatcccaggttgacgtcctaaatgactttagtcctctgtattttgcaaaccgtttttttgctggaacatccaatggcgtctccacctcatcaggaaattcttcatcttcagtattagcttctttgattttcttaatctcagcttctatctgttctttagtcaaattttcgtcatctgccatctcagtatccccaactgtttctgtatcaaacttttccgtgaagtgagacactgcatctatatccgaaccatcacttccttcatctgcatgaccttgctcatcgatgaccattccagaaccagcctggttgtcattatcggagtcattatcttcatcatctgtatcatcaacaatccaagcagcctggtattctgaagtgcctcggggaagcttcctctttaccaattttctctctttgttgtttatgttggcctctttcatatcttcttccgttggccaagtctgctccccagcaagaggatctggtacattttcaacaagtaagggttcctgattcgaagggtctgaaacaaaggtgttaacaatctgaattccatcatcttctgtttccataacatcagagcttttccgctcacaaagaggacatggatccttgaggacatcaatttggcctaactgaaaatcaccagcacctgaaacatggacaagctggttcactgaaagattatgggcccgtaaatacccagacacaagaagtgtgcacaatcccgtattgtcatcaggttttatgcagatctgctcagacataacatatggtctctggtttctccaatgtggtgatgaaagatgctgctccttgaaaagccacatgaacttatgcagatcatcctttgtgtctgctaagtaaaacttgcagtcctcaggcagctctgcagaaaggaaagaagttgctgctttcttcaattcttgcctacttctattgtccgctggaagatctcgaatgaaaacagctgtactaggtaagcccatggcccgaaataccgataggcattgcgacccaaactcatcaattggactgctcgaatcactactgtacaatgaatttgctggtagaacgaacgccaacaaatcagcaacctttgcaagttccatgcatgaggtaagatcaccatatggcgcttgcagtactgtggttcgaagcttataagtaggagaagcaacagtagaggatctcagtttcccatcatctccttctgcaaatgtcaaaaggtctttggcaagtgatccaacatctgttgatgaagataatccaacaagaacaatgacgcgtggtgcgcctgaagatcctacagatgaccgtttctccttcagcaaagcagcacgttttttatcacggatcgccttgctctgttggatgcgcgcggcgcgggcacccttgacggcggcgcggtggctgctctctggcttcccgctcctgaccttatcgatcttgtgcgcgtggcgggacgccttggacgcgaaacgggtcttgtgagccttgtttacctgcgcgcggcccccgcccatctcggcggcggcggcggcggtgggactgcgtgggtcagctcggggccgttggtgagctggtggagctcgggggcgtcggcggaggagcggagcttggggagcgccggggtcgtcagcaccgcggggtggtcggcggcctggggaagtgggtaggaagggagcggcggcgtgatggc

SEQ ID NO: 16375 - DNA, 1243 bp, Setaria italica
  misc_feature (1)..(11): n is a, c, g, or t
  Peptide Sequence Number=SeqID_82349
nnnnnnnnnnnaacaaacttgttcagcaaaaacaagattctattcaggctttgcaggtatcttgggaatagcggagtacacaacggcaaattccccgccaaaagaaaagaacaactatatctactggttttacacacagcaaaggtgccataaccaatgatgagactctactgaaatacatgaggatgaaaaactatcatctcatcaagcatttcgctcggacaatacaaccgctaccaaactatacagaaggtggttagtttcatgccatatacaaaggcctactcactttccactaaaagggactacaaactcgaacaaactttgccacttttcaaaacagtgtgagtgaccgaggttttgagaagatgttcaacttcttttggaaaaaccgggacgactttgatatcggctgcttgtgaactgagttgtcgggagcatcctctaccgcgtctgtggcagccacttcttgtgaacacgagttagtgaactggtcgcttcgcctcatgtccctgagaagatgaagcagcttggttgaacaactcttggcttcttcggttccattcactgacaagtccactagggcagggatcacaccttccttcattacgagtaggcagtcctcgatgcttcgggaacatattgccaaaaggataaccactgcatgctctcgttctttagggcttcctacgtccagatattctgcgacagaagcaagacaccgactggttcttgtaatacgcactgcagcttcttccatgtcacataagttccgtaaaatctccaaacagcactcaacgaagcttccttcggagaaaatgggaacaagctttgagattattcccattgaaactagggaagatcttatatcagcatcacatgaaagctcgcagagaatccttagggaaagttcaaggccttcagtatcttcagatgccagcattttgaacaatggaggagtaacaacagaagccatcacatgagatcttggactgctcaagtgctgaaccagcccatgcagtgtcaacaaagcttcgacctttaactcggagtcaaggaaggatgtgatcagatgaaatgcttcttcgttcatagatggaatcttagccctgctattggaaagaaaagtaagaaaaaactgaaatccagctttctgagcttggacactgtagctgccagtatcatttctcaagattcaaggatgcttctacaaatccattcaaaaccatagcatatgaaacct

SEQ ID NO: 16376 - DNA, 246 bp, Setaria italica
  Peptide Sequence Number=SeqID_82350
attttggctgaccaacttcttgctgtcctgcatttgtctgcttatctgaaactcaaaataatgtactagtttggagacacatggaacatggaagcaggcacttacatagttttgtttcccaccatcactagtttggagacacatggaacatggaagtaggcacttacatagtttcgtttcccaccatcgcaggaatccagtgccaatacaggtacaatatgacttcttttactattccattggagc

SEQ ID NO: 16377 - DNA, 738 bp, Setaria italica
  Peptide Sequence Number=SeqID_82351
tttgttctattattctagtttctagctatccaacacttgggaactatttcactgcagctctgcacgccaaattagttggacacacaagtaattctttgaggctggcaaccttcttctggctgatgccacacaaagttgctgcatggatatactgggaggccctcagactttggctgaagaacgtcaaattcctggaccatcccaggtatctgaacatgagttacagggatgaagcactgaagcgcgatctcgagctccgttcctcttgcagcttccttcagaaacagaaggcgaacaaccaaagaaacagcagcaccgacaagacgtgtgaaatctccaaccatccagataacaaggacgacgagaacatcatgaagaggtggtgcgtttggagggatgctcagtggccatggtcgtgacagtgcaaagatattccattttgtgtttatcgcagtaccgtctgatgccccccaccctcaccctgtatcatcaatcatcatcatttgatttgattgatgcgtcagcagacaccgcaagttgcgagcgcgcgataattgacattgtccctttcatgctcactattaaagaagaagagaacacttgtgacatgttttcctgaaaagaaacattttcttcagtgtgtccatctagtttttgaccaaattttcagtcttgtttcttgcatccctatggaatgtgcaagcagtacatgtttagtctgcagtttcaaaaaaaaaa

SEQ ID NO: 16378 - DNA, 328 bp, Setaria italica
  Peptide Sequence Number=SeqID_82352
gaatttgactaaagcactgctgcgcagatttgcagaagagatatttcacacccattctgagtacttgtcatgggaagggggggggggagttgtgatagaccactccaaattcaggatcacaaaaaaaccttcatttgtattggttgccatagacacgagagtttcacaacgatgaagaaaacctcttctctgcagtcttccttctggaaccaatttatgactggcatagtgatgctgcctttggtagtgttgagctgctcagggaagtttatgcacatagttatgacagagaagatgctatggagaaaacaaggaagggcgagggtgg

SEQ ID NO: 16379 - DNA, 324 bp, Setaria italica
  Peptide Sequence Number=SeqID_82353
ggcctcctgcagccctggtttctgcgggcggaattccatactgtcctcccccccaccctgctccgccactccaaattggctgcagatttctcgtctcatggcagccgacgtctccatccccacgcagccagctctcgatccccctccaccaccagctgattcctcctagtccctcttctcctcttgcgccgacgcctcctctccctcttcctcgtctcactcctgctgccgctgccgctgccgctgccgtgccggtggaatcaaatcaaatcaaatcccgtcgaaaggtggtttaggtgactggtgcagtggtgcttggcgcta

SEQ ID NO: 16380 - DNA, 1177 bp, Setaria italica
  misc_feature (1)..(32): n is a, c, g, or t
  Peptide Sequence Number=SeqID_82354
nnnnnnnnnnnnnnnnnnnnnnnnnnnnnnnngatgaacagcaatgatcaggagaaaactgctgaatgattcacagttttaggatcagtaaataaaggccaccatccttcgcttcgctaaccattcaatgtacaatagagtggcattaccaacagaagtgatttttacacaagtcctaacctcaattcaaggataacctagcacactgtctaacatagagataacacaagttcagtagctgcactgttattccaatttcttcatggtgctatgaaacgataagcgcatcaatcgtcctcggcatctctgcgttagtgccaacctcctcacaacatatctttgttgtcatctcgtctttcttcagatctgccttccatgtttgccttgttgatgtctctcgtgcaaagagttggagtggcattgcattcttcgaaccggaagcaactgaccaggtgatcatttgttagccctgcagcctgcatgaaggaatatatgacagttgggcccacaccacgaaatccccttcgcatcatgtctttgctgattatatctgccttgggactcttgacaggaacttgtcttggatagcggaacttgcttactataggcttggggttcaaaaaaccccagcagtatcgatcaaaggacccaaattcatcagcaatctttagtatctggcgagcattctcaaggacagctcggagcttttgctctgacaaaagagaaagggcaacacttccaggtgccacaagcttcttctcatttattttagagacggcaggagggtcgaagtccatgaaaatttccctaaaaagttgcctcctcttgagaatttcgggccatgtaagctcagccaatgcacaagatagtacaagtagctcaaacaatctcctgtcatcatgtacaggaaccccccattcctcatcatggaaagtgacatagaaaggatcggtggttggagtcgcccatgcgcacctcctcttcccttccacagcctctggcgttaccggagcaacaaaatccacaccggccgacttgctctctgccaccttacccacagccttcccttgctttggcgcagccgtcgaccaagaccggctcttctccaccttcccagtgaaagcccgggtgcggaccaactccgcggaggcgtccgaggagcaagacgagctgagcg

SEQ ID NO: 16381 - DNA, 908 bp, Setaria italica
  Peptide Sequence Number=SeqID_82355
gttcaaatcagagataactgctcctctgttagcaaaagagatggttgaacactgtcgcttcaaagatagtgccgcttaaggaacatggcactactgatccagcactgaccatcgctggtccgtttcttgattactaaactcttactgcagcatcatcggtacatatttatatatgaagtatgaacttttcagtcagatcaatcttcaggattgcatatcgccaccaaaatatcatatttcatggagtccctaactgattgctttatgcaatcatatgtagagtaacatagctacagtaatctaaacctcgaatttgaatttacagcgaggagaatattggaacaccgggtatgctgacacctgagtctacaacgaagatgttgccagtcacatacgacgatgcttcatgaatcaggaaacggaccagcgatgtcagtgctggatcagtagtgccatgttccttaagcggcactatctttgaagcgacagtgttcaaccatctcttttgcaacagaggagcagttatctctgatttgaacagccctggcgcaattgcgttcactctgatgccatatgctcccaattccaaagccattagctttgtggcataatgcacagcagactttgatgacgcgtatccaattgagccaggcagatgaccgcgattaagaccggcaatagatgaaatgttaataactgaacccttaagcttagcatcacgcatgcgtcgacagacatgtttggccacaagccataatccggtaaggttcgtcttgatgagcttgtcccactcatcctcaggccagtccagtggagaatgcactgcacctcggatgccagcgttgttgatcaggacgtcgatgcggccgaatgcgtcccaggccctctgccaccgccgcctccgaggg

SEQ ID NO: 16382 - DNA, 318 bp, Setaria italica
  Peptide Sequence Number=SeqID_82356
caagatggagccccactatgacagcatttggttgcattggcatcgtctgaacaagattcatagcttcatccaagagcccacttcgagcaagcaaatctatcatgcagccatagtgctcaatctgaggctgtatcctgtgcaacgatctcatctcattgaaatgcattcgaccttcattaagcaggcatgagtggctgcatgcagtaagaacagcaatgtaggtaactgagttgggctgaaaaccatcgtgtttcatctggcagaaatactccagagcaaccttacccatcccatggaaagcaagacctgcaatcatgg

SEQ ID NO: 16383 - DNA, 1605 bp, Setaria italica
  Peptide Sequence Number=SeqID_82357
aaggaaccaacggaacgaaccgaacccttaacaaacgaacaaagtcgagaagggtttgaaaactgccataattgagggagatgttgtgggtggtacttgtgtgaacagaggttgtgttccatcaaaggctctccttgctgtaagtggtaagatgcgggaacttcaagatgagcatcacatgaagtcactgggcctacaggtttcctcaccaggatatgacagacaggctgttgctgaccatgcaaataatcttgcctctaaaatacgcagcaacttgaccaattcaatgaaagctctaggtgtggatatactgactggtattggcacaattgtggggaagcaaaaagtgagatatggaaaggttggttttccagacaatgaaatcaccgctagaaacatcataattgccaccggatctgttccttttgtccccaagggcattgaaatagatggtaaaactgtattcactagtgatcatgctctaaaacttgagtcagtccctgactggatagctattgttggaagtggttacattggacttgaattcagtgatgtatacacggctctgggaagtgaggttacttttgttgaagctcttgatcaattaatgcctgggtttgatcctgagattgggaaattggcgcagaggattcttataaatcctcgtaaaattgactatcacactggtgtttttgcaagcaagattaccccagcaaaggatggtaaacctgttttaattgagttgattgatgctaagacgaaagaacacaaggagactcttgaggtggatgcagcactcatagctactggaagggcacccttcaccaaaggacttggcttggaaaatatcaatgttgttacacaacgtggttttgttcctgttgatgagcggatgcaagttatggatgcagatggcagtgtggttcctaatttgtattgcattggagatgccaatggtaagctcatgcttgctcatgcagccagcgcacaaggaatctcagttgtggagcaaatcagtgggagggacaacatcctaaatcacctaagcatcccggctgcctgtttcactcatcctgagatcagcatggttgggttgacagagccacaagctagggagaaggctgacaaggaaggatttgaagtaagtgttgtaaagaccagttttaaggctaacacaaaggctctggcggagaatgaaggagatggacttgctaagatgatttaccgtcctgacactggagaaattcttggagttcacattttgggcttgcatgctgctgaccttatccacgaggcatcaaatgccattgcccttggaactcgtgtgcaagacatcaagtttgctgttcatgcacacccaaccttgtcggaggttctggatgagctcttcaaggctgccaaggttaactcggcaggtgtttcgcattctgtaaatgagccggttgcagcgtagagactagagaggaacaagagcggctatcttggttgtacctaacgagcctactactcatagaaaactgatcttgtagccatttgcaggcattttcgtcatgagctccagggattagtgccaacactatatacttgtatttattgaggtaaaga

SEQ ID NO: 16384 - DNA, 509 bp, Setaria italica
  misc_feature (463)..(463): n is a, c, g, or t
  Peptide Sequence Number=SeqID_82358
ggccaagatcacagagttcggggatttcgtgtgggaggaggagaagagcgaagcgatgagcttgaggtacatgagccgggtgggcgcgcgggcggcgcaggcggtgcgagacagcaccggcaggtccgtcaaggacaaggcgcagtcggcctcttcgtcggcgtcgatggcgaggagcggcagggcggccgggtcggtggactcgggcagggtcagcgccgccgcggcggcgaggaggaaggcggaggaggagaagcggcggcgcgccgagcaggcgctgcgcaccgtcatgttcctctccgtgtggggtcccaacacctagaatttgcagaccatctgcgtgtaattgctgctagcctactactgttgtgcttgcgcatgtttctgttcgagatgaaggaattgtaaatgatctgatatatggacacaaatcgatctgttgattcttaaaaaaaaaaaaaanaaaaaaaaactaaaaaagagaactagccaaggacacacagggagta

SEQ ID NO: 16385 - DNA, 558 bp, Setaria italica
  Peptide Sequence Number=SeqID_82359
gccgtgctgtttcagatgatcggccccgacgttgatgtattatgttggaatgtacggggtcttaatcagcaagcccataaggatgtagttcaccagattgtggccaacacgacgtgcgccattgcatgtttccaggaaaccaagcttgcacagatagatgacttcaccgcgtcttacttgggtgggtacaggctaaccaaaaccgctttcgcgccagccacaagagcttcaggtacaagaggaggactgctgatactgtgggatgagagggtagttcaggtctcacagattaccgtggggatgtttcacttatcagcctctatttcactacatgatggcgaaaccttcagactgtcaaatgtctacggaccatccagtcagggactgcgtgagcctttttactttttttggcaacaacactacgttggctgtgttgattaaaggcaggctcatgcaacgcaagttatgaaaagcattggctgcgtttatgacatcgcactttataatctcccaacaggccttgtaaaatgccccagtgaagccatccgatcccggtgt

SEQ ID NO: 16386 - DNA, 324 bp, Setaria italica
  Peptide Sequence Number=SeqID_82360
tcctcgtattctttagttctccctgccaatcaaacaaccagctaacacaagcaaagccactcttcctcaaagacaagctcgtttcagagggcgggggactttgctcttggtttcttctccccaaccaattcgagtcgcaagttatacatcggaatttggtacaacagtatcccagagcgcaccgtggtgtgggtcgccaaccgtgacaacccaatcaactccccttcatcagcgaagctcgccatcaccaacaattcagagttaatgttgtcagattacccaaaggccgaaagtatttggaagacgaacaacacaaggggaggt

SEQ ID NO: 16387 - DNA, 1877 bp, Setaria italica
  misc_feature (1876)..(1877): n is a, c, g, or t
  Peptide Sequence Number=SeqID_82361
gcgctccttctccctccctcccgcgcgcgcgtggacaaacacgaagcttctgaacctgccaagtcagaagaaagaatccgcctttgagtttttttttcttggcgatctgggttcttccgcggggggatttgagcgttttccttgagaaatttgagtttctttgagaggattttgtgttttctcgtgagagattcctgtgaaggaagtcgccttcgatccattttcttgggcattcggattgttcctatatagcgtcaaagaatccaactttgacttttccttgggcggcttcttccgctctgtgttgtcgacgagacaatttgattttttttatttaattggggtggaggcaggattggtggttgggtgcttgttcagttcgagtggttggataccatccctcgtggtgatttttgtgcttctctgaagagttgggggcgtcaaatttgccacctgcagtgtttcttgggaggatttggtgaatttcggtggaagggcagagcttccttcaatcctccgtcctcgtcttcaagaatttgggtgattgggggtatctttagattatccgtggtacaaaaaggcttaaacttggagtcctgttatatttcttttttgggagaatctggtcttcatttctggtgattcctgttgagttggttgagatgaaaggagcactatggtaactcattttggggaaaggagtccagtcagtacttctctgtgaaaaaagtgacacttctgtgctttcctttggaggactgtggcctgttcctccaagaatttggtaaagaaaggtgtgagttctagaattttctttgcacaggaggtgctcaattccgcatcgcagatccaaattgaccgatggcgcaatctgaaattcctccatttagggactgggaaaccactggaaacaccaaagatgcacgtaagaacaagaaaacaggaattcctgctcaacaaaatgatccaagacggaaccctgaacctcctcgtaagtcacctttgcacccaacggcctacaaaaccgatcctcaaaaccaaggtccaaggaatccaacacatcgacccagacctgaaactgatcaccaacgacactccgaccaccctactcaccgtgagtctgctccacgaagacatacaaatcctcagcgagaacaagggggcaatgctggtgcaccaagaagcccctacagaacagctgctggatctgcttcaccaatgcagccaagcaaccaatcaaagccgaagcacaggtcgactggaatgcagactccagaaaggagggcatcttcagaagggtacggccagcatacccctggaaggagcaggatgaagccgagtgaccgaagctatgagcctgaagaggaagtggcggtaccaccatttggtgaatgggatgatgcaaatgcagcatcaggtgaaaagtacactggtatcttcaacagggtgagggacgataggttatcacctaacacttctgctaggcaaccatccacttcccgtgcagaggagaataaggcgcaacagaaatgtttttgctgcatactttgagaaaatgaggataggatctccaagagttctggacaacttcctatgctgctcctgtgattataagatcactattcttgcagactcttccttcctgtgctagttgtcatgtttgctattgctggtgtgattatgtatctgtaattgagttgttccatttaagctcttcgcgtgcaaggagcatatatatatgataccatttagatttgtaaagtatgaagcgaggtatttccttgcggataataaaaagtttctcgcctctggaaattccagactggttatatggatatcagctagagtgctttcttagtaaaaaaaaaaaaaaaann

SEQ ID NO: 16388 - DNA, 243 bp, Setaria italica
  Peptide Sequence Number=SeqID_82362
tcaagagggagagcaaacttagaattcattggctcaacgaaagtaaccatcaaaatagatgatttcccagtattaagctgttctgatgctgcagatgcatccttagttgatgaggttcaccagggagatgaaacgcagatcaagaggtgggcatctctaagagaatacatccaagatgaagttcatggagctatgcctgatcctcaagtccttctcaagttactctcttctgccagtcagaag

SEQ ID NO: 16389 - DNA, 615 bp, Setaria italica
  Peptide Sequence Number=SeqID_82363
aaccgttaatcctttcatcccatctaatttcagtgaaatgggattcgctagttgcaaagaaatctaactgcagttgagatgtcagaaattttgctggtgactggttgattttttctgcaaagggggcatctgttgcctataataaagttccattacaatttgcaagctgtcacaaacttctgataaactctatctgcgggtgccaggatgcatgggaattttggaggcagtagcatggaaatactaaaaatccctccactatttctcgaaaaatgcctctgtactgtcggagtagaggtacttgttttgctgtcagatacaaatggctgcttcacttcagttagtcttcttgtcaagtatttatgtccaaagatccatattttcatgctagaacaggtacaacgaaaaggctatgcaaaagacccttctcttgttgttcatataattctacgtagctctcctttgatggttagtgcgagagtatttatgtcaaagatccatattttcatgctagaacaggtaagctatgtaaaagacccttctgttgttgttctgttgttgttcatgtaattctacgtagctctcctttgatggttagtgcgagaggaggataag

SEQ ID NO: 16390 - DNA, 271 bp, Setaria italica
  Peptide Sequence Number=SeqID_82364
ccaagaaggaggtcagcaagaggacgaggtcgaagaacggcaagagcgcctccttcggctccaccgcgtcgtcttcgtccgatgagtgcgcgaccgtcacgacgccgcgcaccgtcctgccgccgccggcgtccggggccaaaggaaagccggcacccgtgacgagggcggacctggagatcgccctgaggagggtggtctcgagcgaggcggagctggccgagatgctcgccgatgcggaggggtctgggatcctgctggaggagatcgc

SEQ ID NO: 16391 - DNA, 926 bp, Setaria italica
  Peptide Sequence Number=SeqID_82365
tttcttttctaattagagtcctagagtcctacttcgatcatctcgtcgattcgatccctcgggttgaaggtagcatcaccgccatgaagcttggcgtgccgttcttcggttcctccggcgccaagaaggaggtcagcaagaggacgaggtcgaagaacggcaagagcgcctccttcggctccaccacgtcgtcttcgtccgatgagtgtgcgaccgtcacgaagcggcgcaccgtcctgccgccgtcggcatcggcgtcggcttccggggccaagagaaacccggcgcccgtgacgagggaggacctggagatcgccctgaggcgggtggtctcgagcgaggcggagctggcggcgatgctcgccgaggcggaggcggccggcctcgcgctggaggatatcgcggcggcggaggtggaggacgtgggcgagctcagggagacgttcgcggtgttcgacgccgacggggacggcaggatctcggccgaggagctcctggcggtgctcgcgtcgctcggcgacgaccggtgctccgtcgaggactgccggcgcatgatcggcggcgtggacgtcgacggcgacggcttcgtgtgcttcaacgagttcacgcgcatgatgacgcaaggggtttgatatgtcgggtgttgacgtgccgttgatccatatttgtgctgcttttatgtgcagctgttcttttggtggtcgtacgtccatgtcaatacctgtgtcctccgtcgtgcgaggtgaatccaaattccaacaggagtgcctacctctattttgttcttttcgaaattcgatcggccgtcatataatttgtttgtttggcttggcgaattgagtgttttgattacgtacaccacgtagggattcaccgggctcaaggctcattatgtggtaataaaggatatacctagagtttgaatt

SEQ ID NO: 16392 - DNA, 323 bp, Setaria italica
  Peptide Sequence Number=SeqID_82366
tatgggctatgaatcggagcatcccagggagacaaacgtcggaggaacacaacaaattgcaaaagcaaccacgcccacaaacaatccaccccagaattgcgaatgcaagcaactgatgccatcaatttggtggcattccgcattcctccagatccaggactaaaagatcctcccagaatcctttcttgcaacggaaggtggcagtccacttgctgcaaacgagtgaccagctcttcctccccagggcattccatcacgcatagtgctgggtggaggttttgccaggttataattattctcagcagagtttgccaagctttcgt

SEQ ID NO: 16393 - DNA, 484 bp, Setaria italica
  Peptide Sequence Number=SeqID_82367
cgtccgatgaggactcaccacaatggtcggcctgtctggactaattataactggaagtcatattgttgtactgctgaaatggctgtccacgaaagcttggcaaactctgctgagaataatttgcatggttgtaaccatccaaggtgacatgacctggaggatgtcatctctcggagagagatgatgcatgaaacaggtgtccacttctttgattcagtgctgaagggtttgaacttggaataggtgccaatctgctagatctgtttcatgcatcatctctcggagagagggcacgtcctccaggtcatgtcaccttggatggttacaaccatgcaaattattctcagcagagtttgccaagctttcgtggacagccatttcagcagtacaacaatatgacttccagttacatccgtccgatgaggactcaccacaatggtcggcctgtctggactaattataacctggcagaacctccacccag

SEQ ID NO: 16394 - DNA, 401 bp, Setaria italica
  Peptide Sequence Number=SeqID_82368
cccactgtttatagttgaatttcgagtagtttactaaagacagtgttcaagttttcttaattgtaaaggagtgagctcaaccaattaccacctaatccagtgtaggtgattcgcccacaaaattataaacgaaacttaaaaccaagagataatttttcagcaggaagtactaacccaagaatctcaatcatacggcaaaggacatcatattctgatgctccaggaaataaaggcaaccctataaacagctcagctacgatgcagccgaatgaccacatatcaatggcagtagtatatctagcatttgttaagagcacaagctcgcaagttaaaattcacacagctgcaattcataataaggtgccagcatagaataacaaaagcagaacaacttatgcatt

SEQ ID NO: 16395 - DNA, 398 bp, Setaria italica
  Peptide Sequence Number=SeqID_82369
ggaggcggcgacgaagacgaagcgcgaggacggcgtgccgggcgccaggagcgggttggcgcccaggtagcgcttggcgtagaggtagagcaggaagacgaagacgacgaccatgaagaggaagatgaccgcggcgagcagcaccccgttgctgatggccagctgctgctgccccgagccgctgctagtcgcggcctggtacgccgcctcgccgggccacgccggcggcgtgttcgcgcccaccggcggcaccagtgtcgccgacgacgaggacggcgtggggagcatggctgcttcctgggaatggcgggttcctcgcggggtcccttgtccgacgccgaggagaggagaggaggcgacgaggagaatggagatgagactgggagaggacagaggag

SEQ ID NO: 16396 - DNA, 832 bp, Setaria italica
  Peptide Sequence Number=SeqID_82370
gcgcaaatcgtcgaacaccgccatggcagccgccgccgacgaggccaggctcgaatccttcctccaatggctgcaggccaacggcgccgacctccgcggctgcacgatccgcacgtgcggcggcggcaagggcttcggcgtcttctccacagccgcccccgagccgggcgccaccgacggggtggttctggtggtgccgctcgacctcgccatcagcccatgcgggtgctgcaggacccgctcgtcggcgcgcggtgccgcgcgctcttcgaggagggaggcgtcgacgaccgcctcctcgtcatgctcttcctcatggccgagcggcggcgccctggctcgctctggaagccgtatttggatatgcttccaagcaccttcgggagctccctttggttcagcgaagaggagcttgccgaactggaagggacgactctgtaccgtgctacggtgatccagaggaactcgatgcaatccctatttgatgagaaggttaaaggtcttgttgaggagcttttacatgttgatgaatccgcaagctccactgaagtgttgtttgaggacttcctttgggcaaactcaatcttctggactcgggcactgaacataccattgccgcattcttatgtttttccggggtcatgtagtgatcaacagaccagaactaatgatgatgtttgtgattctagtctccctgcccaccaggaaactgacattacagctaaggatagtagctctgatgagaattctaaatcaagtaacacagaatcgatttgggttgagggccttataccaggaatagatttctgtaaccataatgtaaaggcactgg

SEQ ID NO: 16397 - DNA, 394 bp, Setaria italica
  Peptide Sequence Number=SeqID_82371
cggaaggagtgggcgccctccgacccctcccagcctgcccccgcgcccgccccgtcccccaccacctccatcgaccgcatcgtccaccgcctccgcaacctcggcctcgcctccgacgacgacgatccctccgccgccactgccacggccaccgctccgcccgacggcaccgagcgcctcggcgacctgctcgaccgcagctgggcgcggccagaccgccagtttgcggcggccagcttcgacgatgcggtcctcccgtgggagagggacgacgaggccgcgggcggggggtagggacgaggaggatggggccaagaggaggcgggtcaaggcgcccacgctggcggagctcacgatcgaggacgaggagctgcggcggctgcgcaggctgggg

SEQ ID NO: 16398 - DNA, 1054 bp, Setaria italica
  Peptide Sequence Number=SeqID_82372
ggactgaacctcaccgccgtcactgacgaggccgaggtcatgaccgcgccacgtggcggactccctcgccgtgctgcccccgctggagcgtgcgtaccgctccaccaccggcggcagcgacatcgacggcgtcagctttatcgacgtcggctctggggcagggctgccgggcctgatccttgcgattgcaaggccaagctggagatttacactgctggagtcgatgaagaagcggtgcacgtttttggagcatgccgttgaggccatggggttgtcaaatgtggatgtggtgtgtgaccgggcggaggacagaatgttggccaaagtcttgattacagagaagcgtatgatatagcggctgcaagagccgttgcagaactgaaagttctagcggaatactgccttccattggttcgtgttggtggtttgttcatagctgcaaaaggtcatgatccccacgaagaaataaaagatgctaaaagtgctgtacagaaattgggtgcttccatgctctaattgtgtaatgttgaatcaatgggacctcatggtcatcggacggctgttatatactttaaagaacgagctactccaaaaaaatacccgcgccttccaggtactccttccaagatgcccttgtgagaagcgtgttattgttggtgtagaccttttgcaactgctaaaatctgaaaatcacaactgatctatatcagaggtcatcaactggaagatgtctttgttagaagcacagagtaatcgtgctaccttacaatcatatcctcactctgctgttttgggcaactaattagcttgtcctacactcctactcgtcatatatttaaaacggatgggagtagtttctaacaggattcagtaactctgctcaatcgaatgagactgaaaagtttattggtgttcatgcaactgtcagaactggacattttcacgaagtgcaataggttgatgtaccaattgtatgaatcctcagttcctttcatgacttgtatcttgtggacggtttggaatttgctagtttcttattcaagtaactatccaa

SEQ ID NO: 16399 - DNA, 563 bp, Setaria italica
  Peptide Sequence Number=SeqID_82373
ctaaggaaaggcaacaagtgcgagacaatatctgacacccccaccaatttctctgcactcgactccacgctatcagcaattgaagtgtcccctggcttggcaatccgtcgcaacgtgtttacaacaccagaagcaaccattttcgccgcatgcaccagagggtacacagtgacccggaagctctccacaggcatcaccatggtgcgagcaatcagcatgttgcgcctggaccaaatgaagtcgatggcatcagctgcccactgggcgcgcactgcgagcgcaccctctccatcaacaagcttgtcaccagcaagccggctcatgcgacgcccctctagctcctgaaacagccgtgcaagggcctcaaacgcgctggcggaaaccgcgtctgcggagtccagcgcaagctcggccaggcggccccaccacgtggtggcgtgcgccatgagggaggggttcgtggagcacatgagcgcgaggtcatcccgcgggaggagggaggacagagatgtgacggcagcgaggcgcagcgactcagcgggcgaggagagagcagcagcgat

SEQ ID NO: 16400 - DNA, 2948 bp, Setaria italica
  Peptide Sequence Number=SeqID_82374
atatccctactctcttgtacaattgatcttcacaccaaagcttaaaatgctatgttacaaaatagtctgttcgtaatgcaacaatatctgcgaatacaatgaacaaatcagcgaccgcggcagtacaccagtgagcgaagtcagcagggtacatacgcaaaaaaatggaaaacaatacaaaattatacaggcgagcaaaatacacacaatccaaatcgatctcactgcgctttcatggctttctccttgcacagctggtgccactcctgcagcacggcggcctggagggcacggtgctcggcttcctccgcggtgagcttggagagtgtcgaggggcccttgggattcccgaatccatccagttcctcactctgctttcgctcctcttcctcctcttgctcggtcttggcgggtgggacctttggcttggccgccttgagaatggcgagcctctccatagagatcttcagccgctccgcggcagcactcttcacctcatcctcgggcatgtattccacagcaccatcggtgatatcatccaaccatccttggaggtcagcttcgatctctctagtgattgattcatcagatgcacgcatgacgaatttgcagatcattgtggtggtctcatcacccaggtcaacgttccggctgacttcacttgcgccaaagatcatcatgcccacaaacccaccaaaccaagtctttgcagcataacacaactgaaatccagccactgttcgaatgaaatgtgaacagacttgatggaaaggcttggaggaaattgacttcaatccgctgaggaaaggagagctatcgtactgctgagcagcagtggccttgaaaccactgccttcatatgtgtatgtgccagtgcactccaccatggctggcaggctaggccacagccggaaatactcaactggagagcattctaatggtagtagaagctcagcaagagggaatttgtagggttggcaccgcaaaacaattggctccccaagctctggccgaagtgagcgcttctgcctcatcatctgcgaatcctcttctgcataatctccttcatagtccgcagatcccccacttccatagaatgggtaatacaagacttgaacccagagtgagcatctctcaaaatgtgaaactcctacagtcacactactttgcaccggatcctgggaaacaagattccgaaggtgccgaactgtgcgagagaaaccatccatatagtaaagcgctccagagaggccaacacggatgtccactcggttgagttccagctcggtcaaatttaaaatctttagatgtagggtgattctgccatcagttggatctgctaaatggtatgcttcaatgtagcatggatcactgctgccagtcaaagtacaggcttttggaagctctttatgcaaggcaccaattccctttgtttgcaggagagttaattgactaggattcggcctccacaactcccgaatggccttatgaactaatccctccaatttcctatcttgggcagcagatgcctctgaaaattgaacagtaagtttgtggtggctaaacggataatcccctgtagcatcacctacaccaacccacctgttatctggatggtttgttacatattttattacttgcaagacataacgtgactgatgcttggtgacagaatcagctgaagtacttgccctaaattcttccagttctttactgataagttggcctgctcttgcatttcttgctcccaaacgttgagcacatattaggacagcctgcacatcttgtatcctatttgacgtagtagcagatgaatcggtgttgaataatatcttatgcatgttagatatgataatattcaatggatcctctgggtcatcagctaaaaggggatccagaccttcaagatcaaaatgttcagaaattgcccatatcaagcgtgaagatattcgtggagtatgaacctcacgaagatccctgataagctgtagctgcaaatttctaagtcgtgtctcattcagaatctgatcttgagatgcaccagctttaattgtcttcacaccacctctagtatcatatatatgacaaagccttacaagcaactttaggtagcagtcaattgcgtatgtacggccatcgcagtcccaaagaacacatggtctgcaaacttccaccacatccaaagcaggttccgtccaattcagtgcaccataaccagttccataggctaatgctcctataactctgctctctgtcccagaattcttaaactcaggtagtggaagagatagctggaaacagctttcaaccagggaggccaccagctcttctctgaacaagtttttgcttgttacgctatttagatcttccttcaccctcacatcctcaaaaagcgatatcacatctgttcctggaacaggcttctgacctcttcgaacactttcctttgcaaacagatcaacacaaagagcagtccgacatatacatgccaatgcatgcatacgatctgattctgctctcaagtttctcaccatctgaagcaatcttttgaacagagagacctgcattccaagatccagcaaatggagattggtcacaacagccctgacaatcgtctccctcattgacgagaactcttgacggtcccatagtgtcaggattgcaataatagcagctgaagcccactctggcttgcctccaggcacatctgcgagcgccagcatattgatccccacctcaaacaccagtggtggatcgagtgagctaaggaaaggcaacaagtgcgagacaatatctgacacccccaccaatttctctgcactcgactccacgctatcagcaattgaagtgtcccctggcttggcaatccgtcgcaacgtgtttacaacacaaccaagaaagacaaaccaattttacgaccgacaatagacaaccaagaagggttaaca

SEQ ID NO: 16401 - DNA, 286 bp, Setaria italica
  Peptide Sequence Number=SeqID_82375
gggccgagtggcagaggtggagttaccatcatgtctcctgcttgagcttgctgcatctgcatcatgggcagagcgggagactgggattgcaccatgccttgcgcttgctggtgtgccgccatggcctgtgcttgggcttgctgggacatcgaggccatcatcatgcccatggacgccgcttgaatggccatctgcataccttgctgggagccgggcaccagcacaggcgcgaaatgctgctgttgtggggccaccatttgtttacgtcccttgtcggtcggtcgta

SEQ ID NO: 16402 - DNA, 594 bp, Setaria italica
  Peptide Sequence Number=SeqID_82376
caaattctaagagttcatgatcagtaattttacatgcatcttgttctgctctgtactgtcacacagttaccgcagctcaggtcttattctgagtcaacactctctccttgaagatcttgatggcttcaccaaccccgtcctcataagagagcttatgagcaattctggtcgcctgagctttaatttccggtgataatgctgatctgatagctccaagtagcacatctgcagcattgtgaatactcaaggcatcatcattatttgggattagatgctgtctctgtaggggttcaggtgccactcctaaccagtgtagcctctctgcccaattaaactgatccagcaggaaagggcacactaactgtgggattccagcaagtagtgctgcagctgttgacccactgttatcaaagcagcaaaaacataaaatatttgtggaagcagcagtaacatgaaagcttcagaatcagccacttggccgctgcgatatattttttagctgtgtgtacctgccagcgtggtgaatagcagctgtgcatctaggaaaaagccagctgtatggtattgatctgaaaggtacatcatttacaccaa

SEQ ID NO: 16403 - DNA, 433 bp, Setaria italica
  Peptide Sequence Number=SeqID_82377
aagaagattcagcatgttcgcctgattgattcagaccatcagatgttgactgcccttgcaaatactggaatagaagtgatggttggggttcccaatgatcaagctacttcgtgtggggcaatctcgatccacagctgctgattggattaacaagaacgttgctgcttatgttccagcaactaacatcacatatattgcagtgggtgatgaggttcttactaacattccaaatgcagcccttgttcttatacctgcattgcagttcctccaatcagcactgttggctgcaaacctcaatactcaggtgaaaatttcgagtccacattcaatggatatgatctcgaaggcatttcctccctccactgccactttcaattcgacatggagctcaataatgtctcaatatcttcagtttctgaagaatacaggatct

SEQ ID NO: 16404 - DNA, 429 bp, Setaria italica
  Peptide Sequence Number=SeqID_82378
gagcgctggttgatgttcgccgatcccacgatgatgtactcgtcgtcgactatcatcgtcttggcgtggacgtagatcatgaagcgcctggcctgctgcgccctctcgtagtcggtgtcggggtccggccgctccggcggcacgtactcgccggggcgcggcgcctcgcggttgccgaggcagaagaaggtgaggtagtccctggggtcatcctggagccccttggcgcggatggctagcgacacgtccctgtacatcatctccatcgtgcggcgctgccagtccaggatggcctgcacggagccgctctccggcacgccctccggccacatgggcagcaccacgtacacggcgaaccgctcgccggcctcgatcttgctcacgatcttgagcgacagctccttggggatgaggtgcagcgcgttgatg

SEQ ID NO: 16405 - DNA, 520 bp, Setaria italica
  Peptide Sequence Number=SeqID_82379
ttttttttttttttagttctatcaccacaaattcggttacaatttaaaaactcagctacagatttacattggtcgcagtacgatttaactgctagtttcggctggctaaaacaggtttttgatttgtttgtcttctcatcatctcataatataatacgatgacgacgacggatgtacacatgggtgatggatgggatgggacacgtacgtacgtttgttcgcctacctcgatctcatgcaccgcgagaacgaaagcggccggcgatcgattgctccaattcgtttcagcagatggcgcaggagttggggttctcctccatgctcatgttccgcacgtagtagtagggcgccggcgcgtacgggttgtagtacgccggcggcggtgctggttcatgtagtctgccgtgaccatgttcatgtactgcggcggcaggtggtgccacgggatcggcagcggtgtcggcttcttctcgccgccgaccgaccgaccgaccttacctaccttacttagaccaataca

SEQ ID NO: 16406 - DNA, 751 bp, Setaria italica
  misc_feature (1)..(54): n is a, c, g, or t
  Peptide Sequence Number=SeqID_82380
nnnnnnnnnnnnnnnnnnnnnnnnnnnnnnnnnnnnnnnnnnnnnnnnnnnnnnttttttttttacaacgtacaacaaagacaagaaacgtagctgcggatgcacgtcacaagcagaacgtagcatcaccacaaaattcggttacaaatttaaaaactcagctacagatttacattggtcgcagtacgatttaactgctagtttcggctggcaaaactaggtttttgatttgtttgtcttctcatcatctcataatataatacgatgacgacgacggatgtacacatgggtgatggatgggatgggacacgtacgtacgtttgttcgcctacctcgatctcatgcaccgcgagaacgaaagcggccggcgatcgattgctccaattcgtttcagcagatggcgcaggagttggggttctcctccatgctcatgttccgcacgtagtagtagggcgccggcgcgtacgggttgtagtacgccggcggcggtggcggtggtgggcggtactggttcatgtagtctgccgtgaccatgttcatgtactgcggcggcaggtggtgccacgggatcggcagcggtgtcggcttcttctcgccgccgccgccgccttcctccttcttgccatcgccttccttcttgccgtcgccgtcgccttccttcttgccctcgccgccgtcctccttcttcccgtcgccgtccttcttgccggccctgcccccgacaccattctgctgcccttccttcttcccg

SEQ ID NO: 16407 - DNA, 479 bp, Setaria italica
  Peptide Sequence Number=SeqID_82381
cgactcagtgtgagtagttttttccatctacatttccattggctgctgtgaccctgtccttcggcacgtgcgcaatttggtcatactgtgaatttcccttcttttgtccatcacgacctgatatgatcttcacattcctttcgctgctaaactgtcctttcgttggcatctttatgatgggtgatcatatgaagcagaagtttcaggtatctttgtgaatgaacaatacacggttatcactagattcaattcaatgtcctgaggttgaaacagaggatcaggaaaccacacttccctataaccagctggcccgaaggaatcgaccactcatagtcgcctcttcatcaagatccaggtcggggatcacgcgaacagatctgccactcctgagggaaagggagagacgacgaagcgagagctcgctgcagtggcgggatggagggagaggagagcaagtggactggatagagacctgcggc

SEQ ID NO: 16408 - DNA, 1127 bp, Setaria italica
  Peptide Sequence Number=SeqID_82382
ggcaacaagctcaatacggcagaatttggactaggtgaatatctggccgtcccatgctgtttatccgacagtctactctgctgagctctgatggatgaatggtgatggtcactcatgggggtagattgattactctcaagagatctgctgctggggcttgcggaagaatgtgatggagatgagaataatacagacctactagtattagatggagaggctccatggcttctagcgagctcatgcttttgttgctgagaccagttagccagaaggccccactcaagaactccaacattcaatgccttgtcttgaagatggtcagctgtctctttacgctgtaaataagaaggaacatttgacatatgcttgacaagttcatcaacagtagtcgtctttcgaccaggccatggttttgagcccttcatgcatgcagccttttccccactccaagactcccgttgccttcggaacttatcattctttgcaactctgattctatcttcaattttccatctacatttccattggctgctgtgaccctgtccttcggcacgtgcgcaatttggtcatgctgtgaatttcccttcttttgtccatcacgacctgatatgatcttcacattcctttcgctgctaaactgccacttacttctactacttgtagttcgtgatcatatgaagcagaagtttcaggtatctttgtgaatgaacaatacacggttatcactagattcaattcaatgtcctgaggttgaaacagaggatcaggaaaccacacttccctataaccagctggcccgaaggaatcgaccactcatagtcgccaaatcatcaagatccaggtcggggagtcacgcgaacagatctgccactcctgagggaaagggagagacgacgaagcgagagctcgctgcagtggcggatgagggagagagagcaagtggactggatagagacctgcggcggattggtatagcatgggggttggaggcgtggtgggagtagtaggagccgcagtgctacactgcctactgctactccccctatcccccctcctatatgcgataggttgggtgagcaggtaggtggccggtgccggcgcgactgtggtgcggcccgcgtgccccg

SEQ ID NO: 16409 - DNA, 925 bp, Setaria italica
  Peptide Sequence Number=SeqID_82383
actgtcgaaagggctgcagccaccagacagcaattatccacatcctggaagatctgccccgtctcctttttgatctatgtacatttggtatggtggctgcagccctttcgacagtcttttcccttgctgcgtccatggactcaaactttcctctatttctacttctggttgactcatgtgcaattctctcaattttgttagaagaggtgctgtggatggtgtctaatcgggggcaatttcggcgcttatggtgaaggtataaggctttattcaacgccctcccacattcaatgctcagaagatccctctcccgtgcatctagatcttcttgcatgatggtagctggatcaggtggttcagggaacttggcccagcatgtatttaccacgtcagaatttctccaatcagccttgtcaaagctccaattaccaactccaaatctcaacccataatgaaaaaccttatattttgctccaggtagtggaacataacctggatatatcattatgtccctcctaataatgtggcgcaggttaatctcagctgctgcaaatgagtaaccgtacatctcactaatccagccagatgcatatatgtcaccagtaatgtttgtcgcataatgagctttgtctgcacgaacctcctcggatttgtgtagccaaagtatagcaaaatggcgaagatcatctatgtgcatgataatgacaccaccaaccttgtcacatgcagagggattgcgagtgtgtatctttgcaagtatgttgtcacacccaatgaggtattcatagggagtagaaacaggatgaccgagttttgctccatattcccatggggtgatgggacctctcatgatcatgtcagcatctaagatgacaatgaactcagcatcagtctgcacatggttgagccaatggagaactgctgc

SEQ ID NO: 16410 - DNA, 620 bp, Setaria italica
  Peptide Sequence Number=SeqID_82384
ctgcattgctctatatatcagcaattgttctgtgtgtgatctgtgtctgagagcagctactattcaggtgatcgaggtgagtaggtaacaagcagctgctagtggttcagtgcgagggagatcgagcagcaatggcgcagggaagaggcagtggcggctctgtggtggcccttgcggcggcggcgctgctcctctgcgtgctccttcaggcccaggtggccgagtcggccgtgttcaccgtcggcgaccgcggcggatggaccttcaactccaacacctggaccaacggcaagcgcttcaaggccggggacgtcctagtgttcaagtacgactcgtcggcgcacaacgtggcgtcggtgaacgcggcggggtacaagggctgcgccgctccccggggcgccaggacgtacacgtccggcaacgaccgcgtcaccctcgcccgcggcaccaactacttcatctgcagcatccccgggcactgccaggccggcatgaagatcgcagtcaccgccgcctgacggatatcatctgctacttgcattgcttccatcctagctacctcatgatcgaattaaaatacatacatatacatgcataaaataaagccgggttggttggtt

SEQ ID NO: 16411 - DNA, 536 bp, Setaria italica
  Peptide Sequence Number=SeqID_82385
ctactagtagtagtagtaagtgatctatctatcttcagcctcgctgacttgcaagcctaagtcagtaacatgaacggaccggcgcgacaagaagacacatgcttacaccggcgacattatggacgacggccgcgacaaggaaggcccttccgagacggagctggcgcccatggacctgtcgagccgcctctctctggacctgctccggatggccctcttcacctccgcctccttcatgtccacgaacgacatgaggtcgcggatgctgctcagcctcgccggccgccgcacgctcctctcgctctcggggtccataatgtcgccgctgtcgtcggcgttggtattattattgctgccgtcgtggtactcgcagaactggcagagtatcctggcgaagtagatgagcagggcgatgaagcaggcgacgccgcagatgaggaagaggccccagaagctgttgaggttcaggcggtcggcggagcccacgtcggcgctctgcgagtcgcacgtccccgggttcagccacttgtcgtgga

SEQ ID NO: 16412 - DNA, 1048 bp, Setaria italica
  misc_feature (1048)..(1048): n is a, c, g, or t
  Peptide Sequence Number=SeqID_82386
cgacggccggcttgccgagtcggagcggctggctgccaaccaaccgatggcgtcgggctccggtggcggtgggggcgacttctccgtcctcgtgctgggctccgacttcgcgaccgacgccggcgccgcgctcctcacccccgccgaccgcgaggagtggcatgactgcctccccgacctctcagatgccgacgcctgcttctccgacctcgaggagctccaggtcgtgcttgtccagggcaccgaccgggccggccgaaccatcgtccgcgtcgtcggcaagttcttcccggctccagtaattgatggtgaacgcctgaagaagtatgtgttcttcaagctccgcactgaattaccagagggtccattctgcatcttgtacattcacagtactgtgcagtcagatgacaataaccctgggatgtcaatcttgaggacgatttatgaggagctcccacctgaatacaaggaacggcttcaagttttctacttcttgcatcccggacttcgctccaggctggccattgccacacttggcaggctattcttaagtggagggttgtattggaaaatcaagtacattagtcgtctagaatatctctgggtggatataaggaagggggtggttgaaattccagattttgttgttgaacacgataaggttcttgagcaccgaccactgactgattatggcatagaacccgatcctctacatcttgctgatgtacctgctgcgggatactcgcttggaagatatgaagataagtgggctcctgaagatcgacggtattctcgcaattacatgtgaattgttctgtcgtagccaaaggcataaaaagttgattgtatttgtatagtactaggggactatgactatgagatgtgtaatgtcaggttaccgtgaaaaccttgtcaagtcttgtcttaactttgtaatccagtttaataactgtttcaagactattgagcagatgcaatatgctgtgcttttaaaaatactagtaaagtttaaaaactctctaagatgaacaacttcgtgtctgcttan

SEQ ID NO: 16413 - DNA, 558 bp, Setaria italica
  Peptide Sequence Number=SeqID_82387
aataaggaaggttccttatttaaggaaggttaatagcttcaataattttaattttcttgaataaggaaggtttcaaggaaggttaatagcttcaatactgtgtatgcataattaattctacatggtaatactatgtactatctgggtacttatattatctaaaatcaatataaaatttcctaaacaaacagtctttataattttctaataaaattttctaaacaaacagtttttataattttctaaacaaacaatatttatagtatggttttcttagtctttataattttctaaacaaacagtctttatagcagggatagttccagctctgagatgacggttggctatggttattactcaaatgttatatttgttatagatgtgagccgcagcaatattgcaaataaatttattgataatgagaatatcgaggcacaaggattagaaaaaagttgtttgcatttattagatgatagaattagaatttttttaattattgtgttaaggtgaaatattttattaaaagaaaatgatgggaatacttgtgagtcgtcagct

SEQ ID NO: 16414 - DNA, 398 bp, Setaria italica
  Peptide Sequence Number=SeqID_82388
ctcccaccaccaccaccaccgcctcctcctccccttcccttccccgatccaaaccctaaacccattctccacctcctccgctcgcctccgccatcaactccccaaaccaattgtcctatccctatcgctccgaccggccttctcctctgccttcgcggtcgctgccgtcgacgacgacgaggatgtcgtcgtcggggattgcctcgtgttcgacgacgatgccttcgaggaaccggacctcgacctcccctcttccgcaccgcctccgagggcctcccgatacggccgaagggcggaggccagcggcggtgggagtctggtgccggagaagtggagggacgccgaggaggagatcaacctgactaagaaggagaagcgccgcatcgcgcacgggatgc

SEQ ID NO: 16415 - DNA, 310 bp, Setaria italica
  Peptide Sequence Number=SeqID_82389
ttcggggcgctcggcgcctcgggggcctcttcatggcggccaaccaagtcggaggggaccgcgcgcacggtgagtgagtctcaggctgagacgcctccccttgctcttccgctacctcgtctcgatgcgagtcgcttaggtttccttcctgcgtgcgcgcccgtgaggcgctttgatgtgcctgggattcgaatccttgttaccagatctctgggggatattagcttccgggtttgatttaggtgcctagggttccagaaattgacttggtcgccattagtggtgtctcgggtaccaattctatgaaaag

SEQ ID NO: 16416 - DNA, 676 bp, Setaria italica
  Peptide Sequence Number=SeqID_82390
ctcgcgcttggtcacccgctgtagtgccggcacgagaagccggtcatacacgggtagccacaccgtgagcgccagcatgttgaacacgacgaaggagccggcggggatctggaaacccgaccggccgaggtgccggtccgtctgcatggcctggagcacgttgtacttgctcaggttggtgagcacgatgtagtagacgatccccgacgaccacaccgggatcagcctggccaggcacttgacctcctccacctgctgcagcgtgcacagccgccacgggttcgctgccgtggaaccgtccgccgcgagctcgtcctcgggggtgagtacggcggccttgtcgaggcagacgaactggtccgtgtaggcgatcttggtgatgaggttgctccggtgcggcgggtcgaagagctcgccgagggacgcgggcgccgggaggcggcgcttgcgggcggcggcgacgaggacctgcgcgaagctggtgaaggggctgccctcggggcggacgcggacgtagaggggcgtgcccatgaagaagagcgcgcaggagaggcccatgagcgtggccgggacggcgaggccgagcgcccagctgacgctgctctggaggtagatgatgaccgtggcggagatcatcatggcgatggtgaaggtgaagtagtaccagttgaagaag

SEQ ID NO: 16417 - DNA, 683 bp, Setaria italica
  Peptide Sequence Number=SeqID_82391
agaactacaagtagtagaagtaagtagaccgacccgaccgactagaccgaccaagtcgtccgatgcacaaccgtgaccatgagcccgctggcgtagctggcgacggcgaagcccaggaagagcagcgcgccggcgacgctccgcatgttctccgggaattgcttgtagtagaaatccacctgcccgatcaccgcgaacgcctccgacagccccgccagcacctgctgcggcaccagcacgaaacacgacgtcgagtccccgaccctgcgccggtgccattccgccgccgccgccacgagcattgtggcgatggacatgacgatgccggtgccgatccgctgaaactgagtgatgccgccctcgcgcttggtcacccgctgtagtgccggcacgagaagccggtcatacacggggagccacaccgtgagcgccagcatgttgaacacgacgaaggagccggcggggatctggaaacccgaccggccgaggtgccggtccgtctgcatggcctggagcacgttgtacttgctcaggttggtgagcacgatgtagtagacgatccccgacgaccagggtcagcctggccaggcacttgacctcctccacctgctgcaataggacctaggaagacaacgttagtaacttagactacaaggttaggtagaagacaacgaatagtaaga

SEQ ID NO: 16418 - DNA, 790 bp, Setaria italica
  Peptide Sequence Number=SeqID_82392
tcccaggactgctctacctgtccattgtactaccatcctcaaagcttgctctgttcttgcttgttttcttctcccaaattcagacgttaaatcgatggcaactattccatatctttattaaggtgtggaagccttcatacgggaggagctgcagccttaaccttgaggccgtcattgtttccctgcagcacgacgacggcgatgccggcgtccgacttcttgaacctgtaccagcgcgcgcacgccacgaagtacacgaggttcaccgctgccatggccgcgataagcaggtagtagaggtccaatcgcccctggttgaggtcctgcgccagccagtccggccggccgtcgcgcccacccgtcctctgattcaccaccgtcaccatgagcccgctggcgtagctggcgatggcgaatcccagcgagagcacggcgccggcgacgctccgcatgttctccgggaattgcttgtagtagaaatccacctgcccgatcaccgcgaacgcctccgacacccccgccagcacctgctgcggcaccagcacgaaacacgacgtcgagttcccgaccctgcgccggtgacgctccaccgccgccgccacgagcattgtggcgatggacatgacgatgccggtgccgatccgctgaaactgagtgatgccgccctcgcgcttggtcacccgctgtagtgccggcacgagaagccggtcatacacggggagccacaccgtgagcgccagcaaccaaccaaggaccgttacgttaagtaattagggtttaagttacctta

SEQ ID NO: 16419 - DNA, 463 bp, Setaria italica
  Peptide Sequence Number=SeqID_82393
tcaggtcggccaagcttctgcacctccaagctgggctgcttgcatgctggtgcagctagctgggccacctggtcagacttgacccgcctcgcagtggatggcctggtgcaactccggcttgctgacgggccgctagttgctgggccgtgtgctccctgccgtgctggcctgcgtcactggacttggcccactcgcgtgctgctgctattcgttgctcgctgctggttcgcttcgatgccctacacacacacgaacaaaagaggaataggaagaacagaccgaatgaacacaggaacgcctgaagaactcgcccaacttcaatccagaattactctgtcaatactcctcggatcgaaatgaaacttgagacaaggatgcaataccccaagggaaaatatatccatgagacaaatctcgaaaagctcaagtattcattgcaaatcttggagaaaaccgaaaccct

SEQ ID NO: 16420 - DNA, 556 bp, Setaria italica
  Peptide Sequence Number=SeqID_82394
taaactaaactaaaactaacttttactacaatagtgaacgaattcctgttaagaaaggtaaacgtgacaatatttgtttgtcaaacccatccaatgggtaatttcggtgtagccattttgtctttaaactaagcttttcaatccttccacatctggttttctcatgattggaggattcactttctgatttatctcagattctatttcttcagtcttacatagttcatgtttggattatttatttgctttgcaattgacattatttgctaagcatttaagttattcgagtaaaataaggctgttaacatgcgtttgattttttttcttgttgcgctgacaaggctttctactatagtacaaagcccttatagattctcaccatgtagaaccaatgttgtgctatatgtactttccatttcctcatgggtaagttgattgctattagatatatcactaattcacaacactgatattatagatccatatgcatctttctgctcctagctgtatctcaccttttttcctactgctttttattctggcagctgtcagtctt

SEQ ID NO: 16421 - DNA, 282 bp, Setaria italica
  Peptide Sequence Number=SeqID_82395
tattggtgggggagcattatgaaccttgttgtccacatccatgtcctgagagccatggctttctggcattggagcagctgttggagaatcatagagctttggctctgctctcgatgcagatggactgtggccttttgctgttatactcagtgtgagggaatcatggaccccagggctcacagatggggaatgtccacgccctggtgcatagggtggaggtctggcagccaatgctgaaccatctgggcctttcactgaacaaggcacgtggttttgtgatgc

SEQ ID NO: 16422 - DNA, 717 bp, Setaria italica
  Peptide Sequence Number=SeqID_82396
tttaagaagacaaaaagcgaacgagcattgagagtgcaaaattattacaggccaactccctcctcgcactgtagagattgcagaaacgtaaaaggtactatgcggatatgtaagtagcccaccgtcccaagccaaaagacctcccacgaacactatacgcctgtcgtctgtacccctcccctgctcaatctgttggtattctttatgccgacctacacctcgtcctcccagtcatcgctgtcatcgaaatcaccaaacgcagcctcttcacattgccgcaggtagtctgggctgctgcccccgacgaggcggagggtgcgcttccccgcgttcttcccgagggatggtcggcggccgatgagggggcggcggttgaagggcgacttgaagcggacgtagcggaggtcgtcgtcgtcgtagaagtcgtaatccacggccctgtccatctgggcgagatacttcttgaccttgttcacagcaacgccggctccccctctcgcctcggacttggggatcccgcgcgggtgcaagccctgcacgacctcgaagaacccagcgctcccgtatccatatctctgggcgaaggccatgggagagggggaagccggcttggtgcggaaaccctagcctcccgacgcggtggggacgaagcgaagaggctgagacgatgggggtggatgaatggtgtgcgggcgaggaaggcgaggtgggaatgga

SEQ ID NO: 16423 - DNA, 267 bp, Setaria italica
  Peptide Sequence Number=SeqID_82397
gagagctagcggcgcgggggagagctggcggcgcgcgaggcggcggcgcaaggtgacggcgtggcggcgcggcgcaccccaacggcgaccctctccgccgtcttctcaccggtgatgttgaggccgggcctcgtgcttgtggtgtccctattgtgcctggtgtgatctgcagtcgtttgagattcagattgaaagacaagtagagttgtatcctgcaatgacaactccgagcagagatagcaacatgcagcagctagtccctatagc

SEQ ID NO: 16424 - DNA, 453 bp, Setaria italica
  Peptide Sequence Number=SeqID_82398
cgcggggagagctagcggcgcgggggagagctggcggcgcgcgaggtgacgaggcggcggcgcgaggtgacggcgtggcggcgcggcggaccccgacggcgaccctctccgccgtcttctcaccggtgatgttgaggccaagcctcgtgcatgtggtgtccttatcatgcctggtgtgatctgcagtcatttgagatgtaatttcttctactttctggtttgagtccttgcagctaccattcagagagaggtgttgtgtttcaaaaccgcactccagtggtcctagctcgctgtggcagccgtatgacagtgcctgggtactccagtactcctagctcactttgtttgctactgttctatttctggtattccgtatgtttgcctgacgctctgtatgttctgctttggtactccgtatactttacatgacatggattcattctctatccagcc

SEQ ID NO: 16425 - DNA, 275 bp, Setaria italica
  Peptide Sequence Number=SeqID_82399
cacggcgcggggagagctagcggcgcgggggagagctggcggcgcgcgaggcggcggcgcaaggtgacggcgtggcggcgcggcgcaccccaacggcgaccctctccgccgtcttctcaccgtcagattgaaagacaagtagagttgtatcctgcaatgacaactccgagcagagatagcaacatgcagcagctagtccctatagcaccaccaggaaaggcttctggcagtgacactgggaaggagctggttgtggttgatcctgcaggaaaggg

SEQ ID NO: 16426 - DNA, 519 bp, Setaria italica
  Peptide Sequence Number=SeqID_82400
aaatgcatagtgctctgcatctcaggttggtaccatattagttctcaatcataagttcatgatgatatgaatccattatcccaacttgctgaaattgcatctcatgtcttttacatatcttcttgcttgctagtttcttgatgcttccagtaaattgttgctttaatttccttttgcttatgggcatgcaggtgatgttgaggccaagcctcgtgcatgtggtgtccttatcatgcctggtgtgatctgcagtcatttgagatgtaatttcttctactttctggtttgagtccttgcagctaccattcagagagaggtgttgtgtttcaaaaccgcactccagtggtcctagctcgctgtggcagccgtatgacagtgcctgggtactccagtactcctagctcactttgtttgctactgttctatttctggtattccgtatgtttgcctgacgctctgtatgttctgctttggtactccgtatactttacatgacatggattcattctctataaccaa

SEQ ID NO: 16427 - DNA, 448 bp, Setaria italica
  Peptide Sequence Number=SeqID_82401
gatcgaatcctccacgactccacggcgcgggaagagctagcggcgcgggggagagctggcggcgcgcgaggcgacgaggtgccggcacgaggtgatggcatggcggcgcggcgcaccccgacggcgatcctctccgccgtcttctcaccggtgatgttgaggccggacctcgtgcgtgtggtgtccctatcgtgcctggtgtgatctgcagtcgtctaagatccgaacaagaaattgacggatcaccaggatttagtgacagatcaggatccactcgatccagacctgcaatgaaagcagctgtggaaaaaatccactcctaccgaacgaggccttaaggatcccatcagccatcacctggttttacattctccgtcacgcgctgaaagggactcgccctttggttactttgcagcttgtttatgccatggccatgtatgtcgtcact

SEQ ID NO: 16428 - DNA, 435 bp, Setaria italica
  Peptide Sequence Number=SeqID_82402
cttgacagttcactaaaaataatgaaatccagggatgccgaatattagctgaactgcttgtggcaatcatattgttattgcttttacatgtgattccgaacttcaagatttcctacattcagctctgttgacttgacatgctcattgaaatacattatgtatttgtttaagcctagaaggaactaggaatttcaatctgcatagcatgaacctgatgtccgaatgttaccatacctgacggaaactcaacgttcatatccattgtcatttgtttatgtgcagtcagattgaaagacaagtagagttgtatcctgcaatgacaactccgagcagagatagcaacatgacagcagctagtccctatagcaccaccaggaaaggcttctggcagtgacactgggaaggagctggttgtggttgatcctgcaggaaggg

SEQ ID NO: 16429 - DNA, 851 bp, Setaria italica
  Peptide Sequence Number=SeqID_82403
cttagtggtagtaccctaattagtagacctaggtagtagaatactgcagtcgtttgagattcagattgaaagacaagtagagttgtatcctgcaatgacaactccgagcagagatagcaacatgcagcagctagtccctatagcaccaccaggaaaggcttctggcagtgacactgggaaggagctggttgtggttgatcctgcaggaaagggctcaggaggagtaaaactgcgagaggatgaggaggacctggaggtgaagctgaggcgcatcatggagaatgtccctgttcgtgtcagtaacacatcagggtcctctgctggttccggctccggtgatttccaccagtatcggcaaatgaggaggagagaacaggaccggctagcacgaatggatgctgactaccaaaagaggaaagagatggctttgttcgaaatgcgaaaggaggagaggctgaaagcagctgaggagcggacagccaagaagcgcttgaaacgccaaaagaagcagcggaagaaagagaagcgaactaaaactagtaatggaggtgaagaatctaacagaatggagtcatctgatgatgatgaaggttcggatgatgatgagaagttgaagcaatgacatgtcaattgcatttgaagatgcttttagactgccatcatgcatttgactgtggtctacttgcttcttgaagaaggaagcctgtgcgttcctccctgcttaattgtggccttgtgggcactttaactcacgtctggtatgcccatcgtaataggagtcgggaggaagcagatatggagagcactagaaagttttctgttagtggtcttcagagattcgccttgcatgt

SEQ ID NO: 16430 - DNA, 1079 bp, Setaria italica
  Peptide Sequence Number=SeqID_82404
aagcccccttgggcgtccgctgggggcttctgtgagaggcgttaaggaggatccagcaggggcaccgcgtgcccggtctttgggctctagctcgaggcagcttgaaagacaagtagagttgtatcctgcaatgacaactcacagcagagatagcaacatgcagcagctagtccctatagcaccaccaggaaaggcttctggcagtgacactgggaaggagctggttgtggttgatcctgcaggaaagggctcaggaggagtaaaactgcgagaggatgaggaggacctggaggtgaagctgaggcgcatcatggagaatgtccctgttcgtgtcagtaacacatcagggtcatctgctggatctggctctggtgatttccaccagtatcggcaaatgaggaggagagagcaggaccggctagcacgaatggatgctgactaccaaaagaggaaagagatggctgagttcgaattgcgaagggaggagaggctgaaagcagctgaggagcggacagccaagaagcgcctgaaacgccaaaagaagaagcagcggaagaaagagaagcgaactaaaactagtaatggtggtgaagaacctaacagagtggagtcatctgatgatgaagaaggttcagatgacgatgacaagtctaagcaatgatccttcaattacatttgaagatgcttttagactccaggtcaccattcagacggagcaccgcttgcttgttgaagaagaaagcatgtgcgttcctccctggttggctgtggacaatgaactagcatctggtatgcctgttgtaataggctaatgcctgttgtaataggctaagacaggtcctgtgtctgttagaggatataacattttgagcagagatgggacgcattagaaagtttgctgtttgtgttcctcgttcggagaatgccttgtatcagtaccttttgatcagctataacattttgggcagcgatggagagcactagatagtttactgttagtgttcctcgatcagagaattgccatgcatttgtaaacttcatctccatattttatgcatctgcatgtatttgtatcaaaa

SEQ ID NO: 16431 - DNA, 1187 bp, Setaria italica
  Peptide Sequence Number=SeqID_82405
ccgtcatctctcgccacgtggtgtttgacgagtccgtcttccctttctccaccacctcccacccccttccacctccgaccctgatctctcctccctgtttcccactgacccggtggaccagccaccgttgacgttgtgtcctgcaggtactgctccaccgtggttttcgtcgggctcgacgtccatcggtgctgcccctgaccctgtgcccagcgagggtccgacggcgccagactctggtgctgcccctacccctccgccctgcgcggggccggaggcaccgccctcagcacctgctgcacggttcgcgtagccagtgcgcgtgtaccagcgccgtgcgcggccggctccactacacctggagccggccacgccaccgccgtcgccgcctcggtcaccgcctgtggactcttctccgccggcgacgcctacaccaccacctccaccggccccgactgcccgtgtcgcgccgacggtgtaccatccgcctctcctacaccgacacccgcgtcacgttcaccctatggtgacgcgacttgcggctggtaccctgcagccccgggctctttcagcgatgcccggcgcgccgcaggtttctcctgtaccctcctccgtccgcggcgccctgtcggatcctcactggcgccgcgcgatggaagaggagtacgcggcgctcctcgccaaccagacttgggatctggtgccccgtccgcctggctccaacgtcgtcaccggcaagtggatctggactcacaagcggcgggctgatggtacccttgagcggtacaaggctcgctgggttctccggggtttcactcagcgccctggtgtcgactacgacgagacgttcagtccggtggtcaagccagctactgtccggactgttctctcactggctctctcccgctcctggcccgtgcatcagctcgacgtcaagaacgccttcctgcacggcactctgactgagactgtttactgcagccagccagcggggtttgttgactcttctcggcctgatatggtttgccggctcaacaagtcactttatggcctcaagcaggcccctcgagcttggtattcgaggtttgctgcctacctcctgacgctgggctttgtggaggccaagtccgatacttcgctgttcatttatcaccatggagctgagactgcttatctactgctctatg

SEQ ID NO: 16432 - DNA, 679 bp, Setaria italica
  Peptide Sequence Number=SeqID_82406
ggcctatgtgatgggaagacaaatgaagctgaagaattgctggacagtgctattgcgagaggtttcaaaccaacagttgttacattcactaacatgattaatgggtattgcaaggctgaaaggattgatgatgcactcagggtaaagaatatcatgatgtcaagcaagtgcaaacttgatttgcaggcatatggagtgttgatcaatgtcctcatcaagaaggatagggtaaaagaggctaaagagacattaaatgagattttgtcttatggtttagctcctaatgttgtcatctacacctctataattgatggctattgcaagattgggaaggttggtgctgcactagaggtcttcaaattgatggaacatgaaggttgccggccaaatgtctggacttacagttcattgatttatggtctaattcaggatcaaaagcttcacaaggcaatggctttaataactaaaatgcaagaggatggaataactcctagtgttatcacatatactactctgatacaaggccagtgcaacagacatgattttgataatgctttcaggttatttgaaatgatggagcagaatggcttgacacctgatgagcaagcatacaatgtcctcactgatgcactatgcaagtctagaagagcagaagaagcttattcttttctcgagagaa

SEQ ID NO: 16433 - DNA, 488 bp, Setaria italica
  Peptide Sequence Number=SeqID_82407
cctgattcgctgaggctgtccattgtctgcagagcccacagccaaatctttaccattggtggccacaggttcattgcttgcgtcccgtcttgtttgttctgctgggctgtggctgcgtcttgggctggggcgacgataccctccacggtcacggcgcctcgccggactgcgtgacctactcctgcttcggtctctccttgggtacctagtcatggagttcaaactttgagccattgccaaattaacatggcattgcaaaagatggtacaaaaaatagcaagcaaatgggaaggaaaacaattttttatcagtaatggaaaagctacaagtaaactatggttcttgcacatgtgatctaaataatatctaaagacaaaattgacagtcacacatggcatgtgttcagtatgcacaataccaacaaacttagggatttaatcaaaccaagtaaactctaggaagcgatgaactaacagagccaaatattt

SEQ ID NO: 16434 - DNA, 2301 bp, Setaria italica
  Peptide Sequence Number=SeqID_82408
ttcggacgtagttcctattggttttttttttttaaaaggaagtctaaagaactgatatatgaaacgtttttaagtcaaacggtacatccaaatgtacaactacatagaaagcaaattgtgttaagctgacattacaaaagcgtacagaatactaaacaagcatgaaacatgagttctaggcgcctggaaattgcgtaattgtcacatctcagtaagaaaccaggcctttgtttccatttccgtcagggctgctggatctggagctgctgctgcgcctgcggttgtatctagagctctccctcttggctggggcagcttcaggagatttggacctcgaggggtcacggctcttagacctggaccttgaccgtcctctgttaacaagggggctgctgccacggtagtcgggaccgcctccatggcctgatcgaggcggcctgttgcttgcgtcccgtcttgtttgttctgctgggctgtggctgcgtcttgggctggggcgacgataccctccacggtcacggcgcctcgccggactgcgtgacctactcctgcttcggtctctccttgggtacctggatgggctgctggctcttggggagccatggtatcttcttactggcgaacgtctactgtaaggaccatttcttccatacctattgaaactgttccatctgtcatctcttcctccatcatagcggggccgaacaggagggcgctctggagatggtgtcctgtatcgccgtgcatatccatatttctctgtaaaaccacgtcctttcctgattcgctgaggctgtccattgtctgcagagcccacagccaaatctttaccattggtggccacaggttcattgcttggcgggtgcctttctgtaccagatctagacacaccagcctctgcagtatcagcaccaccgttgccatctgcagtatcagcctggatggggttgatcctggagcttgcaactggatcattcctatcttctgaattgtaatttcctgatctgtcatcagccccattttcatcttttcttgagggtttactcccatcatgtgattggtggacagccgtaaccatttgtttgcctttgtctacatcttcaaaagttcttccttcttctgaaattgtcgttttggtactttctttgtctttccgcgaggaacgcttggtacggtggcccccattttcactgtcagaactgctgctacctatcgaatcatcacttgaactcccatagctccgtctggatctccttttagatcctctactctttttcttactcttcgtatgtttactcttcctctttgtaggcttacgcttgtctttcttagaaccttttcttctcttacgcctatgatcactggatgagctagtatccaatgatgacgacgagtatgattctgactcagagccactatctgaggaataggatcgtgagtctgaagtatctgagctatatgaatcggatgaatagtgttttctcttctttctgtgtttatcatcactggatgcttttttggatttggctctcccttcagcaatggagttgccatctgcttttcttagcttcttgtctttctctccctgtagctgatcttgagtatttatgttggagacttcaccacagtctacaattttcacttgacgagaaggatttccattttcaccaccaacagcttcaagcttcttaagcaaagctattccactggccaccttcccaaagaccacatgcttgccatcaagatgaggtagaggcttgaacgttataaaaaactgggacccattggtgtctggtccagcatttgccatggacagcataccaggctgatcgtgcgttagcctgaagttttcatctggaaattttccaccataaatgctctctccaccacgtccatctccctttgaaaaatcaccaccctgagcaacaaatcctttaactatgcgatggatgttcgttcccttataatagagtggtttctgtgtagatgctccaaggcctctttcaccggtacaaagtgctcggaagttctccgcggtctttggaactacatttgcaaatagctcgaatgtgatcctctcggtgctgcctccgccgattgatatgtccatgaaaacatgaggattcttagctttgggcatggttgccccaaccccaaccccttcgggtgaccggcgagatgggatggatctccgtccggcgctgttgacggaggaggcggcgggaggacgaggacgccgggtcgccggcagctacgggcggggggcgaggcggctgaggccgtcagggtggggagcgcgct

SEQ ID NO: 16435 - DNA, 480 bp, Setaria italica
  Peptide Sequence Number=SeqID_82409
gggtacccacaggagccaaaatacataagttgtacttagataccacatatcggtgtggattacattactaaaccaacaataaagcccgttaacaagaaattggacgccacagcacagaatttaaatgcaaaccctgatattactgaacttaactacaaacactgatattactgaacttaactacaagttaaattgattataaatgaaatttgaaaggtgggatttaaaggaacttgattgagaaataatcaacagacccatggatttcggatcatcaagatcaagcttgatccatcccaggagatcacaggagctgatgtccaaatcttaaacactaactaatagagctgcagtcacaaactaggtaatttttattattttactatcttcgattactcatgccacaaaggttcccccatttataccaaataatgagcacaccaatcagcaccagaactaacaactaagtcccgcccacca

SEQ ID NO: 16436 - DNA, 539 bp, Setaria italica
  Peptide Sequence Number=SeqID_82410
ccccctctgtcttacagtctaagacagagggggacagtgtgaccttttgccgcatgaaagtctgtctcgttacacaacaggagaaacaagatgagaatgacagatagaaaaaaacaaaaacatgtcactacgattgataaacagccctaaaaaacacttggcgttcaatccctctgagaaaagataaaagcattttcattgcaggtctcaataccttcaggcatgcaaacaatagattacctgctcaaccctatttccaaattagtttatctatccagtacttagttgatggcaaaccacttggcagatctaatatagaggattaatgcacagtaatatatgctgatctcttatgcacatgattaacattagtcaataaggaaaacaatgtctctacatatttcggacaggtcaacatgcaaccatatgatgaacattcagttcccttcagtatgcaatgaaaaatattagtccatggtagtagatagtaataattgtgcattaatcattcatgtaccttggttccagaaggcatgtca

SEQ ID NO: 16437 - DNA, 265 bp, Setaria italica
  Peptide Sequence Number=SeqID_82411
tcccgcggccgccggctcaagacgtgcacgtgcccggcggagcggcctcggagtcggaggtcctacagggcgccgtgcctgatggtttgcggcaagaacgccaacgccgtcgagagcgacacgacgacgtcggacgaggacgacgaggtcacaaccagcagctttgcggtggccgacgtgaagagcccggcaccggcggcggtggcagcgagccggcgggagaggtactgcctggttgcctgcaagcagatggtgggtctgttcg

SEQ ID NO: 16438 - DNA, 669 bp, Setaria italica
  Peptide Sequence Number=SeqID_82412
cgcctgcttcctcctatccacgagcgcagcgcaacgcaggggaggagggggcgggagccgagccacggagcagaagcgaggcgcaccgcagcagcaggatgccgacgctgatcctgagcaccaacgtgccggtggacgccgtcgtcgccgccgacatcctcaaggactgctccaaggcagtcgccaggatcatcggcaagcccgaatcctacgtcatggtgtccataaacgggtcggtgcccatgtcattcgcggcgagcgaagagccaacggcgtacggtgagctcgtctccatcggcgggatcggccccggcgtcaacggcaagttgagcgcggccgttgctgagatactggagaccaagctctcggtcagcaagtccagattctacatcaaattcgatgatgtgcagcgacacaactttggcttcaacgggtcgacattctaaagaaaactccatcagaagaagatgattgctgcgtccaaacaaccacctcaacctgcccacacataccgccatcagttcatcaataaacgtggatgatcaagggtttcatcacttcatgtgtatctcctgcacctccaagggatattccgcttgtgtgaggcagcactaattttatatgctttatttcagcatgccgtcgtgcacctcatccctacaaaaaaaa

SEQ ID NO: 16439 - DNA, 599 bp, Setaria italica
  misc_feature (50)..(50): n is a, c, g, or t
  Peptide Sequence Number=SeqID_82413
attatgtcttttactcgacaaaccagcattgcacaaaccaggatcaggtncatattcatacaacaggaaagcaaagttctataactataaagccctgtgcaaaaggattttacacttgtaacactccctcaattgctgaaacaccacaagcaaaactagggttggcagctgcagttgcctgtagataacaaggatgtaatcagaaacaaccagcagcataccatgcgacacccccattatctaatggatcaagaggccaggtcaggggtggcctccccaagggaaatggaggacagcttctgggtcaacagatcaactaatgagctcgcatcaacattagccttgatattctggtgcacagccggaacgttctcctttggagtgtctgcagccaccaccggatttgtcttgtgaaggcacgcttcaggttcggcgaccttaagaggatctacttccatttgtacagttttgatgggtactgcctttgtcgccttgctcttgcaagcactgatctccttatgaggtgctgctacaggttttgattcctgttgacaaagggtagaagatgcctgagaggtgggtgtggcagggtgtgaaca

SEQ ID NO: 16440 - DNA, 1629 bp, Setaria italica
  Peptide Sequence Number=SeqID_82414
aatacatgacactatgactgcataagcttctgtagccactcttgccaaaagaacaaagcttatgtacccactctcgctgtcttccagggttttctgtgacaagatatttcctacacttgcagccaacataaaaggaacatgacactaatgcagaacactaacaccatctgctctgctgtcaaggtgtattatttgttacattgtcagctattcacagtttttccaaaaaattgctgccaagatcaaatgacgcccaatccgacattgccatctttcggctctaggttcctgtcactagttcatgtcagttgtcacttgtaactcctccactttttccgtctcactcatcagtgaggagaacactatccaaaacggcaaaccctgcagcaacgccaccttcgtttgatgaagaaactttggtgcgcattaagtaaccacactggttattcaggatgaccttgtctttgttccgcaagtaggctccatatatccctagctcagagattgtaaggtcctcaaagcaatcaccacccctaactaaaggagtaagagaagcttttggaaaaatcctctgcatcaggatgtatgctgcaagtgactccccctgttccttctggagttttatcagcgtgtctcgcacatcatgaccatatatgttgtttcctccgccttctcgctgaggcttcaagacaaacaggtcaggtttctctattgctgatttcacaatctcttcattatccaagctccacaaacctgcaaaacttttacgtagtttggcaatgtcctccttgttgtcgagaaacctttcaagaacgtttggctttgctagttcttgctggatcttttttgttcctactaaatggtaagatattgaagggcactttactgcagaagattgttccatcagaagcctcgctttccactccgcttccgaagggtaatcagttggtgcatacccggctctgaaatacacaacagcaactgtccgaccatctatcacaagtgttccatctgtaagcacctgtccttcagcctctacttgtgccaacgttttccttatagttgtcacaccatatgattccttcaaatgattggcaagccagtattggtcgtacatatttctttcttcaggttgaacaaccatcagaacaacagcactgtcattgttatactcagcccatgctttgcccaacgcttcagcaaattgagtggcagcccaattccgtggtatccttttagaatctaggcctaaaacttttccatactgattgagtaaggtcctgtgaagttcactgacaagggagccaaggccaggaaaagacgacgaaatagtgttgagctctatttgaagcagtgaattggtttcagaatccagcatataatcagatcggtgcaatcctaagcggatagcctctttcttatttattgccatcatcttctcatgaatttctagcagccttgcagtgaattcatcaacctgctttgtcctagacaacgcagcttgcaaaaactccccatccaagctgacacgatcgacgagctcattgaagataggggccagctcgcacgcctgcttccagaaggacgtcgggaagcgcgatggaagcagcgagaacgggggcatgaacc

SEQ ID NO: 16441 - DNA, 251 bp, Setaria italica
  Peptide Sequence Number=SeqID_82415
gctcttagctttctccgtcgtctccgcagctccctgtgcacaccacacacgctccacgcgggatccttgcttcgcttggcgtcagaagcggcatggcggcggctggcaagtcatcgtcggccgtggaggagacgacgaaggtggcggcggcgccggccgcgcgagggcggcgagggatcgaccggcaggccgtcgaccggggcgtcgcctacgcgctcatggtcgccgcgctcgtcgccacctacgcgctt

SEQ ID NO: 16442 - DNA, 407 bp, Setaria italica
  Peptide Sequence Number=SeqID_82416
tgccgtgatagtgcgccccagcgctgccgtccatccccacgcaagtacacgctggtgccaccgcttcctccgtggtggtgcatgccgtcatgctggacatgggggaaccatgcagggttcagctgctcaagctccggacctgcgtggtacaagacctcagggttcacagcagcagtggcagctccatacgccatgcctcccgtggcttgcacgccgagcatcacatccatttggccgaccctaagcgcattctgagtgggtgcagcacctcttctggcagtactgagacccggggcatcgcccgtgtcggatatcagtacgtgttcagcggtgtcccacttccatcctggagctggaccaactttgacgcctgccaagttgttctcaggaacaggaacggggacgga

SEQ ID NO: 16443 - DNA, 611 bp, Setaria italica
  Peptide Sequence Number=SeqID_82417
gcaggcgatgcgtgtgattacgagcgggtgagcgagcaggcgggggggtccaaaaatccgaggaggaaaagtccgcgagaatctccgggccgccctccccacgccccgtcaaaaatccaatcttgacgcctccctgggcgagcccagactgttccaaagttttgtgcctctgtgatgcgggatttgttgtcagttggttggtcgcctctggtgatgggatgagccccgcctgcctgatccgctgttgatcccgctccagcttttggttcggtttcttggagagattttctctgtctctcactctctcctggattgcgcttggtgtggttggttgcttctgctgtgtgtttggctcgatcgggatgggggcgtgggccgattcgccaccaccacatctacgcgtcctcttttttattgcctccgcagtgggatttgctttcgcgttgttgtgagctatttccgcaaatcgtctagggctggccgaggcgccgtgtgttctcgcgcactttactcttcctattccctccccttcgcccccagatcgaatccaccgcttccccgccgcgtccgggcgtcgattcgagctgcgccgccgccggttccgccgcaaa

SEQ ID NO: 16444 - DNA, 597 bp, Setaria italica
  Peptide Sequence Number=SeqID_82418
aagctacatgcttaccaatcatgtgctctcattacccaatttaatcgtgcgcttcttgttaatcttgaattttaggcacctttgcctagaataactgtgagtttcaggcttcaaaatgctcataaacagctctcctccctttgatatgatgtttgctctctgtccgttttgaactgctgagcgtattttcagtgcagtgggattgtgtaggttacatctgagaaatttggtggaaagttatttgctttacttttgttatcatgtatattgtaattatactgagcgctgaacaacttggtagaagtatggcggacgggggcattttggtagccatttgccaatatggtggagagttcacttctggccccaatggtaacttgatatacaaaggaggagaagcacatgctgtcgatgtcactcgtgatatgtcacttgagagcttcaaggatgaggtgtccaaggtgttccatgttgatgtcactgacatgtcattcaagtacttccttccaaataataacagaactctcatcacaatatcgtgtgatcgagatttgcaacggatggttgatttttactactagtgctgcacaagtggaa

SEQ ID NO: 16445 - DNA, 518 bp, Setaria italica
  Peptide Sequence Number=SeqID_82419
ctgggaacgggtggggcggcccggttgccgccggaggaggaaggggaggcggccgaggcggcggaggaggaggcggcgtggcgggagcagaggaagcggagggggaaggaaggaacggtaggaaggtaggggacaacaaagggacaagttcgggcacgagttcctcgagttcgagttccgccccgacggcaagctccgctacgccaacaactccaactacaagaacgacaccatgatccgcaaggaggtcttcgtctccccatccgtcctccgcgaggccaggaggatcatccaggagtccgatgtgagctcacaccatccctctccttatccttcgattcgattgcattccattcggaatctgtagaggaaacctgctagggtttgtagatttgattgcttgccttcgtccccgccgcagattatgaaggaggacgacagcaactggccggagcccgaccgcatcgggcgccaggagctcgagatcgtcatgggcaacggagcacatctccttcacc

SEQ ID NO: 16446 - DNA, 746 bp, Setaria italica
  Peptide Sequence Number=SeqID_82420
catctcctccaaaacccccaatccgctcactgagaaggaagggagagacagataaaatcgatggcgagtggcggcggcgacaacggcggcggcgcgggcgacgccgagttctacctgcggtactacgtggggcacaagggcaagttcgggcacgagttcctcgagttcgagttccgccccgacggcaagctccgctacgccaacaactccaactacaagaacgacaccatgatccgcaaggaggtcttcgtctccccatccgtcctccgcgaggccaggaggatcatccaggagtccgatattatgaaggaggacgacagcaactggccggagcccgaccgcatcgggcgccaggagctcgagatcgtcatgggcaacgagcacatctccttcaccacatccaagatcggctccctcgtcgatgtccagtccagcaaggacccggagggcctccggatcttctactacctcgtccaggatctgaagtgttttgtgttttcactcatcaacctccacttcaagatcaagccgattcagtcctgagctccattccatgctgtctcatatttgtgttatgtgagagtgagtgtttaagagagaaccatgtaccatgtaagatcctatttagtttgtgatgatgcactcgggttttgtggagcactgggtggaagtgggactttgagtttgcctggggttgctgtttggattgtgcaaactgcgagtaatgatatttattttccttttcc

SEQ ID NO: 16447 - DNA, 354 bp, Setaria italica
  Peptide Sequence Number=SeqID_82421
tccgtggtgtgcaaagctatcaaatacctgtcaaggaaatgtgggagaaaacaagctgcagttagtaacaattttaggtaagaagaagcacctagctgaaagtatcactgtggccagtgcgcatcatgaacaaaaatggtgcgattttgcattatatttctcattcgcaattagcacaagagtagtaatgaatcaggcatgaaaaacaatctgtaatgtttattctttagggttaactacagtctagcatgcatgctcaccatgtgctgaaaagattaacaacaggagaacccagaagtcacatgaaagatcagtctatattaattgctctacagctctacagtttataacaca

SEQ ID NO: 16448 - DNA, 605 bp, Setaria italica
  Peptide Sequence Number=SeqID_82422
acgtcctcgtcatcggcttcgtcatcgtcgccgggttcatccacgccaagcccagcaacctcaggcccttcatgccgcacggcgtccccggcgtgttccgcgccgcggcgatcgtctacttcgcctacggcgggttcgacaacatcgcgaccatggcggaggagaccaagaacccgtcccgcgacatcccgctggggctgctgggctccatgtccgtcatcacggtcatctactgcgtcatggcgctggtgctcagcatgatgcagccgtacacggcgatcgaccggagcgcggcctactccgtggcgttcaccaacgtggggatgcactgggcgcagtatgtcgtggccctgggagcgctcaaggggatgaccacagtgctcctggtcggcgccctgggtcaggcccggtacacgacccacatcgcccggagccacatctattcccgtcccgttgttcgcgctcttgtgtacccctaggtaccggcatccccgtgcacgccaccgcgctcatcgccatcgcgagctcctgcatcgccctcttctctagcctcgacgtgctctccagcctgctctccgtcagcacgctcttcatcttcatgatga

SEQ ID NO: 16449 - DNA, 2169 bp, Setaria italica
  Peptide Sequence Number=SeqID_82423
tttaaccatagagtacctctcaactataaagtttgtaattatattcacaattgtatgcacaatacaaaaatgggttctctcaagacgaggactgtggcagctgactcaggcatacagcatgctaacagccatcactcttatcagcaccaggactctttcaagctactggagaaacacgcagattgagcgagcgaataggccaaaatcttcacaaggatcggtgggggcagaggaaaacttggcactggactctttatgggctaagcgctcaaggtcaaaatgctcatctcactggatgggtaagcaatgtaactacaacttcacatcacagaccagagatgcagccctctccctgtgcagaatagccacctcacgagagcatgtatgtatatacatggagacatggtgccacacaaattggtggaaacatgtcaaaacccaggaacgagaattgaacaccttggcgctccggggtggtcgtaccatcacagaagaattcagttccttgtttccatgggtttgtttttctgtcttgatttgaaaactctcgcagcatctattgggtgaaagcaattggaatcacatgtactgagccagccattgcttacacagatcaagaaccggcagtgcatttgcatgtaacgcctgatgagcaacatattgaacatcagcaacacttccacttcgtgaagctatttggaatgcactttttagacgcccacagacaacacaagcaagtactttcctgtgattgctgattagcatgtcaataaggcggtctggtctttctttatgcttgttcgcataaacatttatagcagcaccaagaacctgatcccattcatcatcatctatagttccccttatgttcttcaaaaattctgttaattggccaccttttttcctttcagcaagggatgcagctacaccagcataaatatcaacagctgggagatcaaactcatgaagcattctgaaagctaaatcaaaatgcttttcagccagagtttcaacaaccatgcaccttcgcctcagagtttcagggtcagttggattcccgaaaagggaagttttccactgaggaccatctatactgttgagagccttcacaacatccatctgataggaaacacgagtagaatacttcattattgtttctctggtcatttttcctggggtgctcttattccgagcagaccgcaataccaactttgtagcctcaattgttctatctcgtacagataaggcttcttcaaaatgtgtcttggcatgtcccaaatgcctcaaagcctcctcttgagacattgaattcataaataattggatacaacaaaggccagaagcaacatggtcatcttttagaaccaaaaagttgtagagataattaaaatgccgatgtgtttcacaatagttgcaaatgcgggtaagaacagtgttcatgtactggatcacaggtgtctcatgatatgccggcgattgtgttattgcccgtattgtgttctccagaacagccatagcaccatatccaagacatagatcacacaagtcatcaattgtcccatagtcagttgttaacggatcactccatggaactgaagacaaagaagtttccccttcagtggtctgttgactaaaagggaagaacagagagcaggcttcagagaaatggccatgcctgaacatgaaagcaagaatttgtggccgagcataatcttgcaagtaatgaatacactcggcatatcggacactgtcaagattgctgcgaggaccatcttcaaggtatgaggtagcagatgtgaattggttgtctataggatctctggactgtcgggagctctcagatcgtggaaatgtggatggcatgtacagaacattaagataagcatcagcagaaagggaatcatcaaagatggttgccgcgctctttgccaaatgctcatacatggaacggacagaagaaacatcaaccggaggccctccttcaattgtgttgatgatttcagtaacaacagtagctgcatctcctttgtactgttgaagtgcttgcttgaacttcactcgggcttgagcatagtgctccattcgtactaaagcatggccccaggcaatccatactggaaaagcttcaatcttgcactttctacaagtatatacaattattactagtct

SEQ ID NO: 16450 - DNA, 855 bp, Setaria italica
  Peptide Sequence Number=SeqID_82424
acgcatcttttatacgcatagcacacatatcctttccgagtatcagtatacaaacattgaactttgccagagtatcaaattttagtccagaaacacactccgtatagatcatttctaacatcatttctcaaattgaacacgccaaatggatacacaagcgatcgaacgagagcacaaggactcaaggacagactagatagatggtatcctatttatacaacacaggaacataagttcgacgtggacctacgggtccctcttgatcgaggacggccatgacaacctcctctggttcatgctgtcgagcccgtcgctctccgggttgatgtcatccacctgcttccagctatcgagcaccgagccgtctctccattgaggtggcgtcaagaactttgaatcatcactagatccgcttggggtcattgatagagaggaatggccaacgcgcagtttctgaagagtcgagaaggattccctcatcgcggacatggcctcaaagaaccgggtgcaggaagcaagcgcagcaggtataggtcgcagcatttccccccagacagcaggtgactctctaaagttttggctccactggaaatcgccgactgatgctgtcaatgccccatagtcacttgctgctttcagaagtagctccgaaaattgtttctggtattcagcttcaacaggtatgcaatcaagggaataaggttgttgcagccgagcaataatgcgatccttgttctgaataacatctttcaaaataacagttattctggccaaagattcgcacttcttttccatctcactaacatgagtcaaatgagcaatgtttttatcatcctttcttccttgtagctccta

SEQ ID NO: 16451 - DNA, 856 bp, Setaria italica
  misc_feature (821)..(856): n is a, c, g, or t
  Peptide Sequence Number=SeqID_82425
cctatcccctgtgtgccttgcctatccccttcgcgtgtctcatctctccctccctcctcgtgtcgtcgtctacctcctcctcctccaccccctccatcggagttcgatccgatctccgctctccatatcggatcggatccgcagcagcatccgcgatcgcgagccatggcggggaggaccaacatccccacgaacaactccgccctcatcgctatcatcgccgacgaggacaccgtcactggcttcttgatggccggagttggcaatgttgatctgcgcaagaaaaccaactacctcctcgtcgataacaagacgacagtcaaacaaattgaagacgcattcaaagaatttactgcaagggaggatattgctattgtgctcatcagccaatatattgccaacatgatacgatttctggtggatagctacaacaagccagtccctgctattctggagatcccatccaaggaccatccgtatgatccagcgcacgactcagtgctctctcgcgtgaagtatctgttctccacagaatcagtggcgtctgagaggcgatgaaggtgcccttgtgtagcaaggaagcaccctttgttgtatctattttgttttgtgttgaagagaaggttgcctgcaccatttcggttcgggatagcaagaagcatgaataacgaatgagcttgcaaacaataataattgggttgaaccaaaccagcttgtattttataaggttgggatgctatttggtgcttgtattaatttggttctttttatggagagtaatataaggtgttattgtcgtagaaaaaaaaaaaaaaaaaaannnnnnnnnnnnnnnnnnnnnnnnnnnnnnnnnnnn

SEQ ID NO: 16452 - DNA, 385 bp, Setaria italica
  Peptide Sequence Number=SeqID_82426
attcctttcctcttcttcacacctccgctatgctcatcactcatttggatgttctgactgaatgtaccagatgaagattgatacaaccctggtctttcttccaaacccatgctgtaaggtccaaatccatacggtccactgttatagcccatcttctgatgcattgtgacagagttccaatttgcctcggagaattctctgccactgtttgcactgggaccttgatcagattgctggcctgagtacatctccaattgtccagaagcaccaacgttccttaatcccctccacagaggattatcgatcagcccataattcttcattaatcttggaaagaacaacgaatgtgaaaagacttaggaagaaaattaacttttacgtacta

SEQ ID NO: 16453 - DNA, 400 bp, Setaria italica
  Peptide Sequence Number=SeqID_82427
ccggtgatttccttttctaatggtgcagaagaacttttcttttgggctcacatggttttattaagacacataaatggaacagcacaatcggtgctttcattaatattgaagcttctggaagtgggggcacagatttagtttgtcaatctggacctggatcgtggccttctcgtgtttatgctcagactgcaaagtatcctatggccaatagcgtcgcacaggatatgtttggaataattccaggtgatacagattataggatatttgctgaagacatcaccaacattccaggactcgatattatctttgttctgggtggttatttctatcatacttcatatgatacattggagaatctacttcctggaagtattcaagcacgtggtgaaaatttattcct

SEQ ID NO: 16454 - DNA, 385 bp, Setaria italica
  Peptide Sequence Number=SeqID_82428
cccctcagttccgccactggatatgccatgctagcttatgtagtcataaaggagatgatttctgaaacatcagaaccataaagctggtgatatattttctctgccacaaactaagtaggagtttcctttaattttctccactgaacgatgtttttatgaactataccattggggcttccattgacagttattatgatatgtggatgttcaaatattggaggttattttctcatcgtttgtctttctttgttggagctcttttcttgtttgtcatcataatatttgtttcgtgggaaatgtgaaacacctttctctgaataatgacaggccaactcttcggaaagtctgagaattgatgtagctgtacttgaccagtatattgttg

SEQ ID NO: 16455 - DNA, 835 bp, Setaria italica
  Peptide Sequence Number=SeqID_82429
ttttttacttttagtttaaccttaactttagttttcctttgtaagtttcccgtaactatttagtctttgtattgttcatggtctgtaactctgttggatttaataagaggaatgttactacatgcatttggtgtcatccttgccatatttatccctgctggggcagcagcattaagattgttgttcacaaagaatgcaatgaattggtttgctcacccttatttggcgttctttatgtttgtccccacttcactggttggtttattgctgccgaggattacatgagtgccgaggattacatgggggctatcagagcaaacacacttttggggtgcttttgggttgtattctgcaataactatggcctacatgctagctgggctgagtggaggctttctgacgtttttcatttccatgtccatgcttcttggacgatttatctctagcatcattaagagacagtggaaccaacaatcaacgaagtcgttggttgcgtatgtggtgcccatgaccccatgtctcctttattgtatttactacggtggattccttatccagttcctgattgaaaagatgggcatgatgggatctcttccaaaaccatacggatattttgtgcctgatgttattgtcggagcagtagttggactggtggttggttggtgttttggtcctctagcacctgttgctggtcgttggttatccaagatctcaattatccagggcctgttgcaaattacagttgttgctttggctatctcatcccaactatttccttacagcactggagcaccaaaaagagttattcttcaacactcttatgttacagatggta

SEQ ID NO: 16456 - DNA, 2274 bp, Setaria italica
  Peptide Sequence Number=SeqID_82430
cgtagtagcatgcagaaaataatttttcacaattaggcaattttttgttactcactggttcatgtctcttagggatctaaataaactgtgtacgattgaacccaatagtgatctgtatgtgaatattctgttaagatcgttaagatgctcttttctgatgctggattcatcctgagttgttctttgatacatgttgcaaccactcaatcttttaatgtctagtactgtataatccatctcgtccgtattgctttggatatacaggatatgtttggaataattccaggtgatacagattataggatatttgctgaagacatcaccaacattccaggactcgatattatctttgttctgggtggttatttctatcatacttcatatgatacattggagaatctacttcctggaagtattcaagcacgtggtgaaaatttattcctcctagtgaaggcattcacaaattccatgttgttaaaagagaatgaaatatccagtaaagctgctaaggatggaattgaggattcacgagctgtcttttttgattatttgacttggttcctggttttttattctcgtgacgtctctgtgattcttcacagtctaccaatagccattttttttcttgtaccactgttcctgaagttcccgaacattagcttgatgtcatggtctgtaactctgttggatttaataagaggaatgttactacatgcatttggtgtcatccttgccatatttatccctgctggggcagcagcattaagattgttgttcacaaagaatgcaatgaattggtttgctcacccttatttggcgttctttatgtttgtccccacttcactggttggtttattgctgccgaggattacatgggtactatcagagcaaacactacggctatcagagcaaacacacttttggggtgcttttgggttgtattctgcaataactatggcctacatgctagctgggctgagttttcctagcatcattaagagacagtggaaccaacaatcaacgaagtcgttggttgcgtatgtggtgcccatgaccccatgtctcctttattgtatttactacggtggattccttatccagttcctgattgaaaagatgggcatgatgggatctcttccaaaaccatacggatattttgtgcctgatgttattgtcggagcagtagttggactggtggttggttggtgttttggtcctctagcacctgttgctggtcgttggttatccaagatctcaattatccagggcctgttgcaaattacagttgttgctttggctatctcatcccaactatttccttacagcactggagcaccaaaaagagttattcttcaacactcttatgttacagatggtaatgatattgtggattcaaactatggtttctctgtggttgatgctaactcgttggagttccttttcaataatgcacctgaggcagccaaatggctgaaggataactcagagttgtcctttgaagaaaagtatcgttctgatagaagctcttgggtggctctatatcctgtccctttcttgttctctggaagtttgaagtttcaggcacgaactgatgagattagaaagcactaccagctttttccccagctacttgttcagaagaccttgagtagcaatgggcagcgtacggtgcatctcaagctctcacttggttcattatcagagatttggactgctgtgctcaatgttactgggccactatcaaaatggtcctttgctgatgacatgctcccagctcctcaaagtgtaagtggcgggccaccatcatatatttgtcgactaagtggaaagagcgatgtggattggtcattctggttggaggccaactcttcggaaagtctgagaattgatgtagctgtacttgaccagtatattgttgatagcacaaagaaactgaagagcctcttcccaagttgggcagatttgacagccttcaccacatttttctcaacatattatgtatgatgtcctgtatttgattgagcaaggtgtaaatgtttttagagggtaaaaagtggaattatagtgctatgttttggggttatgtggttttcttaccccaatcagctggtcccaagcttgaggctggcatgtttgtaacatctttgtaactttaccttgctactatagcggtcactccaaagattgtgagaagctcgattcgataacagataatgccccccatcgcttttgagtgtatccatgcaatacaaagagcttagtatgataaggaac

SEQ ID NO: 16457 - DNA, 389 bp, Setaria italica
  Peptide Sequence Number=SeqID_82431
ttgttcgttccttttactttgcctactgggagatctatgtcaagaagtactgaattcaaatcattaaagggagagcgatttctcggaggagattttaatggccgcaacagcacctagaaaaaaagagcccaagataatacagagtacccaactttcgttataatactacgctcaatggaactaggagtcaagttgatttttacccggttccctgaacatgatcattgattgctttacggtttcacgactgaacaatctcaattgtcaactaagagccaattcttttcagaagttatttctgccaattggaagaaacaattcaatgatgacatcgacatctaggactgattagtcctttgaaaacacaagatcttcacactcacagtacc

SEQ ID NO: 16458 - DNA, 325 bp, Setaria italica
  Peptide Sequence Number=SeqID_82432
cagtggttaatgcttgataatttctgagggtgtgattctcttgataattagctgctcctttagtgttttcttctcttttttgtggtaacaaacaatttatctttctgtttcttgttactcctgtgttacagaaagataagaggccctacagaaggattttctggttattatgttgcaagcatttcttctcgaagtctattgggatataaacctgcaactttcgctatgccctttagatggacaaaaaaaggaaaaaaaatcatgttgttcctaaaaggctaaattgcacttaaatatagaccaaatgaggacatatttttagaaa

SEQ ID NO: 16459 - DNA, 533 bp, Setaria italica
  Peptide Sequence Number=SeqID_82433
tttgctgggatcaggcagcaccatggcctaatctttttccaaaaacatatatcaatagagaagttgcaccagaaacacaaaaatatagcatgtgaacatctgatatttttgttcaaccaaaccatctaatcatattacaaataggaggtgcaaaatcctatttgatggggaagaaactgaaagtatgaaggctgaggaggcccttcacttgagcaccgactcctactccgaggaggaggatgcggcgtccgaggcatctgcgccgaacttgtgcttgaaggcgtcctggcgctgcatccacatcatgtggccctgcagcgcggctgcccatccgacgaggaaggaggccacccagaagcgcttctccttcaccagcttcgacagatccaccgccgccattaggagggattcccttccctagtaccctttctgctactcctttgcttgctacaaggaagaagaagactgaggtcgacgacgaccaggaagcccatgggctacgaagaaaatggaggccaggagcccacgggcca

SEQ ID NO: 16460 - DNA, 795 bp, Setaria italica
  Peptide Sequence Number=SeqID_82434
ggaggcggcgcgtcgacttccgcttcccgccggcggccatctccatcgaggacgtccgcgacgccgaggaggagcgcgccgtcgccgccttccgcgaccgcctcaacgcgcacgggctcctccccgacaaacacgacgactaccacatgatgctcaggttcttgaaagccaggaagttcgacgcagagaaggctatgcagatgtgggcagacatgctgaaatggaggaaggaattcggagcggacacgatccttgaggatttcgagttcgaagaactggatgacgtgctgcgctactaccctcagggctaccacggtgtcgaccgtgagggccggccggtgtacatcgagaggctcgggaaggtggatccgaacaagcttatgaacattacctcgacggatcgctacatcaagtatcatgtccaggagtttgagagggccttcagggagagattcccagcctgcacattggccgctaagaggcacattgactctaccaccaccatcttggacgtccagggtgtgggccttaaggaatttctccaagactgctagggaacttattaaccgaatgcagaagattgacagtgactattatcctgagacattacatcaaatgttcgtcgtgaatgcgggcagtggattcaagtggatctggaacagcgtgaagggcttccttgacccaaaaacttcatccaagatacatgtttctttcttctgtatgtaggttcttggttcgaactaccagagtaggcttcttgaagtaatagattcgagtgagttgccagagttcctt

SEQ ID NO: 16461 - DNA, 1980 bp, Setaria italica
  misc_feature (1892)..(1980): n is a, c, g, or t
  Peptide Sequence Number=SeqID_82435
tttaccttccaagaagcaaacctgtcttttctttactgccgctgcagcagccatcgctaacctttctttttaatgattggcaggtgtagtagtaggtcttcgggaaggtggatccgaacaagcttatgaacattacctcgacggatcgctacatcaagtatcatgtccaggagtttgagagggccttcagggagagattcccagcctgcacattggccgctaagaggcacattgactctaccaccaccatcttggacgtccagggtgtgggccttaagaatttctccaagactgctagggaacttattaaccgaatgcagaagattgacagtgactattatcctgagacattacatcaaatgttcgtcgtgaatgcgggcagtggattcaagtggatctggaacagcgtgaagggcttccttgacccaaaaacttcatccaagatacatgttcttggttcgaactaccagagtaggcttcttgaagtaatagattcgagtgagttgccagagttccttggtggttcatgcacatgcagcgataagggtggttgtcttggatcaaacaaagggccttggaatgatccttacatattgaagctgatacacaacttggaagctggatgtgtgcgggaaatcaaacctgtttctgagggggaggaaagaagctgctcttcttttcgattggaacagttgaaatggcagggcatgttaagtgatacatcaaatgctgaatcaggatctgacattgatgattttggcccatcattctttcaaaaagtttctgactatggttgcctgactccagttcgtgaggaagtaaagggcacagattgtgcaacatacttcagctgtgacgatcagggtcacccggatatggctcctgaatcttaccgcggagtgcgaagaactcatgaaatggtgcagaaaccaatggctaattttgggccatcttccaccaacactaggcctcatgatctcgggaacaatgctcttaatgtggatggtacaattgctccaaggggatgggaaaacatgatcaaacttgtagtcacagccttgatcaagctcttttccttcatccggcttttcatctctagagctgagaggaggcttgagatcgtccatcgttctgctcctccagtaatccaagcagctgagaagccacggcctcggaccgtcagtgatgaagagatgtgcgcctgcttacagcgtcttgacaatctcgagtccttgtgcaatcatctcgccacgaaaccaccacagatcccagaagataaggaactcgtactgttgagctcattcgagcggatcaaatctgttgaggctgacctggagaggaccaaaagagtgttgaatgccacggtggtgaagcagaagtcactggtggaggctctggaatctgtacaggagtcgtctagagttaggaagaggatgttctgttcataggatatggaggagcaccagatccggaccatgccgtcgacattaaccaaccgtgaagctgacgcgtgaagccgccaatgccatttttgacctcgttgacttcagcctcatccaagaaaaagaaacaaagaaacctcggaattcgaaagagaagatcgcaacccctgtttgcttcctttcattccccattttgttccccttctgcgccgtgccaagccctatgttttgtttgcttggccaagtcgtcccacggcctcgcatccagggccgagagctgaggtgacggtgaattgcttacgaattgctgaagctgaagttgtactgaccctgcggctggagctgtaacaaagacattctccagattgatgttaatgcccgtgcacattccgcctctgattctgatgattggctaatacagattatgacatggtccgttgaattctaacnnnnnnnnnnnnnnnnnnnnnnnnnnnnnnnnnnnnnnnnnnnnnnnnnnnnnnnnnnnnnnnnnnnnnnnnnnnnnnnnnnnnnnnnn

SEQ ID NO: 16462 - DNA, 986 bp, Setaria italica
  Peptide Sequence Number=SeqID_82436
tcggtctaagaccaccacaacagccaacctcgccgcctccctcgcgcgcctctccctccccgccgtcgccgtcgacgccgacgccggcctgcgcaacctcgacctcctgctcggcctcgagaaccgcgtccacctcaccgcagccgacgtcctcgccggggactgccgcctcgaccaggcgctcgtccgacaccgcgcgctccaggacctccacctcctctgcctctccaagccccggtccaagctgcccctcgccttcggatccaagaccctcacctgggtcgccgacgcgctacgacgcgcgcccaacccgcccgcattcatcctcatcgactgccccgcaggtgttgatgccgggtttgtcactgccattgcccctgcggaagaagcagtgctggtgactacccctgacattacagctctccgtgatgctgaccgtgtcgcggggctgttggaatgcgacggcattaaagacatcaagatcattgtgaaccgagtgcgaccagacctggtgaagggggaggacatgatgtcagcgcttgatgtgcaagaaatgctcgggttgcccttgctaggtgtggtgccagaggacacggaggtcatccgaagcacaaataggggtgtgccgttggttctcaacgacccgcctacaccagctggccttgctctggagcaggccacctggcgattggtagaaagagatgcgatgacagcagtcatggttgaggatcaggagagacccggggtggcctcaaacttcaaaaagaagaaaggtacctacttgaagaatgtcaagaaggtgagcattgagttcaactgtggagtttatttaggctgtagatgctgtacaggctcgcaatctggagtttacagattgttttttatttgcttcattctagggtagaatgattcatagtgcacgtttcttctactcaagcgtgaacttatgaatcattctaccctagaatactactcacactgagtcg

SEQ ID NO: 16463 - DNA, 335 bp, Setaria italica
  misc_feature (8)..(8): n is a, c, g, or t
  Peptide Sequence Number=SeqID_82437
ccgaatgntaacaaaaaagtagcagccagtgaatagagacgtttcattgctggttcattaacactttctttcagttaaacaagtggataaatcttgcctctgcagaagtcaaaacgagtctattgtacaataatgggctgagcaaagtggggctcaaaaaccctaagcacagagatagtctcatttgccataaattttacactgaatacctgaaaaaattacagagtccataattccctaagaaatgagaaaacataccttagcagctggtattttctcagttcacgagatccaatcaaagtaatcaatatagagggggaaaactgaactataat

SEQ ID NO: 16464 - DNA, 432 bp, Setaria italica
  misc_feature (387)..(387): n is a, c, g, or t
  Peptide Sequence Number=SeqID_82438
aggtgctctttccttgcggctgggcttctccggcgtcgcggccacgaagatccggcggtccgagtgggacgggccctccgtcgtgcccctcaagtccggctcgctgtcggcgaggctcagtgcggcgctctccggcggcctggcgcaggcggtgccgccgccgcccgccgcggaggagaaggtggaggtgaactccgccatattccccaagggaccgccggtgccgctcccggtgcagaagatggcgaggcacgtggacaccacggaggtgatgaggggccccgacgaccagccggggtactgggtggtcaccggcgcgaagctgtgcgtcgagggcggcaagatcgcgctcaaggtcaagtactcgctgctcatcgcggtgcaagnggacaccgacgtctgagcgcttcgttgtcgtacgtacgaatgcct

SEQ ID NO: 16465 - DNA, 552 bp, Setaria italica
  misc_feature (26)..(26): n is a, c, g, or t
  Peptide Sequence Number=SeqID_82439
taagctgcaactgaaggacggtatcngaagaccatgttgaagtcggcgacgattcacggtccagcttctgtgtctctatgtggtcgtccaagcagagttcggacataatcgctggcgatgtcttactaatgcaaaatattaagatagtggagtttagaaatggcctggagggaagagcttctcagatatctgcagtccaagttctgttgaactctaaagacttgatgaaccctgaaggaatagatgaactaatagccagttctaaagtgggggatgttccaaaagcaaagctaagaagagtgacagaatggacgctacgcactaaatgcgctcttggcgaaagtaatcagcagctgcaggtgacatcgaagaactggaaagaagcaaaagagaaggaatcaacagacttcttgtgtatatcagaactattctctcagagaaaattacgtaatgtgaatgtttatgcatgtattgccaagatggttttattgagttcaccagcctcccactctaagggacacttgtcagtcattgacatacattctttgaaag

SEQ ID NO: 16466 - DNA, 909 bp, Setaria italica
  Peptide Sequence Number=SeqID_82440
tttctaatcgctaccaatacttgtgccctgtatttgttagacttgttgctagggcatcagtatgtgaggaatcatacagagctctagagcaatgttcagtagaaatgagtaagaaagttgaaggaattattcggaaacaaaccagcatagatgcatcagcctgtgagcctgatactgtggacatccagatatccttgtctgttagtgccacggacaatgagtcagaacatgcaatgaattattcaagcaataaaagatcaaagaaaaccaaaaagaaaggtcataaagataaaagtcaaacaagaagttgcatcaaaaaaagggttgcagaataagaaaacactgcagctagaacaacctgcggtgcaatttttcatgttggatactcctacccaaactgtacaggattcattaagggaaggcctttcaagtccatttccaatgggccaattgcactattagaaaatgcagccaggcttaagccctagcttcacacagtcatagcctttcaggatttaggtcttgatccatattgtgcttctgatccatcaagttacagccaacataatcagcagggcttgtagttgcagtaaataacagttatgatgcaatggaccgaccacctcgtcaggataatatctactatctatcaatcagtgactggaagcactcagcatttgccttcctgagtttccacaagccacgcagcatgcagaaatgaagtctgatatctggctggtttctgaaattcagactgattctgtgcatcaatcagcaattggcaccttaaattcagatgtaatctgattagctatttcagactaattcacattgggttgtctatccacatcgtacgcgaggcatggaggagcattcatcttttgtgaacttaaagggggttgtacttta

SEQ ID NO: 16467 - DNA, 417 bp, Setaria italica
  Peptide Sequence Number=SeqID_82441
tagacaacaaagaagcaatccaaagtgtccctctattgtatctgtcagtgtgtccatgatgaattatatgtggtatttgcatgggttttaacggtgttccttttgttttaggaaggtgaaaccattaggataaatgtaaaaaacaagccatcaactggaagtggcatgcttacatctgccggtttatctggaggagccgctgcaaaacccaagacaagcatgcttcttgcgccgccaccaggagcagctggaaagcttcggtctcctcttccacctccacctaatgaccctgcagctgcaaggatgaattctggacctaatgcaggaatcagggccccaaaagatccaccaagagaaataatgatccattttcagatcttctgctataaaggtgaggttttctatttggtgcctttc

SEQ ID NO: 16468 - DNA, 1534 bp, Setaria italica
  misc_feature (1502)..(1502): n is a, c, g, or t
  Peptide Sequence Number=SeqID_82442
atttacaacacaaactacaaaaggagcatccaagtgtccctctattgtatctgtcagtgtgtccatgatgaattatatgtggtatttgcatgggttttaacggtgttccttctccaccttcttctcctcacctcgcctcaagaaccccaatccaaaccccaaccgccaaaaatcctacgaaattgcgcagaaatatcgtctcggcttagatcgttcctgagtgagttgaggggggaggaggaggaggaggaggaggcgaaggcgggatcatgtcgtctctggtggaggaggaggaggaggccttcgagcacacgctgctagtggtgcgcgaggtgtcggtgtacaagatcccgccgcgcaccaccagcggcggctacaagtgcggcgagtggctgcagtcggacaagatctggtcgggccgcctccgcgtggtgtcctgcggcgaccgctgcgagatccggctcgaggaccctgccacgggggagctcttcgccgcatgcttcgtgctgcccggccagcgggagagcgccgtcgagaccgtgctcgactcctcccgctacttcgtgctccgcatcgaggacgggaggggaaagcacgccttcgtcgggcttggcttcaacgagcgcaacgaggcgttcgacttcaacgtcgcgctgtcggaccacgagaagtacgtcaagagggagcaggagaaggagactgccggcgctggtggcgaggatagcggcagcgggggcgagattgatatacaccccgccgtcaatcgtcggctcaaggaaggtgaaaccattaggataaatgtaaaaaacaagccatcaactggaagtggcatgcttacatctgccggtttatctggaggagccgctgcaaaacccaagacaagcatgcttcttgcgccgccaccaggagcagctggaaagcttcggtctcctcttccacctccacctaatgaccctgcagctgcaaggatgaattctggacctaatgcaggaatcagggccccaaaagaatccaccaagagaaataatgatccattttcagatctttctgctataaagcaaaacctaccttcatcagccgaacctgggcaaacaaagagcacgggagctggatgggcggcattctgatgatggatgcacgatctcctgttgacattgtttcatctgaaaagaggagtgggtaactgaagtactgaacaggacttggatccgacatattggaagcctctacccttccaaaattaaatggttaaaatgactgatcagcgttccagttgttaatcaagaaataaaacagttcccagaattgttacccatctcaccacatgaatgtaccaagggtgctcagatgtcctgaatataaatacagcctcccttgttgtttgtcatattcatgtcgtgtttcacaaccccaaagaaccagaatcatgttgacctcgatgtgtattttgtggtgaaagattgataatactgttcaaattcggaacaaaaaaaaaaaaaaanaaaaaaactagaagaacgtacgaaccgaaagg

SEQ ID NO: 16469 - DNA, 422 bp, Setaria italica
  Peptide Sequence Number=SeqID_82443
acctagtttagtagttactaccaagacttttttacctaaaccaataacaaaatctttcttatgcaggtcatatccttttatttcagcaaagcggcttctgtgctctcttggaagttagattccagcagttttacagttttcccactcacatgcctgtgctgctggtttctctatgggccactgattagacttgcttgaattgctggcttctgctccagtaaagttcataagaaggactcaaacaaacataaaagaaactgagcagtgacattttttggtcaaacctttgcattggttctcttctctttggacctgattaccaagtctctaggggatcaagttaccataggtatttatttagtgagattaactgtgttttgttgagccactgacttcagaaacgatctgcagttctgtaccat

SEQ ID NO: 16470 - DNA, 382 bp, Setaria italica
  Peptide Sequence Number=SeqID_82444
attggtggagatgctgaggaggcgaggagggagaaatctggaggcacgaagggtgtcggtaaggacaagggtctggaaaactcagggccgcagaaggccaaaaaggctacaccaggggattggttgatggccggtgaacatagtgggcgctcttggaaggcgtggagtgagagagtggagcggataaggtcatgcaggttcacattggatggagatatattggggttccaatcttctcaagagcatcaagatggcaagaagacacatgcagaaaatgtagctgagcgtgacttccttagaacagaaggagaccctgcagctgttgggtacacaatcaatgaggcagtggcacttaccaggagcatggtattttgtaatagta

SEQ ID NO: 16471 - DNA, 460 bp, Setaria italica
  Peptide Sequence Number=SeqID_82445
ttttttttttttttttagttaagcaaaggtctgtgtaaatttctcttaattccattgtcttcttcggaattacagcaagaggccgtggatacagaagacaccatactataggtagagatacacgggaagattacaagaacagattctctcgacggagcacatgattgttattcacattatcacaaagtattaccgaatcttgacagcggtagaagagactaaaagaagcaggaaaaaaatttatcaatgtctatcgagatagcactcggcagtaagcactgctccaccggatgaggcagcccaagaacacgaagaagcgagcacgatccggtaccatttcgggggcagtgctttgcagttggttcgtggctggttcgccgaggcggcggcggcggctagaggtggagcagcgtgtcgcagcgccagtccatctcgtccgttcggtcggtcgcacggtcct

SEQ ID NO: 16472 - DNA, 237 bp, Setaria italica
  Peptide Sequence Number=SeqID_82446
ggttttggtttctattgttggaggttgtaacagtatctatgtcttctgattcaacctccaacaatagaaaccaaaaccacgtaattgacagttcaaaactcctaaaagatatgtggaactttgcttgctaagacacgttcccgcctttcaatataagcatgagggaaccatccagctttgcccttgcactcgccttcggcccacccattgcttgagatctttcggacaattacaatt

SEQ ID NO: 16473 - DNA, 398 bp, Setaria italica
  Peptide Sequence Number=SeqID_82447
tcagacaatttattccctatttcaacttgtttcgatcctgtgactatatagccctccacgccccgaacaatgtctctttgaaaatgtttagcagcacgagtcgataagtaaagcttttccaatctctgatgcagtttaacctctgactcatctgtaaacgcattgtctgaattcccatagccaaactgcttgaacacaccctgcagatgtgtcaatgaaaataaagttatatcacttctaagaggtaaaaaaggtagagttcatacacttaagatggagcatttcatacgcttatttgatgtaatcaaaacagcaagacaaatatcaactaaaagttaaacatagtataaataggtgatcactgagctggtggtgatcagtgataatatgggcaaata

SEQ ID NO: 16474 - DNA, 1588 bp, Setaria italica
  misc_feature (1)..(13): n is a, c, g, or t
  Peptide Sequence Number=SeqID_82448
nnnnnnnnnnnnntcttttttttaacagcaaacactctgaaactatatctatttcaccatttcaatcgacatcaagacaactagtgttcaattcagtctcccgaaatgttttacattcaaaatcttctcgaaactaaaaaaatgggaagcgaaatttaatctatacacatggcacacggtaaatacatcgcggaagctatgacgcgttgaatcagaagacatagatactgttacaacctccaacaatagaaaccaaaaccacgtaattgacagttcaaaactcctaaaagatatgtggaactttgcttgctaagacacgttcccgcctttcaatataagcatgagggaaccatccagctttgcccttgcactcgccttcggcccacccattgcttgagatctttcggacaattacaatgtcaccagctgacaaggtaagctcaaactcactttcagctttgaaggaatcaagggcctctccgaggaagaaatcgacaggttggactgattcattagcagaagtggatgcaaatactccattaacttcatcataagatggtggtggtggtggcatataattttctgcagctggggtcggaggtgcttcgattttttggcgctcagacaccatttcttcttccagctggtcaagtatctcgagaactctctgatggtaagctctctcagcctcaaccagtgcaatgagacgctgtaaggtcaaccgctgctgctgagcctcaacagccgacattgctgcaatagcttccttccctaatcccaccatgcttgacttcagttcttcaagcttgtactcagcagcctccaacttcgatatcatatcaccgttcccaggtgattccctcactctgttctgccgtcttgatacttcgacaacctgtgcttcggcttcttgcctcattctgtcatatctctgggccagatgtctagcatcctctaaaggtgcacccattaccattgcccgcagtggctctgccacctgtgtgccaaatgctttcaacatgttgcaacgctccttttccatctgtgaacgtgcctttccaaagtatgtagcagctttggataaagtatcaccacttgtacatgtgttctcaacaccatatttctggctgtcatcagacaatttattccctatttcaacttgtttcgatcctgtgactatatagccctccacgccccgaacaatgtctctttgaaaatgtttagcagcacgagtcgataagtaaagcttttccaatctctgatgcagtttaacctctgactcatctgtaaacgcattgtctgaattcccatagccaaactgcttgaacacaccctggcgggcgacctggtccttgagcctggaggcctgcttccacagcgcctccatgggcgggcgcgggagcggacgcgcgggcagcggtcgggacgagagggcgcaccggggtctcgcggggggcgacgaggaggacctgggggtccggcggtctccggcccctctccctttgtttttcccctcgcctggattgcttcgtccgtccgactctccggcgcttccgcggtggttggcttcccgcacggccctttcaga

SEQ ID NO: 16475 - DNA, 380 bp, Setaria italica
  Peptide Sequence Number=SeqID_82449
tgttcatgctttcagtgttgttcaccagctctaccaaggcgagttcacctgaatgccttagaagcttcgtgaacgaggacacagaccgatcgagcttcttcaaaggcacgtcgctgcccaaaccatgcttcttgaggagctgggagcgggtaggatggtccatgagggcgaggcggcgggacaacgggaggagccgccgtcggatggcacccacgcgcggcacctcggcgatggccagcaaaccagatccacctcggccgagctcagtcgcgacagtgtccaggatgcggcgacggcggcggtcatcatctagcgtttcgggagattggaggaggactaggtcggagaaggggagctccgcgatgtccagcacggtcgcc

SEQ ID NO: 16476 - DNA, 1055 bp, Setaria italica
  Peptide Sequence Number=SeqID_82450
tttattcacgatctagtagctttgaccaacaaacgagtggctttcagcaacgttctgagagcttcaaacagcagcagcctgctgccacaaggcggcctgggcctgacacttatgcagcagaaagtgctttagaggacagaattttgtgccccatttgcatgtataaatcaaaggacctcgcatttggatgtggacatcagacttgctatgagtgtgggaagaatttggagcgctgccctctatgccagcagcccataaccacaaggatcaggctctactgatttgaagcctatggaatagcaaatgttggaagagactcttgcgcagaatcatcagaaccagctttaatgctaccgtgcttcatcagcttgtaattggtgtgttagtcttactgcgtaagaagtctcagtgtagatggtggtgatgtcactgtcccagtacaatctgaagtttagctacagtagttactgtcgaaaaaatagcaccaaaaataatgtacatgcttccaccctttcttttcctttatgtcccttagtaaataagttgaacagctgaaaatttctggattgaataatgaatattgtgatgcaaatatattgccatttctaagctctagaaaaaacaaaattcaaaaatccgttgcatgggcggttctctgggtaaaagctgaaacactggaaatttgattttatgttattaggcttattcatattgggcccttgcattttgttgctttaacttcccttgcagaccataatacctaatctaatttgactatttctcagttcacttctaccttcttatgttccatttgatctgaaaacaatattttttgaaagtaaatctgaaaacaataatagccgtatgcttgctgttgtacttggacacatatttgcatctcgtggccatactatgactttcaagtcctggaacaaagggtattccaggtgtggagtttctatctactgatgaaatatgtgctgaaacctctgttctccctgcactgaaaactaagaggctttgatactttttatctgcagttgtgccccatttgc

SEQ ID NO: 16477 - DNA, 1943 bp, Setaria italica
  Peptide Sequence Number=SeqID_82451
ccggcgaacgcctttccctcccgtgccgatgaccccgacaagtagcgttctttcaccaatcaacagccatcgtcttcccactctctcccccgctccgaagcttcctccgtcgttttccccgacgggcgaggccgggggcgagggcgcgggggtcagcggcaccgccggacaagaaacctccccgcctccgctgccgctgcattgccttgccgccgggtggagcaattgacttgacttccttcgcccaccgcagcctgcacttcctcccacccgcggggggtttcccctccagttattattgtaatcgagtgcggtccggcgtgactgtccgtgctcctccacgctgtctcgcgctgcgcttcgtccggtgggcggcccacctcactcccgtcgtcgtcttcctcctcctcgcccgccctcgtcgcggagcggagcggggcgggaggcgctgcgcgttcttggaacgggacaagggcggaggaagctgatctgggtgttggagtcatccagaggcacaaggctgagcaatggggcaaaaggactccaagccttcatatggccactcttatgactacgggagtacttcgtcaggatatacctcgaggtatgctggaaatacatcatccagttataacacgaggtacaccccttcttcggagaacaatgtgcagccagaaacacacgccaggttgcagaggaaatattccaggattggtgatgactaccgctctttgagccaggtcactgatgctttggcacaagcaggccttgaatcttcaaatcttattgtaggcattgattttacaaagagcaatgaatggacaggtaaaatgtccttcaatcgccgctgcctgcatgatattggaagcactccaaacccatatgagcaagccatatctattattggaaggacactttcagcttttgatgaagataatttgatcccctgctttggatttggtgatgcatcaactcatgatcaggaggtattcagcttttacccagagaaccgcccatgcaacggatttgaagaggcgctagaaagatacagagaaattgttccaactcttcgattagctggacccacatctttcgctccgataattgagacagcaattggaattgttgacagcactggtggtcaataccatgttcttctgataattgctgatggacaggttacccgaagtgttgatacacaatatggacaattaagtccacaggagcgggataccattgacgctatagtaagagcaagccagttccccctgtcaattgttcttgtcggggttggtgatgggccatgggacatgatgcaccagtttgatgacaatatacctgctcgctcatttgacaatttccagtttgtgaatttcacggagattatgtcaaagagcatagctgctgatagaaaggaggcagaatttgcattgtcagccctgatggaaattcctgaacagtacaaagcaacacttgatcttcaactcttaggccgccgccaaagaataactccacgagttgctctgccaccaccaacaaggaatgcttattcgcggtcaactagctttagtcagcagtctggtgtttattcacgatctagtagctttgaccaacaaacgagtggctttcagcaacgttctgagagcttcaaacagcagcagcctgctgccacaaggcggcctgggcctgacacttatgcagcagaaagtgctttagaggacagaattttgtgccccatttgcatgtataaatcaaaggacctcgcatttggatgtggacatcagacttgctatgagtgtgggaagaatttggagcgctgccctctatgccagcagcccataaccacaaggatcaggctctactgatttgaagcctatggaatagacaaaatagttaaataactaaagtaaaagaaactttaaagaaaaccaaaaacaaaaaac

SEQ ID NO: 16478 - DNA, 2333 bp, Setaria italica
  Peptide Sequence Number=SeqID_82452
caatggattgagtcaacgaatctactgtataaatgtggaatatttctatctctacttatctatttacatcttcatagtgctataccaagctttgccattcacagttttgggcatagctgtggtgcttggctgtgcacaattgctatccccgttgagaagcattgcaatggtgaaagacccgaatcgaagtacaagatgtacaggtcctccgtgatgttgacaagccttaacattgtctgcttcctcgcgcccttgattgacagctctactgctctgctctcctgtgactcttcttcaggcaaggaggcacatccatcattgttcagcactctgatggggcagccaagatcccatccaccgcaatcacagcatcctccagatctccatctctcaatgagacctgatgggccactgcacttcggaacagcgccgccgtgataacctctgggaacaatggcagttatacattttgcagcaccatttctgttctgaacatcagaaacttcagtgccttctgaatgatttaatcctgctttctcaaggaacttcaagccccagccaccgaccacaggctctttctggcgtttttgtcgttgttccttgaccacaattgctgccaactcttggttggtcggttgatcctcagcgtcgaggtttgtcaggcccgattctctagcactgatcatttcaccttcgagtatttcagttaagtcgtcgaactgatgagagaaggatttgccaaacttccagggatgtttaggactagaggaaacatgtcctgttctcataatttctgtcactctcttgactagtccctttccttttggaacactataggaactatgcatttgcctcagatagtcatctggagaaccatacagcacaaactcagtttccaaaagacttgacttgtctgagtttagcactaaagaacttgacaccttgatcttgcccacaagtctggacacattgcttgagtggcccatccaatcttttcttccttgctctccagaatggatcatgtagacatagtcaagggccctgtcattgtcctgtaccttgattgggtttgcagtgtatactgcaatgggatcgtccagtgacaattcaaaatgaggcagcccatccttccaaatgcattgtagaaggcctgcactaagagatgatgggcagtgtgataggacaggctgatttgagctcatagatgtcatatgcgagcatgagggtgacgtcttctcatggatgtggacctcagctgtgcctttattcattggagatgtcccaggggaggaggtttcccatgtctcaggagatataagcttcagtatttctgactgtgtaataatgtgggattttgaccgagtttttctcatttttgatcctgccaggaaaggcgatgggcttttcggtcttgtctttgcatttacaagagcatgcaaagagtccagcacctttttctcggaagggccaagatttacacttccttggctgaccccatcagtgatcaagtcgtcaagatcagtgacattatgggttcttgttgggtgcctcaggcttctgatgagaaactccaagatcatcatcttggcaggaagtgcagggaacaaatccgcatggtgtgcgtcaccacagcacaaacatggtgacttgtggcatgactggcagctcttgcttttcttctcatctgacgtcaatggcttcttgttgtttatctgactcaaatcaggctgaacctcagatgcagcaatagtcaggtcttggtcttcttctgcccttccactgaactctggaattgcaccctcatcatgtaatccatttctcctatccatgtatacaagttccatctctgctcaagaactaaaagatatggagaatgcagtcaaacaagtctttaatcacctaaagctcaaagatcgacaggcagcatccaaggctcgccggaaggaaagcactgcctcccaacctcccagcacagaggagctctcctcttcttgatccgagcagagttcgccttggaaggagcagggagactgatgggccaatgtgaagagcacacaagaacagaagaagaagaagacggccgggagattatatactccagtccaagaagaactgggctaaccaacaagagctagccgatgactcaccaaccgaaactagaaacaagattaggtgaaagaggacccaggacctactaaaaccaagccgctctcaacgggaacgaccaacaggagcatcaagccgaggcaggacactgccacttgctagaacagagcggaagagacaaagcgctcagcttttctccgcctaacagccaccccaaaaacgaagac

SEQ ID NO: 16479 - DNA, 340 bp, Setaria italica
  misc_feature (297)..(297): n is a, c, g, or t
  Peptide Sequence Number=SeqID_82453
ctcccttcacgcctcctcctgctcaaattcataacgcccgaggagccaagaacccgggtgaggtgaggacgcagggcgaccgccgtcaccttcacctaatcggctaatcccaactcccccactagtccccaagtgtccgtcttcctcgcttcggtcaccagagcaggccggagttaaaccaggctgttgagaggagcgatgaagagcccccctgccatggatcccgaagcgccgccgccgccgccgggcactcccccggatgaggaggaggagaagcggggaggacggaagggggtnccatggcggatgacgctgagcctggcgtaccagagcctgggcg

SEQ ID NO: 16480 - DNA, 631 bp, Setaria italica
  Peptide Sequence Number=SeqID_82454
cgccggggttgaagtagcggtaccggagcgtcccgctgaggaacagcagcagcgcggcggcggcggcggcggtggaggcccagaaacccagcgcccacctgccctcgtcctcgaggtagctgaggaaggtgttggagaagagcgagccgaggttgagggcgaggtagaagtagctgaagaaggagaccttggagtgcgcctcggcggggtcctcctcgtcgaactggtcggagccgaaggtggccacgttgggctggtacccgccgttgccgaaggcgatcatgtacagcgcgatgtagaagatccccaactccttgccggagtgcgggccgcagggcgcgtgctccatcccgcacccttccggcctgatcaggtagaggtgcgacgacaccgacagcagcgcgaggccgagcacaaagatggcctggaagatggcgcaggtcttgtagcgcccccagtaggagtcgctgaggaaggcgccgatgagggagaacatgtacacggtgcccgtccacttgatgacgttgttggcggcgtcgccgttgctctgccccagcacccgcgtcaggaacagcaccaggttcacgttcacgccgaagaaggccagcgtcgccaggcccttggtttcact

SEQ ID NO: 16481 - DNA, 1103 bp, Setaria italica
  Peptide Sequence Number=SeqID_82455
ctcgctcccaccgccaccttcctccacatcccggcctccacgtccacctcctcccccttcgccgccgcccccggaatcctcaccagccgacggcctgcgccccgcgccctcccgctccgcgcgcgcccgccgcagcgcgtcaccgtcgtctgcagcggcgctgcggcggcagccgaggcctcagatgccgcggcgcccacggagaagttccggctcgacaacctgggcccgcagaaggggtcccggcggcggcccaagcggaaggggcgcggtatctcggcgggccagggcgcgagctgcgggttcgggatgcgtgggcagaaatcgcgctcggggcccggcgtccggcgcgggttcgagggagggcagatgccgctctaccgccgaattcccaaactacgcggcattgccggcggaatgcacattgggttgccgaagtatgtgccattcaatttaaaagacatagtgcgtggtgggttcaaagatggtgacgagatatcactggagaccctgaaatcccggggtttgatcaatccatcaggcagggaaaggaagcttccactgaagattttaggagatggtgatgtatcagtcaagttgaacatcaaggctggagcattctcagcagcggctaaagagaagctcgaggcagctggttgtaacctgactgtactgcctaaacggaagaaatggctttcacagaattatctgaagaaccaagcccgtgcagaggagtactttgccaagaaaaaaggcagcgctggtgaatctgatggcgcctctgcatagattcctatatgatgtacttctcttcttccctttcctttagcatattcttattgctctctttttctcttggttattcgtatatcatgaattttgtatctatgcgatatgcggttattttctgcccctttttgtgaaatgtgaacaacatcgctgtgtgatatgccctggtgcttctggagatctttttcaatgaaaaaaaataatcatatgtgtaaaaagaaacccatagatcaggctgaatgtaaatccacttccaaaaagataatctataaaaccagaatccttagaaaaccccttaaaaaaaaaaaaaaaaa

SEQ ID NO: 16482 - DNA, 258 bp, Setaria italica
  Peptide Sequence Number=SeqID_82456
catcatatagaaatatctttgcaggtgggcgcgatatgatcacaagaacttgcaaatcttcatgctcgtcagaattcaagacctggtgtggatcatttacagggaccgaaaatgtgctattctgaaagataggaatcttctgaggctgccctgggtacttgagcgtgcttgaccccagcaagagcgtgcctttccctttgaggacaacaaaaacctcctcacaggagtgcctgtggatcggcgtccttcctcctggaa

SEQ ID NO: 16483 - DNA, 751 bp, Setaria italica
  Peptide Sequence Number=SeqID_82457
cgagcaagatgaagaatgtgtggggagcccagggacctggagtggcctggcgctgagggtgtcgcgatgcatgttcgctgctgcctcatacgctgccttgatctctgcacccgatcacgatgacttcaccgccttccgggccttgcaaatttccatggaaatgcaatttctttggagtttcgtgctgctttgcgttggtatacactgtttgaggacaaagcgtcatctcaacgaacctggtgtactcatggttgttacttttgactggctgacagccatcctatcaatggcgactgcttctgcatccgctgctgtgaccatttatttgtagagagacttcaccttgtgcacgacgtacccacaactcccatgcagccgatacaagatttcggttatctggcattcatttcttggtcatttgtagctgcatcttcggcttcatcattttggctgctgacttcttttcatcatggctaagatttcgctaacgtacagagaaatcagcaagttcatcagcaacttttgagctgagttttgctggttactactcttcctcattatttgtgtatattaggcttgtgatggaagtgaacagaggacgctcttgaaataaaggtagggtgatctaggatgggaggtcgccggatcgatatctggagatgcatggatatctgtgtcagtaggtggtgtgtatatgcatacaattttagctcttgaatggagttactaatgatgcaagacaaaaaaaaac

SEQ ID NO: 16484 - DNA, 1549 bp, Setaria italica
  Peptide Sequence Number=SeqID_82458
ttgggggagcgggctgaggcggaggaggaggaggaagacttcgtggtgcgcgagatcgatgtgtactacacccccaagcccttcgatgacgacaccaagctgtacattatgcaatatcccctgaggccatgttggcgcccttatgagttaaatgagatatgtgaagaggttcgcgtgaagccattgagttcagaaattgaagttgatttgagtgtcgatacacagagtgaaaattatgaccaagaggcacctttgagactgacaaagcagacactatcatcatcaaaggcagatgatgtttctgattatgcgattggagtacttaagggcaacttggttcatttgaatcatattgatgcagttgtgcaactgcgaccatcaatgtcacatgtattttctggtcgagcatatactaggcaggctttacaatctcgggaaatgaatggtggtgctagtggctcaaaggcttcatctcgtaagggagacgagcacccagaagattctaaggaccatgcagaagattctgagccatggatttctctcacgtaccaaccaacagggagtaatatttcaaccaagtaccatgataagatgatatcaaatgagggtggacctattgatttcacaatgaggaactctgattatgtaatgtccttgtgtcctggagcctcaactagcagcaggcatattaacaaatgccaagcaataagggagatgcttttgctaccactggaagaacgcctgaaaaaatggtttacagaggtttcagaagtaaatcagtttgatgctctgaagcaccttgctccaacctattcagaggaagaaatcttgaaagtgcttccagagtatgcatatttggtgcgtggtttatgggtctgcaaaagttctttgttgtttgatgatggatatgcttccaaaagagatagagttcttcttgaatttacaaaaatggagtccatcccttcagatactctagatgcatggatcagactggatgaccctaagaggaagaggatactgtttccattgtgtaaaaggcgtggaattctgaaggactataaatttatatcggcagatttgtcctttttaaaacgctaccctcatatagtcaatgaacaagagtgtgcttggtctgctcgtgagatgattctccatgagtctccaaagatgtgcagtacagtgcctcggaagggcaagaattcaaccagacctaatgttgcttctaaagggcctcatccaaatacgagcaagggcagggatggccctgctcaaggaagtgatgaccttgtgcagtctgttttgggtactgtttttactgccaataaagttcgcagcatgcaggcagttgttagagacttgcgccagttggctgcaaaatatgcttccaatagaaaggatgtatcaaaattccaagctctgtctgatgctgcaaaatattgtgcatcactccctcatgataagctgaaaagttcgatacttttagttgctgttgatgttcatgatgtatttgttgcaaagcatgagaataagcttgctctacgaaacgtac

SEQ ID NO: 16485 - DNA, 674 bp, Setaria italica
  Peptide Sequence Number=SeqID_82459
tgagcaaagctgggtgggccgaggcggcggtggagggagggaccccggcatgggatactgtggaggggcctgataggtagcttgttgttgtggcggcggccctggcattggcatcggtgcatagcctctctgctgtggcggcagcggcatcggagcataacctctctgctgctgggcaaaagggtatggctggttctgaggtggcggcacgccatgctggtacgggccaggcggaggccgcattcctgggtgctgtgggtacggtgctggcggtggtgggataggctgctgagggaaggacccagttaccccagattggtgctggggcggcggcgcgccatggcgatagtgtggattaaagctccctccctgcccgtacatatctagctcggaaaccaaacctcgggcgacctcctcctacagtcctacgaggccggagacgagacccgcggcgtcctgcgggaggctcggattcggattggagcggaaccccacgcggctcgcgacgggctgggatcctccaggggcgccggcacggcgaggcgggatcgagcggcggcggcgctatatcgctggggttgttcggattgcgagattttggtttcgcggtgcgccattggggcgaggaggaaggtcggggggagggagcaaggacgggtgcgtgcgtccgtgcg

SEQ ID NO: 16486 - DNA, 864 bp, Setaria italica
  Peptide Sequence Number=SeqID_82460
cgaggcgtgcgtgctgctgctgccgtgccggcacctgtgcctgtgccgcgcgtgcgaggccgccgtagacgcgtgccccgtctgcgcggccgccaagaacggctcgctccacgtcctgttctcctgaggcgtgccgtgctcgtccgtggacgcgcggatgacaacggcctggctcctcccacaaggccgagtcagagcgagagcacgctatccacttcagtgccacgccgtcctcgcatcatgccgatgggcggaatagcgtagcatcctgggaaggagattatgtggagaatgggcaacggcgcaaaacaattctgttcagtcgcacatgaattggaggtacccgaaggttgacgtccagactgaatcgtgcgaaggtagttcagcttgcaggagttagctgcagaaatggagacaatgtctgacgagcacacgtgttctcttgacaaagtcaccaatggctgaaccaacgaacagttctttgctggaaaagctttctttcagtgtagattgtcaacaaattatcgattcgtctgaagtctgaaccaatccttgaggtgctttcagatctctgaagaatggtgcgcgttacacctctcaagcgatttggtaaaactctaatccgacaacgatgcacggcgggtgtcccgcgactcgcgaggagatgatggcgtcgatgtacatattttgtgcaagcgagaggggttctggtttctgaatggtgaagttgtgaaatgatgccaacaccgctgcagaaatcaggcctgcacaaaagtatctttaaagtgatgattattcgaagtgatccgtgtactttagataacttggtagaatggtacaccccatcctaaattattatttatt

SEQ ID NO: 16487 - DNA, 3357 bp, Setaria italica
  Peptide Sequence Number=SeqID_82461
ggaaatctgaacccgcggctgccgcctccggtgctgtccaaggaggattggcggtcaacccagcgcctgaaagctggggtggttggggggattggggacaggaggaaggtggggcaagaggacgcggtacaggggacggggactgcagtgggtaggtctctatttccgcagcatcctggttctgagcaggaggaggaagccagggttgatggtggtggtgctgctgagtgggtggatggtggaggggatgggctcattggtttatcgctcgggcggcagcgtagcttcgcggatatcctgcaggacaatattgggcgcagaacacctacttcagagcatccctcccgtgcggccagtcgcaattcttttcttgacaatcaagaaccagtggattctgctgagaaccaatattctgtgcatactgatattttggaagctcatcatcctgttgggaatgtgcaaaatgtcggtggtcgtcacagtcttaatgcatccacatctcagacgtttgcatctattctgggttcatctgtttccagaaatgctacaccagatcctcattatgttgcaagggttcctagtcctggccttccacctgttggtgttaggattacttccaatgagaagaaactgaattgctcctcttcgccattcaacactgtatcctcaaaagcagttggggctgatgatattttatctgcattgtcaagcatgaacttatcaaaaggtggtaccttgaatggtaataacaacatcagtcgatcaaactttcagagagggacaagtgatcagcagaaattttctcttgactcacaagctggagctgcccaagtcaataataagcagcatcctgtgatgttaggaactgatgatgaatatttgggtatgccatcgatgtcacaaccatctaatacttcttttgctgacgttaacaacagcatggctggtttagcagagttaagaaatagtaccaacacaagatcagatggacatttggaaatgcaaagatcttctactttatctgctcgttcatatcagaagtccccatcatcttctaatgaaagcccgggtggttctcctgctcaacatcagaattttgatggtataaattcagcctttttgaactatgggcttagtggatatccactcagcccaggtttgccttctatgatgccccctttgtttgaaagtgctgctgctgcatctgctatagcttcacttggtgcagattcaagaaaccttggaaacaatattttagcttcacctacgttgagcctaacagatgttcataaccttggtcgaggtggtaatcaagctcccacaggtcttcagtctcctctttctgacccgttttatgtccagtacttgaaggcaacgcagtatgcaacacagggagctggcagctatggtgatccttccttggaaagaggttacatgggtaactcatatggtaatttaactgcagttcaaaaagcttatattgaagctttgcttcagcagcagaagcaatatgaaatgccacttttaggtaaatcaaacgcttcaaatcatgggtactatggcaatttaccttttggcatgggcatggcatacccaggaagcccattgggcagtccagttgcttctccatctggtcctggcagtccactaaggcttggtgagcggaatctgagatttccttctaacttaagaaacttgggtggatggacctctgatccaagtggctacatgaatgagaactttccatcctcacttctggatgagtttaaaagtaacaaggcgagaagttttgagcttgctgagatcgctgggcatgtggttgagtttagtgctgaccaatatggaagccgtttcatacagcaaaagctcgaaaccgcaacagtcgaggaaaagaacatggtcttcgaggagatcatgcctcatgcactatcattgatgactgatgtatttggaaattatgtggtacagaagttttttgagcatggaagcgcagaacaacggagggagttggctgataaactgtttggccatgtattagctctcagtcttcagatgtatggatgccgagttatccaaaaggcaatagaggtggttgatctggaccagaaaacaaagatggttaccgagcttgatggtcatatcatgaaatgtgtacgtgatcaaaatggaaaccatgtcatccagaaatgtattgaacgtgtcccagaagattctattcagtttgtaatatcaacattctatggtcatgttgttccattatccacccacccttacggctgcagagtcattcagagagtacttgaacactgtgctgatccaaaaacacagcaaatagtcatggatgagatattgcaatctgtatgcatgttggcacaggatcaatacggaaactatgttgtccagcatgttttggagcacgggaagcctcacgaaagatccatcattattgaaaaattagctggacagatcattcagatgagccaacagaaatttgcctcgaatgttgttgagaagtgtctaacattcggcggacctacagagcgagaagttctcataaatgaaatgcttggtaccactgatgagaatgagcctctacaggccatgatgaaggatcagtttggtaactatgttgtacagaaggtacttgagacttgtgatgatcagcaacgtgagttgatcctgtcacgggtaaaggtccacttaaatgctctgaagaaatatacatatgggaagcacatagttgctcgtgtagagaaacttgttgctgctggtgagaggaggattggacttcaatcacaaaatccttcttgatggtgcaaaaatgaccatgtacagctaaccatggctagacagatgtaccttctgccttctgctttgggctgctacaagccgagcttaaaaataaacatgttgtactaagaagtctgtacattttgtagtctgagcttatagttattccaagatgaggctcagacgttttaatcttacctgatgctgctgcagagaagataggcgttctgtataagttgtaggtgtaaagaggtggaggaaagtctatattttgcgacgagactgtacaaatctgcatcctgcgagagttagcgtccgcttaggataaggtttcattgcccgccgtgtttatcactaatggatgtttgtaatcctgagtaactgatgtaacaattccagcttctgaaaccagatgcgtgttttgtatggaattgctcttatcgggcgtagtttcttgggctgggtcagagatatgcaatttttcgtatttcattagcagcttcataaggtgtcattttcgtgctgactaggttagtagttagaagacaacgtacaaactaataccca

SEQ ID NO: 16488 - DNA, 357 bp, Setaria italica
  Peptide Sequence Number=SeqID_82462
tccacgtctcccacggctgcgtgttcccgtcccgcggtgccccggccgcggccgccgccgcctcggcaccctacgtggccgacgaccacagcgggcggagggtccaccacgcgagcccggtggctgccctggcgagataccccggcatggcgggccacgggatggtggtggcggagcccgtcgtcgccgggccggaggacgccctggggctggacctccagctcagcctcgcgcccgccggcttgtgacttggctgcctcctctcgcctacatcgtcgtcgagatcaccgcacgcgcgcgagctgccttggtaaaaaaagattaatcacctactagtactactactactacgggggt

SEQ ID NO: 16489 - DNA, 613 bp, Setaria italica
  Peptide Sequence Number=SeqID_82463
agttggctgggaataccttgcgctcagtattgggaatccacaggggggatgcctgctgcaaatgcttggccggggccaccagcacgacgcgggaacgcaaagtacatagatgctaggaagaacatctcagtatctgtcacctgatcaataccaggggcataatcctcctcatccgcaaccccaaatgctatatgcaacctctgcagcacacgcttacgcatccgctgcttggtatcatcactgcctgcagaaccagcagctcccacctctccatcccgaggctcacggcaggagccatccccccatccaaggacgagatcaccagattttgtgcgtgagagctgccagaagatggcataattccaaccagttccagggccctctgagtcaacaagctcttggagtttgttttgcaagtcatctggcaaagatgtcgcaacaagaccctcagatatggcaccacccccttttgttagatatgcaaaggcatctgttccgaggacagcagcgccgagagcacggtcctcctctgtccatgtgccaccagttcctccgacggcgccgtcgtcctcgatctccatcttcatgaccataataccagattggtagccct

SEQ ID NO: 16490 - DNA, 277 bp, Setaria italica
  Peptide Sequence Number=SeqID_82464
cctatctgtgaaccagaaaagattcatatcagacatcagaaagaagtttcaggatgatcaagagttctttgccagcaaggttaatgctgcattgagcaactattccaagaaaaacggggtgcaaggtcacatatcaacttttgggcaatacccaagggatcaaatgttgctagcactactcctatactgttctttgctgaatgtagcaatgatgctgatgaggaagaggaatcaatgtgtttctctttatcttctgcttcaattgattccgtgcgcg

SEQ ID NO: 16491 - DNA, 594 bp, Setaria italica
  Peptide Sequence Number=SeqID_82465
tttattcatagtattcacagtcaaagacagcgcacggaatcaagattgtgcatccgtgtgatgaagtgtatcatgggaatggtgaggatttcaacataatggctattggagaacacagcatcagcaatgagttgctcattagctcctgccagtttcatgttgacatggtgcatgtattggatgaggactggatctattttgattcgaagctagacgccaagattgctgagaggaacatgatggatgacggtgcttttaagatatggaggtggaagggcagaatcttttgagaggcaagttgctggatgaaccctagcggttgctgtcagaatcttcagaatgcactacttgtgaatcgatgactccatatttcagtgatagtgcgccttagtttgagagactaaggttgatggacatgtgctttttgttagtgtaataggtgccgctagatttttgcagacaaagtttgctgggcatggatcagtaggcagctggcgctccaaacaatatcaggagtgcattgcctccacaagtacctaagtcaaattttaaagacaattttagtaacaacaatttaagtagggaaaaaaaaaa

SEQ ID NO: 16492 - DNA, 678 bp, Setaria italica
  Peptide Sequence Number=SeqID_82466
atcaggagtgcattgcctccacaagtacctagtcaatctgaatctaaatgcttgaggctcagctaactaaatttggatgagtgatagtaatcttatttgtatggaaacttcaataatatgttagcactatgcaaaacacaaagtggcttgctgttttattttgacaaaactgatatgttatcttgcttctatttatttacatgtctatttcatttatacttggctgataacccattttaaccactcttgttttcgagggaagtgcgctgctttgactgtgaatactatggaataaagattgtgcatccgtgtgatgaagtgtatcatgggaatggtgaggatttcaacataatggctattggagaacacagcatcagcaatgagttgctcattagctcctgccagtttcatgttgacatggtgcatgtattggatgaggactggatctattttgattcgaagctagacgccaagattgctgagaggaacatgatggatgacggtgcttttaagatatggaggtggaaaatcgatgactccatattcagtgatagtgcgccttagtttgagagactaaggttgatggacatgtgcttttgttagtgtaataggtgccgctaagattttgcagacaaaagcacatgtccatcagccttagtttgagagactaaggttgat

SEQ ID NO: 16493 - DNA, 537 bp, Setaria italica
  Peptide Sequence Number=SeqID_82467
ctcccttactaggtttcctttccaccactgcgttctgcccttcagctccctctagtcccttcagcaacagcacggcttgttgctgacacaacttcggtgtcttgacctgctgcaagctcagcttaaccttttccttggaactccaatccttgtctctgaaacttccaggttccaagggggaggttctgctgaaatttctggttccaaagattgattttcaagtggaggttctgccaaaatttcctgttctgaacatcgatttcccaggggaggttctgccaaaattttctgcactgaccatcagttttccaaggggaggttctgccaaaattttctgcgctgaccatcacttctcaaggggaggttctgacaaaactttcttctctcaccatcagttctccaaggggaagttctgccaaaattttcttgagcaagaacctaccctttcttgacgcacacatacaaatatacacacaaaacaaattttaacttaagtgaagaagagtacttgcttcttgttcttgatgatagactagg

SEQ ID NO: 16494 - DNA, 916 bp, Setaria italica
  misc_feature (1)..(53): n is a, c, g, or t
  Peptide Sequence Number=SeqID_82468
nnnnnnnnnnnnnnnnnnnnnnnnnnnnnnnnnnnnnnnnnnnnnnnnnnnnnacgatcatagcacagtatttgtaataaataaattttttaatgcaaaaccaaatttcccctcacacgcatcaatccattccggagagctcaagaaccactagcgtattaactgctcagcacggcacgtttgttcatgcaaccacaacgctgcagcaactaatatccattgatagacataaatgcatgataacgaggaacttgcactagttcgacccaacagctccaatctatcataagctccttcatcttcccaaattctcattcttgattcaacaagtagattttttttactagcaggcggtctggttaacgaatgcgatcaacaagaccttcactcttcagcaacattgacaagctcatactccacaagtgagaggttgttgtcctccttcacattgaagcttgccggttcagtgacttcgatgcggccccatttgtccacagcaagcctcattgagcctttgaacatatcaatctttgcattgcggataataacagtgctttcaggcttcaacagatcaacctgctcgttgcgggcggtgaagaggatgcagccggtctcgtcgccgatgaggcactcggcgatcctggtgggccgcgccgccgggccggcggcgggtgcgcctgggcggcccttctggaggacggtcttggagctgagcaccttggcgacgagagtgtggccggtcgtgccgggcttgagctggtccaccttgacgaacaccggcttccgcttcgccgccgccgtggccatggggatgaccggatgaaggatagagataacaatcggattagaggacgcggggttaaggagcggcggtggccaaaccctagatgggggaggatttaatagaggccgggag

SEQ ID NO: 16495 - DNA, 397 bp, Setaria italica
  misc_feature (1)..(25): n is a, c, g, or t
  Peptide Sequence Number=SeqID_82469
nnnnnnnnnnnnnnnnnnnnnnnnnttttttttttttgtaagcctcaatcaggaattcaggatcatatatgtagtcaagacactcggatgaaccatgttcttctctcgtttttttacagcagcttacacagctagatagcagtttggtaccatatcttaaacaaaaatcacatgaacaacaaactcataagctcacaccatacatggagacaaacaagatcacgaggaaggagcaaacaaagcctacttctgcatttgcctgtccgcctacaggagggggttgggccgccggaatcgccggatgaggaaggagatcagatggccttggcgggcggcgcggtggacgcggagaggtcgccgaggagcggctcgttggcggaggcgccgccggagccgg

SEQ ID NO: 16496 - DNA, 537 bp, Setaria italica
  misc_feature (11)..(11): n is a, c, g, or t
  Peptide Sequence Number=SeqID_82470
ccaaaactganagactcagaacacgggtcgatgcacttctgtttgctgctcttgcaatgctctcgatcacgctgcttctgaccacttgactgcgcagtgaatattaacgatagagattcagaaggagctgaagcagtccgtgtggtcgccggaggcggcgtcgtcgctgcagggggagtgcgtgtggcggccctcgtacgtggtcatcaccatgcggcagtccgtcgacagccgctccacccgcttcttcacgcggcagttgctgtgggtgcaccggaaatagctcctcggatggaggctgttcttgacaaccttctgcccgtacttcctccacttgtagccatcatccagcacatccacgtcgcttctggtctggaaacagaacctcggctccctcatcttcctcctcaccttcatcttccctctatccgccatcgccggcgccgagcccttccaccatgaactagcactacccgtgcaaattggtggcggtggtggtgctagcgatctcgccggcggctttcgccgctgaggtcg

SEQ ID NO: 16497 - DNA, 438 bp, Setaria italica
  Peptide Sequence Number=SeqID_82471
agcacagggaacttgaccggtgcccagtagttttcccagatccgccgcatcctgcaggacgcaaaccacgatcccctgttcttgcctgacaccgcaatcttgtcctcctgccccggttctgagacaccaatttaacaatcaattaccagcactaattaatcgtcatctcgctagcaaagctaatcagtcacctcgactcgatcgcttcacttctaacctttgatggatggatgcttccatgcagctcggtggaggagcagccgccgagcaggtgaggtgaggtgacggcgagctccaggcaggcaaggattagtcaccaaatccaccacctgacacccgctcaccacctgtcccggccgccttaccatgtccccccacctgccgctccccctcctcccctcccgcgccacacgccgctgcgcgctcccatgcccccgc

SEQ ID NO: 16498 - DNA, 688 bp, Setaria italica
  Peptide Sequence Number=SeqID_82472
cgggattccatttccacaccacccatgccacgagtaagaagatcgcaatgatagccaagtcttcgatccacaaattggtaaaagtgagagtacacaatctctaaggagctcgaagcaagttgaatggcaagttcaagcacttctccatgctcagcaaccgcgggaaatgtactaggatatgtagccaaatgccccaaagctctaacagcaacccgttgctccacccaagtcagcctacctcttagaagttcaactaatggaggtattacaccggcacgaacagcacgttctgcaaattcctccacattcatcgtatatgatccaattatgtgagctgcataatatgggatgtaaatattctgatcatgtgcaagccaacgcctgtttttcaatcccttccatataagagatgccatgcattcaaatatgcccaagttgatgaactcaggatcatttggatgagccatcgctgtattccagagaccgctaatagggagaacttgaccgtcgtcatcttgggaaggaagttccctaaagaactttagcacacttgcctttcgtttactagggtttgcctccttcataacacaaaagaaacatccaggataagggcaatcagattgtatcttgtccattatgacagccaatcgatcctagcagctctttagccacaagcccacaacctcaa

SEQ ID NO: 16499 - DNA, 489 bp, Setaria italica
  Peptide Sequence Number=SeqID_82473
ctcagccaccgccggccgccgcggcggcgcagccgcagtcagtctgcagggacctcttcccggtcgagtccgacgcctgcctggagcctcggctggggatggagttcgagtccggcgaggctgccaagaccttctacattgcttatgccggccgtgttgggttctccgtccgcattgcccggtcgcgcaagtccaagtgcagcgagtccattatcatgttgaggtttgtgtgctcgagggaagggttcagtaaggagaaacgagcggccacggctgggaagaagacgaggaagcgtcctgcctccatcagggagggctgcaatgccatgctcgaggtgctccgcagaggtgatagcaagtgggttgttaccaagcttgtcaaggagcacaatcacgaggttgggctgcccagccgagtgcattacattgccattgagggtgatgctgtggttgacccttaccttggtatggagtttgactcccttgagt

SEQ ID NO: 16500 - DNA, 875 bp, Setaria italica
  Peptide Sequence Number=SeqID_82474
cttcttcctaccttcgcggcaacctacctgcgcctgcgagcgtcgatcgatccattcgtctccatggcgtgcagcttctccccttcctccgccacgaggctacaggccgtggacgccgccgcggcggccgtgaagaacggcagggttcccatcaaggcctccgtcgcccctgcgcagaggtcgctcggctgctgcagggcgaccgcgcggcaggaaggcgccaccaaggagcctagcgtcgcagtttcttcggcccgtacacagttggacctcctggaacaactgacgtcccctacacttgatggcattgctggcctagagaatggtacactccctgaaccccgtcaaggcgcaactatccgcgagcagctgtcggcgctggccaatggtaaggttgacgagttcaccctaccattgggcaagaagctgaaggaaggcctgaagcaactcaaccgtttgacggtgtcacagaggaggaacatcaagaggcaggccatgcttacccaggtcagtggacggaatgactcggtgttcttcgcgaccgttggggcatttgtgctcgttccaccttttgccattctagctattgctgtcctaactggttatatccagctcttgccttgaacatgaaggcgcaggcaccaggcaggttctttaacttgtcatctccagactgtcatataggaagatgcctttgctctgcagtaaaactgtgtatatatagtagcaatttgtatgtggggtaagtaggttttgtgttcaaggttgtaagaacttgatgtggcatagatttagcataagaaacatctatggatcgatatgaacacgaggaagaacacacatagtactgaatacaaaacataaaatataggtgc

SEQ ID NO: 16501 - DNA, 257 bp, Setaria italica
  Peptide Sequence Number=SeqID_82475
aaaaggagaagaagcgcccgcccgaccccgaccccgcgacaccggacgccggacggcgcctcatattcgcccggtcgcggtcggtcggttcgtggcgtcaacctgaagcagcatcctcgcatggccacaccgcccttcgacttcgcttcccttgctgtcctgagcagctgcgcttctgtcctccatccccctgcggccctgcctgccttctccgtcgctggcgaggcttctccaagcctcgctgctcgctagctcca

SEQ ID NO: 16502 - DNA, 292 bp, Setaria italica
  Peptide Sequence Number=SeqID_82476
ctcaccttcaccagcgtcgtcgtcgtcgtcgtcgtcatcttcatcctcgtcgtcatcgtcctcgtcctccttgacgtcctcgacgaccggcgcctcgtcctccgcaggctgctcagccttgggcgcggcctccgcgggcgccgccgcctcgctcttctccacctccgccgccggcgcttgctcgctgaccatcctgcctggtccgcggccgatcgagcacggggtttgcggtggcggtgcacgggaacgaacggcggcctcaggataaggggcgggtaagcggagtgagcga

SEQ ID NO: 16503 - DNA, 273 bp, Setaria italica
  Peptide Sequence Number=SeqID_82477
cctcctcccgagccatcgatgacatcctcaatgccaccctcgccgcgccccccgccgcctctgccttttagtccaataaccaccgtaagaaagatggagaagagggataatgagctcccaccaccatctctggcttttagtccaccagggataagaataagaaaggtggagaagagggatgatgagctcctcccaccacctctggcttttagtccacctaggataagaacaagaaagatggagaagagggatgatgagctccgacggggatgt

SEQ ID NO: 16504 - DNA, 585 bp, Setaria italica
  Peptide Sequence Number=SeqID_82478
cgggggatgggagcaggagagcagcaacattaaaaggttcgtggcacgagcaacggcacaagtcagaaaagcagatgaagaaagagcttgtcgcgaaagaaaaatccagcagagttttgccttgaacaagcaaggtgttcagatcggaattaggacagaatcgcgctctgagaaaccaagaaactaaccccaggtgaaaattttggcagagtgtcggcctggagaacaaggtttttgggcaagaaatttcggcagagtgacggcctaaccagcaaggtttctggtgaaaattttcggcagagtgacagactgaacagctaactagctaggtctcctgtgtgaaaaacaatccggcagagtcttgccctgatcagaaaggtttccggccgaaaattccgacagagttttggctgcacagagacactttgctacagccactccgacgagaaggttcggaacggaatctcccaggcacagggaactaaaggtgcaggtgtctggtgcaagcaaagggccgggtgttcaaagatgcagcagggtagtgggttggtgagggcggcagaggtcaacagctgcagcgggaca

SEQ ID NO: 16505 - DNA, 348 bp, Setaria italica
  Peptide Sequence Number=SeqID_82479
gttacgttagtctggtgtgggacggcctgcaggacctgatgaacatggacgaggcggacctgtggttcgcgcccatttgctggcactgctgcgtccagtttctgagagctcatcctgtactgtcagttgtgtacacaaaagtagtgcggttgttactactactgattaggtctcaggtaggctaactgggagtggcattctttcgttgtgcattgaacatagctagccggtccgtcaaattggattgaattgtagattgacattcttgaattgtgtatattgattggtggatggagaattctttttcaatggatttctgaggaaactgtttgatagaaaaaaaaaaaa

SEQ ID NO: 16506 - DNA, 363 bp, Setaria italica
  misc_feature (320)..(320): n is a, c, g, or t
  Peptide Sequence Number=SeqID_82480
tattatatcttctcgcaagcattacagtgttgatgttgttgtagcatggttagtacatattctattgcattgtggaaatattaccatgcttctttttccctttgttgatgtatctttcctagacaggtatactgtgaatttggttgttttctttgtggataagaagcttacagaacttcccgaccgatcagcagggtctgcatcaatactacctgtcagtacgaaggacaaagataccaagttgaaagaagagagcacgagattgttgaatggtaactctggggattcagctgaccgggtatgaaataacaagtgtttancatgacatgatggctacatttttgtatactaccctgcatattc

SEQ ID NO: 16507 - DNA, 1468 bp, Setaria italica
  Peptide Sequence Number=SeqID_82481
tcctttcttcttgctgccggggaggaggagaggagaggaaagaggcgaagggcgcaccgggaaggaggaggaccaggaggaccaggaggaggcgcttgccggcggagttctctcgcctccttcttggctccgattccgggtgccataaaacgcgcgccgccggcggccacccggcagccatgtcgcccttctaccttgctcgcagtgcttccaagctagtgaggaggatcacctcggaggtatcggtcgagctcaagatcctctctgagaaatggcgccttcttctcgctggcctcgttttccagtacattcatggtttggccgcacgaggggttcattatttgcaccggcctgggcctacccttcaagatctaggctttatgattcttccagaacttggaaaagaaaggggttacatcagtgagacattatttacattcatcttcctctcctttgtattgtggacatttcatcctttcatccttcagaccaagcgcttctacactgttctgatctggcgcagggtgcttgccttcttatgtgcttctcaatttctacggataataacattctattccacacagcttccaggtcccaactatcattgtcgcgagggctcacctctggccagattaccaccaccccagaatgcagcagaggtccttctgattaatttcccaaggggagtgatatatggctgtggtgacttgatattttcatcccacatgattttcactctagtctttgtcataacataccagaagtatggaagtataaggtttgttaagatgcttgcgtggtgcatagctattgttcagagtcttcttattatatcttctcgcaagcattacagtgttgatgttgttgtagcatggtatactgtgaatttggttgttttctttgtggataagaagcttacagaacttcccgaccgatcagcagggtctgcatcaatactacctgtcagtacgaaggacaaagataccaagttgaaagaagagagcacgagattgttgaatggtaactctggggattcagctgaccggagaccacgaacgcaaattaatggaaagcacattgagaatgaaagccatgttgatagtgaaagtgtgaaaacatgatgagtgctgatggagcgatttttgttagttgaaagacgttccagagaaggaaggaatatgggatgacacgtgctttggtgcctagcagcttcatgacatagctatgaaggaaatagttttagacctcacgatcctacgcagaacaagttttgttcgtaaaactgtatatgtctatatcccagctgtctcactgtgaccccccttttctttttctggtttctttcttttattttccgtattagaattcagattatttatgcaaaagcgtatagtttgcacagcattgagatcctttgcaagtgtaatcatcttgacaatatgagattgtcttgggtacctacttctag

SEQ ID NO: 16508 - DNA, 355 bp, Setaria italica
  misc_feature (50)..(50): n is a, c, g, or t
  Peptide Sequence Number=SeqID_82482
cttcccgtccggcggatggccgcccgccaccgcgtctgcgcgcctggganccgggggtttcggcttccccatgccgtccgacttgacgcctcgcggcggcgacgggccgtccgtcttcaccggcgcgacgcccgtgcacgtctctgtgctccggccaccagcgcccttcggtctcccgcgccggaagcagtctcgtgaggataagatggctgcgtcggctggctcgactcgcccgccacccgagcccgattccgccgcctgatttcccgggactttccccttcgccttcgattcgctcttgttctccggcttgccgccgtacggtgatgcaggaaccacctcagcaggcttgccg

SEQ ID NO: 16509 - DNA, 1515 bp, Setaria italica
  misc_feature (1444)..(1515): n is a, c, g, or t
  Peptide Sequence Number=SeqID_82483
taaccccttaacccgttaactaacgaatttaatactaccttacctacaagtacctaagacaagtttgtcgcgcctcatcataggcgacctcgccgctggtgacttgaagcctggcctcttccgactgaagtcttctctcgtcagcaagcgtcgccgtgctcctccttctgccctctactgtatgtactggactggcgttgagtgcagaaatgagtaagctgtacggtatgttctcggctctacgcctagatgctgaaattagtggagaagatgacagacttgaagttgcccaggcatcttccagcgcagaagaaactgcttccagggaacgagataaaacgcagaatggcacaatcgtagtaaactatgaggaagggacacttgtttcgtcatctggtgattacaagatgcctttagtatggatagacctggaaatgactggtttggatattacaaaagatcggattttggagattgcttgtattataacggatggtaaacttacaaaacaaatagagggtcctgacttggttataagccagagcaaagattgtttagataatatggatgaatggtgcaaaactcaccactcagctagtggtttgacggaaagagtactgcagagtgaactttctgagtgtgatgcagagtcacaagtgttagattttgttaggaggcatgtaagttcaggcactccactgttagctgggaattctgtttatgtggatttattgtttctgaagaagtatatgccacagcttgcagccatcttctctcatgtaactgtcgatgtgagcagtgtaatggctttatgtgtccgatggtatcccaaagaaaggaagcaaactccaaggaagcaaaaggcccacagggcaatggatgatattaaagaaagcatcgctgaactaaagtactacaaggacaacattttcaaaccacagaaatctaagcggtagccgcatgggtgaagtctgcagccaccttgttgagtagttgaatcaactgatagccagaattggaggggaaatttcaggttaaaagtctcatgcctcgttgagctcatatgcaagggttccactttgatgttctgtatatattatttagtgttaggacttcaggcttattgttcggttggattccgaacactactaatgctaaatgaacctccttgttactgcattgcgtacatatatagatgttcaaaattactttgctactccctatgataaatgacatggtgtcaatgatgggctcagacctcagatgctgcctcaacgtacggtgtgcccctgtaagtgtgtgatatacactgaagcatccttctatgtaacttgaggggctgtgcaatttagttctgcttcactagataagaggtgcacatagttttattgatgtaaacaatgagtatgagcatttcctacaagattcatctttaacaatgacnnnnnnnnnnnnnnnnnnnnnnnnnnnnnnnnnnnnnnnnnnnnnnnnnnnnnnnnnnnnnnnnnnnnnnnn

SEQ ID NO: 16510 - DNA, 553 bp, Setaria italica
  Peptide Sequence Number=SeqID_82484
cttctcccactcgtcctctgcctccaccgccgtggcgcgcccgctcctcggcctcgacggcctggtcctcgcgctcgcggcgctgctgttcatcatcctcgccaccggctccggcgacgacgaggaagtctccagcgacggcacgatccgccgccgccgctcctgcagccgcgtcccggcggcgctcatcgtgttcgcgctcggcctgctgctctgcttcgtgcgtgacccgtcgattgtgcagggccttcgttttgggccggcgccgctgcggatcgtcaagatcacctgggacgatttcaagatcgggttctgggaaggcgcggtgccgcagctcccgctgtccgtgctgaactcggtgatcgccgtgtgcaagctctcgtcggacctgttccccgaacgggccgagctctccccggcgagggtgtcagtgagcgtcggcctcatgaacttcgtcggctgctggttcggcgccatgccgtgctgccacggcgcgggcggactggcggggcagtaccgtttcggcggccggagcggagcgtccgtggtgttc

SEQ ID NO: 16511 - DNA, 285 bp, Setaria italica
  Peptide Sequence Number=SeqID_82485
tgctccctcccttccacggcggcgaagctctcaacatggcggatgcacggggagaggcttccggcggggacaaggccacgcgcccgtcgcgcctccgcgtcgtacgcccggacgtccaggaagtcctcaagagccctcgccgtagccgccctaagaagcagcagcctccgcctccgccccagcccccgccgccaaggaagcagaagcaggtaaaggagaagaaagaccgggggaaggagaaggagaaggagaaagagaagggagaggaggagcaattcgatcccg

SEQ ID NO: 16512 - DNA, 458 bp, Setaria italica
  Peptide Sequence Number=SeqID_82486
cggcggcgaccgtcaggtgcagctgcgtcggcgaggcggggccggccgctgggggcctggcggaggagcactaccggacgctgcggctgcggccgggggccacccgcggcgaggtcaagaaggccttccgccgcctcgcgctcatgtaccacccggacgtctgcaaggagagcgacggcggcggcggccgcgacgcctgcggcgtccagttccagcggatcagcgtggcgtaccagatgctgatgagcaacatgagggaggccgaggagcggctcgagtactggcggctcaagtacggcctcaccgaccaggatctcgacaggtacaggagctacctcaacgaggacgacgacgactggttcgacgtgtgaaggagctgatgaagcgcccgaccgataaccaaggatctacacggcttgcctatccgcactgatcttattaccatcgattagttttaa

SEQ ID NO: 16513 - DNA, 504 bp, Setaria italica
  Peptide Sequence Number=SeqID_82487
gttacccgtaacccctcctgttctcccccatggatccccagctactacccaatattcacgatttaccgcagcagcagcaagtaaaccagtaatttcatttcatttcctttttcacccctgactgacgtgccgattcctctgacgggctccttccccgggcgtcgtctttgctcctgcagtaccacccggacgtctgcaaggagagcgacggcggcggcggccgcgacgcctgcggcgtccagttccagcggatcagcgtggcgtaccaggtgagctaccttagttacccaccaccccatttcgtttctgctttcccctacctgctgctgaaatctgaatgattgacctgaccaacgcgatccgtcggatgcagatgctgatgagcaacatgagggaggccgaggagcggctcgagtactggcggctcaagtacggcctcaccgaccaggatctcgacaggtacaggagctacctcaacgaggacgacgacgactggttacgaac

SEQ ID NO: 16514 - DNA, 511 bp, Setaria italica
  Peptide Sequence Number=SeqID_82488
ttttttttagttcgcattttttttataactaacatcaataaatctttgtatataaacaagaggtctttctgagacacaaatatcagtacactgtctgcagtctgtattccttcacccacaataaaataagggaggagtacagtaaccagtgtatgcacataaacatgcagatgaaattaattacagtgttgctgcctctgccatggcaacaagattaaaactaatcgatggtaataagatcagtgcggataggcaagccgtgtagatccttggttatcggtcgggcgcttcatcagctccttcacacgtcgaaccagtcgtcgtcgtcctcgttgaggtagctcctgtacctgtcgagatcctggtcggtgaggccgtacttgagccgccagttacttcgagccgctcctcggcctccttcatgttgctcatcagcatctggtacgccacgctgatccgctggaactggaccgccgcaggcgtcgcgccgccgccgccgtcgctctccttg

SEQ ID NO: 16515 - DNA, 334 bp, Setaria italica
  Peptide Sequence Number=SeqID_82489
cggggggggcgaagcggagcgccgcgaggccgctcaagtcctcgcccccgcctcgccctccctcctcttcttcctcctcctccgtcagcggcggcggcgtcgcggcgacaacgttcacccggctcccgctccgcgacgcgccggagtcagcggaggtcacgctcgaccggttccccaccgccccggccaacccggaggcgccagcacccgctcccacacgcgggaacggtgtccagcggctggaggacgaggaggagttcgaggtggggttgggggccacctcgttcgcgcagattccgctgcgggactcgccggacggtgtggagctcaccat

SEQ ID NO: 16516 - DNA, 705 bp, Setaria italica
  misc_feature (586)..(705): n is a, c, g, or t
  Peptide Sequence Number=SeqID_82490
accttctgactaaaccagttgctgcggtcaaggtgacactcagcttggctgcaaaagcatatgcaaattcattgcccctctgtaaggaaacatttttctccccacaaatggatgatgaacttgtgttaaggtaccaagcactaatgaaggagagctcaaaattgccactgttcgacttaaggaagctaaatgcagcacttcctgttccttctgtaccagataatacaacagaaattcttgtcatgggcgcaagcaatgattttattgttgattctgaaggactttctgaaacttcaagattttatggtgttcaaccagtatgtgtggaaggtgtagctcacgatatgatgttagattgctcgtgggagaaaggagctgaaataatcttgacgtggttagagaaactcacgccacgactaaactaattttcagtccaacagctgtgttcgacattttgtagccctgattcttgttgattctttttgttgggcatctgttggtagggagtttgtagctagtgctcggaaactgcttccagtattattgttcaattggaataaagtagagtttatcctttacaaaaacnnnnnnnnnnnnnnnnnnnnnnnnnnnnnnnnnnnnnnnnnnnnnnnnnnnnnnnnnnnnnnnnnnnnnnnnnnnnnnnnnnnnnnnnnnnnnnnnnnnnnnnnnnnnnnnnnnnnnnnn

SEQ ID NO: 16517 - DNA, 733 bp, Setaria italica
  Peptide Sequence Number=SeqID_82491
gtcgagaaatgaaccttccccatcgtataatatggatgcaaataggaacactcttcggtatgctcaagtttcaagtgatcggcatgttgagcaaatggatattgtgggcactacaccttctaattattttgaggaaaatgttcgtaatggagaagcaagagtagatggtgactcgcagttgtacaggcatgaaaaccaggattacccagctgatggtgatcccttacctggtattgagggtttcaattgttggcgagcctagactaggatctacattaacagcatgtggtttccctacaaatggtactaccctttgcaatttccaggtatgttgttttctgactcctaattatgtttctttgtaattgctcttaatggttaaatcttgtgagcaaaacctttcatcccatgatgttgctattctagtgggttcgccatcttgaaaatggtaccaggcagtctatcgaaggtgctacgatgtatgactatgtggttactgcagatgatgttggcactcttcttgctgtagactgcacgcctatggatgataatggccgtcagggtgatttagtgacaaaatttgctaacaatgggtataagataacctgtgatccagagatgcagaatcatattgatgcatgcattttgaatgggaaagctgaatttgaagttgttgtcctgcatgcatattctcctcctgaggaatgggaactggctacattggtgcttacac

SEQ ID NO: 16518 - DNA, 301 bp, Setaria italica
  Peptide Sequence Number=SeqID_82492
caccaatgtagccagttcccattcctcaggaggagaatatgcatgcaggacctagctatcagattaagttaaagcatactggtgaagttataattgatgagaagtactcttcatatctacagacaaaaattccgaatgggcgcactactcaatttgttttagtaagttctacgggcgcaaatctaccagttaacacacagggactatcagacccaaacaatgaggactatgatgttaggttacgtgacctaattgtattggtaatgagaactttccagaaaaaggctctagatgctaaaag

SEQ ID NO: 16519 - DNA, 421 bp, Setaria italica
  Peptide Sequence Number=SeqID_82493
atcttttctgggaaaagtacgcctgttctccttctgggcagctcctacacttctgtctcctagcaaccatctggtgctactagctgaacaattgtttgatacttgattgcactacggtggtgtcatgccatatgttctactgaaagtctgactgaacactataggctgatttctaccttcttttgtgcagcatgcatattctcctcctgaggaatgggaactggctacattggtgcttacacgacctagctatcagattaagttaaagcatactggtgaagttataattgatgagaagtactcttcatatctacagacaaaaattccgaatgggcgcactactcaatttgttttagtaagttctacgggcgcaaatctaccagttaacacacagggactatcaggcccaaacaatgaggac

SEQ ID NO: 16520 - DNA, 754 bp, Setaria italica
  misc_feature (129)..(129): n is a, c, g, or t
  Peptide Sequence Number=SeqID_82494
ccgtcgagaaatgaacttcccatcgtataatatggatgcaaataggaacactcttcggtatgctcaagtttcaagtgatcggcatgttgaagcaaatgtaccatggatcccattttcagcaggatattntgggcactacaccttctaatatttttgaggaaaatgttcgtaatggagaagcaagagtagatggtgactcgcagttgtacaggcatgaaaaccaggattacccagctgatggtgatcccttacctggtattgaggggtttcaaattgttggcgagcctagactaggatctacattaacagcatgtggtttccctacaaatggtactaccctttgcaatttccagtgggttcgccatcttgaaaatggtaccaggcagtctatcgaaggtgctacgatgtatgactatgtggttactgcagatgatgttggcactcttcttgctgtagactgcacgcctatggatgataatggccgtcagggtgatttagtgacaaaatttgctaacaatgggtataagataacctgtgatccagagatgcagaatcatattgatgcatgcattttgaatgggaaagctgaatttgaagttgttgtcctgcatgcatattctcctcctgaggaatgggaactggctacattggtgcttacacgacctagctatcagattaagttaaagcatactggtgaagttataattgatgagaagtactcttcatatctacagacaaaaattccgaatgggcg

SEQ ID NO: 16521 - DNA, 2846 bp, Setaria italica
  Peptide Sequence Number=SeqID_82495
gcccccatccccggtcgcctgccgtggccggcttgccaacggcgcaggcgtcgtagcgtggtggccgctagggttctgcgccgacgacttgcccttgaacgaggtcgccgccgcccccctccccctgctgctgcccccctaatcgagacgctggataggagcccgtgacgccgacccctggaggagcttgcctgacgccgaccggtgccgcttgcttccaatccggctaaggaaggacatgcgggatccatttgatgcaccagttgatctcgttaacgcagatcataatggtgggaatcaactttccaggactagtgtggtgcctgctagggactatggtttacaaaatggtgatgccaaatccttcgctccaaactccgacactttagtcaggcatcaactccagggtgcatccatgcaaaaagacttagttgtggaagaccccaatactcgtctcatggatcctgagaccaaggaactttactttagatcacaatcacaagaggacgagatcttgttgcttcgcaagcaagttgcagatgcatctctcaaggagctgagattgctgaacgaaaaacatattctggagaggaggcttacagacttgaggatggctgttgacgagaagcaggaagaagctatatctggtgctatgaaacaactgaaccagaagaaaaaccatattgaggaaaatatgagactggcaaatgatctaaaagctgaggaagaagagctataccttttcacttcatcattgcttagcatgctagcagaatacaatgtccgcccacctcaaataaatgcttccaccattacaactggtacaaagcgcttgtaccagcagttgtattggaagatcagatctttaaatgacagtttaggtgatatgactcaacctggaaacatatataatcccaatcatcagcaagcaactccgtcgagaaatgaaccttccccatcgtataatatggatgcaaataggaacactcttcggtatgctcaagtttcaagtgatcggcatgttgagcaaatgtaccatggatcccattttcagcaggatattgtgggcactacaccttctaattattttgaggaaaatgttcgtaatggagaagcaagagtagatggtgactcgcagttgtacaggcatgaaaaccaggattacccagctgatggtgatcccttacctggtattgaggggtttcaaattgttggcgagcctagactaggatctacattaacagcatgtggtttccctacaaatggtactaccctttgcaatttccaggtatgttgttttctgactcctaattatgtttctttgtaattgctcttaatggttaaatcttgtgagcaaaacctttcatcccatgatgttgctattctagtgggttcgccatcttgaaaatggtaccaggcagtctatcgaaggtgctacgatgtatgactatgtggttactgcagatgatgttggcactcttcttgctgtagactgcacgcctatggatgataatggccgtcaggttattattcagaatataaaacatttaagcagtttctttagctgtaggttgcgcgctcatctaagttttttctgtatatgtcaatgatcaggtccaatgtttttcacttaacacattttaaattgttatttgttatacaggagggagtagaaacactattatgataagtttccgctctcaattctgtctcaataatagtatgtgctaaattgtacatttggaagacatgggctactggtttcccttttcataatttgagaatgtcatgcttaatatgtagacaataggactgtacttgagctctttaccttatacatgtgttgttttgaatactgagctgatgagcatctgatacagcctgttttgaatagaattccacctacagtgccattatcctagtgtaagaagtctccttttttttgtagggtgatttagtgacaaaatttgctaacaatgggtataagataacctgtgatccagagatgcagaatcatattgatgcatgcattttgaatgggaaagctgaatttgaagttgttgtcctgcatgcatattctcctcctgaggaatgggaactggctacattggtgcttacacgacctagctatcagattaagttaaagcatactggtgaagttataattgatgagaagtactcttcatatctacagacaaaaattccgaatgggcgcactactcaatttgttttagtaagttctacgggcgcaaatctaccagttaacacacagggactatcagacccaaacaatgaggactatgatgttaggttacgtgacctaattgtattggtaatgagaactttccagaaaaaggctctagatgctaaaaggaaaggcaaggcttagaatccatgtagatgtgttacaatagatcctacgaagaagattttccttttttctgattgttttgtgcagtattcaattattttttgttctcgaggtgaaatgaactgttgattgtagcagacatttcaagaattacccggtggagttgtgagggcacataaatgattagaggaacctggtcagttcttgatcctactagtgttaacagtaaattgtaggtttgtgtaattcgttctcgtatcattgcttgctctaagtcacggcactgaggtctttgtaaaatttgacgcagccaatgctgcatataaacttctgaggtgtccgctgcagctcttggagagaacagttcatttctttatggctgctgattttgtttctcatggtggttcacgaagaatccatcgtgcaatgttcatctcatggacttccaatatgccttttgttcagcacattgcct

SEQ ID NO: 16522 - DNA, 891 bp, Setaria italica
  Peptide Sequence Number=SeqID_82496
gtcagtgagaagggtgtcggaacattgttgtctgtaacagcgagcttgcagaggtgcattaggcattttaggaaacttgagcttgtaaagggggacagggatcctgagccattgccatgttcaccaatgttgtattctgggcaggcacacactaactcgcagatgaacaagtttctcgagaccatggctgattggtacaggtatgcagataaccggaagaagattgtagggttctgtgcatatgtcataaggagttcactggcaaagctctatgcggcaaggtatagactgaagtctcgagctaaggtctacaagatcgcttcacgggatcttagccgtcctttgagagaaaacacaaggaatgatgcaccggaatattctgatcttttgaggatgggactggttgattttattgagggtgtacaatttgcacgcatgtcatcaattccatcgtgcgattacacacctttccctagaaactgggtaccacaccatgaacttgtattgcaagagtacattaagctgcaagatccaaagttcttttttgaacttcacaagactatcaaacgtcaggaaataagttcaccacaggatgatgtatcaaagatggtgtggtattataaagttcatggtgtttatgatgacaaaggatctttgatgagagccaaagaattgagaaatggtgaagttgtcaatgggtacaagcaacttctattggatacatagtctgtgactcctatgttcctgattgttaatagaaatattgatgggtatgcaatggtgcatcaggcagattcttctatattttttgttgtacgagtgaccctattctcatgggtatctatgaacagcatttcagctaaagaaatgcaccaaatcatttattatggc

SEQ ID NO: 16523 - DNA, 425 bp, Setaria italica
  Peptide Sequence Number=SeqID_82497
acgccgttcaaggtcaccgcgctcaagaacatccgggcgtgcatggccggcgacgtggccatgcagtgcgagttcgtgtcctcgggcgggatccaggcggtcgcccgggtcatggcgcaggcgctcgcggagagcgccgcgggcggcgacttctcggcgttcacggcgtgcgaggaggccgccgcggtgctcgcgctgctcccgctcgcggacgcggcgtcggtggggctcgtcctcgcgccggagtgcatgaggccggtgatggcgctgctccagcgcggcggcgccgaggcgaggctacacgccatggacatcgtgaccaagatctccaatgccggcgccggggactggaccgccgccgccggagtcgaggttgacgacgtgctcaagcccctcctggagctcctggccgacgaggtctccac

SEQ ID NO: 16524 - DNA, 344 bp, Setaria italica
  Peptide Sequence Number=SeqID_82498
cgaaaaagattgaatttagaagaacagttgcggagcgatacttcctgaagaagaatcttccccacgcgtcccttcgcctccatggcctcgctccagcctactcttctcactcctcgcccgctctgctgctgttcgcacgccttgctctacccaaggttcaggaaattgcctccgagattctcaaatggggcctattccacggcgaggccgttggaccggagcgagttcttggggaaaggcgataagttggcttggagaacggcggggaggcggcggcgtcggcttggcgccgccgcagccgggagaggccccttctttggcggcggcgggaggcgcatgggcaa

SEQ ID NO: 16525 - DNA, 1020 bp, Setaria italica
  misc_feature (1013)..(1013): n is a, c, g, or t
  Peptide Sequence Number=SeqID_82499
aaattctctcgaaaagaaaccagaaaaagaggaggaaaaaaggactcgtctccttccccaccaagcttgccagcacccgaagtcggcgagcgagagcggcaggcgcggcgatggggtcgagcgaggcggacaagccgctgcggcggatcgcggcgtcgttcgaggagctcgccgccgtcgcgaagcagcagcccgcgggggccatggacgccggggcgtttgcgcgcgcctgctccaacgtctccgtcctcttcggctgcctcggcatcgccttcaagttcgccgagagggactacgtcgccaaggttgatgatttgctggaggcatccaagtcaatttctacattgcccttgatggttgagttagacattcagcaggacactgtcagggtaccagggagccatacaaggaatctgcttagagtaaagcgtggtattgatatggttaaggttctgtttgagcaaatgctggttacagagggcaactcgctcagggatgcagcatcagtagcttatgctcaggtgtttgctcctcaccatggatgggccataaggaaagcagttgctgctggaatgtatgcgcttccctcaaagtcccagctgttgaagaaattgaacgaagatgaggattccgcaaaggctcaaatgcagaacttcgtcaggtcatcagcaccagtaatcagctacgtcgaagatctattcacctcaaggaatttgggcatagattggtgaagagaacttacagatacctgtgctcgatgtactaatccagtcagatggtctgctgtgagctgggctccaaaaaacttaatcctggtttcgatgtttgtaaccaaatcaacaagcttcggtctattactaggaatcccgctctggagttgtttgtgatgggtagatgagtaaacgatttgcaagtttgaactcttgtacgtgacgtgtgatgacatccatcgatgatgaggaaatatatctgccggccgattgggagaaaagtaagaataaaaaaaaaaaaanaaaaaaa

SEQ ID NO: 16526 - DNA, 277 bp, Setaria italica
  Peptide Sequence Number=SeqID_82500
gttttcctctcctctccctccctccctcccagcagcagccgccgccgccgccgccacctgccaggccagctcgagcgggagcgcgccccgacgcctcgacagtcccgcgccgccgagatctcgccgagggagggagggcatcggccagcggcagcagcagcggcggaagagatgtcgtcggggcggtacatggcctactcgccctcgccgtccaccaccccgcactccccgcgcatcgccggcctccgcgcgccatccgccgccgttgccgagcagg

SEQ ID NO: 16527 - DNA, 509 bp, Setaria italica
  misc_feature (19)..(19): n is a, c, g, or t
  Peptide Sequence Number=SeqID_82501
tcccacgagctgaacgccnccgcgcgctcggcgaggacaacatggagtactgcaaccccactgaccggacgcggcggcggcatgcacagctcctccggcttccacagcggccactactcccagccacgatccgatccggcgagtgatccgacgctagggaggttgcaccacagctcccacgggagccagtccggcatgcctacaaggaggtccaactacaactgagatatcgcgacagcattcgagtggagtgaccataaccaaccaatcaatcgccatgaatcactgctagactgcccactgatgcctaactgaactgaaatcgtctcctgatctgagtagatagctactattgctaactgaagcagaaccagaagtaacatgacaatatgccaatggtgcgcacttgggtatagtcaatagttaagatgtaattgtgcagtacatagtctcaaaatttctgttttattgtaagcgacctgatattgcaaagacaaattgaaattggg

SEQ ID NO: 16528 - DNA, 294 bp, Setaria italica
  Peptide Sequence Number=SeqID_82502
cgccggcgtcgagctcccccggcctggttgcagaggcggcggcgagcccctttgggcggggcgcgaaggctgcgggcaagagccccgtcagctagcgggcgaaggctgtcgtgaaccctcccaggtagtgcgcgcagacggcggcgacgagttccccgggtgggttgcgcaggcggcgccgtcccccgggcgtgttgctacgcgcagacggcggcgacgagttcccccgggtgggttgcgcaggcggcgccggtcccccgggcgtgttgcagaaccgtcggggagcccctgggg

SEQ ID NO: 16529 - DNA, 202 bp, Setaria italica
  Peptide Sequence Number=SeqID_82503
tcgagaccccccatcagcccgacgccgtgcgcgccttcctcgccggcctcagcctctccactcccgagatcgcccgcctcgtgccgctcgtcccttacgtgttcgccagcccggtgtacgtctcccgtctcgcgttcttcatatccttcttcggctccttcaccaagctgcacgccaccactcgagggacggccacctacct

SEQ ID NO: 16530 - DNA, 148 bp, Setaria italica
  Peptide Sequence Number=SeqID_82504
ttagggtaagtgggagggcatcgacaggctctgtgagcctcaacagcctcgagggtctgattatcgctattgcattgcacaatcagtaaatgcgggaatggacatggtatatggttattgagtgttcacatgaaatgcattcttctgt

SEQ ID NO: 16531 - DNA, 1498 bp, Setaria italica
  Peptide Sequence Number=SeqID_82505
gccacgccctcgcctcccgcctcggcgtccccatcctctacggcaccgacgccgtccacggtcacaacaacgtctacggcgccaccgtgttcccccacaacgtcggcatcggcgccaccagggacacggagctcgcgcgtaggatcggcgaggcgacggcgctcgaggtccgcgctaccggcatccactggaccttcgcgccctgcgtcgctgtctgtcgggatccgaggtgggggagatgctacgaaagctacagcgaggacccggagatcgtgcgctcgatgaccaccattgtcagcggtctgcaggggcagccgccggcagaccaccctcatggttaccccttcctcgcctcggtcagggagaatgtacttgcttgcgctaagcatttcgtaggggatggtggcacggacaaaggggtgaatgagggtaacgccatttgctcgtatgaagatttggaagcgatccatatgacaccataccctgattgtatagctcaaggggtggctacagtgatggcgtcctactctaaatggaatggggagccattgcattcaagtcgctatttgctgacagatgttctgaagggaaaattaggcttcaagggttttgtcatttcagattgggagggcatcgacaggctctgtgagcctcaacagcctcgagggtctgattatcgctattgcattgcacaatcagtaaatgcgggaatggacatgattatgatacctcacaggtttgagaaatttttggaggatattgtgttcttggtagagacaggggagataccaatgtctcggattgatgatgctgttgagcggattctgagggttaagtttatttctggagtgtttgaacatccattttcagaccaatctctgctggacacagttggttgtaaggaacatcggctgctggcacgtgaggctgtttgcaagtctttggtgcttctgaaaaatggaaaggatcagaaggcgccatttcttccattggccaaaaatgcaaaaagaatactggttgcaggaacacatgctgatgatattggatatcagtgtggtgggtggacgatagcatggcatggagatagtgggaaaataactcttggtacaagcatattggaggccgtacaagaatcaatgggagtgcaaactgaagttgtgtatgagaaatgcccaacagaagctacgattgaaaatggggatttttcctatgcagttgttgttgttggagaggttccatatgctgaatggacaggagatagaactgaccttggtattccatttaatggctccgagcttatcacccgtgttgcaagtaaaatccctaccctggtgattgttatatctggaaggccattggttattgagtcacaagttctggagaagatagaagctctagttgctgcctggctacctggaagtgaatgcacgggaattaccgattgcctctttggagatcatgatttcatcggcacattgcctgtgacatggtataggtc

SEQ ID NO: 16532 - DNA, 459 bp, Setaria italica
  Peptide Sequence Number=SeqID_82506
ccagttgggacggaagtgacccaactatgctctgggaggatgcaaaagttcagatgatgattgagaaagaaagctggccatatagtttcgcactttcagaggattttcagaagactgagcaaagaggttgcatctctggtagattactagttcgagacaggtatatagatgatgaggacctttatgcctccggagcctatgtaggcttggccctaccaggagaagttggatcctggcaaagagagtgcaagggataccaattctggtgtagagcagacgtagatgggagcttctacataaggagcattgtaactgggaactacaacctgtatgcatgggttcccggtttcataggggactacagattagatgctacactgaccatagcttcaggggatgatatttatctgggtgaccttgtgtatgaaccaccaagagacggtccgacgatgtgggaga

SEQ ID NO: 16533 - DNA, 486 bp, Setaria italica
  Peptide Sequence Number=SeqID_82507
acttgaaagcacaacacagtagcgaaatttaaactagaataaattgtcgaggagatgcatacccgattagcaaatagattttcctttctctgatttttaaataatgctagctggaattcttcctgcgcggtaaaatgatggcaaagattaaacattctaggttttatgtccaaaaatttagtttcctatggcatcgagttttttttaaagatggcatcaagattttatctgtagtcctgtatctgtctgagttacttaacacgacagttcataaacttgatataacacaatgtgtaaactaaatctagaatatagatgcattccctctagttgtgtagcacatatttggcttagctgatatgaattgcatggcatgcaagagcttatttttcaaacagctatatccttgtttaagttcataagctgggtagccaggcatcacacttaaggctacagcgataacttaggaatatggttaaccaatca

SEQ ID NO: 16534 - DNA, 842 bp, Setaria italica
  misc_feature (809)..(842): n is a, c, g, or t
  Peptide Sequence Number=SeqID_82508
gtggcatccacctccacaccccaaagacgtttgaaaccaaggcgtggcttgacgcccacccctcgctgtctgttgtttatgtggccttcggcagcatagcctccctaagctccaaacagatgactgaggtagccgaaggtctctacaacagtgacaagcccttcttatgggtcgtccgggctaaggagacttcgaagctacctgcaaccttcgctgataaggctaaagggaggggtctcattgtgccatggtgctcgcagctggaggtcctagcacacccgtccattgggtgttttgtgacacattgtggatggaactcgacattagaggcaatcagctctggtgtgcctatagtggcgatgccgcattggtcggaccagccaacaaatgccaagtacgtccaagatgtttggcgtgttggtgtacgggtacctccagattcccaaggggtgatgagaagagaagagatcgaggtgtgtgttcggcaggtgatggaaggagaactgcgcgaggagttcaaaataagagctttggagtggagcaagaaggcaaagaaagccatgagtaaaggtggcagctcagacatcaacatctcagatttcctctccaagtttgggcaccacaaataatcaatattaaagccgccctataatgcgacgtgtcacatgtatgtttccttcaaaatgaaatgtgactttgtaacaaccttgagagttcagaaatgcatttatatattctgtatgttgtaaagtgattctatatcataaatgtatgctctgaaatataaggaaaaaaaaaaaaaaaaaaannnnnnnnnnnnnnnnnnnnnnnnnnnnnnnnnn

SEQ ID NO: 16535 - DNA, 331 bp, Setaria italica
  Peptide Sequence Number=SeqID_82509
gcggcgcgggctcgctggacggcctcgacgtcgagggcaagatcgtgctctgctaccgcggcggcggcaccggtcggggtcgtaaaggcgaagtggtgaagcgagccggaggcgccggcatgatcctggccaacggggcctccgatggctacagcacgttcgccgacgcgcacgccctcccggcctcgcatgtcagctacgctgccggcgaggccatcaaggagtacatcagcaccacggcgaagccggtggcgaagatcgtcttccggggcaccgtcctcggcgcgaagccggcaccggccatggcttccttctcgtcgcgcgggcccag

SEQ ID NO: 16536 - DNA, 3022 bp, Setaria italica
  Peptide Sequence Number=SeqID_82510
ttttttttgcaaactaatactgtatgcctattccttcaagagaaaagtccatctttctcagtttgatttcgaccatgaaactccaaaaccagaaatcttccctactgtttacaattgaatcgactgagcttactattacttacaagaatgtacaccactataactccaatcactggcttcttgctgtacactccaccgatttaatttcaaccaaagaaaatgtagaaatctgcttcccatggggcaatagacctatcctaaacacacgaccaagatgcaaaactgagaaagaaaataattaccacatatctgaactacgctggagagctcccagaaataggaggaagttccaggtctagcaagtcagaccaattcttcagattcagaaatgggctgacgaagatgcaagagataaaatgctgcttgtcagctcaaccaattgatactttctgccacttagcttgcagcaggcagctacattgcccagaatctatcagggtcgggactaaataatgtatagtcctggatctccaaattcgcaacatgccagttaacgagtccagcttgcagtgacttgataagaaaaagaataacaggtagtatccaccattcattgtcttccctactcttgaagctttttgcgttgtatacatgatgcactgaggacaccgccaaagaagagagccaaaaatacaaagcaccatatatcattgatacaataatgtttataactgaagtaatgttccaaagtgcaaaaatacgggtcacagaggatcgttttggtcctcgactgaaaagtgcattgagaccagcaagaaaaggtgaaagcaaagcaagagggggaatgagcagaacggcaagaaaagctccaacagatatccagtagtactgtacaagcatgagcagggtgatggaaaaatcacccagaagtaaaatacaaatgagcagctgcaatgtttccgcatagcctataggcctggaattttgcaataacaatgaaaaagggaagagatagtctcttttataatctagtgactcgagtgttccctcatttatgattccaccattcactccacctgtcaaccgcttcctagaaacagcatagcttgtgcaaggctgatcctgatttgcctgattgaaatcctgaagtagaactgcaatgttcttcctcgagcgttcaccgaattctgggccatgctcgtgggggtggagactcttgtagaagttctcattcacagctacaacaatacctagctggtaatatccagaagcagtggactggaaccaccctagctccactcgaacaccatgcctctcaagttggggattcccatgactgttgatccaagtaacaacagggctcaaagttgagcggatgcctccttgtcttactgtcctcaattgggcattcaaaccagcgactaatctgttccagatcgcagtcgatacatactggccaagaaggtttgatagcaatgtatcactatgcaggtagtatggagacatgtagcttccatcaccaccaaaaattagacacatgggaaacctcttctgtatggtggatgctacatcaagtcgtttctcatcacccccaagaaagaaatctatgtaagcaaccatcaaatctggagttgaaccaaccttcaagcctttatagagagcccgtgacctgcaagaacgaagacatgaatggtcgtattcggatttaacgtactcttgaagacgatggatttttttcttctgcgccattgcttccaagaccaggcacaaggatacgccagaacagaaagtatactgtgtattgatccttcccaccactcatatgcagccaccaaattgatctcatcaataaatcggttgaaagcatcttcataaacaattctaattattgcatcaggaggcgagtaggggagatgccagggctcccggaaagtattaggtcccatgaagtacattctgtgaacatggctctgtgtttcttctgccctgctagccccaggtacctcagccaaagaaagcaaaaaagggaaagaagaacatccatcattgtggattgcatttgttgcccggtaggtgatatcactctcaccaatcttaattcttagagcactcaagataagtgccaaaagaataattgtaaaagaaaggataattgcaaaagaccatggaccaccaaaagtatacataagttcctcgagtggtgtgtaacagtttggcatcttgtacttatcagatatgcacttatatgggcagggtggctcggtaacaccacctcttacatatacgaagtcagcgcggtttggaagactaaccacagaacaaggactgcacagagatgaattggacccggtaacatttttatatgtaccgactgggcattcggtgcaaaatgttccatatagacccatggggcatttctttccagttatggttccatcttgtccaaaatgtccatcgttgttaccagatcctccacttgatgctactgtaccattgacagaagctatctgaacatattcatctccagtagcaatattcgaccaatggaaatgtattctaccaccaccaccacctccaccaccatatacacctccattgccaccagatgcggataatgatgagtttttctctagcagaagccattgaagaaataatagaattgaccctccagaaccaccaccaactccacctttaaaagtattggagaggttgtccttcttattgtactttaaaaaaacaaagtcgacgttatacagggtgattgaacaaaacatgctgcacttttttagcatgttcatcaaaacaccaacgaatattttgatatcaacaacataaaagctcaacaaatatgcaatatgagatccaaaacgattaaattttctaataaatgctgcaagatgtgtgtccctatgcatcaaataaatctcatcctgatcaattattcacattctccacctagaagatgacaagatgttgaatactcatgaataataaacttggaggcctagagtaatactacgaa

SEQ ID NO: 16537 - DNA, 1261 bp, Setaria italica
  Peptide Sequence Number=SeqID_82511
aggtaggtaggaaggaaggcggaaggtgggtgggagtggaaattgggaagaggtggtggaggcatggggagtagaggtcctgttggtaatatgaggaacaggatgggcccagctggtggtggccgtgggatcatggggaatggtggaatggttgcaccgccaccaccaatgatgccgccgggtggaatgctggggcagggttttgatcctactggctatggcgctatgggaagaatgggtggtggatttggcggtttccctggtggaccgggagctatgccattccctgggctgatgcagccattccccccggttgttgctccacatgttaacccagctttctttggtcggggcgggatgggggctggcggaatgtggcctgatcccaacatgggtgcttggggtggggaggaacaatcaagttatggagatgatgcggcatctgatcagcaacatggggaaggggggagccatgggaaagagaggccaccagagagggagtggtctggtgcaccagagaggaggcgtgagagggagagggatgtgcccccagcacaggagtggccagagaggaggcaccgggatgagcgtgacatggaccgggagaggaatcatgactatgacagaggtagagaaagagatcgtgacagggagagagatcgagaccgagacagggagagggacagagatagggagagggagagggacaggcatagggatgacagagatcgctatggtgattatcacaggcacagagatcgtgattcagaacgcaatgaggactgggacagggggaggtcatctggggtacgcagcaggtcgagggaggccgaccactccaagcgtaggcggatgacacctcagtaatgtagcttggtgagctactaatgtagaggcaacaatgatccagggcagcgtcttatttgcacacaggcatggttccgtaacaactagcatcttcttagtgcttgtggctgtggtgttcttgtgtctccggcgatgtgttgtagcaagaattcgagatgaatgcgtggttggaaccctgttgcgctgtgcgaaggcctacttccctggatattagttgctgcctcatattgtatgcaatattaatgtctgagtttcctgaagacttaatgatctatttgtgtaattcgggaccaatgctttgcattgttgttattgaagaactgagactgtatttctgtcgtagccttgtaggatgatcaaatggcttatgttatggttgtccttcgttacaaaa

SEQ ID NO: 16538 - DNA, 755 bp, Setaria italica
  misc_feature (1)..(79): n is a, c, g, or t
  Peptide Sequence Number=SeqID_82512
nnnnnnnnnnnnnnnnnnnnnnnnnnnnnnnnnnnnnnnnnnnnnnnnnnnnnnnnnnnnnnnnnnnnnnnnnnnnnnnctttaattctcaagtttcaataattccacgagaaccatgttattaggctacaaaggaattactcaagatagatggaggcaagattttggtatttacaacttttgcagctacaatgctgttgttcctttcagcaattcgccatctgatcacttcctctatacgctcagtagtggtgaccagagaggtatctaaatacagcttcagtggtggaaaactgcatacacatcttttcaaaagagacatgtttagtggagatgtacgtagatatgttcacatcattacgtaggtgcacatacgcctagcaaatttcttttcacatttgatcacacagacacacagtatatccttttaccacagttcttcaataatggatcgatgtgaataagatgttctcctttcttccaggcataatcgtcataccttatatactactgatttggaattatcttgagaagctcaatgtcaaatagcagagttttgtctatcaagccttgattccgtagaacaaaatcaagagctctttgtcccgagaatgtcgttggttttggacccaacttgttgtagtcattatctgggtacccaagatccggtggtacaattatcctcctaactcctccgggagccatgcctgatatagcctcctcaaaagctggtatgacctgccctgatccaacct

SEQ ID NO: 16539 - DNA, 657 bp, Setaria italica
  Peptide Sequence Number=SeqID_82513
cgcccagccttctagtttttgctcagcatatgctgtatgtggacctttcacggtctgcaatggcaattcgggcccattattctgtgactgtatggagaccttctctcggaaatcgcctcgagattgggaccttggtgatcgaacaggagggtgtgttagaaatactgccttagattgcataggtagcaacaaaagcaagacaagttcaacagatgtgtttcaccccatatctcgcgttacgttgccctatgacgaacagagaatagaagatgctgccacgcaaactgattgtgcagaagcttgtctcaataactgctcctgcaccgcttattcctatgagaatagtaaatgctctgtctggcacggggaattgctcaatgtcaatctggacgatgggattggtatttcttctcaagatgttctttaccttcgccttgccgcaaccgattttcaaagtttgagcaagaacaacaaaagaaaaccaagagctattattgctgcaagcattgttagttttgggttactaatgctcatgctgttattgttggtttggaggaccagattcaagaggttcaatgcatcgttacacgacattccaggtagcggtggaattatagcctttagatatactgatttagtccatgctactaaaaattt

SEQ ID NO: 16540 - DNA, 270 bp, Setaria italica
  Peptide Sequence Number=SeqID_82514
ctccacaagctccgcaagaccgccacccgccgctgccgcaactgcagcaacccctacagggaccagaaccccggcggcggcaagttcatgtgttcctactgcggccatgtctccaagcgccccgtgctcgaccttaattcagctgggaaggcgcccaccggatggccatgcgctcaggattgtggatactggctagacatgcgctgctcctctggcaataacaactctttcttagcattctcatggcgcttgctgtcgtccttttgctcg

SEQ ID NO: 16541 - DNA, 1365 bp, Setaria italica
  Peptide Sequence Number=SeqID_82515
tttttttttaaaattaaaccaaaactgtgattcatatttacattaccgtatcagctagtaagatgcataatttgatttggtcctgacagttaggtgagtagtacaaacaaaacatatcacaaaggaaaatccaaaaaaactgaagacctctgcggcgatatcctcatcggagcgctctagaaatcaaagccgccgtcgtcgaacccggcgtcgtagccggcatcgtacgccgacgcgtccgacatcatgtccccgatcaggagcccgccgacggcgcctccgagcagcccggccccgagccccatcccgaagttgttcttcttcttctgcggcttcacggcctgctgctggtacccgtacccggcctgcggcgggtaaccgtatccgtacccggcttgcggcggcgggggcgggtagccgtagccggcgggctgctgcggtgggtagccgtacccgtactgcggctgaggagcggcgtagggcgccgcggtgctggggccggcggcagggtaggctgtcactggttcacctgcctttgccggcttgcccgaggctggcgggtagccggattggggcggataagcggttgccggcgcgtcggccttgccggtgggcggataggcggtgggaggtgagtacgcgtcggccttggcggccggcgggtaggcggagggaggcgggtacgcgtcggccttggctgccggcgggtaggcggagggaggcgggtacgcatcggccttgcctgccggcgggtaggcggaggaaggcgggtaggcggcggccggcggaggctgggtgtaggcggactgggcgggggtgggagcgtacccgccggccgattgggtgacctcgccgagcttgtatgagaagttgaggactccctggggcttggcggaggagatcttgcggacctggtaggcgacgaacttggcggggacggggccgtcgggggcgccggagaggagctcggagagcgggatgtggacctcgccgacgtcgcggtcgccgagggcgcgctcggcgcggaggagtacgtggagggatcccgcgccgctggcggggacggtgaagcggagcgtggcgttccaggtggggttccggccgccggtgcggtcggcctggatccgctgccgcgagcgggggtcgccggagagcgacaccacggcgtagacctccatcttggagagcaggttcacctccttgagatccttggccgagatcagcgtcagctccagcgtcctcgtcgccatggttgctgctgagagatcccgcggacttctcggtggagacggggagagactcaagagatggattggttcttcgaaattgatcggtctgtgttgcggatcgcaattcgcaaagacc

SEQ ID NO: 16542 - DNA, 323 bp, Setaria italica
  Peptide Sequence Number=SeqID_82516
tccgcgcgcaccgcgccgcaccggtggaacgacgccgcgccgcagtcctcggcggccgcgtacacgcaccgggagaagcggacgtcgccgccgccgccgccacgaaccacgacgtgctggagccgggtgacctcgaggacgcccgggccgaccacggccaccgtgccgccgccgctgcaacggagcacgccctcgtggacggccgtctcgacgccgtcgatgaccacggtgaactggtgggcggcggctttcggctcgacggccaccattttttcagatgtgaaatttaaaatctttgaaaatttcacctttttttttctgag

SEQ ID NO: 16543 - DNA, 394 bp, Setaria italica
  Peptide Sequence Number=SeqID_82517
cggaaacattctgcacgcggcagctaccagctgcagaaatggctaccacctctcctgccctgctcctgctccagcagctgttcccgttaatgctgctgctgctgcttttcattggggcagcgccagcggccagggcggccgacatgccgatgcctgtcaacgaggaggtgcttgggctggtggtcttcaagtcggcgctctccgacccgaccggcgcgctggccacgtggacggagtccgacgccacgccctgcggctggcggcgcgtcgagtgcgacccggccacctcccgtgtgctccgcctctccctcgacggcctcgcgctctccggccccatgccccgtggcctcgaccgcctccccgcgctccaggagctcaccctcgcccgccacac

SEQ ID NO: 16544 - DNA, 423 bp, Setaria italica
  Peptide Sequence Number=SeqID_82518
agcagcagcggccctgcggcggggccgcctagagttctcccaaggtacgctcgcctcgccgcaatccatcccttctcaaaagggaaaccaaaattccgaaataggagggagtcaggtgcggcgagacgataggaaagcagagggattttcgagcagcaacagtttgcgcgaaggctgcggcggtcggcggtctcggagatgggttccggcatgagcagcttccggcggccgggcgacttcgccttcgatccgatgaagggggtgattcccctgctggggctgcaggtggcgttcgcgtacggtcgcccggactccgccaggccgcccgtcacggcggcgctgctcgccgccaacgtgctggtcttcctccgccccggggcccctccacaggatcctgcccaggatcaacgacgtcgcccttca

SEQ ID NO: 16545 - DNA, 1026 bp, Setaria italica
  Peptide Sequence Number=SeqID_82519
tgtgcatcaacattggagatgactggaattctcggtgttctaatctcagtggcagccagtgcagactccaatcttgaacggctggttgcatgaagctagtatggaacgcaccagcaacagctaggcgaaccgtcattctggccttgaaggacttggctttggcttcaaccatttcaatacctttaacaccaccggaaactgcataattcccagggcagagaaagtttgctatctgaactctttccttttcatctacttcctcattagcagcatcacataactgttgcaccttttctgaatctagaccaatcacactaaccatcgcactattggcagcatctgaagcatcctgcatagcttcacctcttagcttgacaagcttcagtccatcctcaaagctaaaagctccagcaaatgcaagggcagtgtattctcccaagctgagaccgcacgtaacatcaacagagttgatcacatctttgcctccatcgcgtgcacgtagtacctctactgctgcaaggctggtaacatatatagctggctgactgatcaccgttgagtcaagcttttcttttggtccattggtgcaaagatccaacaagtcatatccaagtatgtcatttgcatggttaaacagtttggcagctgctggaacgctctgagcttctgcacccattccaacagtttgggcaccctggccggggaagaggaaagcggtggtgggcttgtagtcggcgaagagcgcgtcggcgcccaccgccacttccgacccgagcgacaccctggccgatgagtacctagatctggacgacagcgccaccctcgcggtcgccggcgcggcaacccggccccggggcccagcgagcggggccggcgcggagggcctgaggatggcgagcgtggaggccatcggggagcccggaacgaggcggaggcggcgaggcgggaagcgctggagcggcaggcgtgaggcgtcgaagagcatgcgagtgcgaagcttttgtaaattgtagagccaggtgggcg

SEQ ID NO: 16546 - DNA, 863 bp, Setaria italica
  Peptide Sequence Number=SeqID_82520
ttttttttttttttttttctctaccaaacggcatgcgcttcatatttaaatactgtcaaactacaatattgtgcagatgatcattgatggtacacaagagtttacaggtgccaattttacatctcgatcaaaattcaaccatggcagtaaacaaacataaccaaaaattacggaactctatgaaaaagtcctacaataacctctgtaggttctctcgcccctgatgtcatgtcaccacccctctgaaatagaacttgataccatcaggagttcgtcagatcctttaccttattatctgatccagaaatcttgaaattctaatatctcaagcaccgatgttctcaatgctagcgcctttgttgatcctcttgagaatacctgctataacctttcctggtccgagttcataacttttctcaagccccttgcccataagagtcttcacagtggtctcccattgtacaggagaggttacctgccgcgccaaaatctgcttgattgtgtcaggatctgaatggggctgtgcatcaacattggagatgactggaattctcggtgttctaatctcagtggcagccagtgcagactccaatcttgaaacggctggttgcatgaagctagtatggaacgcaccagcaacagctaggcgaaccgtcattctggccttgaaggacttggctttggcttcaaccatttcaatacctttaacaccaccggaaactgcataattcccagggcagagaaagtttgctatctgaactctttccttttcatctacttcctcattagcagcatcacataactgttgcaccttttcagatgctagaccaatcagtgcgatggttagtgtgattggtctagat

SEQ ID NO: 16547 - DNA, 430 bp, Setaria italica
  Peptide Sequence Number=SeqID_82521
gcaaggaatcttcaccgtgaaaatatctcaccgggggaaacggacacgcgccaagaacggcgccgcgcgaccgcgacggaacggggggctcggacgccgggggacaggacgcgacgcgggaaaagcgtggatggccgccgggtctgctcggaccgcccgccgcggcactccgcgggcctaggtcgcggtgcgcactgtgtcgtgccgtgctcaccgcggtggagcgcgtgcgcgacaacgcatgagccagccggcagccgcgctctggctgtcaagactcatccaccgtgaaactgacctgatgtaccagcgcgtactgcgagtaccatgtggcgcttggtcacggcggcccgcaatcagtgagcccgggccgtgctgtcctccgctgagcgccctgccggcacgaaataatggtccagaaagaaaggca

SEQ ID NO: 16548 - DNA, 250 bp, Setaria italica
  misc_feature (163)..(250): n is a, c, g, or t
  Peptide Sequence Number=SeqID_82522
ctagcatgtaattagtacttaagtctgcaatgctagagatgtacttgttcatagtacaacacaatgtaatgctcttcgtggcaccattataggacagtttttcctgcacttgtacgaggaattgaagaatagatgtccatctaaagcgcaacgcatcattaannnnnnnnnnnnnnnnnnnnnnnnnnnnnnnnnnnnnnnnnnnnnnnnnnnnnnnnnnnnnnnnnnnnnnnnnnnnnnnnnnnnnnnn

SEQ ID NO: 16549 - DNA, 494 bp, Setaria italica
  Peptide Sequence Number=SeqID_82523
aatcataatcaacagaatctaaatcctctgaaccttgaatggatgataggtgatagatcttgaacgacgaaataaatgtctgccacagagatggtagaatggcagaaattttagcttcaggcaacctgggaaagttctgtacaagctgaagtaaacatttcagcacctccatctgcatgctccagtcatcaggattttgggactgcaatggggaatttaaaatgatggagaattgctctattagtggatcaagcatcgaagtcattaaactggcagtatctctcttataaacaccactcattgatccaagcatggaaatgcatgaatggactattgcaagagcctttgcccggagagaattttcatacagatgaggagatgatattattctatacaatgatgggaatagctctggcaccaacttcggaacacatgtatcatccagatcatcggaacaaaagggctaggcatcttaatgctccacgaactccatt

SEQ ID NO: 16550 - DNA, 1484 bp, Setaria italica
  Peptide Sequence Number=SeqID_82524
tcgtcggacgtcgcccccgcccgcggggagctcgggaccggcgagcggggcgcgcggcagcagccggggaagatggtgtcggtcccggctagggacaaggggcgcgcgccgtcgccggtgaaggctgcgtcgtctgggaagaggtacccatcgccgacgctgaggtcgaactcgcctgcgagggcggccgccgcagggaatgagaacgccctggtgcagccgacgcacgggccgtccctgagccggagctcctcgaggaaggccgagcagtcgcccttccggcgcaaccccatggcggagctcgacgagaacgctctcgacaacaaccaccaccacaacaatggcaacaacggcaagctccaaaagaaatccgccgatgctgccgtcgcattgccgcagaagacagtggagcgggcaaaggatcagatccccagcagccgagctgtgaaggagaaggagattgtggacgaggccgtggcgtcggacacaaaggcttcgtctgcaaggatgaacgcgacccactcggtgagcatcgtggccgagaacgtcaccaatctgaagccggggagccggtcgtcgaggcggtcctcgcgcgacttcgaccacaatggcaactcgtacgcgtccctgctcctcgaggacatccaaaactaccaccagcagagcaccagcgccgccactgccactgccgcgccgaccttcgctctcccggcgtgcgtgtcgaaggcctgctcgatccttgaagccgtcgctgacctcaactcctcttcgtccgagaacaagagcttcgagctggagaggtcggtcaacgacaaggagtcgatcaacgggaggtacggtggcaagggtccaggccccagcctcgtggtcgagtcggaggtcggcgtgaaggacgacctcatggagccgagcatgcacaaatacgtctcggtgcgtgacatccgcggggtcggggagaccgagccgcaggagtccgcggggagcaacagcttcgccggcaacgcctggacgtgctcctgggagcccaattccgtcgactccacggaccggaccaggacggcctcgcagtcatggcagtacaatggtgacgaggtggagcaggtcacggagcagtcatggcagagcaagcagaaggcggcggcgtcgcaggagcccagccgccgtggttcaactagcaatgttcacgttcaacgcgtgcgtggcagtgccgtcagtggccggtccgatggtcgcggtgtttcggcgagctcttcggttgtttaacgatgctactgggcagtttaggagtaatgctctaggtgttaatggtagtttctggtttgaagttctggcaagataggttgctgtttcagagtagtcttccagcgttttggattctttgctagtttggtgatacattgttcagatgtaatcaggcggtgacattggcaatgtatatctctttctttacaaaaaacaaaacaaaacaaaacaaaacaaaaact

SEQ ID NO: 16551 - DNA, 593 bp, Setaria italica
  Peptide Sequence Number=SeqID_82525
aagatatttttatattccgatctgagtcattacacatccacaagtttctcattgaccttgacctatgattcattaatacaccatgacttgcagggacatctatgaaattttacaccacagctcggcaaattcttgttgcattggccactgggacttacacaattacggtataaaaacatcaacgtcacatttcaaaatcaaaattaaagatgacacttgcgcataacaaatcgatcgcgcgcgcgcggcaaaaccagcacaataacttcacctacatacagatcgaacatgaatagcaccgaactatagtgtcggattattcaggtcaccgaggttcatttgccgagtaaaaacacagggggaaaagtaccaactgtatagcatacagcacatcagcgacagatgataagcagccagcaatggatcacatgacggagcacgagttgtcctcggtgacgatattgcaggagctgccccacggcggcggccagaccggcggctgcgttggccaagccggcggtgtcccgtggcagccgcagctgccgtggttggaacagctgcacggcggtggcggtggcggcggcttctggcag

SEQ ID NO: 16552 - DNA, 283 bp, Setaria italica
  Peptide Sequence Number=SeqID_82526
accaggtggcgggtggagctttgctgtcgtgcgtcagcggcagcctcataaacctttagcagctcgatctcctccctctggtctctgcttctccttgcttccgagcaagccgtcctgtatccatcatcttcatcttgctagctgcttccgagttcagtccaatggcattcatggcggctgcagctgctgttccttcctcctcctccgcctcaaccatcttgccgagccgaccccaaacagtcccttccaattccatgagcacgccgccgcacgccgctcatcc

SEQ ID NO: 16553 - DNA, 1057 bp, Setaria italica
  Peptide Sequence Number=SeqID_82527
tacgaacaattacccattctattatgcatgacacaattcatcgatcaaactcagtcaggattctaagatacactaaaagccatccatcgtttcaacatgagctcaactgtaactgttatactgtttcagtgcacaaaatgctgcaactagtaccaagcgcatgggtacagtacatggtttacaagatagtgaaagggcaaccctcatggaatcacgctaaaaatgccggggtggctgaaacaacatccagcatcaacctaggttgccccagagttactcggtgcaaggaatgaggaacttgaggaaaggttcagccttgggagcaagggatctcacgtcctcaaatgtggccatttcaaagtcctcgtactggaaaccaggggcacaggtgcagccaaccagggagtagtgctgctcaggatccctcttccgagactttacaagaacactgccatcggaagcaaacgactcaacatccagcgtagggaaggaaccaaaccacacgttcggtggcacggtatactgggggcgctggccagcttcgaggtgcgggccgatgacagtgaggtcaatgtggccatcatcatgcagctcaaagaccgtgagaggctctcccttgtagaagtgccaggtttcagcacagggaatgcggtggagacgtgaaacactccctgcaggaagcaagaagtagattgcagtgctcacagcacggttgaccttatactggggcgggagctgggaggtggagagcgtgatggagccgtcgcggaaggtctcgttgtagaagccgccctccgggtgcggcttcagatccagcagcgccgccacctccgtcgccgtcatctcctccgaggccatctcctccccccgccttctcttcgcgcccgcctgcgggcttcctcgtcgccggaaccctcgcttagatccggtcggccggcgccgtgccctgctcgccgccggggctctcggattttaaggggaggatttggctgattggttcgttgaattccgagcagcgcagcaggttctgccgtgtttgtttaccccggctggaacg

SEQ ID NO: 16554 - DNA, 291 bp, Setaria italica
  Peptide Sequence Number=SeqID_82528
tcctaccatgagcactgagctactatgagaactgaaaaatagaacttcagcagcagcaagtaaacattcatacatgacggtagtggggaggtggataattcacatgcactgcagcagaccatccctaacaccagttgttggagcatattggctcccagttcagggagtaacaagattggaaatcatgcttacaacagcagggcacctgcaaatggaatcatgttcagagatttaggggcatcagtcaatgattaagagacattgttttttcaagcacacagattaaaggat

SEQ ID NO: 16555 - DNA, 702 bp, Setaria italica
  Peptide Sequence Number=SeqID_82529
tttttttttttttttttaaacaaaaaaaataagaaacaaaaatgaacagatttggtattgcaaaaaattaaacggcagagatgtcaacagatacacgatggagaacaatcttgaccacaaagaaatgataatacagtagggtattcagatcatcaatttccatgagcactgagctactatgagaactgaaaaatagaacttcagcagcagcaagtaaacattcatacatgacggtagtggggaggtggataattcacatgcactgcagcagaccatccctaacaccagttgttggagcatattggctcccagttcagggagtaacaagattggaaatcatgcttacaacagcagggcacctgtggtgcgcgtccttatcctacttgtcaaggaatgattcgacagtcttcaaccatcggagcagctccatcttctccttgttcgccatgtagtcgtgcaagaattcagcgagctccccgtccacctccctctccttcaagaacctagtcaccgcttccctctccccagcacccagcttctcgaaattgcgtccaccacgcgcaccatcactgctggcggcgccgccgccagccctgagggtgagaacgtggcggacggcgagctcgtcgggccaggcggagcagatgaagccgaggacgcggtcggcccgggtgacctcgacgaatgaggctgagatggagg

SEQ ID NO: 16556 - DNA, 373 bp, Setaria italica
  Peptide Sequence Number=SeqID_82530
gttcgtccgaagcactcggcgcagatcttgaagtcgcattcgcaggggaggatgtcctcgccgcgctcgtcgctcatgaccttggcgtcgcatccgttgatggcgcaggaggatcccttggcgccggccatctgcgggtggctggcctcggactcgatgaccttgtccatgaggtgggcgcgcgtgacgctgttgaagccgccggtgaagagggagttggagacgtactgctcctcgacgcgggcggagatggcgggatccatgggctggttgtcgggggtggccgggatgtggacgtggtagctgaggaactcctggtgctcgggggagaagtcaccgatgccgccgacctcgctgtcgaggtcgtcgcggg

SEQ ID NO: 16557 - DNA, 996 bp, Setaria italica
  Peptide Sequence Number=SeqID_82531
agacgcagcgcgcggcgaggccggccgaacatggacaccgactccaccgtcgtaggatccccttggccaatgtcccggtccactacccggcgcagcctcttccggtcgcccaccacctggtggatccccacgatgaggttctgctcctggggcccctggctcaggtcgatggcccgccgccccgtcagcagctcaagcagcacgacgccgaacgcgtacacgtcgctctgcagcgtcagcttccccgtcagcgcgtattcggggtcgaagtagccgaacgtgcccaggaccctggtggtcgtgtgcaggtcctggtcctgctgcatcagcttggcgagcccgaagtccgagatcttggcctcgaagtgctcggtgaggaggatgttgctggacttgaagtcccggtggacgacggggacgccgacggccgtgctggagtgcaggtacgccagcgccctcgccgcgcccagcgcgatccgcagccgcagcggccagtccatcttcacctccccaatgccgttgaggatgtcctggaggttgcctttgggcatgaactcgtagaccacgaaccggtgcttcccgtcggcgcagtagccgatcagcgtcaccaggttggggtggtctagcctgctcaggatgtcgatctctacccgaaactcgcgctcgccgtcggcctgcttggaggtgggcaggtccatcttcttgatcgcaacgatctggccatccttgagcacgcctctgtaaacccggccgaagccgcccttgccgatgaggttccggtcgctgaacatgttggtggcctcctccatctccttgagcgtgaacaccatcgtgcagttgcgcttcttcggtggcgggctctgctccttcgcctgccacagctcggccggcttgtacacccatggatttagctgatcaagtgatctgcttctcctcctcttgttccaggatgagactatgttgaacatcttgaaccctcccttttccatttctacg

SEQ ID NO: 16558 - DNA, 894 bp, Setaria italica
  Peptide Sequence Number=SeqID_82532
ttttttttttagacaacaactaatccttggctccttgcacacgacaacatacaaagtgagatctctctttgatctcatagaatttgcggtcccaaacagagtccttattgttaggtatccattttttctttctaaagtaaaaaaaaagcattcctcttttgtagaccgaagtgcaatcttatcgcaatgagaaattactataaccctgtacaagtatcacgatcatcataggatcaaccctcttcgatttttgtttcaatcaatcggacaaaagctgcagacctgcaattccaatccaccagcagccgcgccctctgtctcaaaacccacgcgtgttctgcgtcccctccagagtccagacccgagcgagagtgatcatatcatatcttcatgttggcgtacatgatgaactggagctccttgacgcagtccggcatggacggccgggcggcgctgtcgaagcagacgcagcgcgcggcgaggccggcgaacatggacaccgactccaccgtgtaggatcccttggccatgtcccggtccactacccggcgcagcctcttccggtcgcccaccacctggtggatccccacgatgaggttctgctcctggggcccctggctcaggtcgatggcccgccgccccgtcagcagctcaagcagcacgacgccgaacgcgtacacgtcgctctgcagcgtcagcttccccgtcagcgcgtattcggggtcgaagtagccgaacgtgcccaggaccctggtggtcgtgtgcaggtcctggtcctgctgcatcagcttggcgagcccgaagtccgagatcttggcctgcgtcggtcagcgacgctagaaggaaggaatagttagactaggaacaaactaaactaacaaacaaactaagaaa

SEQ ID NO: 16559 - DNA, 614 bp, Setaria italica
  misc_feature (598)..(598): n is a, c, g, or t
  misc_feature (609)..(614): n is a, c, g, or t
  Peptide Sequence Number=SeqID_82533
aactaaccgggtggggctcttccacccgacgacggcgcgcgggtggaaggccatggaccccatcttcttcttcatgaacccgaggcccgtgtacgaggtgacgttcctgaaccagctcccggcggaggcgacgtgcgcggcggggaagagccccgtggacgtggccaactacgtgcagcggatactcgccgccacgctggggttcgagtgcaccagcctcacgcgcaaggacaagtatagggtgctcgccggcaacgacggcatcgtcaacgccgccaagccggcggcgcccgggaaggcggcgtggcagggccggatcaaggaggtgctcgggttcctgctccactaaccacactagctgcagagagagacgccacggagctctggtcaaatctccgctcaccaatttgattgagttgtacttatacatgtacctagtcacgtaaagaatctactcatagtagaatacagttttagtttttcttacacaaaataatgtatttttcttttcattttactttaatctgtaaatggtttggcaaatttttactggttgtaatcaaagatcagcgttgctccctaaccaaaaaaaaaaaanaaaaaaaaacnnnnnn

SEQ ID NO: 16560 - DNA, 251 bp, Setaria italica
  Peptide Sequence Number=SeqID_82534
cagacatgccattgctggatcagcattcggtgaaaccaacttgcagattgtgaaatttactagaacattttaatttgacgatcgaacaactcctatacctgctccactccgatgaacatcttggaatctcatctcatctaacaatccaaacagaaattttacaagtttactagctagctacttgatccttttactttggttgatatctttcttcagtccactcgttcctccatcgcgctagctagtggtgt

SEQ ID NO: 16561 - DNA, 676 bp, Setaria italica
  Peptide Sequence Number=SeqID_82535
cataacatcaccgagcttgtaatgggagcagctgcagaccaacacttctcaaagtatggatcaaagcaaattaatctagtgtttctcatcaacctgttttctaaaattgggagcatacataagatgaatatgcatctcccttctgtgattctgaatgattaatgagagtaacagcatactattgaactgaagtacctgaaatactcaaagatttcttttttgttgctctccttccaagaaatgtgttactccgtagaagctagcatgcttagagcaagaagtttcttaagagtatacctcatgatcgcacattctaacagatggtctgtaattgtagagaaatgaacacaccaaagtcaaagacagcactcaagcttatggagacagcagttccatcatgcaagatatggtttacttgtaaagggcatttgatatgtaccagggaagcaactgaaagccttcctgcaatacttccatcacctgcaaaaaatgcaccaatggcaccagcatacagcatatcaagccaaatgggatcaatggcacccgctgagttggaatatgaagtatcaagctccaaaggatacacttcaagctcattggttgcaacagaaatgacagattgggattatcttttcggaggtgatcatcctgaatacatatggaatgataatatgtc

SEQ ID NO: 16562 - DNA, 466 bp, Setaria italica
  Peptide Sequence Number=SeqID_82536
gtccggaagaatcatattttgaagtttgacgagcatcttcccaagatcagtgtaatctgtacagcaagaggcttccagagcaaattctttccaagttgtggctttccgagcattatcaattacagcctcaatatgaagctcatcacttaaatttagcattgaaatggcaagtttctgcatgatgtatcgtcgaggaacgcccaaatccttcaccagctttctccatttacgatgagttccattgacaagtggtgaaggacattcctctatcggaagaacaagtagcatgtctacccaagaataagatcttgtccgtgggaagaaaacaacaatatagctcttcctgtcatgtgttggttttgcctttacagtagttaaaggatagtctactctacagcatcgaattcctgtttgccattttcctctccacttcacccaaagtgctacagcatgatcttcatctcca

SEQ ID NO: 16563 - DNA, 1148 bp, Setaria italica
  Peptide Sequence Number=SeqID_82537
aataggttcattgttcattgtacctctaatactcttaacattatcaataacacttctgagttaaacatactatataagatacaaacgtcatgcaaactgtggcagcagcgagatggcacatggcaccataaccattaaaagggacaaagataagaaacgtacatgggacatgtcacccgttctaggaaatattcggtacagaatctctcatctcgccaatcaacacaaggacgaagccagctgatgcccaaaactgccttgctgttgtcccctcgacaccgattcgaggaaaccggtgggaacctgtactcctggagtgactgctagctgtgcactttgaagcaactcagcaatgggaacaacttaagcaggtcatcccggctcctcctcttgataccgatgcagccatttacatcaagtgttgtgaggctgtgcgagcaagattttgataaagcctccaggcaggcatcagttaccccaactattccaaacaaacttagcagtttgagggaccggcacccttgcgcaatagctacaacaccagcatcagtaacacgtacacaccaagtcaaattgaggtatgttagacctccgcatcttgatatgtatactagaccatcatcagttagattctgagcaccacataggtctagaaatgtaagattacttaacaatcctatgtccttataaatcttgtcagtaaaactcgaaagggcataaaggtttaagctttcaaccaaagaacatttctgaagcacttctttaagcccatcatctgtcaacttaacacacctggttatgttcaatttctttagtccttggtaactattagcaattaaccgcattcctttatctgagatattcttacaaccactcaagttgaggtccactatctgcctgcagtactttgtaatgtgcccaatgcttgagtctgtcagtcccacaatccaatagattgaaaggccgtgaaggttaggacaaagactggtaatggcttcaattcctttgtcagagattttctgacatgcgttcaggttcaggaattctaaattttccagtgagataccactcatttcttttagatgaacaaaatgccggtcctcgatatcttgtgcaaattcaaggttcagtagtttgagatggcgata

SEQ ID NO: 16564 - DNA, 312 bp, Setaria italica
  Peptide Sequence Number=SeqID_82538
tcactttatgagcatgatgtatattttgcttatggtagtttattatcagtttgccttgagcgggttattacacagtttaacttatgtattgtactagcttgtcctagctgatacattagtttgataaattgacactcagcacaaggaaaagaaatcaagttagtactaacaaaaaataatattgattgatttgtgatcattaacttgccacctagacaaatgctcagtctgtagttggtgatttcatattctagaagatgtcacccttttttgaagtatgtatacatatacgactttcagtttgcaagggga

SEQ ID NO: 16565 - DNA, 436 bp, Setaria italica
  Peptide Sequence Number=SeqID_82539
cattgagtgttgcagcaaactccaagaaggaaatagcttcagcttgaagaatgttgacgtcagtttcattgaagcttttcgaatcagttgatttgggagcatcaataagttgatcattccatgtctcatgaatgatctgatgaatatagttcacagatgacccaaagtagaaaaatttctctgagaatatcagatcccagagaccctcctctcgaaaagatttaagtagagctggtgctgaaatgagaaccttcctaaacgtgcaaagcatgtaatgctgcaaagtgtttgctaaaatccttatatggttaggcaattcagtttcactagcacaagctttgatgcacgggaaaactgtcgaaagaacctttataatccaccttgcacattgttcccagtatgccaatgagatggatagcgaaatttggctaacatc

SEQ ID NO: 16566 - DNA, 265 bp, Setaria italica
  Peptide Sequence Number=SeqID_82540
cgcctgccattcgcgcatttttttttttccgtcgcgcgccattcctttccccgagcgcccgagcggcggcggcagctcctttcccgagcggtggaggcagcggcggcggctgctcctttccagggcggcagaacaccacgcagggctcgcaacctttcccgagcggtggaggcagcggcggcggctgctcctttccagggcggcagaacaccacgcagggctcgcaagctcgctgacgcggagctcctccaccgtcccgccgccg

SEQ ID NO: 16567 - DNA, 2055 bp, Setaria italica
  Peptide Sequence Number=SeqID_82541
cgcgctcggcccggagttccggcgcgcgcgcaccaccaggaccatctccaagcgcacccgtggcggcggcggcggcgcgggagcccaggaccgctggcgtgcgtcctcggccgccgcggggcgctgcgtcgacaagctgctccgtctggcgcctgaagaccagcgagcgctcagtgcggcgctttcgtcctttcggggcgagctagtcgctcccgaggactactgccaggtcctccgggagcttggcgacagggataaatcggcataccgtgcctatgaggtgttttatgctgcgttgcctcttgttggtggtggtgctgttgagaaaggcaaactgctgactgcagctatcggtgcgcttggcaagattggtcgacctgacctggcaaggagggcttttgattctggcattgctgggggctatggcaacacggtgtttgcgcactctgcactcatctcagcttatgcgaggagtgggctcgcaacggaggccatgggggtgctcgagtcgatgaaaggtgcaggcttgcggcctactacggtgtcgtacaatgcagttattgatgcatgtggaaaagggggtgttgaccttaggctcacactggggtatttccgtcagatgctgcaggatgggctctgtccagatcgcaagacgtttaattcacttcttgctgcatgtagccgggctggccatttggaagatgctcgtgcagtcttcgatgaaatgatccatcttggcagtggtcgtgacatttacacttacaacacatttgtcgatgcaatttgcaagtgtggcaacatggagctagctatgcaggttgtcttggatatggaagcaaaaaatgtcaagccaaatgttgttacatatagtacgcttatggatggcttctcaaaactggagaaatatgatgaggcactcaagttgcgcggaaagatgaagtctttgggaattcaactggaccgagtttgctacaacaccttgctggcgatatatgtgaagacagggaagtatgatgaaattgctactgtgtgtgaagagatggagagtttgggtattgagaaagacactgttacatacaattccttgattaatggatatggaaagcaaggacgcttggacatggttgctttgcttgttcaagatatgcgagcacaaggtgtagctcctagtgtgctgacatactcaactttgatagatatctattcaaaggcaggaatgcatggagatgcatttaatgtctacttggattttaaggagtctggcctaaaggcagatgttgttctgttcagctcttttattgatacattagccaagaatggcttggtagaatgtgctttgtctttgcttgatgagatgatgaagatgggtatcaagccaaatgttgtaacctacaacacaattatcgatgcatttggcaagtctaagattcttcctgaggaggatcctgagattggtgacctgggaattgttggcgtttatggtggccagattgtaagggccgctaatccagcgaccagagggtggcgctctgctgttgatgctcggatgaggaggtcccaggaattatttttcattctggaattatttcagaagatggtccagcagggtgtacgaccaaatgttgtaacgttttctgcgatcctgaatgcttgcagtcgctgtaacagttttgaagatgcagcccttttactggaacagcttcgcttgttcgataactttgtatatggggttgcgtatgggcttctgatgggccatcgagaagtttggtctcaagcacggtccctctttaatcagttgggacgcatggattctccaacatcttcagccttctacaatgctcttactgatgtgctatggcattttggccagagacaaggagctcagcaagttgtgcttgaaggggtaaaccgtcgtgtttgggagaacacatggagcgagttctgcctggacctgcaccttatgtcatgtggtgcagctcaagcaatggttcatgcatggctcctgaatgttgcgctctattgtctttgaaggacgagctatgcctgaattttaag

SEQ ID NO: 16568 - DNA, 840 bp, Setaria italica
  Peptide Sequence Number=SeqID_82542
acctttgatgaaaaaagagttgtaaggcaggctgccaattttacaacattacatacctggctaacaaaagcctaaaacactgggatttgatagagtgagctatttgcctacttccctcaacctatgatacactacaatcttctgaacgaaggtgaataaaaagcttgcaacagacccaacgctaacagggatgatgagatgagatttaggggaggctacaactgcaacgcctgtaatctcggtaccagattgggcggatttgcatgctgtactcgctcattgcggaggagaaggatgttaatggtgccagactctctcaaccaggcagccaccacagcactgggtgacacaaaccttccaatgttgaagcgttcgacctgaaacggtgctccaattgaaaggagcaatgcttcaatgacacgccggagagtgcttgagccagctatcttgctatgctttccccatcctgtcagaatgcttaaaaattcaggcatagctcgtccttcaaagacaatagagcgcacattcaggagccatgcatgaaccattgcttgagctgcaccacatgacataaggtgcaggtccaggcagaactcgctccatgtgttctcccaaacacgacggtttaccccttcaagcacaacttgctgagctccttgtctctggccaaaatgccatagcacatcagtaagagcattgtagaaggctgaagatgttggagaatccatgcgtcccaactgattaaagagggaccgtgcttgagaccaaacttctcgatggcccatcagaagcccatacgcaaccccatatacaaagttatcgaacaagcgaagctgttcc

SEQ ID NO: 16569 - DNA, 254 bp, Setaria italica
  Peptide Sequence Number=SeqID_82543
aattttgcggtgccgatgtaaccaatatctgagctgcccagtgtagtgtagctgttgtagggaaacactgtgcatatagagaagtatggctctgttaactaatggagcacgaagcagttcacatgaagaaaagtaaagaacatggcgattctttgtattgtaatcatgtggtgctacgaactcaacactgcaaatgtgtcctggctgatgtgatcgatatgtgtactagaagaattgatgcctgttgtatttat

SEQ ID NO: 16570 - DNA, 268 bp, Setaria italica
  Peptide Sequence Number=SeqID_82544
gatattgatccctgaagcatattgaaggaacaaatgtgagtatgtgctgtatttacacaacaaacaagtatagacatgatgaatacaatagtaaccatatacttctcaaaaattaaggaaataaattattaaaatgataattgtttattgtaaaaagtagctgtactggtctttttcactagtcttgaaagtatggtagtaccaaaaacatgcattttcaaactccagttctcaggagaaatatttaaaattatcattgaatccagac

SEQ ID NO: 16571 - DNA, 734 bp, Setaria italica
  Peptide Sequence Number=SeqID_82545
ttttttttttaagacaaaaacctgcacttactcatgccaaaattacgagtacgacggcgatcaaggaaaggaatctagctaggtgcaacaaccaaagtacagatgcggatcgcagtgtcaagaactcgagaacgaatccgaatggagccgtggaggtgacactgaaaccagggctactagtacaggtcggcctcccggtgcgtctggatgacgcagtcggaggtcgggtacgcgacgcaggtgagcgcgtacccggcgccgacctgcgcgtcgtcgaggaacgactggtccgactggtcgacggagccctccaggaccttgccggcgcaggtggagcacgcgccggcgcggcaggagtagggcagctcgacgccggcgtcctcggccgcgtccaggatgtagctgtcctccggcacgtcgatcacgctctcctggccctcgggaccgatgagcttcaccttgtagacggcggcgacgcggacgtcttgcctcgctctgaagcccggcaacggcggcgtgctccttgggaagctcgcgttcggtggccgttttgtgctgttgttcagcagacgcgcgttgttctgtgcgatggccaggaagttgcagagaaccggagatgcgaaagtcgccatctttgcgtgttcgagacctcgcaggtgcgcgggcgctgggatggacaccgtctccgtctctggggcaatcgagacgacgagggcgagggatgggtgcggaag

SEQ ID NO: 16572 - DNA, 364 bp, Setaria italica
  Peptide Sequence Number=SeqID_82546
acgtgcttcggagggttccggcgctacggcaagtacctcaacttctcggaccccgtcgtgcaggggagcttcagcccccgcgcgtgcgcctggtcctacggcgtcaacgtcttcgacctccaggcctggcgccgggagcaatgcaccgaccggttccaccgcttcatggaaatgaatgagaacgggacgctctgggatccggcgtctgtcctgccggtcgggctcatgacattctacggcaaaacgaagccgctggacaagtcatggcacgtgatggggctcggctacaacccgcacatcagacccgaggacatcagcggagctgccgtgatacacttcaacgggaacatgaagcctattggtc

SEQ ID NO: 16573 - DNA, 464 bp, Setaria italica
  Peptide Sequence Number=SeqID_82547
acggactaccgaagaatcgccgccgcggccgcggccgcggccaccgccaccgccgtgggggagaagcggccgtcacccgagccggctgcgagctccgactcttcttccccttcgtcgtcctcctcgtccgggactcccaagcggaggaagagaggagaggccgcggccgcgaccatggccatggccctcgtgccgcccccgccggcgcaggctcccgtccagctgacactcccggcccatccgtggttcgccgcctgcccggtccagcagctagtgagctaaatgactgtgatgtcgtagctgattgatggattgagccgagtgtgagaacaaagcaaaaatgaggagcgcatcgccaatggcagtgctcgaagaaatgactgtgatgagctcgacgaaatcgttgcatcgacatgaggactcctgatcgcatggagtccgtttccggtttccgtttcccttac

SEQ ID NO: 16574 - DNA, 937 bp, Setaria italica
  misc_feature (1)..(17): n is a, c, g, or t
  Peptide Sequence Number=SeqID_82548
nnnnnnnnnnnnnnnnnaaagcagaagtagagtagtgattttaaaaaatgaaatgatgaaaacgcaccatcataggcagataatgtagtgaatatatcacaacttagcgagcaaaattcgacatttttcatgattgtttgcaatcgtggcctaaacaccaggttctgcattgaaactattgattttgatttctagaatacatagtaggtgtgacaaatattcaagcaagatacccagaatctgatacatgaaaacagtcagctatccaacaggatgcatcctcaggcagtatcggtcacagggtactcatagaccacatccttcccgcaaagcctgcggtacacagcactgaatgtctccagcttgtactcagtgttgttgcgctcctttgggtccaagaagatcttgatgatctttgatccatcaaggtgatatctgacacgttttcccacaatctcagccgggtagacaacatcctccaagataccatcatgaacagcagttagagttctggtgcgcgggcgaacaacagcagaacccttcttgggtggcctcacgatccgccttgttgcaacaatcaccacatccttgccgctgaacttcttctccagctccctgacgagcctgacgtggatcttcttgaaggccttgcgcagcctgtagggcacgtggatcaccaccgccttcctactcccggccacgtccatctggaaggcagaattgatgtagaggtccctgaggtcgctcttgagctcctggttcgcattctccaggtcgaagaacgcctgcgccacggaggtctcgaactcagagggctcaaggcccttgtccttctggatcttcttcctcgcggtgtacatcctgcctcgcttgcctgaccttcgccggagctcagcgctaggagcgcggttggtcgaagggcggcggcggcggcgct

SEQ ID NO: 16575 - DNA, 1347 bp, Setaria italica
  Peptide Sequence Number=SeqID_82549
cgtcggctcgaggggaagcgagccacaaaccgagcggacgccatggatcgcgagtggggctcgaagcccggcagcggcggcgccgcctccgcccagaatgaggccatcgaccggcgggagcgcctccgccgcctcgccctcgagaccatcgacctcgccaaggacccctacttcatgcgcaaccacctcggcagctatgagtgcaagctttgcctgacgctgcacaacaacgaggggaactacctggcgcacacgcaggggaagcggcaccagaccaatctcgccaagcgcgccgcccgcgaggccaaggacgcgcccgcgcagccccagcccaacaagcgcaagctcgcgccccgcaagtctgttaagatcgggagacctggttatagagtaaccaagcaatatgatcctgacaccaagcagcactcgtttctttttgagatcggttaccctgaaatcgaagataataccaagccaagacaccgtttcatgtcgtcatatgaacagaaagtcgaaacttgggacaagaggtatcaatacctactttttgcagcagagccctatgaaatcattggattcaagataccaagcacagagattgacaaatcagcagataaattcttctcttattgggatcctgacaagaaggagtacctgctgcaactgtacttcaagccaagaccgccggaagttaacaagccaccaccggctcctcctgggactttgcctaatgggactggaggtcctggtgctccaccaccaaggccaccgggacaagctccaccacccccgccacaagtcccaccgcctcctcatgcaccccctcctgcacctatgggaatgcccccaaggatccctccaccaccaattggcggtgctcaacctcccccacctccgccacctgcaaatggtcctccacgtccaatgattccgccgccacctaacttcactcctggagcaccaccaccgcgccctccaatgcaaggttttcctgggcagcagcagtagttgacctgagttccaagaactggtgtcagtctgcaagagtttagcgcctgcctagattgccttattgtgtatttcaactcaaaactttgtatgttgccatatgcgctgcgtggttctctgagactataccgatagcctatcagtgataggtttgaatttttgtatgcgcttttaagctaagtacctgttatctgaaatagaatgtgctcatgtactctatttcttggatctcatctaatgttgtgcactgggcctttctggatgagcagaatgcacttggcctttttagagttctgtaaagctttagttgtctaggtcttggttcgttattagtctaaa

SEQ ID NO: 16576 - DNA, 365 bp, Setaria italica
  Peptide Sequence Number=SeqID_82550
cggcggcggcagcggcgcctcttcgttgtcggcgccgtccttgtcaggctcgccgaactcctcaaggtccaaaaggtcctcgacagagaacccgtctttctcaacaagcgccccggcggcggctgcggccgccgcgtcctccgccgtctcctccggagcgaagctattattacacttcagcgcgtccgtcctcccgtcatccagggggctatggtggtgcgcgagggaaggcatggcgggcccgcgcaggagaacggggacggaggaaccagccggtggtgctgtggcggcgtcggaggcgtggaggaaaggcggggaggaggaggcggagacgtagggtgcaaagaaggaagggatgagcgttt

SEQ ID NO: 16577 - DNA, 755 bp, Setaria italica
  Peptide Sequence Number=SeqID_82551
ggcacccgcccgctgctgcgccagcgggggccggcgccgccagcgacgccaccagcgccgcgggtgggtgcggctgcggcggcagctcggagagcgagtcgtccatgatgcgggagacccactccaactcctcgacgtcatgcgccggaaggtcaaccatctccggcggcggcggcgggagctcgtacgtcacgaccgacaacggctgggagtccccgttcgacttctcctcggccgccgcggccggcggcggcggcagcggcgcctcttcgttgtcggcgccgtccttgtcaggctcgccgaactcctcaaggtccaaaaggtcctcgacagagaacccgtctttctcaacaagcgccccggcggcggctgcggccgccgcgtcctccgccgtctcctccggagcgaagctattattacacttcagcgcgtccgtcctcccgtcatccttcaccgccgggccggaaaaacacgcatacgcacacatcaaaaccacaaattccgagtaccagaacaaccaagcagcacggttcaacaagcgtttccccccctcttttattctcaaaaaaggaaacaacaaaaaccacccagagaatctttctccgcctccctcaatcaatcatccaccgcaaccagcggcacccttccttaccagggggctatggtggtgcgcgagggaaggcatggcgggcccgcgcaggagaacggggacggaggaaccagccggtggtgctgtggcggcgtcggaggcgtgg

SEQ ID NO: 16578 - DNA, 557 bp, Setaria italica
  Peptide Sequence Number=SeqID_82552
ttgcattactaaacccatcatcatcctttctggtggctgttttctttccaacacattaacaacttcctgcagtatattttctctcctggaaatggtaggagaacctgcaggcccgctcttaattttgttttctcgagtttcctctacactgccagaaaacaaaggtaatgcagccatctctagagaataactgataaaatccttcgggaaattaagtttcctagagcactctctcaagtaccctaggttctcccaaagcaaagtggtccaaccctcctggcggtacagaccagcaacaccatcaaaaagttgttttgcgttgctaaagtccccagctgcataatattctatggccattccacgactacaggaagaagccattcttgtagcacctaggctctgaaatgattcataagcttttctgaataatgctattatctcataagaatcttgaaacctttctgcttctgacaaagcatagctggtgtattcagtatcagaaaggggtagcacactaactgtatctccttgctcaaacaagcgcacatactggccaa

SEQ ID NO: 16579 - DNA, 2114 bp, Setaria italica
  Peptide Sequence Number=SeqID_82553
tgccccccatctctattcctcaaatagaccacccttccattgtctccccaatgggttcttgcacagcagacccaaggagcagcgttatcaataatcctgctttaattgcacggttcaatggatcgtcagctgtgaattcgtacaccagtcttagtgctgtgacgcagagcattggaacttcgactccaaagctgaaaaatgtggataatttagatggccgctatcctggttttccacttgatccattttctgggtcccactcacgtcatcaggtagcaatttcaagtgacctggagcaaaagaactcccagaagtttgaacattcagatcgacagtcccatggcaagggcatgaagaactttaatttgaatgacgcactgtcagattgtcaggaagatagtcttgtagaacaagaagggagatgtgctggcagttttcagcatagtaaagacgggggatcagtattcgggatctcttggctcaaaaataaaggtagatgtgctgacccgatagctttggagaagccagggaagttgtttggccattcatttggaactgcagtggagctgaaaaatactaaagaccagaacgaacttggccaaactattcggaatttatcagattctgcctcaacatccctaggctgtgggattaagaaagatgggccttcagaagacattatcgctagaactctgcttgtttgtaataaggcccaagagactgctgcacgtttacctctttcatgccagaagcatgtgcctaaagatggacaggctgctgaaggagtcatcaagaaaagtggcgcccccatcaggaatttcatcgatctgaatgatgatgtaccaaacgaagacaattctgaggaatcggtagtgtcacatgaatgtcaggtggcccctttacagaacaaccagcctaaacgtgcgttcgtgattgacttggaggtgccagcttgtgaagacggtgctgcatggacttttgatcaagaatgcgcacatcctggtaaacttgacgcataccaggagattgacagcacatctgttacagccgctatggcagcagctgagaacattgttgcattgtcaatggatataccaacagctgctgaggtgtctgatgatatgttgcagtggtttgcagatctcgctgtatcaaacatcaatgaccttgctgaacaagtggaactccaagcttgcaccaatgataccagtgatgatgagttggattcatttgagtccttgacactgaagctggaagaaaccaagattgatgaatactggagcaggccactggaacctgcaatcacaaccgatgaacaagcagtttcaactgctcacctcctcaccaagcctagaaggggccagcaaaggaggcgacggcaaaagcgggactttcagaaagatatcttgcctggcctttcgtcactttcccggcctgaaatcatagaggatgttcagctgcttgaggggttagtccaggcttctggtggatcctgggagtcgagtctaactaggcgaggacgttatggtgggcggacaagaggtaggaaacctcggaaaactgtagtaactgtaaccgtagaagaggaggaggttgatgtcagactcggaccccctaaacctgctggcactggagacttggaagccgatgaaaggggtatgattggatggggaagaacaacaaggcggtgtcgcagaaccagatgtccgtcaggcaacaacatcgcagctgcatcttgagaaaggtcttgccagcaagcattggacagcattctcaggtattgggcggcacccgtttgttatagagactaagatggatgatggactggtataaggtgatcagtcatgagtgtacatactttgtcggcctattggcctcacccccaaactttcatgcttttgggtcgaaacatggtgtacgttcctataataaattccgtaaattagttgataagacatttctgagacagcattgtattaagctgttccaggttattaggtccggtataattcattgtgacaaaactgaaatgcctgtaagccaccttgatctctgaagaatagctcatcgcatgtgcaacaaagggtatgaaggagggtccgagtctgtaaaaa

SEQ ID NO: 16580 - DNA, 283 bp, Setaria italica
  Peptide Sequence Number=SeqID_82554
gtcgtgtcttttttttttggttaaatttcatcagatctgatatataattaataaagcattcgaacctaatatggctatgaatcatggtgttcttgcaccactcattattctgttgtgcatatactatctttttttctgtatacctacctaccagcatttgcaacgaatacaatatactgtagtaacatccactaagatcagctttgcaccgacttaattgcccaattagcagctaacaatcgatcaaccaaccatatctcttcagttcagcccgctcgtgaaa

SEQ ID NO: 16581 - DNA, 904 bp, Setaria italica
  Peptide Sequence Number=SeqID_82555
gaggggcaagagagggaaagcgcaaagggacggaccctcgcaacatcgaagctagtccaaactagtgggaggttgtgtgcagggaggaagacgacgaccaagcttgacgaagctgctgcttctgctgctacgtacccattgatcaagagaatcctagctctcaatcctcatccatggcgaggggcaaggtccagctgcggcgcatcgagaacccggtgcaccggcaggtgaccttctgcaagcgccgggccgggctgctcaagaaggcccgggagctctccgtcctctgcgacgcccacatcggcatcatcatcttctccgcgcacggcaagctctacgacctcgcaaccaccggaaccatggaggaactgatcgagaggtacaagacggccagtggagaagcagccctgcagggtgacggcggcggcgaccacagaatggacccaaaacaggaaaccatggtgctgcaacaggaaatcaatctgctccagaagggtctgaggtacatatacgggaacagggcaaatgaacacatgactgttgaagaactgaatgccctagagaggtacttggagatatggatgtacaacatccgctccgcaaagatgcagataatgattcaagagatccaagcactgaaaagcaaggaaggcatgttgaaagctgctaacgaagttctccaggagaagatagtagaacagagtggtttgctcgacgtaggcgtgatggtagcagatcagcagaatgggcattttagtacagtcccactgatagaagagatcactaacccactgacaatactgagtggctattctaattgtaggggctcagagatgggctattccttctaacggtaataacaccctgaggggcttgttctgttgattactagtgtgtaatacaa

SEQ ID NO: 16582 - DNA, 632 bp, Setaria italica
  Peptide Sequence Number=SeqID_82556
tgctcactggttggatctgctctttctttttggtaaggaagccccgctctcgtgcaagcacccactgatcgaggacaccacatttaatagcatatttgactgccttgtgcaagtaaaccttgtctgtgaccaggtgagggttaattgcgagcatcctcatgagggctgcaacaatggcatcacccgattgtgacatttcactggtgaaaggagtgattggtgcatcttctgtcccacgaacccagccactgtgctttcttgtgtaatagtgaatcttggaggtaccatttgtcacaaagaggaccttgagattatcatgccacagtttcttaatagcttctggactgtagtgtgtgaatttggatttatcattatcatttgtgtcaaatttctcagatggtttaatatcgcaaagaaactcaagttcttgtttcgtaacttcaataatatcagcagcttcccatgcctccttgatgagcgacttggttaccttactggatgaccatagtggaagtggaagattaagatcaaagaatattataccaccaaatttcttcgaaacatcaaccgctttttaacaatgatgactgtgtagtgggctcaagcaaagctgatgaattataagtaaaaca

SEQ ID NO: 16583 - DNA, 495 bp, Setaria italica
  misc_feature (212)..(212): n is a, c, g, or t
  Peptide Sequence Number=SeqID_82557
ggatcgggttcctctcgaagaagttggacggccggagctcgaacccgccgctcagcgtcggcatcacggggaagtcctcctggtacgggatgtggtgcaggcccaccgtgtaccacagcacgatgtcctcgtccctgatccccctgttcctcctgctccacgcggccaggccgtcgtcgccggtgctctggtcggcgtacatccccggggcncccacttctccgccttgctgtacggcgtcacccacacctgcttcttggtgtagctcgcccgccgctgcgggtagtcgtcgtcggccagcacggacgccgccgtcgcccccgccgggatgagccggtacccgacctcgttccccatccgggtcttcttgcccgggttcacgaacagcaggtcggcgggcccggcgtcgacttccacctgcccgtccgcctcggtctcggccacctcgcgccgcaccgtccagtagctccgcctcggcgtggcggcgccgccagt

SEQ ID NO: 16584 - DNA, 644 bp, Setaria italica
  Peptide Sequence Number=SeqID_82558
tagagactcaaagctcacacgcttacttcagtcttctcttagtgggcatggacgcatatctcttatttgcacagttacccctgcatccagcaacagtgaggagacacataacacattaaaatttgctcacaggagcaaacatgttgaaataaaagcttctcaaaataagataatagatgagaaatccttaataaagaagtatcaaaaggagatatcctgcctgaaagaagagctacagcaattgagacgtggtatgatgggcaatgggtgtattctccctacggatcaagaggatcttgttaacctaaaacttcagcttgaagctgggcaagtcaaacttcagtcgaggctagaacaggaagaggaagcaaaagcagcactgatgggtagaattcagaggctaacgaaattaatattggtatcaaccaaaagttcaatatcctcaaatgtttcgggaaagactaacctccgtcgacgacattcatttggggaagatgagcttgtgtatctgcctgatcggaagcgggaatacttcgtagatgatgatgatattagccttgattcagaactttcgcttgaagggaaacttgattcgaacaatcctgatgagtcagccaggtttgacagaaggatcgtaaacgtgg

SEQ ID NO: 16585 - DNA, 805 bp, Setaria italica
  Peptide Sequence Number=SeqID_82559
aattcaccaagcttgacatgcaattgagttccttggtctaccaacttacttgcagaaacactaagttgaattgaaaaagacaaatggtaaagtggtacatcatcaagactgtgaagtacaagagtaaagtcaggagctgacagtgtacatgccaaagccaatgccaatttttctttgggtgccttctcttgttgaggactctcacggagaacaaggggcttctttttatctgagttaattctaatcagtggcttaattctgcttataatgaggttacattggaacccactaatcttgacatctacttcagcttgaactggcaatgctggctgagtgggaatgttagctgaaactactgttgaaacttttgcaacctctaatactgaggtggcaccatccattagaagatgaatctctgttacatcagtttccaaccgaagatgtgttgtgttctctccgaagtcgtgttgtggttgtaaccttgtacatctcaaagatatgctaccaatttcattgttgactgagaggccatgatcttttggcaaaaaacttcagatccagtttggacatgttgaagctaaccttttcaggtaacagacttatcttcttatttagtgatgcaagtttgcccccttcagatctggcagatgacttattatccacggaaggttcatccttttgatcagcaacagtagatgcagactgtttcttcttggtgagtaatttctcttccaaattcacaacaattggaccaaggatcaaatccaaattcttcactctaattcctttatccctctgatgaagg

SEQ ID NO: 16586 - DNA, 1964 bp, Setaria italica
  Peptide Sequence Number=SeqID_82560
agctcaacatcgactggcactggcatctcatcagagtgaccggaaatgcagagcgatccattttcatcctgatcccagtaaacctcaaccatgacacctcttggatgctcttctgtctcagttccaggaataccaacaaaacgagcccccttgggaatctacattgtgaaagagccaaaattaaagaagataaaacaatattctaatgtatcccagataagcagtttttttcttttttgacacaatcagataagcaaactatggctacttgataacagtttgtatatctcaaaggtcttttcttaagataagtgtggtagtgatcttaggattattaagcacagacctgaattgttgctcctgatgacaggttaagagtcaccagggtgccttcagcagtagagctctccagctctgcctgctttgcaatgttcaggaagacctcttcaagtgtcgtgagaccaagttgaatatctgatattccaaacccctttccccgttctctagccgcctccccgaattctctctccgtcgctcgccgcttttccgcctcctctctctcccctcccccggctcaatggaggctctcacgggcaccgcctcctcctccattctccccgtccgccacccgccttcccggctggccccacagtccctcgcgctccgccctagccgctgcggtcccatccgcgcggcggccggcggcggcggcaaggacgaagctcaccccgcccccgccgccaacgggtctcccgtcctcaagctgaagagtgattcgagtcaaaatggagttataccgatcgctgctgacaagttgcagaaggcttcatcaaccaataccggtagtgactcaagcggatccagagcaggcctgtttagaacacctatatcaggtggtgtgcagagcgcgacttttgcgcatggtttgcctccgccggctctggctgtgcgcaatttgatggaacaggcgcgctttgctcacctgtgctctgtcatgtctggcatgcatcaccgccgcactggatatccatttggttcacttgtcgactttgctaatgactcgatgggccacccaatattttcgctgtcacccttagcgatccatacaaggaacttgctatcagatccaagatgcacgcttgttgtccaggtgcctggatggagtggactgtctaacgcacgagtcacaatatttggtgatgtttaccctttgccagctgaccagcaggaatgggcccataagcaatatgtagcaaaacatcagcagtgggcatcacaacagtggggaaatttttactattacaggatgcacaacataagtgatatatacttcatcggaggctttggaactgttgcttgggtagatgttaacgagtacgaaactactcaacctgacaaggtagcagttgatggtgccgagaaaagtttgaaggagttgaatgcaattttctctaaaccacttcgagagttattgtcatcagaaggggaggttgatgacgctgctgttatatcagtagatagcaagggcatagatatacgggttcgccagggtgctcagttcaatattcagaggctagcatttgatgtccctgagaaggttctgactctagaggaagccaagagagcactccacaagatcatcaagacgagcagcaaatagagtgaagaaggttgcggaagctggctttactcatttttcaaatggcgtaaggtttctttgcaatcgaacgacgaggactgaggattatgtaatgtagcgagtagcatgcatatgtgagaactggaaccgatggctgtgttgctaataatgagacgatagtctctctccacatgtggcaaagattgtacgtatgcccgtgttgctatatcaataatgatatgattgtgcggttgctacttgaaggaaaataggcattctagctattggcacagaggaaacagtcgatatcagcatggatctttga

SEQ ID NO: 16587 - DNA, 2288 bp, Setaria italica
  Peptide Sequence Number=SeqID_82561
ccgagaacagagagagcgcccccgccgagaagaagaagaaactcccccaccgcggcccgcggctccaccggccgatccggccggccccgatggagctcctgagcggcggcgctctcgcgtggcagcagtaccgctcgctgctccgcaagaacgccacgctcacctggcgccaccgccggtccgcggcgctgcagctcttctcctcgctcgtcttcatcttcctcatcttctgcatcgaccgcgccgtccgctccaggttctccagcaccaccgcctaccgcaacgtgccggacccggaggcgctcgtcgcgccgccgatcccgccctgcgaggacaagttcttcatcaagtccccctgctacgacttcctctggagcgacggcggcagcgcccgcgtcaaggggctcgtcgatgccatccggaggaacaaccccggccggcccatccccgcagagaaggttttaggttttaggactccagatgatgttgatgcttggctgtttcaaaacccaatgcgctgtcctggtgctttacattttcaagatataaatgccactcagataaagtatggcatccagacaaactctactccagtagcacggagaggaacatatgaagacccaactttcaagttccagataccacttcaagttgcagctgagagggaaatggcaaggctgcttattggagacccaaattttagctggactgtgggattcaaggaatttgctcacccagccacagaaacattctctaccattgctcaagcagggccaactttcttccttgcaattgcaatgtttggatttgtttttcagatcagcgccttggtgacagagaaagaattaaagcttcgccaggctatgtctaccatggggctctatgaatcggcctactggttatcgtggtttacctgggaggcccttcttacaacactttcagcactttttactgtgctatttgggatgatgttccagtttgacttcttccttaataatagttttggaatcctattcctcctgttcttcctgttccaactgaacatgcttagttttgccttcatgatttccacatttgtagcaaaggcagcatcagctactactgttggatttgcaatattcattattgggttcttgactcagcttgttaccacctttgggttcccatattcggctgactacaaaaaattgtaccggacattgtggtctctctttcctcctgatgtatttgccaaagccctcaacattctaggcaaggcaacagccactcctgaagataaaggtatcagctggaatcagcgtgggaagtgcccatcttttgagacggactgcgtcattactatagatgatatctataaatggctcatctccacgtttttcttgtggtttgtcttggcaatctactttgacaacatacttccaaatgtaaatggtgtccgaaagtcagttttctactttcttattccttcatactggacgggtaaaggaggcaagatgcaagagggaggcctctttagctgttttggttcaagccgtccagctgatgatgctgcccctactgatgaggatgttcttgcggaggaaaacctagtaaaggagcaagctgcaaacaatgaggtagatcctggtactgcagttcaaatacatggtttacggaagacatatccaggaactttcagcatgggttgttgcaaatgctcaacaactaagccatttcattccgtcaaaggtttgtgggtgaaccttgagaaggaccagctattctgtcttcttgggcccaatggagccggtaaaacaactacaatcagttgtctgactggaatcacaccaattacagggggtgatgcattcatttatggtcaatctgtccgaagcgctgttggaatgacaaatattcgtaggatgatcggagtctgtccacagtttgatatcctgtgggatgcattaacagctaaggagcacatggaattgtttgcgagcatcaagggattgcctccatcagcaatcgtgtcggttgcagaggaatcattagccaaagtgaagctcagccaggtaactaatgttagagcaggcagctacagtggaggaatgaagcgccggctaagtgttgccatagctctaattggtgacccaaaattggtgttcttgatgaaccgactactggcatggatccaataacaaggaggcatgtctgggacatcatagaagaggcgaagaaaggaagagctattgtcttgaccacccattccatggagaggctgatattcttagtgaccggatagcaataat

SEQ ID NO: 16588 - DNA, 359 bp, Setaria italica
  Peptide Sequence Number=SeqID_82562
cccgggcccctccctcctcctcctcgcgctgaccgcggtggcggcggcgagggaccacgacttccggcgggacttcgacgtgacatggggggagggcaatgcgcggttccgcgacggcgggaggcaggtggagctgtcgctggaccggcggtcgggcgcgcggctgcagtccaaggagcgctacctcttcggccggtttgacatcgagatcaagctcgtccccggcgagtccgccgggaccatcacctccttctacatctgcacgggcggcgcgcgccacgacgaggtggacttcgagttcctgggcaacgcgagcggggagccgtacctcctgcacaccaacatccttcaccgacggc

SEQ ID NO: 16589 - DNA, 247 bp, Setaria italica
  Peptide Sequence Number=SeqID_82563
tgacagagctctcttaggattctgcaactgatgcaaatggcgatgttgagggctgtgcgtttaagccctgcaagctgtagagattttcgtattaagtgctgcatttgctactcttttgatgtttatttcccaatttagttactggtcctttcctgtttacaactgtttgtcaggatgacgattttgatgaggcttcttatgttccagttcaactggccctcatctttgcgcacacagagaaataccc

SEQ ID NO: 16590 - DNA, 1323 bp, Setaria italica
  misc_feature (1240)..(1323): n is a, c, g, or t
  Peptide Sequence Number=SeqID_82564
aaaaaaagctccgaaagccttcttcacacccgacctcctccggcgacgcacgcagccgccgtcgtccgcccgcccgcccgcctacctctccgccgcagagttctcatcctcgcctttctccgaagggtatccggagctccctgaagcatagccataagcagcgatcatggccgactacgagcaggagcaggagatggaggttgaggcgctgcaggccatcctcatggacgacatcaaggagatcgaccccagcgagagtgggatcgccaccactgcccgttgcttccagatcctactctcccctcaggatgacgattttgatgaggcttcttatgttccagttcaactggccctcatctttgcgcacacagagaaatacccagacgaacctccactgctgaatgtcaaaagtatgcgcggaattaaaccagatgatcttgcatccctgaaggaaaagcttgaccaagaggcaacagaaaatttaggcatggctatggtctatactcttgtttcatcagcccaagagtggctatgcgagaaatacggtcagaacggaggcgatgaggaacctgaagagactgaagagaaagaagaggaggtcattgtaccccatggtgaagctgttactgtggagagcttcctggcctggagagaacgttttgaagctgaattggccttacagcgtgctaaacttatgccagattcagctcttacagccccaaaggaaaagagactcacaggacgacagtattttgaaagtggaaggcatgcagtgaaaggagcaagcacagttgtggatgaagatgaggaagaagaggaagacattgaatttgacgatgattttgaagatgacgaagaggacatgcttgagcattatttagctgaacagtcagggaagtcaacagcttaggctacaaggccaaacagaagtaccttcctgggcagaatttagtttaggaaacccaatgtggtaatatgttatgggtgaagcaccagggctcagtattttgtgcgattctcatcatttggttgtcccctggtggacctctttaagcttctatacagatatgtgctgagggtgttggaagatcgagctgcacctacataatgtactttgctgtataacttgtcgtgtttttggtcaggtataacgtgtatgttttattgtggagcgtgttgcataacttcgggaagatcttggtgataatacatggaatgctattcttttcgcaaataaccnnnnnnnnnnnnnnnnnnnnnnnnnnnnnnnnnnnnnnnnnnnnnnnnnnnnnnnnnnnnnnnnnnnnnnnnnnnnnnnnnnnn

SEQ ID NO: 16591 - DNA, 353 bp, Setaria italica
  misc_feature (230)..(353): n is a, c, g, or t
  Peptide Sequence Number=SeqID_82565
acggctttattgactgtcggtttagaagccgttcagctattgctgggaagtagacaaatagtgggaggagatcatggtccacgaaggatgaagttctatcgggatctaatttgctgggaaacaccaaccctggtttgagtgtgtgatatatatacagttcttattgccgtttcctgttgttacagttgaaaagctatcagcaattttgtgtatctccttccgtgaaaaannnnnnnnnnnnnnnnnnnnnnnnnnnnnnnnnnnnnnnnnnnnnnnnnnnnnnnnnnnnnnnnnnnnnnnnnnnnnnnnnnnnnnnnnnnnnnnnnnnnnnnnnnnnnnnnnnnnnnnnnnnn

SEQ ID NO: 16592 - DNA, 672 bp, Setaria italica
  Peptide Sequence Number=SeqID_82566
agaaggtgaaggatgcaatatttatggtttcattgaagccctcccttttgcactggtcaagcagatctggatttgatacaccccaaccttttttcctgtatgcttcccggacatcttcacacgtgttacaacattgatcattagattcttgtgcaccatagcaagagccacaataggtttcattatgttcaagcctcccaccatgatgttgtaagggcttttccatcttcatcccaccaacagcatcttgtatagtcgcaataacattgccttgggggatcaattcgctgcttgaatatatcatgtttcacatcaaggtgctcttgcccactgatgtccattgcatcaagactaattatagaacactgaagggctgggaaggtgacatcaaaatttatgcgtagcttttctccccttgaggtatccacccttaatgttgtctctgtgactgcatgaagatataatcggagttcggagacgaagaggaggagcatgacgacggaggatgcgagcgtgatgatgccgcccgagagggtgcggctgtagaagtcctcgttcaccttggggtaggcgtccaggttgcggagcttggacaggagcccgtccatggctgacgggatctcggggagactgccggggccgcggaaccggggagacgagaccggccctgcc

SEQ ID NO: 16593 - DNA, 736 bp, Setaria italica
  Peptide Sequence Number=SeqID_82567
ccaatttccatcttcttcttgattgctctctggccatggtatacaaatgaaatctataaattccagaaacggtgaagacaccaccaacaattgcacaaacattggttaagaagtgcaagaatgacacatgttgctctgtgaatgtgaccttgattgggaaaggtcatagaagaaaaacacgccaggaagagcttgtatccgaccaccctcactacttctaaaatgttccgtcacagagaactgatttgagaggatgatgcgatcatttatgtcagtgtagacagtgggaacaaccttgatgaagtattgatacattccatatgatgagtgctgcacccattgcgccctgtcaaggggattaaccacaccaggaaagtgttctccaaaacttaacttatttatcttatggctaacattgaaactgtccttctggaatggaagcaagtcatgcacatgcacattagactgctggaagctttttccaggagcaaagtggaaattcccagcaaccttgttaacttcaatgaaaccataaatattgcatccttcaccttcttcatcctttatgctttgaaggaagccctcccttttgcactggtcaagcagatctggatttgatacaccccaacctttttcctgtatgcttcccggacatcttcacacgtgttacaacattgatcatcagattcttgtgcaccatagcaagagccacaataggtttcattatgttcataca

SEQ ID NO: 16594 - DNA, 427 bp, Setaria italica
  Peptide Sequence Number=SeqID_82568
acacggagaagatactgtgatggacgatggtaaactattttcctcatgaactctgcagtcagttcacagtccagacatctccaattctatgcaaccattttgtggcctcatagaaggaacactattctgaagaaactgaaaacaaactacttttctgaactagtcgtctgatactattattattttggtcaggtgttgctgattgtaacattacaaaacaaaaggttgatgtttcaccttgggaggccatacagaataagaattgcagtcacttcacatcgtcgcgtcagcctatatggctctgttatcatttccataattttgtttccagccattcttggtctcctcagtatcgtgctaactgtctgttcttctgataagcatagtcctcttgtttctggaagatggtggtgaccctggtatccac

SEQ ID NO: 16595 - DNA, 283 bp, Setaria italica
  Peptide Sequence Number=SeqID_82569
tggcaatgcatatcaaccattaccatttatgttctcatctggattcagggcatgtgcaggatgtcacagagagattggtcacggtcgttttctcagttgcatgggagctgtttggcatccagaatgttttcgttgccatgcctgcagtcaaccaatatacgactatgagttctccatgtcggggaatcatccgtaccatccacttcctgcgaagggcagtatcgtagccagaaaggatgtgccctatattcaataaggccattcatatttgtaggaataaatt

SEQ ID NO: 16596 - DNA, 460 bp, Setaria italica
  Peptide Sequence Number=SeqID_82570
tcaaggcactctaggcagagcttacggccatcatccagcaatacatatcttgattcccttggctccattctttcacaactacagcaccttggagtaccatccacttcatgtgaaggacagtatttttgtagccagaaaggatgtgccctatattcaataaggccattcatatttgtaggaataaattgcttgcagacatcacattttgggtgaaactgctccttgtagcaagttttatggtacggatgattccccgacatggagaactcatagtcgtatattggttgactgcaggcatggcaacgaaaacattctggatgccaaacagctcccatgcaactgagaaaacgaccgtgaccaatctctctgtgacatcctgcacatgccctgaatccagatgagaacataaatggtaatggttgatatgcattgccaccattttgcggtgccatttttcacg

SEQ ID NO: 16597 - DNA, 500 bp, Setaria italica
  Peptide Sequence Number=SeqID_82571
ggataagtaaatgaaccatgttggaatgaactgatccaaatttcacacaaagcaccttatctaaccatgaagtatggccacaacactaaaatacaaaagcagaacattgtaactgaacatacctccattctttcacaactacagcaccttggagtaccatccacttcatgtgaaggacagtatttttgtagccagaaaggatgtgccctatattcaataaggccattcatatttgtaggaatctgaaaataaggaactgtaagatggtgcatatgaaaaccaaaaatataagtcaactgtcaacacaaaaacaactttctactcagaacataaacaatcagctacctaaaatgtgcaactaattacaagcttcagaccttccgtagttgcaacaataaataactgaaaccatgaacatggtcagatattaacaagaataaacatggcaatcattgagaatgtagaggaagttacattctccaggaatgtgaggcagattg

SEQ ID NO: 16598 - DNA, 404 bp, Setaria italica
  misc_feature (404)..(404): n is a, c, g, or t
  Peptide Sequence Number=SeqID_82572
taggtacggccatcatccagcaatacatatcttgattcccttggctccattctttcacaactacagcaccttggagtaccatccacttcatgtgaaggacagtatttttgtagccagaaaggatgtgccctatattcaataaggccattcatatttgtaggaatctaaaatgtgcaactaattacaagcttcagaccttccgtagttgcaacaataaataactgaaaccatgaacatggtcagatattaacaagaataaacatggcaatcattgagaatgtagaggaagttacattctccaggaatgtggaggcagatttgatgtattatttcttaacacaaagaggcatgtaaaacgtacaacgttaatgacttctaacgtaagcagataagatcagagtaan

SEQ ID NO: 16599 - DNA, 1319 bp, Setaria italica
  Peptide Sequence Number=SeqID_82573
attagtatttttcttattgaaattcacaccatataaaaaatttaccatcgtcttgttttcgttccagagtttggtcctcacaatacgaaatgattggtcaggctctggccatctcagctcattcgatacttcagttagcccttccaatattatatctggattctggaaagaatgtttgtacaattgatttctttggctgtaaagttactcttgaatgacaatcatgtatgtaacgtaagcttcgccagaatgtgaatccatgccctttcaaaatgggaaggtccctgttagccggatatgctcgagggtgcgcttcaagccgtactgcatgacggcccggttcccggctctgaaaccgtctccgtaggctgtggatgtgtccgactcaatctgatgcttgaagaaatccccgagcttccgctcaaactgagaccgtcccccctttttcgatgatgcggatgtcgaagagcccgaggaagatgatgcagcactactgcctgatcctgccatgatctctgactcaatccacatgtgagcaaggacttggcagatgccctcttctacgtctggactgagtgtccggtatcctctaagtcgcaaccatgcatgcatcatctcatgagctaatattgaacctgtcaacaaccttgggaggccatacagaataagaattgcagtcacttcacatcgtcgcgtcagcctatatggctctgttatcatttccataattttgtttccagccattcttggtctcctcagtatcgtgctaactgtctgttcttctgataagcatagtcctcttgtttctggaagatggtggtgaccagccttctctccttccatggcttcatttaaagcctgtctctctaccagaagcaaaggaacctgctgttccactttcatattcagaccttcgtaaaattcctgaatttcaagatacagaggttgacactcgcttgtatccatcactgcggaatcaaggcactctagggcagagcttacggccatcatccagcaatacatatcttgattcccttggctccattctttcacaactacagcaccttggagtaccatccacttcatgtgaaggacagtatttttgtagccagaaaggatgtgccctatattcaataaggccattcatatttgtaggaatctgaaaataaggaactgtaagatggtgcatatgaaaaccaaaaatataagtcaactgtcaacacaaaacaactttctactcagaacataaacaatcagctacctaaaatgtgcaactaattacaagcttcagaccttccgtagttgcaacaataaataac

SEQ ID NO: 16600 - DNA, 798 bp, Setaria italica
  Peptide Sequence Number=SeqID_82574
ttttttttccaagacaagcgcatcaaaatttgaccggacgattcgtccgctggtccgcacacggcaaattataaacttattacttccggatcacatcgcatcacacttgcgaggtccaatacacaaaagacacggccaatgtgagaataggacgaaacacgaaacagaggtgtcaaagcctggcaatagagaccttctaatctagacaagatgcatcggttcaagtaacttttcaagaggtccagtgcaactacagttttacgggcggatatgagatcatcgtcgtttgtacatgcaagctttcaactggggccagtcgattctctttgccactttactcttttcctttttcctgaagtagaacagaacgaacattttatttttcatgtcctttgaaacaagggaaaagccaagctggatgatggctttagagaacttttcaggatcagcgcctccattatttggatctagcctacttcgcacttcagcaataacaagccaaccacttggcttgagaaccctatttgcttcctccaagtaatttggatagttggtccccatcaaagaaagacaaaatattgcaacatctacagaggacgactccaatggtgtatgagccatatcacaagcaatcactgaaggatcatctgaaacaagatcaatggagaaaaccttgttcttcacattttttgcaactgctgcgttgccacagccaaaatcagcaacagtccacgatgtcttatgactcttcaaccaattgattattacatttactggctgctctggccaacgtgacat

SEQ ID NO: 16601 - DNA, 1007 bp, Setaria italica
  Peptide Sequence Number=SeqID_82575
ctccttctccgatccccgccgtcgtcctcctccacagccgcctcttcttgccagagccgccgccaccacctcctccccagcgaggaacctcttgcgctcaatcgtcttgccaggctcttcacgtcccaagctggaagtgatggtggccattcccggaagccgttcgttgcttttgtcttagggggtcctgggagtggcaaaggaacacaatgcagtaagatcgcttcggatttcgggtttacccatttgagcgctggcgaccttctacgccacgaaatagcgtctggcagtgagaaagggcagttgatcctagacatcattaaggaagggaggattgtctcgtcagagataactgtggaactcatcagaaaagctatggaaacgagcaatgccgataaggttcttattgatggcttcccaaggtgtgaggaaaacagaatcgcctttgaaagaattgttggaacagaaccagacattgtggttttctttgactgtcctgaggatgagatggttaaacgccttctaggccgtaaccaggggcgggttgatgataacatcgagacaattaagaagcgtctaaaagtgtttgagagtttgaatattcctgttgttgactactactcttctagaggaaaggttcacaagataaatgccacgggtacagcagatgaaatctttgaagcagtccgcaggctcttctcttccttaaggttctgacgaggagtcgaggatactgtctttgaaggaattcgtggagtttgcttaggaactatctagtatttaattgtcttaaagccagtgcccactttgcaccgtctaaatatttggtgcagtaattgtacatacacgctacatctttacctaataatacccacgaaaacacagatgacttgtgagttatgaaacatgagacatggagcctgaaggttgtcctgcataataggcattatgttttaacctattttcccctaaattttacaggcattacgctcttgctctgtgtttct

SEQ ID NO: 16602 - DNA, 414 bp, Setaria italica
  Peptide Sequence Number=SeqID_82576
gctgggtcgtggcggagctcgactacggggacaccgcggcctgggcgagcctcgcgcgcgacgtgctcgacgaccccatctacttcgaccgcgtcgagtgggagcacgcccaccgcttcctccgcggcgacgccgactacgactacacctacgacgacggcgacgggccgctccaggagatggccgagcgcttcgggtgggacctctccgacgaggagggatggggccgcctcgacctccgcctcatcggcacctcctacggcggccgcatcccgagaaagggcgcccggaagcaaagcaccagcagaagcaacagcaacagctccaccggcagcgccaagaacggctccctgttcgacgtcggcgctgacccggacggcgccagggggaagcgggacgagaggagggagcgga

SEQ ID NO: 16603 - DNA, 303 bp, Setaria italica
  Peptide Sequence Number=SeqID_82577
cttttattatgttagatgaagggggaaaaaaatagggaactcaaggatatcaaagagtaaaaaaaaaggaatggaatgaaagagtgattggttgaaagaaagagaaatagaataatgagaatcatatggatttacacaaacctctaatgattagaaactaaaacgagatctcgaagtaattcggacgatttcaattatcatttatttgtacttattagttacttttacccaatagagcttagaagttagaagtaataatttcttggttgattgtatccttaaccatttcttttttttttgtac

SEQ ID NO: 16604 - DNA, 581 bp, Setaria italica
  misc_feature (11)..(11): n is a, c, g, or t
  Peptide Sequence Number=SeqID_82578
aggctccggcnccaagcttgctgtcgctgtgcctggacgcggtcgccgccccatctcacccgcgacagcgcgggcgtgggcgcggccgaaaatggatggggcaggaggctgctgcagcggcggcggtcccggcgagttcgcagaagaagtcgcagaggaggcgtacgacgagcacctggggccggagcaggtcgcggaggcgcttccctgggagcttctgcaccggctggcgtcccggctccctcccgccgctctcgagtcgctccatcacgccgcccatgccggatgctgctcttctgctaatacaactgctggacttggagggcaaaatggtgacagacgtgggataaaacgttcaaggtgcgaagatttcaacacagcttggcaatcgttgttcaaacttcgatggccccttggtgttaatgctgggcatgatagtgtggccattgtggattggcagcaacagtactgggaaaagcatttacaagagtgcctggatgaagctgcagagagtgcctttcttccttctttttgtgggggtattagtgagtcgagtatatcagctaaaatcatgaatttca

SEQ ID NO: 16605 - DNA, 746 bp, Setaria italica
  Peptide Sequence Number=SeqID_82579
tctcctccccactccttccctacccgcctcactccatactccgtccctccctctcctacccagcgcaccgctcgctttccctcaccgcgtcgggccgcgacaccgttcacttcgctctggagcaggagatctaccccggggacccctacgcggcggtctccgcggaggccgtccccaccttccttgcctacgcggcctccggctcggtcaccgccgaggttgtctacgccaactacggccgcgcggaggacttcgcctacctcgccgcacgcggcgtcaacatcaccgggaaggtcgccgtcgcgcgttacggcaaggtgttccgcggcgacatcgtccggaacgcgcgcgacgccggcgcggccgcggcggtgatatacaacgacgccaaggactacgcggcagggaatgccttcccggacgggccgtggatgccgccgaccggcgtgcaggtgggtagcacgttcaagggggtcggggaccccacgacgccgatgtgggcgtcgtcggaagggtgccagcgcctaagcatcgcggaggcgatggcctccgacgacatgccggggataccggcgctgccagtgtcgggaatggatggggaggccatactacagctcattggcggcgatgtggcgcccgaggattggcaaggaggcgccggcgcgccggcttaccggcttgggccccgggccagcggtgctcaacctgacctacataggtaatgagacaatggctaccattcagaa

SEQ ID NO: 16606 - DNA, 494 bp, Setaria italica
  Peptide Sequence Number=SeqID_82580
gaacgtataactaaatcctgtttggaagataggatttcaagagtacacagttcagcagtctggttcagaaagttttcacgagttccagacatggccatggccttcctgaatggaagatgcaaaaccacatgttcattcctatcctatgggaatcataagctgcaagcagaacagggcatgaaaactttacagttgaattcccaaatgagagtgatgctctcccaacagaagaaaacattccagctctgaacaggaatccattccaattccactagacaaaaaacacaaggaaaacttactaaagactgatggatacgcatagcgcacacagtaactttgtgactaaccgctgcgttcttgagattttacagagcaaggttaatcagacgtcgtcgtcgtaggggaaggaggtggcgccgagccactcgtcgccgtagatgaagttctcgacggcgaactgggccgcctcgtcgtagtccatctggcgcacgccg

SEQ ID NO: 16607 - DNA, 411 bp, Setaria italica
  Peptide Sequence Number=SeqID_82581
agaacaaacacagctgaccttactgcaaacacaaacacaagttcaccataaatcatgaaccaggtgactaaggtgtaccgaggtgggtaaggactatgatgaactcatcactgttaacaatgaagtttaggaaatggaacaccctctgcgttgtccacccatactcaggtaccctacactcgattcttatcagttggacctgacaaaattcacaccaaatgagctaatgagattgatagccaccatcttagttctcaaccatacagtgtattaccatgacaaatgcttcttttgtatcttttctgctacaagtccaaggtgatgttagatgagcctataaagggcaaatcctgaaaaaatgtcaccacggcaaagaagcttctatcagttaaccaactgcaccgtaatctt

SEQ ID NO: 16608 - DNA, 505 bp, Setaria italica
  Peptide Sequence Number=SeqID_82582
atcaagaagcaaccaaagcatatggtggtcacatagccaacctcattcaactttttccgtccgaccttttgactcaacatggaaacgctgcagcatcaggaatagcctccctccgtagagaaggaaaccaaaagcagcaaataaggatgtagctgcaaagaacaactttgacagaatgaccacagcttgaactggtttccaccacatgagcagccacagtacaatctgaaattttacaagtcaagtcattccaaaaatcaccaaagacatgagaagcgagaagctattgagaaatattctagccaaaaaagtgccacttgagaagctatagcataacaagcagtgaactgaatatttataaggttatcaggacaggacattagtgcagcaactgaagcatgtaccagatcagattaacaaaaaagtaaggggagtcctcagtccccactcacatcactcgtgtttggacaagttgtaaagtacttaaaacttaattaagtactaa

SEQ ID NO: 16609 - DNA, 472 bp, Setaria italica
  Peptide Sequence Number=SeqID_82583
tttttaaaacaaaaaaacaaataagtaaaaccaaatactaattagacaaaactactaatccttggtttaatatttagaacagaatccagtatgtttagccgtcaattgtccttacaccgtgtcctcagtattagcgatctcaagttctcaaccatacagtgtgttaccatgacaaatgcttcttttgtatcttttctgctacaagtccaaggtgatgttagatgagcctataaagggcacatcctgaaaaaatgtcaccacggcaaagaagcttctatcagttaaccaactgcaccgtaatcttcttgactagcctttaactttcttggacctctttgggaaaagctcatgcccctcaagaagaacctcttggtgcatctgctcccattttaagtcaaactggctatggaatttatcctggtaccacgcctttatctcaggatagagaaaatttggatcagcattccatgca

SEQ ID NO: 16610 - DNA, 796 bp, Setaria italica
  Peptide Sequence Number=SeqID_82584
ccaacaggtggccattatcactaggctcctcagttttgggctctggaatgcttactccaacatccatctttggttggcattccatagctttctttgaatcattcttcatgtttttctcatgtaccctaccaggatcctcactttttacaggctcaacaaacttcggtggcaaaatgtgctccacagggtcactgttttcagagaatttctgatcatcgtttctcttgaatagcgagagttcttccggaacatccaaaccagccttggacaactgcatggcacgcctgcatttttctttcaaagtctcaacttgaccaatagtccctgaagcatgcagaagtgaatatgcatcttctgagatcttgtgcttctgcaaaatctcaatgctttgagcctgcagcagcttctttcgcttttcctcctccaatttctgcagcttttttagcttagtcttgctcatctttgggtcctccttcttggctttctttccgtccttggctttcccctgccccttgttcttcctcttgcagggcaaaatcagggcgttgctatcctccatgcttgcgctgcaaaggccgcaatctcgaacagagctcagggacaacccaaacacaggctgcctgaagactgaactcaccttgttgctgcgctcactcgcccggcgtcaaagagtggctgccgaggaggaagacgatgtggaggcgtcggggcgggtgcggaggaggcggccaaggtggaggtgcccgctgcagatcgaggtgtccgagggaagcgcctagacggggaggcggagtgg

SEQ ID NO: 16611 - DNA, 681 bp, Setaria italica
  Peptide Sequence Number=SeqID_82585
agtaaggggagtcctcagtccccactcacatcactcgtgtttggacagtgaagctaaactatagcatttccttaatacgctgtggtatattacaagcgcatagaaatctggataaacaacaaattgttgacaacagcatgtacactaagacataagggtgtggttttgtgtatactcaaggtttctacactttcttcttttttaatatgatgctacgcagctcccctacgtatttgggaaaaaaatgttggcgacaaaatcactggaaataatatatgaacaagttccttgactacgaacaatgaagaatgctaggccaggcaaatcaataagcacatgttgaaatatctacaagaccgtattgttacacattatgtttccaatcaaccgacagaacggaaacataaatagcctccttccacaaacctcaggatgtacaacttgcacattccgtcacagaacaaacacagctgaccttactgcaaacacaaacacaagttcaccataaatcatgaaccaggtgactaaggtgtaccgaggtgggtaaggactatgatgaactcatcactgttaacaatgaagtttaggaaatggaacaccctctgcgttgtccacccatactcaggtaccctacactcgattcttatcagtttggtaccttgtactaaaatttctactact

SEQ ID NO: 16612 - DNA, 1070 bp, Setaria italica
  Peptide Sequence Number=SeqID_82586
caggttgtgttagtgacattggggttgcaatgacagcgggagtttacattttttaactaagccgtatttgccacactcagtaaacgcttcttcacaagaaagctactaaacctacaaaaggtactacaaggtatctcacatttgcctttttgtctttagcaattggacggaactgttagaaatggaccatcgacgttactgactaatggattggatggtactgtgcaatcccacgttttggcggtagtttccttaagatgaacagcaccaaagacgatggtacaatctcaacaagcaagtagtaaaagaagttcaggattggatggttcagaacatcaaggtcagcttctttgtcaaaagcactaaagcacatcattatgcatctgatcaagaagcaaccaaagcatatggtggtcacatagccaacctcattcaactttttccgccgaccttttgactcaacagggaaacgctgcagcatcaggaatagcctccctccgtagagaaggaaaccaaaagcagcaaataaggatgtagctgcaaagaacaactttgacagaatgaccacagcttgaactggtttccaccacatgagcagccacagtacaatctgaatggcgtagaccactccattgatcgtatagaaagctggtcgaagcccattggttggcagtgcacgtgcctgatagtagatttcagcccaaaagagcaccaacagagcataggtcgtgaagaatgctaggccaggcaaatcaataagcacatgttgaaatatctcaggatgcacaacttgcacattccgtcgcagaacaaacacagttgaccttacactgttaacaatgaagtttaggaaatggaacaccttctgcgttgtccacccatactcaggtaccctacactcgattcttatcagttggactagggctacgagtgcgacgacgccgtagagcgcggcgagggcatggaaggtgcggtcctgccacagcggcgagttgttcacatcgtcccaccaggcgtccagagccgccgctgccgccgccgaggacgaggccgccatggccgcgcaacca

SEQ ID NO: 16613 - DNA, 1225 bp, Setaria italica
  Peptide Sequence Number=SeqID_82587
ggtggaattacatcaaacaatctcctattagaaatgaagtccttcaattgtagagtagcactcatgagcaccactttcaactgactgatcatatcttctggcttgattttcactccagatcgtattttatcctgctgatctacatataaattcttgcgacccttaataattctagaaagcatcccaataagtatatctgtgttcaagctcctttcatgtgcctcatccaatatgatcaccgaatagcgcttcaacagaaaatcaccctggagctctcgcagcaaaataccatctgtcatgaacttgatggagcaattacttcccaccaatttgtcatgccgaacttgaaaaccaacttccctccccagcttaagtcctaactcataggacaccctcctagctgtggcaaggacagcgacacgtcgtggttgggtgatcccaatcatccctcttctgtcagctcgatcacttgtgccaaagccagcttcatacaggaactgagggacctgagtagttttaccgcagcctgtttctccacaaaggattactatagaattttcataaatagcttccattatttcctgctccatcattattattgggagatctctccttgccttctcaacctcatgcggtcttgacacaggcacaacaattggaggatttatgcactcctgcatggcagcttccccttgtcctggctctttatcctgcaaatttagctctgatccagagcaacttggaattgaagactgaattttctgatttgccaacaggtggccgttatcactaggctcctcagttttgggctctggaatgcttactccaacatccatctttggttggcattccatagctttccttggatcattcttcatgtttttctcatgtaacctaccaggatcctcactttttacaggctcaacaaacttgggtggcaaaatgtgctccacggggtcactgttttcagaaaatttctgatcaccatttctcttgaatagcgagagttcttccggaacatccaaaccagccttggacaactgcatggcacgcctacgtttttctttcaaagtctcaacctgaataacagagtaatttgaaatgcacctgtatattgattaaaaataactaaattatgaggtcataggttggtccacatacttgaccaatagtccctgaagcatgcagcagtgaatatgcatcttctgagatcttgtgcttctga

SEQ ID NO: 16614 - DNA, 2416 bp, Setaria italica
  Peptide Sequence Number=SeqID_82588
tttaggaatacaagcaattccatgcatctctcagtgctgctcggctgtcaattaattttttaccaatctttgatttttgtttaatatgcatcctgtcaagaagatctccaactcttctttggctggcaggcccgaaggcaaaagatggtgacagtgccaggaaatctttcgcattccttagacatggcaagacatcccccttaagcaaagcacacacaaatacctgcaggcgactggtgttgtctttgataggtaaactatgcaagggaagctgccaattatgtcgagaaaagaccggactaacataacaatagacttggtcattcatggggtcataatagggttttggatcttccaatggtgcagagaaggtgcagagagaaccggcatactttaaaagccaccctggctttatagtggttacaccatgcatgtataacctctttgtactaagtagctctgagtaaactacaagctctggggcaacttgggcaacagacgatgatcggtgcagatatatggtatcattaagcgcgcaagattgatagcgaatagctcgaactttacgatcatctcctgatgctctggaataggtgtgatttctccttgcaactctatcagcccatccagcacagattccttgcccaagaagttcctcttcattcatttgcaatggtcttttactggactcattcctccaggcctgctcaacatcatcagaatctccataattccaagcaaattccttgcaaaatttgctgtggtgaaatattaaacggagaagttgctttctcaattttgacatctcttccattgttttgagatgaagtgaattaattctgcagaattccacagggttttctgacaactcaaaaaattgtagggcacgggcaatggttaaagcatcactgctagggttagaaaatttttcctgtgcctctctaaccatggcattgtgcttcttccgtcttttcctttcacatggatcattagcttctggattcgtgttatgttcttccgattcgccattaatatcacattcatccaactgcttgagaaatggattagtaaaactcaacactgatgcagcagcagcagcatatcccagtatgaagttagatctagcaaagccttgctggctcttcaaaatcttaatcactgtcagaagaagacgagaatgtcgtgggctcatggggtattgtgccatagcttttcccattggtgtaagttttccatcataatcatcatggctataaagtgcttccaatgcctttaagcaacgctcagcttcaaccaaactttccttgtttggaggtgtagggaaaggaaagttcacaaccttatggatacccataaacttgagcataaggacaatgccttcaactggaattttcttaatctcaggttcagcgaattcaggaaataaatcgtctttaccatatgctgcagctgagtagagacggtaacagtgcccaggccctgttcttccagctcttccagcacgctgggatgccgatgccttgcttatccattggacttcataacttgacatgccagtagcatggtcgtaattcttaaccttttctttcccagtatcaactacatattgtatgccgggaattgttaaagaggtttctgcgacattagttgccaccacaactaatctttcccccttgggtatatcttgaaacacttgaagctgctgtgaagctggtaacattgcataaagtggcaagacacggagtctaccatgcgatacaggcatacgttctgtacatttactgaaacaactaacagatggactagacttttcttcacttgtagcatcacttgatttctcaacactttctggcactcctgatattcctgacagagctccaaatgacgccttcaacacagatgagttctcagcgtctttccaaaatgataatactggagcatcctcttctgtggtttcatatgtaacagactcttcatcgtcagtatcagtatccatttcactttctgtttcattgtcagaagaaaaagaatttggcccaggatccatatcatcatcatcatcatatgaataaaatatgtcatctgggtgctcagatttgttcctatcaatatcatatgcttccaaaatttccttatcatctacttctgggaacgggccattatcatcgccatcaactttttcaggcttcttagcagtttgcaccttggatgctcttcggaatttcttacacaagtagtccacttctcgttgtccagtgacaaatacaaggattccacctggtggaagcctcttgtggattgacataacctttttataagcttgccctaaataatcatcatgtgtcctctttgagaagtgaactgttactggaaactgccgcacaggtaccttaacagctggtggaattacatcaaa

SEQ ID NO: 16615 - DNA, 3093 bp, Setaria italica
  Peptide Sequence Number=SeqID_82589
ccaccacatgagcagccacagtacaatctcaggatgtacaacttgcacattccgtcacagaacaaacacagctgaccttatgttaacaatgaagttaaggaaatggaacaccctctgcgttgtccacccatactcaggtaccctacactcgattcttatcagttggaccatgacaaatgcttcttttgtatcttttctgctacaagtccaaggtgatgttagatgagcctataaagggcaaatcctgaaaaaatgtcaccacggcaaagaagcttctatcagttaaccaactgcaccgtaatcttcttgactagcctttaactttcttggacctctttgggaaaagctcatgcccctcaagaagaacctcttggtgcatctgctcccattttaagtcaaactggctatggaatttatcctggtaccacgcctttatctcaggatagagaaaatttggatcagcattccatgcatctctcagtgctgctcggctgtcaattaattttttaccaatctttgatttttgtttaatatgcatcctgtcaagaagatctccaactcttctttggctggcaggcccgaagacaaaagatggtgacagtgccaggaaatctttcgcattccttagacatggcaagacatcccccttaagcaaagcacacacaaatacctgcaggcgactggtgttgtctttgataggtaaactatgcaagggaagctgccaattatgtcgagaaaagactggactaacataacaatagacttggtcattcacggggtcataatagggtttcggatcttccaatggcgcagagaaggtgcatagagaactggcatactttaaaagccaccctggctttatagtggttacaccatgcatgtataacctctttgtactaagtagctctgagtaaactacaagctctggggcaacttgggcaacagacgatgatcggtgcagatatatggtatcattaagcgcgcaagattgataacgaatagctcgaaccttacgatcatctcctgatgctctggaataggtgtgatttctccttgcaactctatcagcccatccagcacagattccttgcccaagaagttcctcttcattcatttgcaatggtcttttactggactcattcctccaggcctgctcaacatcatcagaatctccagaattccaagcaaattccttgcaaaatttgctgtggtgaaatattaaacggagaagttgctttctcaattttgacatctcttccattgttttgagatgaagtgaatttattctgcagaattccacagggttttctgacaactcaaaaaattgtagggcacgggcaatggttaaagcatcactgctagggttagaaaatttttcctgtgcctctctaaccatggcattgtgcttcttccgtcttttcctttcacatggatcattagcttctggattagtgttatgttcttccgattcgccattaatatcactttcatccaactgcttgagaaatggattagtaaaactcaacgctgatgcagcagcagcagcatatcccagtatgaagttagatctagcaaagccttgctggctcttcaaaatcttaatcactgtcagaagaagacgagaatgtcgtgggctcatggggtattgtgccatagcctttcccattggtgtaagttttccatcataatcatcatggctataaagtgcttccaatgcctttaagcaacgctcagcttcaaccaaactttccttgtttggaggagtagggaaaggaaagttcacaaccttatggatacccataaacttgagcataaggacaatgccttcaactggaattttcttgatctcaggttcagcgaattcaggaaataaatcgtctttaccatatgctgcagctgagtagagacggtaacagtgcccaggccctgttcttccagctcttccagcacgctgggatgccgatgccttgcttatccattggacttcataacttgacatcccagtagcacggtcgtaattcttaaccttttctttcccagtatcaactacatattttatgccgggaattgttaaagaggtttctgcgacattagttgccaccacaactaatctttcccccttagggatatcttgaaacacttgaagctgctgtgaagctggtaacattgcataaagtggcaagacacggagtctgccatgcgatacaggcatacgttctgtacatttaccgaaacaactaacagagggactagacttttcttcacttgtagcatcacttgatttctcaacactttccggcactcctgatattcctgacagagctccaaatgacgccttcaacacagatgagttctcagcgtctttcaaaaatgataatactggagcatcctcttccgtggtttcatatgtaaaagactcttcatcgtcagtgtcagtatccaattcgctttctgtttcattgtcagaagaaaaagaatttggcccaggatccatatcatcatcatcatgatatgaagaaaatatgtcatctgggtgctcagatttgttcctatcaatatcatatgcttcaaaaatttccttatcatctacttctgggaacggaccattatcatcgccatcaactttttcaggcttcttagcagtttgcaccttggacgctcttcggaatttcttacacaagtagtccacttctcgttgtccagtgacaaatacaaggattccacctggtggaagcctattgtggattgacataacctttttataagctagccctaaataatcatcatgtgtcctctttgagaagtgaactgttactggaaactgccgcacaggtaccttaacagctggtgggatcacatcaaacaatctcctattagaaatgaagtccttcaattgtagagtagcactcatgagcaccactttcaactgactgatcatatcttctggcttgattttcactccagatcgtattttatcctgctgatctacatataaattctggcaagtgccaaaggttagcagtgcacttttactttaatttatatgaaatgaaggtttttttcttggataacgaaatagagtttttaagtttc

SEQ ID NO: 16616 - DNA, 767 bp, Setaria italica
  Peptide Sequence Number=SeqID_82590
cctggagcagccgctcatggtgtacgagttcattcccaacggcacgctcgctgaccacctttacggcggcaagagccggccgccgctcccctggcgccagcgcctggccatcgcacaacagacggcggagggcatagcgtacctgcacttcgcggccatgccaccgatctaccaccgcgacatcaagtcgagcaacatcctcctcgatgaccggctcgacggcaaggtctccgacttcgggctgtcccggctggcagagcaagggctgagccacgtttccacgtgtgcacaggggacgctagggtacctggaccccgagtactaccgcaactaccagctgacggacaagagcgacgtgtacagcttcggtgtcgtgctgctcgagctgctcacgtcgaagcgcgccattgacttggccgtggcgctgacgatgtcaacctcgcagtgcacgcgcagcgggcggcggatgacgagcgactcatggatgtcgtggacccagcgatgaaggagggcgcgacgcagctcgagctcgataccatgaaggcgctcgggtttctagcgctaggatgcctcgaggagcgccggcagaacaggccgtccatgaaggaggttgcagaggagatcgagtacatcatcaacatcgaggctggcggccatcccatagagcagcagcacagcacataatctgctgctcgatgggtgactttactaattaccagcgaatcttcaagataggtaagcgccccgcttagtacacccttaattct

SEQ ID NO: 16617 - DNA, 406 bp, Setaria italica
  Peptide Sequence Number=SeqID_82591
ccaatcttttcttttttgtctcgctagctgctggtcgccgcaacaagaaagcgcgcaagcaaggggaggggggcggccggccggccgagcactcgataataaagctcgcgtgctcggccaggcctggccacagccgagccaaccacccgcttagcgtcaccccgctacaaaacaccgcttcctgcggtgcccccgagccaaaatcgcgggaccgaagccaatcacaccatcacccgggctcgcaatcgcatcgcatcccccctccgctctggctggccggccggccacgcgctttgacgaggccgccgccaggtagcggcgcggcgctgataaaaacgccgcgacctggtgcctgcagctcccactctttcggttgctccgctctctcgccacgcggcttgcgttg

SEQ ID NO: 16618 - DNA, 1699 bp, Setaria italica
  Peptide Sequence Number=SeqID_82592
tacgtgaccccacgccccagtcacagggggagtgggcgctggggaacaccgcgtcggggtgcgcgaggcggaccgtgctggaatgccccagcgacgggttcctcaagatgccgtacgccgtgcagctcccgaacggctcggcggaggcggcggccggagcacggagcgacaaggcgtgcgcggtcgcctgccagcgagactgctcgtgcaccgcgtacctctacgacggagccaagtgcttggtgtggaacggcgagctcgtgaacctgaggagactcccgtccaacgatcaaggcgaccaaggcgtcgcgggggccgtgcttcacctccgtgtcgcggcctcggaggcgccaccgcctgcggcggttgcgcattcttggaggaagtctatggtgatcctcagtagctcggtgtcggtcgtggtcctactactggcgtgcctcataatctttgtcgcggtggcggtggtgctgcggaagcggcgggggaagggcaaggtgaccgcggtgcagggctcgctgctgctgttcgactaccaggccgtcaaagcggcgacgcgggatttcacggagaagctcgggagcggcagcttcgggtcggtgtacaagggggttctccccgacaagacgctcgtggccgtcaagaagctcgacggcctgcggcagggcgacaagcagttccgcgccgaggtggtcaccctcggcatgatccaccacatcaacctcgtgcgactccgtggcttctgctctgaggggaacaagagggctctcgtgtacgactacatgcccaacggctcgctggacgcgtacctgttcaagaacagctcgggctccaagttcctgagctggagccagaggtttggcatcgcggtcggcgtggccaggggcctggcttaccttcacgagaagtgccgggagtgcatcatacactgcgacatcaagccggagaacatcctcctcgacgaggagctgggcgcgaagctcgcggacttcggcatggccaagctcgtcggccatgagttcagccgcgtcctgaccaccatgcggggcacgatgggttatctcgcgccggagtggctcgcgggcgcaccggtcaccgccaaggccgacgtgtacagcttcggcctgctgctgttcgagctcgtctcgggccgccggaacaacggctcctcggaggaggggggccgctccgccgtgtacttcccggtgcacgccgcggtcaagctgcacgcgggcgacgtggtcggcctgctggacgagaagctggccggggatgcctacgtggaggagcttgagagggtctgcaaggtcgcgtgctggtgcattcaggatgatgaaggcgaccggccgaccatggggctcgttgtgcagcagctcgaaggtgttactgatgttggactgccgccgataccgtcgcggcttcacatgctggcgacggctaatgggtgcgccggtggggttgccgaggacgaaccaaaaaacggtagcaaattagcgacagaagtgtaacgtgtattagttactgcactggtgtaagacctgtaatgctagtttcagtgtttcagcatgatttttcctttgttacatcaagagtgtagtacgagtactatgtagaaatcatagcaggcagccaagcaccccggcagggttagatcctctgcaacaggagctgccaatgattttttcacttaaaaaaaaaa

SEQ ID NO: 16619 - DNA, 546 bp, Setaria italica
  Peptide Sequence Number=SeqID_82593
acccctctgaataaatcacaacatcttgtagtggacgcactcgatcaatatttcgagcagccagagttgagcttgcaaagtccaaaacacagatgtctgtgcatattccgagcaccaagacagttttgatttggtattttccaatccaatcagcaaaaacactggatccatccttctctatgcagctgatgtacccatcaatacaacttttcctctttacagtcacatttggctccttttccaaccactccaaatctggaacaaaattctcctccccattaccaatgatacaatgagggggatatggtggttccggcttatctgtatagtgggtatcaagaaacgcgaagattggccagtttctgtcacagaacaccttagagagcctagcggcctctcccaccatcttttcaatctgcttgtttggtgcaacaggagcgaggttcccggcgccgacggtgcagaagccgttgcagaggtcgacgagtacgagccccgccctcgcggcgggaggacgagctccccgtcggtctggaacgggatccg

SEQ ID NO: 16620 - DNA, 138 bp, Setaria italica
  misc_feature (133)..(133): n is a, c, g, or t
  Peptide Sequence Number=SeqID_82594
ccacggtagtccttgatgagtgttacacggtcctcaaggactaccgtgggaagattgagactgagctcaccaagatctgtgatggcatcctcaagctgctcgagtcccaccttggactcggggcagtggaagngggga

SEQ ID NO: 16621 - DNA, 374 bp, Setaria italica
  Peptide Sequence Number=SeqID_82595
ctacctcaagatgaagggtgactactacaggtaccttgcggagtttaaaactggatctgagaggaaggatgcagctgagaacaccatggtggcatacaaagctgctcaggatattgcactggcagagctgtcccccactcatcctattaggcttgggctggcactcaacttctcagtattttattacgagatcctcaactctcctgaccgtgcttgcaatcttgccaagcaggcttttgatgaggcaatctcagagctggacaccctgagtgaggaatcctacaaggacagcactctgatcatgcagcttctgcgtgataactcgcccttgggagcctccttgatttcttcggcagcatcctccgtgatgtctg

SEQ ID NO: 16622 - DNA, 338 bp, Setaria italica
  Peptide Sequence Number=SeqID_82596
gtgaccttgtcgaaaataggtcatgcctttgaatatttctaatcctgtctggtgttctgaagtcttctgcgagtcaaagaagaatggagattttggttatttagagtctgtttctttattgaaaccactgacatgtgacagacatcatgctgatgctccctcctttgcaattgcaggcttttgatgaggccatctcggagctcgacaccctgagcgaggagtcctacaaggacagcactttgatcatgcaactccttcgtgataacttgaccctatggacttccgacatctcggtaagacctagtatttcccaaatataacgttctgacactccttcc

SEQ ID NO: 16623 - DNA, 1090 bp, Setaria italica
  Peptide Sequence Number=SeqID_82597
gcaatcaggacattgctttggctgagctgcctccaactcaccctattaggcttggtctggcacttaacttctcagtgttctactatgagattctgaactcacctgatcgcgcatgcagtcttgcaaagcaggtttgtttttctgcacaatttgatgtttggttagtatattttctttgtggatctggaatgtttgtgtatggaattgctggtctgttgtcgatgatatgctgcaattgtatgatcatttgccataagaccattgttaattgtgcggtaaggaaaacatgggcataggacattagtgtcaccatattttcacactagaggaccatatgtactacgttgttacctttttctcctttttttgcatttctagactccatactgctcatccttttactttggtgacacttttatgttaccttttctggtgcgtgaagcctattgtatattagaactgcattaatatataatactatttgcttttgggtcatacctgcagtcataaacatgtgcactttttatgcaaggtgcacactttctgatatggacgggaaaccgaacattttggttccttactattccgtagttgacttaatggaaatttcatggaattagtatgatgggagacaacatcttttaattgcttgtcaactgttctgctgagtgtgcccacgagaaaaaggatcctattggtgtacctaacctttaatcattatctgccttaaaagttgacctatacttagtatggctattaggtgtcatcaatttcaaattgtccttgagtttgttatgcaaattctttggatctgcatcaaattgactttaggagaacaaatattaggttatcttttgcagtcgttcatattgcttcttaaaaggttttgggtttaggtatcctcagtcgcccatagacatcacaattgcttcttcaccctggtgcaaagattggtatttagcaatattggtattctgtctttttatgggtatatatacctggtcaattctttgtttgtgagagtaaacttagtgtggcttgtgatgttactaaactgcaatgcatgtgaccttgtacgaaaataggtcat

SEQ ID NO: 16624 - DNA, 1399 bp, Setaria italica
  Peptide Sequence Number=SeqID_82598
cagaaagctgaaagcgagaagcatccccccaccccccccacccccccaaaacggggaaaaccgaagcagcagcagcgcggagtttgacctttggtggactgttagaaaccataaacagtgaagatgtcgcagcctgctgagctttcccgtgaggaaaacatttacatggctaagcttgcagagcaggctgagaggtatgaggagatggttgagttcatggagaaggtggctaaggcagttgattctgaggagcttactgtggaggagcgcaaccttctgtcagttgcttacaagaatgtcattggagcccggcgtgcctcatggcgcatcatatcctccattgagcagaaagaagagggtcgtggcaatgaggaccgtgtcactcttattaaggactaccgtagcaagatagaagttgaactcaccaagatctgtgatggaattctcaagctccttgattcccaccttgtcccctcatccacagctccagagtccaaggtcttctacctcaagatgaagggtgactactacaggtaccttgcggagtttaaaactggatctgagaggaaggatgcagctgagaacaccatggtggcatacaaagctgctcaggatattgcactggcagagctgtcccccactcatcctattaggcttgggctggcactcaacttctcagtattttattacgagatcctcaactctcctgaccgtgcttgcaatcttgccaagcaggcttttgatgaggcaatctcagagctggacaccctgagtgaggaatcctacaaggacagcactctgatcatgcagcttctgcgtgataacttgaccctgtggacttcagacatcacggaggatgctgccgaagaaatcaaggaggctcccaagggcgagtctggagatgggcagtaaagatgatccatgtgcccagaaactacatttcagtgttcgtctactagtgaatctgccaatgtgctatgggttcttgtttcgttggtataggctgtattgttgcttgtgatagctggaaattggagactcccatttgtgtcgtgctagaaaggcttgcgagtagcttgctggttggcaggtgttgtcaagctacacttggttgagggagggagcctttatttatttggattattggtgttactttgtatttgtaggttgagtcctgttgctcgtctccatgttcgtctcttttctattgttgattttgatgtatttccgtaaatgcgcatgatgctctgaactgaattagtttttgccgtctgattgtgatgctggatgttgggagtgaccttcgccctctgtaacctgcaaccacttcctttctcctaggacggcaacaaattttcttttaaaaagacgaatacaagtcttgaagctattgtctgaa

SEQ ID NO: 16625 - DNA, 1481 bp, Setaria italica
  Peptide Sequence Number=SeqID_82599
tgtcaagcttggggacatctaagtttctagtacacaagctttcaaaataatccagcatcaagtttagttgatgtttatgtgcaggcaaaattatcgaagcaaatacactagcacttactttactgttaaattacgggaattggtaggggttgcccacgatttttattctagaattccccctcctgaattttgagccacaagggaatgggtatcagttccacagatgtctgctcactcctgtattcatgtatcttaaatcttagaggaacggattggctcactgcttcccacaattctgcagatttggcacactgcaagttttaggaactgaaccataagatggcatcagcggagctttcccgtgaggagaatgtgtacatggccaagctcgccgagcagggctgagaggtacgaggagatggttgagttcatggagaaggtagccaagaccgtggactcggaggagctcaccgtggaggagcgcaacctcctttctgttgcatacaagaatgtcattggagcccgtcgtgcctcaatggcgcatcatctcctccatcgagcagaaggaggaaggccgaggcaatgaggaccgtgtaacactcatcaaggactaccgtgggaagattgagactgagctcaccaagatctgtgatggcatcctcaagctgctcgagtcccaccttgtcccctcttccactgcccccgagtccaaggtcttctacctcaagatgaagggtgactactacagataccttgctgagttcaagactggggctgagagaaaggacgctgctgagaataccatggtggcatacaaggctgcccaggacattgctttggctgagctgcctccaactcaccctattaggcttggtctggcacttaacttctcagtgttctactatgagattctgaactcacctgatcgcgcatgcagtcttgacaaagcagggcttttgatgaggccatctcggagctcgacaccctgagcgaggagtcctacaaggacagcactttgatcatgcaactccttcgtgataacttgaccctatggacttccgacatctcggaggaccctgcggaagagatcaggggagggcacccaagcacgactcgagcgaggggcagtaaagacggatttacgtgccctagaaactagtcgctagtgtttgctgctgtctaatgacactatgcaatgtgatctggaccctggtttctttggtgcgacgctgtagccgtgctatgattattgtcgggaaaatctgtgggctcccccatatgagatgttgccgggcaaggcctcgggtgcgtcccacttgttggtgggggtcactggagccaggtttggttgggttgggaagcccttttaaaactgttggtgttaactttgtattttaccttttcatcgcagtttattgtgagtggtcctgcgtcaattgctgtctctttttgggcttctttaaagtagtgtattcacaaat

SEQ ID NO: 16626 - DNA, 255 bp, Setaria italica
  Peptide Sequence Number=SeqID_82600
ttcaaatctgcatgctctgccatcctcaggcctggttcagcttgctcaaccgagccttggccaggtcaagttgtttctgctccgttgtgaccaccgatttaacgctcttgcggaagaagatgttgccggccttctggtacaccgcctccttcatgagctccaccttcttctgcaccacctccttctccggtgccgaccccgtcgtctccgccgccgccgccgccgtcgccatctctgtccgcgctccgagaaaac

SEQ ID NO: 16627 - DNA, 538 bp, Setaria italica
  Peptide Sequence Number=SeqID_82601
acatttggtctagagtttgttttctgtcgtctgtttttttttttaaaaaaaaagcatgtccctgtttcagcaatcagcagacttgtagcatcacgagcacaacagtattgcatctcaagcaaaatgagtagcattacatatggattaggcccacaaggcacgaccataaaatcgagcaacgaggtgatgacgaagtgttccacaattcaaatctgcatgctctgccatcctcaggcctggttcagcttgctcaaccgagccttggccaggtcaagttgtttctgctccgttgtgaccaccgatttaacgctcttgcggaagaagatgttgccggccttctggtacaccgcacgggagggatgtaggttgtcgagctccgcgatcgccacctcgtgcgcccgtatctccttcatgagctccaccttcttctgcaccacctccttctccggtgccgaccccgtcgtctccgccgccgccgccgccgtcgccatctctgtccgcgctccgagaaaacccttcgccggaaagaactgcagag

SEQ ID NO: 16628 - DNA, 341 bp, Setaria italica
  misc_feature (250)..(341): n is a, c, g, or t
  Peptide Sequence Number=SeqID_82602
atgaaaattatttgaaagggaatatatactagcagaaaaataatttgtaagctgtatttatggctattttgaggtgttattgctttctgtatttattaatgcatcattgtatcatatacttgtatacgccaaccaagtttgtagaaactggtatctgactggttttggtcaagtggtgcccaccagtttttgatgaaagtatgggtggaaagtcatgtcaattgataccaaaaaaaaaaaaaaaaaaaannnnnnnnnnnnnnnnnnnnnnnnnnnnnnnnnnnnnnnnnnnnnnnnnnnnnnnnnnnnnnnnnnnnnnnnnnnnnnnnnnnnnnnnnnnn

SEQ ID NO: 16629 - DNA, 237 bp, Setaria italica
  Peptide Sequence Number=SeqID_82603
cttccccgcatcgaccaacaaccatagcgacgcggcagcaagccagcaagctcctcctcctcctgccctgtccaccatgtgctgcagcggcgacaactgctgcctgctcaagtgctgcggcaaattgctcttgtttctcctatcagccggcttattcgtgctcatctactgggccatcttccagccccaccagattcgcgccaccgtcgggtccgcgaccctatccaacctcaccgt

SEQ ID NO: 16630 - DNA, 344 bp, Setaria italica
  Peptide Sequence Number=SeqID_82604
acatgataaaactatatgcacaatggcatacaatacttccccgataacatttttttctagcaaacaaatgaatatcagcatcgctaataaagtgggaaaattttagtatcaagtcaagacttccatctctacaccactgagattacaatagcaagcaaagtactatgagacaaccgaacctagatcctaattaatttatcatacatccaaggtgatagtccccgaacggattagaaaataagcatcacgataatttgttaatgcataagatggtcggggataatgattgctcacgggtaagattctcagtatcgtcgtcgagccgcttggtgttgagggatgtg

SEQ ID NO: 16631 - DNA, 442 bp, Setaria italica
  Peptide Sequence Number=SeqID_82605
aatacacgcccagcagctgtagaagctggtacgtcctcactgtcagccatgctcaaagtcacagagctatattctccattgttgtacaaatggccatgcaactcttccaaaattttgtaaaacagtacacctcgcagctttgtgaggtcagaacgaacatcttgaagagcacctacctttaaagttttgttaggtgtgatattgcgcttgaaggccttctcgttctagcatcagcattgattggacatgcaactgtactgcagcatacagctgcttctctgccattaagttttcgatccgagcaggaaccttggcaacatcctcaacctgatccaaaagagagaggacatggcgtagtgtgagggaccggtaccacagctggccgaggtgcttattcttcctgccaagcagcttcttggccttcttgtcctattcttcttct

SEQ ID NO: 16632 - DNA, 864 bp, Setaria italica
  Peptide Sequence Number=SeqID_82606
tagtacccttcttctagttgaattcaaggccgaagaatcaattcagcacatactgatctcatgcgtgtttgcctgccaatcagtagcaaatgagagcatcttgtggtgctcagctggagcccatgcactctatgagcttctgttaggctgttctggtcgttaaaacattgtgtgcggcgagccggcgagcacgtaactgctttgtaccctgggggtgggtgggggtgggttgggggggaacttttgacctcttctttgtagatttttttttctcttcttattgacatgaaacgcgggtctctggatatggcctgctgaacacattttcggtaatctacaaatattgctggcaagaagtgctccttcaaaaagttatctacaaaagccaataagccatcactcccaagttgtgagtacttctgaggcaacatcgatcctattttattcataaactgcaaaatcaaatatctccaatgaacaacatagtatactgtgagacgcatgtacaacagacaaccacaaggcaagtcacctcaaaaacaggacggtaaactgacgcggctaggaaaattccttggtcaggtatgacacttgctgttccataaccttcttgtggcacatttgaatttcttcgccatccttgaccttcatttggcactgaggttgctgaatcagtaatgcggaaagcgaaagaaaggccttccgatccatccctcttttccttcactgggtccttatttgcaagtctagctgtctggacagctgcatcagcagtagcagcttctggagttgccctcaaaatttcacaaagaagttgctggcactcactctgcacaactgatagtgagaatgcaacactaaaac

SEQ ID NO: 16633 - DNA, 449 bp, Setaria italica
  Peptide Sequence Number=SeqID_82607
gagcgggtatgttgaccatgctggctgtgattggcggttggtggacttatgaatgattccccaagcctttcaactgaatcagctaaatattccaaagagtcactaagagaagccaacaatatcagtttctggtcatcatgtatcaagttttcctgctttattgggcacatatctaataagagatcacttagttcaatctctacttcgactgcctctgcatcagtaacattgttatcaggctgactagtagaattttgcaaataaatgtttgctggttccaggcgcattaaactttcaacatcattccttgaaagaagaatataactttgcttttcaaggacagcctgcaattttcacatacaatgaaagaatcatgaactctccacgtgacacaagaaaacagtctactagggttgataacagtaggagtcaaactgaaattgcttcaa

SEQ ID NO: 16634 - DNA, 534 bp, Setaria italica
  Peptide Sequence Number=SeqID_82608
tggttcgtttaaaaactaatttgttgttgcggtcgagtccggcgagcacgtaactgctttgtaccctgggggtgggtgggggtgggttggggggaacttttgacctcttctttgtagatttttttctcttcttattgacatgaaacgcgggtctctggatatggcctgctgaacacattttcggtaatctacaaatattgctggcaagaagtgctccttcaaaaaagttatctacaaaagccaataagccatcactcctgcacaatgtttaaaaacaattgtaaatataaacatggtctagttacaaacctgccgtatttaaaagataaacatcagaaaacagacaatcaattttcagaaaaagatgtaggccataaaatgcttcatagttccaatcatgtacatctgctattaggtagcatcatatgcctattattttggaatggagtcaattcacattgagaatttagttacattatgcttgtcgtaactctgctgaccacatatataagggaaacagcctcatatcctact

SEQ ID NO: 16635 - DNA, 3516 bp, Setaria italica
  misc_feature (1)..(7): n is a, c, g, or t
  Peptide Sequence Number=SeqID_82609
nnnnnnnttttttttttggttactgaatttgatggcatcattaatattgatccagatagtcaacacatttacaaaagtcaacaatggaaagcttccagaactacatatctacattagaaatttagaataaatgataattaataagacatacaaaaggataaatgtgagataaaaatgaaaacaaagtaaaaaagaacaaagataagctaaagctacacaacactgccataaaacaggtggggctccaattggtatccaaagccgatataaggcatttacagaaaaaaaaaaggcaatacaaggcatcttgaatcgaaaatagtactatcatgtttgaagttgatctagtgacccaaaatctgtgagatgcgtcgttcagcatccataggtatctccctaccgggcacattgaccttcagaacactcaagtattcttttgcggaaaataaatattcatgttcggcgatgaatccaagcaaagactcgaaaggcaaatttaataactcatagaatgttcgaacgcgatccaatctttgttggactgcttcactatctattgacggtatggccgcaagagcctgttctagagctatcgaattcctgcatatttgctgaactcctaacaagttgattgacttcatttgagcaagtgcctttattgacgcattagcagcaacactggaaatcccaccaaatacataattcctttttgattctgtgatataaggagccatttcttcatcccgacgtgcgatctgagttgtgagggagataataaagtcatcaggatcttcagcatcttgatcttcgatgtattctcttttggtcatttcctgcatgtgatatacggcctctagttgcatttccaatctcaatactctgacacaatcaatagctagccttctgtactcattagccagagatgcaagaccttttggaattgcactagatgagcgggtatgttgaccatgctggctgtgattggcggttggtggacttatgaatgattccccaagcctttcaactgaatcagctaaatattccaaagagtcactaagagaagccaacaatatcagtttctggtcatcatgtatcaagttttcctgctttattgggcacatatctaataagagatcacttagttcaatctctacttcgactgcctctgcatcagtaacattgttatcaggctgactagtagaattttgcaaataaatgtttgctggttccaggcgcattaaactttcaacatcattccttgaaagaagaatataactttgcttttcaaggacagcctccatatatgatgcacgacatctttcatgagtacgttctaaaaatgtgcgtacatactccacaagctcagtcgcatagtttggcattaattgaacccatccaagaacctctttagctataatatcaactgctagaagcccttgtagcacaggacgtccaagttccaccaatgaatcatatactgaggttgcatgtacacgtggtctaaatgctgctgggctggatatggcctgctgaacacattttcggtaatctacaaatattgctggcaagaagtgctccttcaaaaagttatctacaaaagccaataagccatcactcccaagttgtgagtacttctgaggcaacatcgatcctattttattcataaactcaaaaacaggacggtaaactgacgcggctaggaaaattccttggtcaggtatgacacttgctgttccataaccttcttgtggcacatttgaatttcttcgccatccttgaccttcatttggcactgaggttgctgaatcagtaatgcggaaagcgaaagaaaggccttccgatccatccctcttttccttcactgggtccttatttgcaagtctagctgtctggacagctgcatcagcagtagcagcttctggagttgccctcaaaatttcacaaagaagttgctggcactcactctgcacaactgatagtgagaatgcaacactaaaaccaccagtagcttgggaagattcggagtcaggattccagcttgcatccccatttacaatatgaggtgtgtttatgttgtcaacctcagatgttgacttttgttcaagaagatctccaacaataatatgattctcaagtatgtctaaaagacattcaaatattgatctaagaagttgagtagctgcacgctgagcatctcctgtgggtgccatagctggggaaatgggactgacaacaagttgcgctgccattacagatgcaccattctttgttttctgtttgagcatctggaaccggggaatgggtccatctgaatgtgacgcatcagatgttctttttgcagctttatctgtgctggattttgaagcctcttcagaataggctttaatctttgaagtgataacatcatggattgtagggcgtactcgttggcatatcacagctcctgcagctgcaacctttccaagcatggataagcattgtaccaatgttctcaagtatttcacattaaggggggcatctgccttgatcattgaatcaatgaactcatctggtgccgcacaggaaagaaaaattgggatttgacgagaaatacttttcgaatccttccgagagcgtccatcactttcacgcatgtctaagctactatcatcatccgggccatcaaatgaagagcctccatcaatagaactagtttttggaaacccatctgcagccactgctccactaatgtgattgtcacctttaattgacctagttctccttgaaagaggttgcatgctatttaatacacgcccagcagctgtagaagctggtacgtcctcactgtcagccatgctcaaagtcacagagctatattctccattgttgtacaaatggccatgcaactcttccaaaattttgtaaaacagtacacctcgcagctttgtgaggtcagaacgaacatcttgaagagcacctaccgcttgaaggccttctcgttctagcatcagcattgattggacatgcaactgtactgcagcatacagctgcttctctgccattaagttttcgatccgagcaggaaccttggcaacatcctcaacctgatccaaaagagagaggacatggcgtagtgtgagggaccggtaccacagctggccgaggtgcttattcttcctgccaagcagcttcttggcctctgccatctctcccttaagtccagtaatgctatccgcagactcgctgaacaaccgtaggatctgggagtagttctggatggccttgttgaagccgtggtggtaggcgtgcacgacctcgtcaacgacgtcctcaatgagatcgctctgctccttgaggaactggatctcgccgtcgcggtccttggaagtgaggatgtgcacaacatgcggcagcgagtcgaaccgcgcggccgcccacccctcatcgatccgcgacaatccttccttgaggtaggatttgtcggccggaatggggaggccatcgaagatgccgcggcggtgaccgctgcggctcatc

SEQ ID NO: 16636 - DNA, 463 bp, Setaria italica
  Peptide Sequence Number=SeqID_82610
tcgaccacgatcacgcctcccagtacctcaagtgcaaggagatgctatacgaatcaccatacttatttgctattagttagttaattaattggtttttcagaactcaacttatgaatatgaatcagtcatcaaacttaactttaacaagggcagggcgcaggacgacaactccctggaggtggactttggtgccctggacgacctctccacgcctcgcctcacgctgccttcctccatcggcaacgggatgcacttcgtctccaggttcatgtcttccaagctcgccggcaccaccatgagcatgaagccgctgctcgactacctgctagcgctcacccaccggggccacgacctcatggtcaatgccaccctcgacaccgtcagcaagcttcagacggcgctgctccacgccgacgtcttcctcgccggcctgcacggcgacacgccgtaccaaaagttcgag

SEQ ID NO: 16637 - DNA, 378 bp, Setaria italica
  Peptide Sequence Number=SeqID_82611
gccgccgccggaagaggacgatcccccttccggagatccggccgaggaagacgacgtcgcgagcggcggcggctgcgagagttgcccatccgaggcgaagaggtcgaggtcgaagtcgacgtcgaggtcgagatcctccagatcgaagtcctcgaaggcgaagtcgtcgccgtcaacgggcgcctgaaattcggggaaggggaggtccgcgaaggggtccggcgcggccggcgcgtggagggtcggctccgccatgggcttcgccttcgccgatcagatcacggccggcgtatgcgcatacacgacgccggggaagttgcggttgttgggtctcgtggggtggatcgcggtggccgacgcggctgcggaagcgtgcag

SEQ ID NO: 16638 - DNA, 337 bp, Setaria italica
  Peptide Sequence Number=SeqID_82612
caatttcttcttcttcttgggagactgacagcagcaatttctcagtcggccacctgcaccccctatcacacacaaatcactttctcttgttttgtttcctctgctcgccgtccggcagggcagctgccgtcgccgggctcgctagcttccagattcacatcacgccccgccacctgccaccttacttttcaccttcctcgcgcacaccccgccgccggaggacgctaatggacgccgccgagctgcctctcgtctaccacatcggcctcgtgctggccgcgctctgggccgccggcgccctcggcatccgccactccttcctcttcctcctcgcctt

SEQ ID NO: 16639 - DNA, 741 bp, Setaria italica
  misc_feature (10)..(10): n is a, c, g, or t
  Peptide Sequence Number=SeqID_82613
cgacggtgcnttcccggagccggagctgccgaccagcgcgatggctttccggcgggcacggtgagcgagaaggcgcgcaggatgggcacgtccggccgcgtcgggtacgcgaagtcgagccccgcatctccacccgccccgtgacggattccagctcaacctggccgtcccgcgagatccccggcttgtggtcgatgatgcggaagatcttggccgccgcgacgcgcgccttggcgaaggcggccatgctgggcgccgactgccccagggcgatgcccccgatcatgacggagaacatggtggcgatggcgagccctccgttggtgcggtgggcgcgcaccaggtggcccccgtaccagagcagcagcccgtagcagcagaagacggtgaagtaggtgcctccgaggccgagccccttggcgacgccgctccggtatccgatcttctgcgcgacggccagcgccgccgagtatgcccgcatggcgcggtcctcgccgacgaaggcctgcacgatccgtatctgcgccagcgcctgctcggcgatggcgctggcgccggagagcgcgtcctggctccttgcggagagcttggagagcgcggcggcgctgaggcccccgatgacggcgatgagcgggacgacggcgagcgtgacgagcgcgagctgccacgctgcggtgaatccgacgacgaatccggcgacgaaggtggccatgtagtggatgttgtaggtttgcttctcgc

SEQ ID NO: 16640 - DNA, 290 bp, Setaria italica
  Peptide Sequence Number=SeqID_82614
cgtacttccgggacaccgtggcggtcggcgccttcggtgccgcggcggccggcgtgttcgtctcctgctccgccgggaactccggcccatccggcgccaccgtctcgaactccgcgccgtgggtcgccaccgtcggcgccggcacgctagaccgcgacttcccggcctacgtcacgctcccgacaggcgcacgcctcgccggcgtgtccctctacgcggggacctccccctctccccgccccgccatgctcccactcgtctacggtggtgggcgcgacaacgcgagcaag

SEQ ID NO: 16641 - DNA, 387 bp, Setaria italica
  Peptide Sequence Number=SeqID_82615
cgcctgttgcaaagttcccttcctcatctctaaacttagcaaacacatctgaggtgacattgaacccgtgcttcctgagcaagtagaaccgcagcgaggtgaggtagaggtcgccgccgccgtcgtcctcgtcggcatcgtggacgacggcgcccagcaggccgttgatctcctccccgaagcggtagtccaccccgatccgctgcagcgcgtcgacgagctccagcttgacggccaggtcgggggaggcggcggcggccagcacggcccgcctcagctcctcctccttggtccgcgcctcctccatcatggccaggagctccgccggcgtgcacggctggtggccgaggaagaagtcgcccaggggctcgggtggtagggccgggg

SEQ ID NO: 16642 - DNA, 442 bp, Setaria italica
  Peptide Sequence Number=SeqID_82616
cgggaaacggtacccggcccccaggggtcagtttgaccatcgacgaacgacgagagcacgccggcgccggcggcctagctgagactagcactaatctgaactaatgaaggaaattaatcagcgagaaaaaaatggagcaagctactgaattgaatctgacaggtggcgaggccggcggaggggcgccggggagctgctacgccggcgacggctgggaggtggggtcggcggaggacgggatgtccgggccgacgcggcagccctccagcatgaacaccacgtcgcccatggccgggcggtccagcgggtcctgcgcggtgcagagcagcccgaccttgatgcccagcaggaactcctcccactcggaggactccgggtccagctccagcaggcccggctccagcagctctgccaccgcgccgcgctgcagctgacgcttcaa

SEQ ID NO: 16643 - DNA, 256 bp, Setaria italica
  Peptide Sequence Number=SeqID_82617
cagagttcagctcagttcagttctgtgcagtgcagtgccggggcaggagagcgcgagctgtgaagtgcactaggctctctaggcagctaggaatggagctccaggcgaggtgcctctgcgtcgtcgcgatgctcgtggtggccggcctggcggggatggagacggcgcacggcgccggggagtgcggccgggtgcccgtggaccaggtggcgctcaagctggccccgtgcgcggcggccacgcagaacccgcgccg

SEQ ID NO: 16644 - DNA, 424 bp, Setaria italica
  Peptide Sequence Number=SeqID_82618
ggttaagaaaagcatgactattgtgatagatatgaaataattactgcatctgtacctttgttgaaatacattgtctttgctacctgccgcgtataaaccagcacaaccaacttgaagcttgatacacttagcatgacattgctgtactagtttctcaaaattatcgatttgagtggcatagcaaattatcattagcttcttataacttatttacaatataaacaaccattattgcccttacaactttgcattgtctttctgtatctcttaagttatgagatcactaagaagtgcttttcatcttgatcagcggcaagctggttccaagcaacaaaaatccacgaatctgcaaggtcccgaacttgatgacaaccactggggatcaaactggttggacaggtggatggcagtacgtccatgggag

SEQ ID NO: 16645 - DNA, 1749 bp, Setaria italica
  Peptide Sequence Number=SeqID_82619
cgaaatccaagcgcacggacaaaaagagggggccaggacagacggacggagcgcgaggggagggcatggtctctctcgtctccgccctcccgtctcgagcaaaatctctcctcttctcccgctcaggtcattgagttagtgaaagaggaggaggtatcatgggtatctcatccaagtggattaaatcattggtcggcataaggaagcaagaaaaggggcacaatgcagaaaaacaacaaaagggacaaaatgctgaaagcagtgaaactaggagctcttctgatcaatcgctgcacaaacggaaacattctttggatcctgaaggtgcacttgcagtcgaagaaattccagtgcaaagtgaagcattgactgatggcaacggcatacaaacgatttcaaatacgatttgtccaaacagtacatcacttgatgtacatgtctctcaggctgaacatgaaagtaaagaggatatggcagcaacagttatccagtctgcttttcgagcattcttggctaaacgtgctttacgagctttgaaaggaatagttctacttcaagcccttgtcaggggtcatgctgttagaaggcagacagaagaaacgcttcagtgtatgcaagcactggtaaaagcccaagctcgtgtacgagctagacaagttcgtgttgccttagaaaatcaagtggcacggaaaaagattcctgaacaagatgatcatgaaaaccatgtccgagaagttgagggaggctggtgtggtagtattggttccatggaggaaatgcaagctaaagcattgaaaaggcaagaagctgctgctaagcgtgagagggcaatggcatacgctttgactcatcagcggcaagctggttccaagcaacaaaaatccacgaatctgcaaggtcccgaacttgatgacaaccactggggatcaaactggttggacaggtggatggcagtacgtccatgggagaacagattacttgacagtaatgccaaagagagtatgccaaatcatgaagataagcaggatgaggaaacaaagtctcagatcacaccaaagggtaaagtgccaactttaaatactcctcctggcccaagcaagaagaaatgtgtaaaccacaaaaagtcatattcagatgttagttgtacttcatttgctcgaccggcaaatgttttgccatccacctctttgggatcatccaaacaaaaggcaaaggttacagatgaagtttttgaggaagtcagctcccagccaacagatgtagcttctaaggctatgcgcaatccaaaagataagctcgagcaagcaaatacaccagccaagaagcggttatccctgccaaacaacgttggcagggaggcaggaaaggggccaacccgcaggaattcgatgaacaggtctgatccaaaagcaagttgagttacaggcctgatcacacattcctgatctcccaatctgtaagcagttcttggggtgtttcttcagctgtgcgtgctatatctgttgtacataacattctcaaaagacatcctgcatcgggctgtgtttcatattcgtgttgtgcaatgttgctggtgtgttgtgccgtcttttcttatgctttcaccttccctgtaagttctaacatccgaaaggaggacatgtgttgcggttgtgcccgcctgaaaacaatgatcccgtgcctgatgtgtccttcctttctctggttataaaataattgctaaaatttattgtctttgcttttaaaaaa

SEQ ID NO: 16646 - DNA, 661 bp, Setaria italica
  Peptide Sequence Number=SeqID_82620
ttttttttttctcaaaactcatgatgattttaattttcaatcggggcaaaactgggacagcacgaacgaattcattacagcagcagtaagatgacaacgaatgtagaacacaatctcttctttacacaggggccactaaccaaccgatcgacgggacggaggaagagcaggaaggaatcgaagcagcgatctcgctcaccatacggccgcggaatcgaatctgttcaggatgaaaagggcaccatcttttctggttccgacgtcctttgaccaatcaaccggcattcctcctctgctccgatccgatgaccaatggggggtggtctcttggaggtccacgggagcggtcaagcccggccggctccgtcgtgggaaggcggcggcgggttgaagagcggcggcgcgtcgcggccgccgaggtccatggaggacttggcggaggccggcgggccaacgaagcgcgcggagaagtcgcggtagccggtgtagtcgccctcggggctggcgccgtggccctcgtcgaaattgagcgcgtagctgagggcgtcgtagttgagcttgcggccgccgaagtgatggtgcggccgcgtgggcggcccgctgcggccgaaccgccggatgaaggtcttccaccgcgggccagccaccagctccgaccact

SEQ ID NO: 16647 - DNA, 435 bp, Setaria italica
  Peptide Sequence Number=SeqID_82621
tttcacgctgaatgtttcatcgtctctttcacttgctttcctgtttcttcaggcactgaaactcgcagcgccgttgtttgattgcttgcagttgcaggcaagggagattggaagggtaagagagcaagagcacgagatggcaggcggcgatggagccaagtcatcggcctccatggaggaagaggcatgcgttgagaagaagtacggaggaattgcacccaagaagcctttgatatccaaggaccacgagcgcgcctacttcgattcagcagactgggtgctcggcaaggtaagagaagaagagaacaaaatgctcacaccaatattcaggcgtggcactttgcaccgtcagagctcaagctgtatctaaccctggttcttggaacgcctcttgcagcaagctgcaaatagcagcacaagggctgctgttgagtc

SEQ ID NO: 16648 - DNA, 814 bp, Setaria italica
  Peptide Sequence Number=SeqID_82622
ccgtgcgcgacgcgacggcaccggcgccgcgtcgatcgccgtcgggcggccgtcggatcgagggcagcgaccgagatccggccctggcgctgcagctcgtaatctcgcaaggcttggggatcctctgtgtcagctggggaatcgacgagctgttgtgcgagcgttttgtgctgctgcgcgagaagtttttctgatccccccactcccccgtacgagctctatataaacaggcttgcccctctgcagcacacgcgcttccttcctctccgtcttcctgcagagagcgccacaagttgcaggcaagggagattggaagggtaagagagcaagagcacgagatggcaggcggcgatggagccaagtcatcggcctccatggaggaagaggcatgcgttgagaagaagtacggaggaattgcacccaagaagcctttgatatccaaggaccacgagcgcgcctacttcgattcagcagactgggtgctcggcaagcaagctgcaaatagcagcacaagggctgctgttgagtctctgaagcccaagctgaagagaacccctcaccaccagctgccccctcgcaagccgacctgcgcttccacctgagacgctcgtgcaggcttcgcattgcagcagctggcgggactgctcggaggcacgaaggggaggatgctgagctcggataaatgcttggctggtccggaatcgtaggggtgaatcagaaactcgaggtgcaatttggctacttggcagttgcagcctctactatgtctatcatcagaacggattaattatcagtatcatgcttaagttagatg

SEQ ID NO: 16649 - DNA, 471 bp, Setaria italica
  Peptide Sequence Number=SeqID_82623
tcatagcaaaagcacatgaaatttgtgtggtccttgtgatggtcatcacaaccctattgatgacaatagtgatgctccttgtgtggaaggtaaacatttggtggattgccatcttctttgttgtcttcatgtcaacagaatctgtctacacagctgcagttctatataagttcacccatggaccttatgtgccattggccatctcagctgttctcatgttaatcatgattgtctggcactatgtgcatgtcaaacggtacaagtatgagcttgagaatactgtgtcacgcgatgaggtgaaagatctgcttgaacgtcgggacctaaagagggttccaggattagggcttttctacactgagttggttcaaggcataccacccatattccctcacctcattgagaagattcctaccattcactcagtgattgtcttcatcacggtgaagcatttgcctatcccccatgttg

SEQ ID NO: 16650 - DNA, 686 bp, Setaria italica
  Peptide Sequence Number=SeqID_82624
acagaattattttgtaagaattaaagaagcatgtaagaaccggtacctacatatgtgcaagaaggaatagtgttaataagatattgctcaatagaaaatatgatataaatattaaaatagatccaactaaataaaattaataaaaatttaatatctggatacttaaattaaatttataattgctagctatacaaaatatatctgaattcgtagcacgcaaattcttctagaattctataaataggtcacttcttttgctggagagtagaaccaccattaaattatctaacgaaaagaggaataaaacaaatgtctatttaaataatttgttcaagcattaaggcattaaacttatgtttcttagggtactaccaccaaattggcttttagcactgtcgcaatatttagcactattgatagccaatgtcctgaaagatgtgtcatggatggataggaaacgagcagcaccacacttcttcaattccaatacctcaaggttacggaaggtagtttggagagaaccaatagactcttggaaggcaagttatgctggtgtcattaagattcatacaagtgcaaaatgtatgacctcttaagacagcttgctcagcatttatcaagagaagagtgtttctttggagacccacaatcgttggagggcaggactataactaaattgcgacgtg

SEQ ID NO: 16651 - DNA, 1938 bp, Setaria italica
  Peptide Sequence Number=SeqID_82625
aggatttggagagaaccaatagactcttggaagactagttagctgctggtggatgatcttgcatccttgacttctattgtcagtcaggtcagtcaggcctgttgaaaataggtctttgattcaggtccaagttcaatcgtttatggaataacactgtgaaagcttgttcaaggaatctcactagctagtccttcatattactggttttcttagctctgaaaagatatattggtggtggtgggtctgcttcagggattcacctaatggcaaccatattattttcttttgcgggatcatgcatccaaaagctccaagaacttattatagaggaagcgatacagatactaggtgttaaacaagagcttagtgacttgcaacgaacaatgacacaaatacagtgttttctgaaagatgctgaccggaggaggattgaagacttagcagttagtaattggattggtgagctgaaggatgcaatgtatgatgctgatgatataattgacatggtcaggtttaaagggagcaatctactaggagaaaactcttcatcattatcaagaaaattaattacatgcaatggatttgcaactttctcttgcttttcgaatctaaagacacgtcatgagattgcggtacagattagaggcctcaacaaaagaatagagatgattaaagagttaggtacaaatttcaagtttgaaacagaacctattgatagagtattagtatcaaatatgagaaaaacatcccacctggtagaaccaaatcttgttggaaaagagatcatacatgctaccaatagattggtagggttggtgctagaacacagggacaagaaggcttacaagatggcaattgttggaacaggaggagttggaaaaacaacactagctcagaaaatatacaatgatcaaagagtgaagggtaactttaagaagtatgcatggatttgcgtttcccaacagtactctcaagttgctctattgaatgaaatacttcgaaatgttggagtggacaaaaaaaattgtgaaagcatcggagagcttcaagccaaacttgcagaagccattgaaggagacagctttttccttgtgttggatgacttgtgggagtttgatgtatggaccaatttactaagaactccactcaatgcttcaactcaagtaacaattgtaacaacagctcgacatgatacagttgcaaaggcaattggagtggaacacatgcatcgagtcgaattgatgtcagaggaagtaggatgggagctactctggaagagtatgaacatatctgatgagaaagaagtgcacaacgtgcaggacaaaggaatggaaattgttcggaaatgtggtggccttcctcttgcaattaggactatggctagtgttctcgcagtgaaggagacaacagagagtgaatggcagaagattctagacaatgatgcttggtccatgagtaagctccctgctgaactcagaggtgctttgtacttgagttatgatcagctaccacaaaacctgaagcaatgttttctttactgtgctttgtatcctgaagattggacactatgtcgtgatgatcttgtcaggctctgggttgctgaaggctttattgaaaagcaaaagaaccaactactggaagatacagcagaagaatacttctatgagttggtctcaaggaacctcctcctaccagatcctcagtatgcagattcatacaggtgcaaaatgcatgacctcttaagacagcttgctcagcatttatcaagagaagagtgtttctttggagacccacaatcgttggagggcaggagtatatctaaattgcgacgtgtgtcagttgtaacaggcaatgatatgatctctttacctattgtggacaggcatcaactcaaagtgagaatttcaataaatttctgtggcaagtcactggtagttg

SEQ ID NO: 16652 - DNA, 802 bp, Setaria italica
  Peptide Sequence Number=SeqID_82626
ctaaccaagaatacctttagtaatagacaagaaaataacacgtgcaaaatgtatgacctcttaagacagcttgctcagcatttatcaagagaagagtgtttctttggagacccacaatcgttggagggcaggactataactaaattgcgacgtgtgtcagttataacaggcaatgatatgatctctttacctattgtggacagttatcaactcaaagtgagaatttcaataaatttctgtggcaagtcactggtagatgaatcttcaatttttaagcaatttccatatattcgtgttttggatttaagtgggtcagggtgtagaaaatattccagattatattggaagtttgattcatttgcgcttgttgaatcttaatgacaccagcataacttgccttccaagagtctattggttctctcaaaaaccttgaggtaccggttcttacatgctctttaattcttcaaaataattctgtgatctaagagcaacagcaaatggcttagcgacaactttaatgtcgttttgcaaagcacttggtccggtcggagggggtattgtgttttcatgggcacagaaatgccaacatgccttcttcttacaaggtgaccaaatgttgttcttcgttatggacatcatcacgtttctcgtgctgatttggacattcaagccatttctagccttgccggagcaatcctcttcaagatattttaggcattctggtgcacattatcagaagctgtcacatgtgagagtggaatgttatacattactatatggtgactaaagtcctcctttgact

SEQ ID NO: 16653 - DNA, 734 bp, Setaria italica
  Peptide Sequence Number=SeqID_82627
ttttgagattattttttcctattcaatcaactgactcaagatcaaagagcaacagcaaatggcttagcgacaactttaatgtcgttttgcaaagcacttggtccggtcggagggggtattgtgtaagtgtagatttaaattaatgtcctttgctaagaatcaagccttcaattctagttcagaatatcaggcatttacgatctttttcctgaaagaaaatacaagtcaaaatgcgcatgtaagtttggatagaaaggtagtacaatacgataaggtccaaaataaacattaattgtcaaaaattgatcagaacgtttatcagaacgtaactgacatgggcctttttgtcccttttaactccggcctttttatgcccagtgttacagtgagacataggttagtatgaatgcataaaggatgattgtggttaaatgtataaatccccttatacataaatgtaggatacatcttaaattgaatggttaatggaatgattgactcgctacaaaaatacaatgattattgaattaatacgtgccatgggtttacacaacagtgatatgtattaacgcaggttttcatgggcacagaaatgccaacatgccttcttcttacaaggtgaccaaatgttgttcttcgttatggacatcatcacgtttctcgtgctgatttggacattcaagccatttctagccttgccggagcaatcctcttactaaagtaattaattttaa

SEQ ID NO: 16654 - DNA, 1166 bp, Setaria italica
  Peptide Sequence Number=SeqID_82628
tacgttctgatcaatttttgacaattaatgtttattttggaccttatcgtattgtactacctttctatccaaacttacatgcgcattttgacttgtattttctttcaggaaaaagatcgtaaatgcctgatattctgaactagaattgaaggcttgattcttagcaaaggacattaatttaaatctacacttacacaataccccctccgaccggaccaagtgctttgcaaaacgacattaaagttgtcgctaagccatttgctgttgctctttgatcttgagtcagttgattgaataggaaaaatatctcaaaagtgggataggtaaattaaggatggcttaaatggaatcggatggaaaggcacataccacagaattattttgaagaattaaagagcatgtaagaaccggtacctacatatgtgcaagaaggaatagtgttaataagatattgctcgatagaaaactcaatctttaagccttatgatatgcatgatctacccatccctgtacactaaaggtctattgggtaaaatgttcataacagcacaacttaatactggcttctgcctattttgcaggtgaccaaatgttgttcttcgttatggacatcatcacgtttctcgtgctgatttggacattcaagccatttctagccttgccggagcaatcctcttcaagatattttaggcattctggtgcacattatcagaagctgtcacatgtgagagtggaatgttatacattactatatggtgactaaagtcctcctttgactaggagacgagaggggtggtactattaggacttctagttctactagggcatcaacataaattatattaggaaataggactcgtactcgctgctgttgaggggactgtataaataaggcttggaaattatagggatcaatcaagccaggagcaaacaactcaaggaaatataagatctcatccaggactcaagagaattagagtagataattctatagcactaggttctgatatagggtaaaaatcaaaggctgctagagggtcaagtagaattgtgagagagctaaaatattgttctcttctagagttgtggttaaaaaattatggtcagcttcacttaaatcttgtcatgttgtcgtggtttgcttaaatcctattattcggagtttt

SEQ ID NO: 16655 - DNA, 2589 bp, Setaria italica
  Peptide Sequence Number=SeqID_82629
taccggttaggtagatcccagttggaaacaccaaccaggataaaagaccccattttatcccggttggtattacaaaccgggataaaagggttcgagggatttagtcctctttcatccaccccgttgtgaccctttttatcccggtttgaaacaccaaccgagataaaagggtcgagagccttttatcccgatttgtgttaccaactgggataaaagggtggtcttttatcccggttggtgtttcaaaccgggataaaaggtctctcagagtctttttttcccactagcctttgcaaccgggataaaaggtcccggttggtgagccccccaccagtgaccgagttttagtcccggttggtgaaccttttatcccgggccaactttaaaccgggacaaaagggggcgtatggaaagccaattctctactagtgttaaatataccggtgttattgcccactggcacatatattcttatatgctagccggcttgaaaattaaccgattaaaattattcttcttttaccttatttgttggtactaggtctattctaactcgaaagaagtagtttctttggagacccacaatcgttggagggcaggagtatatctaaattgcgacgtgtgtcagttgtaacaggcaatgatatgatctctttacctattgtggacaggcatcaactcaaagtgagaacttcaataaatttctgtggcaagtcactggtagttgaatcttcaattttcaagcgatttccatatattcgtgttttggatttaagtgggtcaagtgtagaaaatattccagattatattggaagtttgattcatttgcgcttgttgaatcttaatgacaccagcataacttgccttccggagtctattggttctctcaaaaaccttgaggtattggaattgaacaagtgtgacagtttgcacagccttcctttagcattctgtagattatttaacttaaggagtcttggtctcaaaggttcggcaataaataaggttccaaaaggtattgggggtttgaaatacctcaattatatagaaggatttccaatttgtggtagaagtgattatagcactgcaatgcaagatggatggaatctagaagagttgggtcctcttttgcagttgaggcagcttcttattacaaaattggaagcatctgtttgcagtatagattcactactaactaataaaaagcatcttaaagaattatatttatattgcactgaatgtgcggaggaaccatactctgaagaggttattactaatattgagaaggtatttgatcagctaatgcctccaaaaaacctgcaacatctatatttgaagggattctgtggtcggaggtttcccttctggctgggtactgctagacatttgccttcactgaaatacttgacacttaaaaattgcaaatcatgtgtgcatcttcctgcgatcaggcacctccccaacttgaaattcctgagaatccagggagcaactgcagtcaccaagattggacctgaatttattggcttgggggtgggtaatttcggatctccagaggcagttgctttccccaagcttgaaatgttgtccatcgggtatatgcccaactgggaggagtggacctttgtagttgaagaagaagaagcaacggcagcaggtaaggaaggtggagaggatggagctgctgcaaagcaaaagggggaagccccacctccaaggatgcagctgctgccacgtttgaagggcctggaactttaccgctgccccaagctgagagctcttccacggcagcttggacaggaagccaccagcttgaaggagctcggattagcattcatggataatattaacgtggtggagaacttcccatttctgtctgagaaactttcagtctcatattgtgaatgcctggagaggatctcaaatattccccagatgaaactgttgcatgtagagctctgtccagctctgaggtgtgttgagggtttggacaagttgcaccagctgtttctgacagaggatatggaagatgtctcctcacaatggctagctggactccaagagcgtcaccaacagctgcacggagaagacctggatgtcgacacttgggatgagtgatacttttatatagctacgaatgtgcaagctacatgacgttgtatgcatggaaggagtgcatgcttctggatgaaggactggagaatgattgttcaagaaccacagcaatcaggatgagcaaaccacttccatcaataaaaagataaaatatgagctaaccacagcaattaatcaagatgagcagacggcttcctctcttgtttctagcctgtgggaaggcttgcgtcttgttatttaagtgtttgaccatccttgtggtgtatgtatgaatgaaaacgtgtgctacactgctacttgagtttctcaattaattctgtgatgaacttgcacctgttgtagattgtgatcttgtaatgcgaagaactgcatcggctgttgcgtgctttctgttgctgctaggaaaagtgagctcttgtttcgttgttcctacaaacattaatgtatataaaaaaactgctctttacttatttt

SEQ ID NO: 16656 - DNA, 372 bp, Setaria italica
  Peptide Sequence Number=SeqID_82630
ttgaccctaaggattattcaaccatctatatcctccatcaatcaaagaaatgttcaaagccagtcagcatgccatgctggttggaccaccagctctgtttacacccatgcaaatcagatggctaatgcacagttattacctgcacataacatgcagaaaggagtattgatagacctcaacaattcttctttgaatcagataccaaatgagcacactaactttgcagacagccctgcgcaattttttcagtacagagtaagagaaatggtagaaccaaatcctttgttagagctccatgatggcataccacataaaaaatgtacctgacatcaacagttcgatcattctattgcagagcatccctaccgattt

SEQ ID NO: 16657 - DNA, 609 bp, Setaria italica
  Peptide Sequence Number=SeqID_82631
tactggaatggtatagggtgaaactgtagtaattagagcagtcaaggcatttggcaagtggaataattgtccttcctctacctttcctttctgtacaggttgaatcggatgacattcctttttagtgatgcccagacgagggctactaaatcaaccattcaaaaaggcaggtgaaatacaccgtgtttacatgatgagctgttggaaagtttccatctcggagagctgacagagtgcaagatgccagcttgagtgcttcgttttctgaagggtcttgtgggctgtgctacaagatagtgagtgcacgatgaggtaactgaaggcaatgccgctgtgtttgggaatcatgggcaagggcttggctgcgtctaaaacaatgctgctgtgcatgaaccgtaataaagatggtggcattttgctgtagcaactccataatatataggtgaccttttgtttaagaggcttcgttttgttgtcatgatgctataccacagtacattgttgtataatgcaatagtacactcacaatgtagttatatcccttgatatgcaagcattggtgcacttcttgtggtatagcttatttttgctgaattgtctactctggtg

SEQ ID NO: 16658 - DNA, 2667 bp, Setaria italica
  Peptide Sequence Number=SeqID_82632
caaatccgcacccccgaaatccccaattccgctctccctcccccgcagcaggcgagagcgcgaagcggagcggaggcggagagatggagtcggaccagggcaagctcttcatcggcggcatctcgtgggagacgacggaggagaagctgagcgagcacttctcctcctacggcgaggtcacccaggccgccgtcatgcgcgacaagctcaccggccgcccccggggcttcggcttcgtcgtcttcgccgaccccgccgtcgtcgaccgcgcgctgcaggacccccacaccctcgacggccgcacggtcgatgtgaagcgggcgctctcgcgggaggagcagcaggccaccaagtccgcgaaccctaccggcgggaggaactctggcggcggcggcggcggagatgccggtggtgctaggacgaagaagatctttgtgggcgggctgccctctactctgactgaggaagggttccggcagtacttccagacctatggtgttgttactgatgtcgtggtgatgtacgaccagaacacacagcgcccccggggttttggcttcatcacttttgactctgaggatgcggttgaccgcgtgctgcacaagaccttccacgacctgggtgggaagatggtggaggtgaagcgtgcgttgcctcgtgaggccaaccctggcggcggtggcgggcgttctggaggaggtgggggctatcagagcaacaatggccatagcacaaactctggcggctatgatggtagaagtgatggcaggtacgggcaagcgcagcagggtggtggtggctatcctggctacggtgcgggaggttatggtactggtgcagctgggtatggatatggtgctaaccctggggctggatacggaaattatggagctggggcatatggaggtgttcctgctacttatggtggaccttatggaaacccaagtgcggctggatctggttaccagggtggtcctccaggctcaaatagaggaccctggggcagtcaagctccatctgcttatggtgctggaggctatggtggcaatgctggctatagcgcttggaacaactcttctggtggtggcaatgctcccacaagtcaggcacctggtggagctgcaggctatgggagccagggctatgggtatggtggatatggaggggatgcatcatatgctagtcatggaggatacggggcttatggagcgcgtagtgatggtgctggcaatcctgctaccggtggagcatctggatatggtgcagggtatgggagtgggagtggcaactctggttatgcaagtgcttggagtgatccttcacaaggcggtggatttggtggctcagtcaatggaggtcctgaagggcaatcaaattatggcagtggctacggcagtgtgcaacccagggttgctcagtaaagagaggctattagagtgtctttgaaatgaaccagcacatctgggcattctatgtattgttttgttactctggcctcgattgttctcagcctcctgaagatcacccatttgctggttaaatcagtatttctccgggttggaatgcttgaacctttagtggcttactactagaacttctagtcaataagtagctataatgtggagtagcagtatcttgcattatttttaagtttagctttatccgtccgtgtgcttttccatgagtgaagtttcaggttgattcgtctctagtttaaaaagctagagtagcttgactgcttctgggcaaaactatctagttgtacctctgttctacagatcatatatttgtgtttgacagtagtatctatgctggatcttgttctacttctattctggaatgctctgtattttgtggttgtgttgacctgtggtgctgtgcttatccatctggtttagctcaagttggagttatgttgttatgccacattatcaacattcctggtttgcagatgccaaccctgaaacttctatgcagtgttagttatatgatactgtagtttcttctaacaatatgttccactgtagtgcaagtgttttacgtagctggaatggtacatccttcaagtatatcatgaagctatgaattccatccatttggccgtagatttcgatattttccaagcagcagtaagcttattagcagcaagattgtagcgccaagtttctaaggtagtatagataacagagttatctgtgaagctactggaatggtataggggtagaaactgtataattagagcagtcaaggcatttggcaagtggaataattgtccttcctcctacctttcctttctgtacaggttgaatcggatgacattcctttttagtgatgcccagacgagggctactaaatcaaccattcaaaaaggcaggtgaaatacaccgtgtttacatgatgagctgttggaaagtttccatctcggagagctgacagagtgcaagatgccagcttgagtgcttctttttctgaagggtcttgtgggctgtgctacaagatagtggtatgtggaatcaaaggttcactatattagtgtttcattcagcaaaatctttttgactatggaacttgccaaagtgaagctctagagtctagacgactttctagctttgttcctttaagatttgctctagtaaaccatatactttggtgatagaaaagattgat

SEQ ID NO: 16659 - DNA, 333 bp, Setaria italica
  Peptide Sequence Number=SeqID_82633
cccgcgcgcggacgcgttcatgcggtacgccggattcgaggagaagcgcggcgagttggagcgcgcgcggcgggtgttcgagcgcgccgcggacgttctcgccgatgatgaggaggaggcggggacgctgctcgtggccttcggcgagttcgaggaggagttccgcgaggtggagcgcgcccgtgccatataccagtacgcgctcgacagggtgcccaagcgccgtgccgagcagatttacgggaagttgctggcatgggagaagcaattcggggaccccaagggaattgaggatgccattgtggccaggaggagattagagtgtcaggatga

SEQ ID NO: 16660 - DNA, 359 bp, Setaria italica
  Peptide Sequence Number=SeqID_82634
atccttcctgagtttcacttgcagtaaatgctgtaatgaatttttgtttgcttggtcaggttattgggaaagcatcagtacttgacgagataattaattacattcagtctttgcaatgccaagttgagttcctgtcaatgaaacttgaggcggtaaatgcccatgcgaacaatggtgaagcatttccatccaaagattttgctgcgcagacatacaacacagctcctggactgacaatttagaataacccaaaacccccaaagaagaaataacgactacaaaggacaacaatacggacctacggaaataggacttacaacaatagacaagaattaggacggtaggtagacctaacgaaa

SEQ ID NO: 16661 - DNA, 952 bp, Setaria italica
  Peptide Sequence Number=SeqID_82635
aagagcggcggcggccgcggaggaggcagcgccggacggagaaagcagcgggaggcaccggcgtccgaggacgactcgtcccggatcgtctccacttccggcggcggcggcggtcaggatttgacagattcaggagcaaaacgtttcaaaacaaataaatccaacgataataatggcaaccaaagaacagaggctgaaactcaaacaagaagcgctggcaagggtgttagtaaaaaccctccagcgccagagccaccgaaacaagattacatccatgtcagggcaagaaggggccaagcaactgacagtcatagtcttgcagaaagggcacggcgtgagaaaataagcgaacggatgaaagttctccaggatctcgtccctggatgcaacaaggttattgggaaagcatcagtacttgacgagataattaattacattcagtctttgcaatgccaagttgagttcctgtcaatgaaacttgaggcggtaaatgcccatgcgaacaatggtgaagcatttccatccaaagattttgctgcgcagacatacaacacagctcctggactgacatttgatacccaaaccccaagagaatacgctcaaggcacatcggcctcggaatggcttcacatgcagattggcggtggtgcctacgaacgggtgtcatgaacaagatgaatccagagtagcattctaataaagggaaccatgatcaatcaagcccatggttctagattattttttgaaactgtcatgttccagacgcagttttagtcatgcttggagctgtaatgccagtaggaacatgtattttgaggcgggtacaattttcttttccccatctgaatccaagacatgatcttccttctcctattcatgtgttccttggaatttctggagatcgcgttcgtttgtgagaaggttgaataagtcagttacaaaaaaaaaaaaa

SEQ ID NO: 16662 - DNA, 570 bp, Setaria italica
  Peptide Sequence Number=SeqID_82636
ttactttcaactgctcaaataggtgataggattttaaacaatcttcatagggtaatttcagacgtacatacctacgaatgtattcctgaccaaatatcaggaatttatatgggttgggccaggtccaaagtgcatggattctctaaggtggtcattggtactgggtgggacttttcacagcagaccgtcgagagagtgatggtagtagagtttcttgattccactggcaagattgaaacagagcctgtgaagcttcttgtaattggttacatccggaagctacaaagcacagatgatatgttgcaagctttaagtgtaactgacgaagacaggagcattgcaagggatggactggacctcccaactttctctgaatatgcccacgaccttcattttccctgaatgtggccatatgattgcaagctctcacagcactaccttagggttggcattgttattgttagctcacaaacattatgccagcttcatttacgtctaggaagactacacgaaatacgtgtatttgaagaagaggaaaagggtacagaaggaatgaagtttgttgtcatt

SEQ ID NO: 16663 - DNA, 838 bp, Setaria italica
  misc_feature (1)..(62): n is a, c, g, or t
  Peptide Sequence Number=SeqID_82637
nnnnnnnnnnnnnnnnnnnnnnnnnnnnnnnnnnnnnnnnnnnnnnnnnnnnnnnnnnnnnnctttacataataggtaacacgttctgattcaaaaaccagagccttttgaacctgccagaattcgattcctacatcagagcaaggatttatcgctaccaaaaaggaaagaacaaggcctcgagttcattcacaagtaaatgaactcgaaggcatagttgctcctaaccatagtgtgccattagaacctgataacagccacacagaggttgcaaggtaaactctcttccaccctactattgttactagaagtctagaactgtatacattttatacagtgaggcaacgttgcttcaggtcagcagcctctttgcgtcgaggatccggtctgagcttctcttgaagttgtacaccatctggaacgcctccatgcagacactggcgaagcctgtcatcgcctggaaaacgttaggcaaaccagtctgcaggttattcaaggtcattgctcttgtgaccccaatgctcttctcatacttgctcttctcctcatcagcgcggctcctcagggcctccacctttgcccgcttgtcagctactggtgattttcgcgacatttctctgtaaccttcagcaccaatatatggcccgtattttgactctaaggatctcagctcctctgccttcttctcgaattctttgaatgcagactctgactttttcttcagcttctgttcctcagcttgttgaatcacaacagcatggattaccgttaggagagtcttgatcccttctgaggcctaccttatcttggattctatcgatggctagctgccattcct

SEQ ID NO: 16664 - DNA, 846 bp, Setaria italica
  misc_feature (1)..(3): n is a, c, g, or t
  Peptide Sequence Number=SeqID_82638
nnntttttttttttaactttttgttttcctaaaagtcttcttgtttcctcttgctgagactattgagtctggttgtccgacagtatgcacaacccaccaccaagacggcgggcaagaccaggtaaaccaccgaatgtcaacccaaaaagaaagagaaaaggaaaagaaagacgccggctaggacctcactacccagatatacaaaatggaatcgaggcaattagcacggcgcctctatgattaacctgaaaaggaaaaaaaagttttttttgctttttttttgcctcagaccagcgctgacaaagagagcctgcttgttgaacacgctctcctctcgtcttcctttgctcttctcgtccccttcttctgcttcacttcatcttctcttcctcgtcttcttctgcttcgcttcctcttcttctccaccagtgtcctccgaaaccacgactctgagttctccctcgccgccaccaccctttggcccggcaacgcaggtctcctcgtcgtcggtcagtcggagtcgctgtccatgctctccatccctttcaggccccggtgcttctgttgcttcttggggcacttcttctcgcgcacctcgtacctgctcctcgtcacgtccgtcagccatgtccccgggcagatgaaattgaccgccttctcgacgttcttgggccgcctcttggggcgctgcggcagtttggtgcccttcatcgccatgaaatcctcctccttctccttgcgcgacagcgtggtgtagatccgcggcagctccagcttcggcgtcggcttcgccgacgacgacgcccccgcgccgccggcctgctgctgctgctggctgcttcggga

SEQ ID NO: 16665 - DNA, 313 bp, Setaria italica
  misc_feature (3)..(3): n is a, c, g, or t
  Peptide Sequence Number=SeqID_82639
tcntttgtttttttttttttttggggttcagagaacgctcacgtgatgcttcaaatatctgctacacggctaacacgtgtgatccagctgttagggcgcatcaagcctaaaaaaaaaagttagccctaacaactttcccttctatcaatgtgtgctaccattcctctttgtacaaacgggcatcgcttttgccataatatcatctgacggtgttgtacactaactgtatagtagttacatattatattatggcagcgatgcccgtttgtacaaagaggaatagtagcacaactttcccttctatcaatgtgtg

SEQ ID NO: 16666 - DNA, 4039 bp, Setaria italica
  misc_feature (1)..(4): n is a, c, g, or t
  Peptide Sequence Number=SeqID_82640
nnnnatccaaggctgccccgtctggcagtccaacagaatgtaagcaagaatttggtcagagaacgctcacgtgatgcttcaaatatctgctacacggctaacacgtgtgatccagctgttagggcgcatcaagcctaaaaaaaaagttagccctaacaactttcccttctatcaatgtgtgctacattcctctttgtacaaacgggcatcgctgccataatataatatgtaactactatacagttagtgtacaacaccgtcagatgatatcggaacgttctgttggagcgatcgcagaactcgtcgctgtcgcaaattcttaccagcagtgcaatgaggagcattcagtggtggtacctcactgtcagccgggaaggcgattatctgctttctctttcgaggccctctcttcctgtatttcttccagttcatcttcatcacttcgcttgcctgcttgctccttccaataggcaaccagcttcttcagcctcatgatttcttttggggcaacatgcttgcttgtatcattaataatgcaacgaacccgtgaagcatacatgagtgagttgtaagtctcctccaagttagactctgctggtgaaacattcacaaacatcaaggtcttcgcattgcctccaagagaatcactcataagcatcgttaacttatggttccggtaaggtatatgttgtccatcggaagataaagcaccaataacatcagccaatgcagaaagagatttattgatactttgtgcttctttcagttgttttcctgctgaaccagattttttcaccctctcagaaccagcaaggtccacaaaacttagcttgcctcttgcatatgattgagtttggagattcgtactttcaataatgattgaaagaattaaatgagaccttgagctctcatcattcatgtttgttccagcagtgtgccttctctcagaacctcttgaaattattgccctcagttcttcaatacttgaaatgctcacaactgtcgcattttcaacagtaacaacacccttagaatctttctttatctctaatttttgctgctttgcatttttgggcaacaataggtccacaagattatcttgataaagctccaccatatacgccttcaaagaaaatgagtatttattgccatctcgctttatcaccctaaaaagctcagatgtagcccttggagtaagaccaggattgttatctgaaccataaattgtgaaagtctttccagaaccagtttggccataagcaaatatacaaacattatatccgtcaacagctgattgcaccagatactttgtgtcctcaaagacttcttcttgagtagtgttcgcatcaaaaacacgatcatatatatgttgcttcgacttgtcatctttccatggatgtgcaattgtaaattcatcaggactgcaaactatatttttctcctctaaagaaagttccttgtcatttagagggcgcaggcgacaaaaaactcttatttttcctttcatatcttcaattgtattatagtagcgctttcgcagaacttgttcttgcttataaagattttcaagttccaccaattgtgctccttgccttttaagaatctcagcagtttgttggttctttctgtcaacatccgctttgaactctcttaactcatcaagttctttcagactattttgcaagttatccacctcagaatttcttacggcaagatttgattcagccatgtttaaggatcgtgttgcaacttccaatttctgctccaattcagcaatctgagatttcagtttacggcattcctctgcataaaccttttccattgtgcttttctcttcactcttcattctttcaagcctttgaaccttctggtcaagaagatttttttctgacattaacttctttgagacttcttttgatgcatcaagctctttctggcatgattttaactcctccttaagctttgtaagcatctcaatgtcactgttcacactgcctacagttgtcaaagtatctctctcacggctctggccacttgttaatctggtctcaagtctacctttttccatcagggcagcctgcaaagcattctctttctcatcacatagagattttatcttatccagttcactttttacttctttcaaactatgtcgttcagattgcaaggtatctcttagaccttccaactcttcctgcatctccgtttcttgttttgtctttaactgtaggtcttctcgcaaccgatctactttcttctgagattcctcgactgtttttgtcagttcttggactcgtttctcatacatttcagtatttggtggcttatatgattggttaccatcattttgacttgtcacactagtagcagagcgtgcttttgaatatctacggagcatgacgtcatttatatgtgtttgaagtgctacacatatttcctccccctgcttcgtttcaaactgaaagatatgaagaacaccagcaactcgcattttaaagaaaacagctgtattgctgctaccaaattgcatgatgtctcttagctctgcagaatgtagatattccttgggaaccgggcggaaaaagtgaacccctcgtttgttgattcccaaaatgatttttccaggtagcaatcctattggatcatcaatcttccgaacactgaagaaaactgagttcccatatggaagattccttaagattctgagaaattgttgccgtgcatcgtcctttgacaagtgttccattaactgatagcgtgaaatgatgtcaagctcccagtctcgctttgctctagtaatcgcaacttgtctaggaagaaatctctctaaaagtgatatccattcaacgcaggactcaggattgtcaatgaatccaatctcaaccaatatttgcagagcagagagttgtgcagcatcatccctgccgactggatagtttcccaaaatgtaatcatgttgcaactggacatatgatagctgaatgaacattggatcagtcacagcctcatctgactcacggaagaggcgttttttaaatacaagtttgcaatgcagaatttctcctttgtttcgatccttggctgacttgaattcagatagcaagtcaccgatatatttgttatcatctaagccaatgtattcctcattgccaacttctgaagactttgatccattaacaacctttcgacattcaaataggctgaaactagaatacactgaaagtttgataatgccagcgagttcctcaacagcatcagcaacggtcgttgccatgtcgtaagtgatttcctcaaaagtttcatccaagaaaaatacaattgttgtaagcttccggcttgttaaaagagcttctatttcctcccgtgcaggaattgtaaccctaggacctgcctttactgatctttttaatgcatttagtgtgttcagtgctagaactcgaacatcagaatcagttgtagctccatgggcaatatagtgaacatactcagacaagtatgccccaatatctttgcttggtggcatggatgatgcacacagatacataagctcccaagctcttattgaccaacccctatcaggattgttacgtgtttgttttgaaatctgtgcaaagagttcatctcgaagttcagaacgcttcaacgtatgcttatagagcttcgcaacaagttctattctctcctccaaacttattattgctggtgaatcaatgcccatgtactttagtatgacctggaacaacttgattgagcggcttacaaggtcgctgcttatctttagtaatgaagttggaataggatccttttggaagcacaacatatcttccaaagtgaacttctcacgagcttgtggcccaacagactttttagaaaaaaatccacgtttcccagctgaatgaatctgcttttgcattgctttgagaaagccctccacctggaatctatcaattaatggaattgctccagcaagctctggaggtatggacattgacaaagttgatggtgtaggcggcgcgaagctgtagccgtcgctgtcgta

SEQ ID NO: 16667 - DNA, 357 bp, Setaria italica
  Peptide Sequence Number=SeqID_82641
ctcccctccccgatccctcgcggaggcggcggagacgagctcggatggagatggccagatgttgaagaagagaaatcggtctgggaatttggggattttttttctcttcttctctgcgctcttgttctttgtgtgttctaatgggcttcccaagtaacaggggggatagtcgaatagagaagggagcgcggctcggtgtggtgggggagatgagtttttttccgaagtttcctcgtgcgattcgggggcattggatcggatgggggtcgttggatggaagtcgtcgtcttcgtcgtgggagcggcttgccgtcttgatttcgtggtcgctgatggtggccgcggcggtgtgcgtcca

SEQ ID NO: 16668 - DNA, 873 bp, Setaria italica
  Peptide Sequence Number=SeqID_82642
acttgtcgttactactactcgtgtaacatcctggcatcagaaactgaagcatagaaatttacaaggctgggcagcgattcatggcgaagcatgccgtagcgaactggatccacgataacacccagttcagagttcagagtgcccaaacactaggcagtgtcagctaaccactgaccttacaggcttcgcagaatgggagaaaggctagttcagcacacggttcttttcacatcgcgccatgagagcgacctcctgatcccgttactggctcaggagcagcatcgcctccggccgctgctgcccgaacccgtggaacgggtggcgatggtgcggctcctccgcctccacttcccgcgcgacccgcggcggctccggccttgttatcaggttctccttgtcaccgtcatcgccctcctcttgcctccaccgctcctcgacctgcgacgggttgctccggccgtagccgcggccaccgtcgccgtcgcagtcgtcgtcctggcgccgccaccgctcctcgtactgcgagttgctccggccgtagccacggctgccgtcctcctcacctggttgtggctgctccagggcccgcgacgcgctgctgaggttgaagctgccgaagcccttgatctcgcgcgcgatcttgcgcgcccgttcgcgctcctcctccaggaacggcccccgctccagcagcttgagcacccgctccgacttgctcttcaccgtcacgccccagttgaagcctttctcgtcgatgtgctggaaggaggccatccggtcgatggcgtccctgtccttctgaaactcggcggcgacgctgcggggcccgtgcgtgaggaggtgctccaggaggaggagcgccttgtaggcctcccg

SEQ ID NO: 16669 - DNA, 476 bp, Setaria italica
  Peptide Sequence Number=SeqID_82643
cagaagaatgatgacaaagcatggccgtggagctcaactgctcaagtaaaagataaaaactacagatgctagaccaatacaatgactggtgatgtcccctggtgagtcatctcaaagataggctttctgctacagaacttcaaagatgcactaacttcatcgagcatagagtacagcactacaaaaacagacctattatctatatatacacattgatcagggcagtcacatccctagcctcttggtgccacactctgagcagaatttcgatgttgcccttaaatatggggaaccacactcatcacagaacttggcagggctggttggctgaaatacaaaaatacaccatcaaggcaagggataaaataaggtagcattagatagcagggcatgacaactatgatctaatggaactcctacaacaactggaggcagcaaaatgagaacttatgttcaattgctaactaaatgttaca

SEQ ID NO: 16670 - DNA, 1313 bp, Setaria italica
  Peptide Sequence Number=SeqID_82644
ttttttttctatgataagtaagatgcaattagaacgtgaaattactaaaactcttcagaagaatgatgacaaagcatggccgtggagctcaactgctcaagtaaaagataaaaactacagatgctagaccaatacaatgactggtgatgtcccctggtgagtcatctcaaagataggctttctgctacagaacttcaaagatgcactaacttcatcgagcatagagtacagcactacaaaaacagacctattatctatatatacacattgatcagggcagtcacatccctagcctcttggtgccacactctgagcagaatttcgatgttgcccttaaatatggggaaccacactcatcacagaacttggcagggctggttggaataatatgcatgcgtcctccaagatgaccttgtccaacttgcaagcaagatatatgctgagataaataagcctgctgctggttttgggggttatctgacaaatgtggggcgctcgtacattgatgaacgggagggaactgggtacaatgttgtacttgctgaatggtatcatcctccgattgatggaaaaggtgtaaataaggttgattttctagctgttcaatatgtctctttgatgttgactggtgctgattttgtatacttgtctcagggatgtcaaatgctgcctgcggagagcgcctgaacttatgccggggtgaatagaatttataatctcttgaacaaatagcaacttcacttcgaccagtcaatcttttgaaccattctgcatcctccattctcatattgtctggcctctctatgattgccaatccgttaattacaacaaaacgaactcgtttttcttcttgaaccacaagttcaggaaactttgtcctagttgaatgagaagtcgctaactccctcctcttgaagctgcaagggcctttctttgggaacctttgaatcagtttcctgtacaagccaccggaagcttcaagagctagccctatagatttctcacggaatccaatcaaagacgcaagacgcacattgacatcactgaccaaggtttcatacaagtttgctatatacattaatggcaaagcaatcataggatcaccctcatatcgaaccccctgttgctttcttttgcttgatttatcatcaacctggctaaagtccgagctagagcattccaccgtctcaacaacatgctcacttataaaataatcaacaacgaggtccaagaacctagatcttgccatttcaatagggagaacatcttgaggagtcaggatatcaaaaggactggaggtctgctgctgttat

SEQ ID NO: 16671 - DNA, 907 bp, Setaria italica
  Peptide Sequence Number=SeqID_82645
tttttttttttttagtttacgaaacatattcatgtcatcgcatcaagatcacacttaagataccatcaagttacatgtcagtggctcagagcacagccaacgagcatatgctagatgatgcccaaaagaactactatcagtatacaaaaagcacaatcagtagacttccaacccagcgggagcagttacaaaaacatgtatcatctggtgaacttgtggaacactttttgcacaccttaccagacattgcaactggacatgtgagctattgatctgtgaaggaatcatgaaaggactaccatttgcatagttgcattacctaggttaaatcctgttagaagctatgaatgtgaagctaagattgggattctaaatcaaattctgatggttgagagcctcgactgccttttgattcttgcatctccacttcaacagtaataacttcttttgacttgccatttcctgtctccatccttcttatcttttctttctgtatggcacgtagctcgtacggtgagatatagctcttggcaagcaggaagtatatcctccagaactgcttatccttcatgtggcgagggcacagatcgtaccgaatcttggcgagttccttggctttggatagcacgagcacggcatgccgctcctgccagctcgtgaggtcgccggcggtcgcctccgcatagcctccttggagctggagggcggcggccttgaaggcgtcgggggagagcgtccggaggaagtccaggagctgcggggtcacgcccagctcctcgcactcctcggccgcggcggcggcgggcttgcttgcaccgccgccacccccgctgccgctcccccggcggcgaaacggccatgagaaagccgagaaggccatggcgcggtcaattgacaagctgatccg

SEQ ID NO: 16672 - DNA, 1356 bp, Setaria italica
  Peptide Sequence Number=SeqID_82646
agacaattcgaagtggaggcatctgaatgacaagatgaagaagtgggtccatggggtcaagacggttgtccgctccctgctgaccggtgagcggcggctctgcgaccaggtgcttgctgcgtccgatgatctccgggatgagtgctttgttgagtccaccaagggttgcattatgcagatccgcaactttggggatgcggtggctgtgtgcactcgctcgccagagaagctttcccggattcttgacatgtatgaggcgcttgctgaggtgatccctgaactgaaggagctcttctttgggagttatggtgatgatgtcatccatgatttagagggggttcttgaaaggcttggtgatgcagtgaagggtacccttcttgagtttgggaaggtcttacagcaggagtcatcacgacggccaatgatggctggtgagatccacccaatgacgcgttatgtgatgaactatcttaggttgttggtcgtttacagtgatacacttgacacacttttggatgacactggtgctggagatgtagatcataatcctttacataatggcaccgatgaggatgaggagtatctcaagagcttgaccccacttggacgccgtatggtcaaactgatatgttacttggaggcgaatctggatgaaaaatccaaactctatgaggatcctgcgttgcagtgcatattttccatgaataatatactctatattgtccaaaaggtgaaggattccgagcttggtaggattttgggtgatcattggatccggaggcgccgtggcaagattcggcaaaattcgaagagctacctcagggtttcatggaccagagttttatcttatttgagggacgatggtcatggaagtagcgggagtggaagtttcggcagcagtgggagctctagctctaggatcaaagaaaaaattaagaacttcaacttagcctttgatgagatatacaggagtcaaacactgtggaaggtaccagaccctcagctccgagaagaactcaagatatctatatctgaaaatgtgatcccagcttatcgtgcttttacgggaagatacggcagtctagtggatagtggaaggaattcaggaaaatacataaagtacaccccagaggacttggaaaatcatttgtctgatctatttgaggggtcactaggttctgccaaccattccaggagaagatgagaatttcctatgaagggatttggctacagttatatacttgtatggaactcctcggtggtgctcaaatgctggagtgaacatgtgctgaattggtttttgtcccattagatgtactgcgatgtagttcacataaaccaattgtgaaacaaaag

SEQ ID NO: 16673 - DNA, 1120 bp, Setaria italica
  Peptide Sequence Number=SeqID_82647
ttgttagttcggtttggttagttcttagttcgtcgtaagtcgtgctggcccaccgagtcgctgacgtagatgggcccgccggagacggcgcgggaggcggcgtggaaggcggcgcaggggtgggtggactggaacatgtcccagtccgggtggatgaagttgcccatccacagcgagttgtaggcgcagtgcaccatgtggcagccctgcagccagaaggtgccgttggggtcgccggaggggtccgtgcaccagaagtcgtcgccgacgcggcccagcgccaccgcctccgtgcccagcagcatgaagtcgttgcagtgctccatgctcgcgatcacgccgttgccgccgaagtggcgccgcaccgacgccgtcagcccggagaagtaggccttggcaagctccacgcgcccgccgtactcctcgcacagcatctcaagcaggtgaatgacgtcgaccttgacgccgtcgatgccggaggcctcgaggtgcgagtgcaaaccctcgtagagctcgtgcgcgcggtcggggtccacgagcccgacgccgttgttgacgatcttgtcgacggcgaggtcctccatggtgcgctgcagccccggggagagcctgggcggcaccaccttcgccggcggcaggccggaggtcccggggcgaaggccgccccagtacccgcagagcgcgtgccacacgtacacctgctccacggtcgggaacgccgccttcatctcccgcacgaacgcgcccatcccgccttgcttgtactctctgaacttgtggttctcctggaacttgatgagccggcacggcatctgctcgccggcggaggtgcggttcatgccctcggcgcccgacgccgggtcgtcgtcgtcgtggcagatggactgccagccgtcgtcgatgagcaccatccccggcgggcacccgccgtcggcgagccggcggacgccctcccacacgccctccgggtgcaccttgaggtagaaggcgtcccacgtgcaccacccgaacttatccacgatcggcggcggggacttctcgtccatggtccggaacgtgcccaggtgggcgcggaccacgcgcacggcctcacgaacgagctcgaacgggtcgtcgccgg

SEQ ID NO: 16674 - DNA, 536 bp, Setaria italica
  Peptide Sequence Number=SeqID_82648
gtgtggtggtggcctctatcccaagctccagcagttccccgatggcgccggcggccgcggctgtcgcgggggcgcgcccgtcgtcgctccctcgaccgtcgtcgcctcggcggggacgcctggtacgtgcctgctcgtttccccgcgccgcgccgagcgcacgccccaccacaacacttgtgtcatctgtaagtcagctgccgaagcgtactggcatcttatccactcttatcttttcgcctcgtcactcggtactctgctgccgttacccgatgtcttggccatggcacctagcgcgttcgtgctcgtccggggtcaatttgaagttttcatatcgcaaatcgttttatcgttgcactgcaaactcgctgtacgaactagctagctagtgccacttgtgcgctctgacgtgacgatttcagttcccacacagaaaccgttctgcgccgccggccatcccctgacgcgacggcggcaggggcggccgctctgcagccaggccgaggtggcgggcaccaccgtggacgacgacgagg

SEQ ID NO: 16675 - DNA, 1400 bp, Setaria italica
  Peptide Sequence Number=SeqID_82649
tcacgaggaaaaataatctgaacgcgaggccgcaagtctgcgacgccgagctagtggtggtggcctctatcccaagctccagcagttccccgatggcgccggcggccgcggctgtcgcgggggcgcgcccgtcgtcgctccctcgaccgtcgtcgcctcggcggggacgcctggtacgtgcctgctcgtttccccgcgccgcgccgagcgcacgccccaccacaacacttgtgtcatctaaaccgttctgcgccgccggccatcccctgacgcgacggcggcaggggcggccgctctgcagccaggccgaggtggcgggcaccaccgtggacgacgacgaggcgtgcgagctagtgagcggttcggacctcgtcatcggcgagggtgacgacagcgtcagcgcgtacctcctcaaggccgtcaagaacaacaacggcacgggcatcctcctcctctccgacgtgttcggcttcgaggactccgccacgcgggacttcgcctaccgcgtcgcctgcaacggctacaatgtcctggtgccggacttgttccggggcaacccgtggaagcagagccccccgttcgacgacgacctcttcgcgcggtggctggcggggcaggccccggcgcgggtgtccagcgacatcgacgcgtgcacgcggtggctggtggacgagttcaaggcggcgggggtgtccaggaagctgggcgtggtcgggttctgctacggcggcggacgcctcgtggaggcgctggcgcgcgacgccgagggctgcttcagcgcgggggtctgcttctacgggtcccggatggacgcgtcgctgggcgaccggatcgcggcgcccgtgctgttcgtgtgcggcgacggcgacccgctgtgcccagtggagacggtgcgggagctggggaggcgcgcgaggggcgccagggccgcggtgtacgccggcagggggcacgggttcgcgcaccggccgcagtccgtggaggacgacgccgacgccgaggacgcgttcaacgccatgcgggggtggctgcacgaccacctgctcgcctgatcagccggaggacatcgtcacggttacacgggttgggtgcctggcgagtggtggagtacataggtttgtcgaaaatcagttggaatcaagaacgctagtgagagtttgagtgaattcactagtaatggcaaaagtttcacttgtgcactgacgctgtgaacttttgagagtgtgaattctaatgtaaaagttactcctttactttcattccaaaatgtgaggtattttagtttagttagaagttaacttatcgagctttgacatgtttactaaaaattgtctacctaactattctttacttaacttatttctttaaatttttagttttttcttttaaaaaaaaaaaaa

SEQ ID NO: 16676 - DNA, 354 bp, Setaria italica
  Peptide Sequence Number=SeqID_82650
gctgcgccgccgcagaacgacctgctcgtcgaaggggtggtacacgatgcctagcagggtcttggtcctgcggcgaaggccctcgaggtcgaggggggcggatcgccgggaacatgtcggagacgttgccggtcccgagtatctcgacgatctcctcgatggtgtccctgaacatggccctctccttgggctccaggtcgatggagtagagcaggcccagcagcaggctcaggatggggtccatcaccgcgttcctgatcgcgacggggtgccgcgcgctgcgtggtccgacaggtaccggtacagcgactccacgatcctggcctgcatcatcgcgccggcgccggcgatccg

SEQ ID NO: 16677 - DNA, 377 bp, Setaria italica
  Peptide Sequence Number=SeqID_82651
cgtggcgcgccacgacgaagggcgacgtgtacagctacggcgtgctcctgatgtagctcgccacggggcggcgcgccgtggacggcggcgaggaggagtgcctggtggagtgggcacggcggatggacaaggaagggtggcggtcgaggaaggaggcggcggcggccggcggcaccgtgtcgtgggagctcctgacgctcggcatgcggtgcacggccgacgcgccgccggagcggcccgacatgctggaagtgctcgccgcgctggtcgacgtcgccaaggccgccggcgtgcggctcgaattcacctgacaactttgatcattcttctttccctgcacttgttcgttcatagatgttttttatgctttagtttag

SEQ ID NO: 16678 - DNA, 1542 bp, Setaria italica
  Peptide Sequence Number=SeqID_82652
taaggtctggactaaagtaatttttgagagtgctctcagaaacgttgtttctgctggtaatgagtatcacgaggattgcatgaaactccttaattctaatcctcagctgttcccactggccctccagttatttaataaacctgataaaaggaatgaaattcttgaggcatggggcgaccatctttctgaagagaaatgctttggagatgctgcattgacttaccagtgctgttcatcatatcagaaatcactgaaagcttaccgtgcttgtggggactggaaaggtgtgtttaccgttgcaggtcttttggagttagaaaaggaagaaattactcagcttgcgcacgagttatgtgatgagttccaagctcttggcaagccaggagatgctgctagagtagcactagagtattgttcagatgccgagagaggtgtaaattattatatcatggcaagggaatgggaggaggctcttagagttgcatacatgcttaccaggcatgatctggttggaactgttagagatgcagcttcagaatgtgctgtatcactgatatccgagtaccaggaaggactgttgaaggttggtaaatatatagcacgttatttggctgtgcgtcagaggagattgtcccttgctgccaaactccagtcagaagaccggtttatggatgttgaagatgacagcatttcagaagtgagcactagcttcagtgaaatgagcgcatataccacaaggtcaaccaaggagtcgactgcttcagtgatatccagcaaagccagtaagtcacgaggggcaaggcggcaaaaaaaaggtggcaagatacgagctggaagtcccggggaggagatggcccttgtggagcatctcaaggggatggcgctgacaggaagtgctgaaaatgagctgaagagcctgctcgtggttctaatacaactggggaaagaggaaagtgcccgtcaggtgcagcaggccgcagataattttgtagtgtctcaaacggctgcagtgaagttggccgaggatacagtatgtaacgacaaggtagacgagaacgctcacacccttgagcattacgtaaggatgctgagagctcatgggtcaggtcatagcgagaccggttcatggcgaatcaaagcattgtctccttgagggcttgttaggttaatggccccaaggggattgaggggggattatgacctgtaggggatttagtccctctcaatcccctccaatcctcaacaatccccgtcaaaccaacaaagccctgagcggtcgagtgatttactgattagaactgtttgaatcaggatgaaatgttgtggtccaatggtgttggcttggttctcatcgatgacctgttgtagcatcacttgggaagttggtgcctgtatgggctgttagattggatgtgtgttgtgctcgtggtctatgggttttgtgctgtgacccgatattctgttgacagtaatgtgatgagatacattcctttattatatcaagaaaatgcgaatgtagattaattttcttttatttaaaaa

SEQ ID NO: 16679 - DNA, 741 bp, Setaria italica
  misc_feature (659)..(659): n is a, c, g, or t
  Peptide Sequence Number=SeqID_82653
cagaagcaccaaatgcaagagcaccaacaccgaacaaaaacataatcaaattgcgagccagaaatacaaagaaaaatattactcctacgactcgtgcgcacactcctcaactgttcttgggaatcttgggaggaagaaagtagagagttccctgagctccttgccagttcttgcttcatggtttcttgaggtcctctcttgacccaagaactcggggggtttcttggattgtcctgccatgtcggtctcgtcctcgcccatgtgtggcggaggggacaccgggatgaggatcgtggtgtggttccggagggacctcagggtggaggacaacccggcgcttgcggcggccgcgcgcgccggcggggaggtggtgccggcgtacgtgtggtcgccggaggaggatggcccttactatccggggcgagtctcccggtggtggatcagccagagcctgcagcatctggacgcctcgctccgccggctaggggcaggaaagctcgtcacgcggaggtcggacgacgccgtcgtcgcgctgctccagctcgtccgcgacaccggcgccacgcacgtctacttcaatcatctctacgacccgatctcactggtcagggaccaccggctgaaggagatgctgacggctgagggcatcgttgtgcaanctttcaatgcagatctgctgtatgagccatgggaagttgtcgatgatgaagggcaaccattcaccatgtttgccccgttact

SEQ ID NO: 16680 - DNA, 411 bp, Setaria italica
  Peptide Sequence Number=SeqID_82654
attctcttgacaacagattcttagaatatgttggctggataagcttggagtttggcaaccctgattatttgtagttgattatctattctgagtgtaaaatgacatctatgcccatgtggctgatgatagctcttttgattcatgagtatgagtagaagatgattttgataatatttttaagcttgtaaaacacatattttgataacataattagtaatacagccaagtcattaactccaaaaaaatgaattgaagtcacaggaatccatctctgcggtcttgctcttcggcctccctgtttgccatctacacggccttgaaccacagaaacgcctgaaattacaagtcagcaacaaccaggagctgcaatacgaggcacggcgtatgtggatacgtatggaggtcgggagt

SEQ ID NO: 16681 - DNA, 553 bp, Setaria italica
  Peptide Sequence Number=SeqID_82655
gtactccttgccctgataggctgggttgatggaacacaactccactccccggccatgcgcgtcagggtccaccaccgtctccagctcgcccctggcacttccatccaaaggtatcctgaaccgggctaccctggcatccgggaatgcatccttgttaattcctggcgatcttagcctatggagtgcaagtgcctcgatgatagcaggatcagcatagtactcgcagcagtcagcgatgatcacacctgtcccgccgtcatcgtctctctgttcatatgcgttgatgaagtgtaatgccatgaatggaggaacctccacgctggccacagtctttccagtggacctgcatacgacgtgcatgtagctcccagactccggtacccagtcgaagatgtaccatggtgtgagctcagacttcagcacgccggtgaccgagtaccggagcggcatctccggcacgataatgtagttctcagtgacagcgaaagagtgcacccacccgggtgccaatcctcctcggcaatgcactctccctagcactttcctctcgttg

SEQ ID NO: 16682 - DNA, 273 bp, Setaria italica
  Peptide Sequence Number=SeqID_82656
gagtgtttgaatcatctggtagccttagtgctaagatcaggatcagcacttgacttggcttcatcagttttcaaaccttcctgaatgccagtaataccatactcattactgccagcattttcctccataggtctctttggtggagatgtaccaacaccactagaaagcgtacggttgtcatagaaggcatccttctccgagattaaacctgaagatccttcttgacccaacccaccaaatgcaacagcagccttttccttgtcgtcatcaata

SEQ ID NO: 16683 - DNA, 267 bp, Setaria italica
  Peptide Sequence Number=SeqID_82657
tagaaaggaattgaggacggaacgacacatgcgacagcgaaggggtgaatacgggagaaccgggatatcaggaattgacttcagaggtgtatagatagcggaaacaggaattacacagttcaaagcctcctgctttgtgcctggaataacattccagggcatccttatcccgtcttgtgcctctaggtcaaggaactcagacatcttcaatgcagctgccttgtacaaccgttgtatatgaggcttacacaattcggtcaaaggaat

SEQ ID NO: 16684 - DNA, 277 bp, Setaria italica
  Peptide Sequence Number=SeqID_82658
tagagacgaagccgaacgaaggatcctctggggggtcgtccaggcggctgcggggggtctcgaccccttatatttatagggcggaagggcggatggcctctgctcttatgggccaaaactcgatgcgggccgctcactcttatgggccaaaagggtctgttcgcttcgctgctggcttgctgctcctgcttcctgatactacctttgcttgttggctgctatcctggcttcctgatgctgcctttgcttggtggctgctacagcatgtagatccggc

SEQ ID NO: 16685 - DNA, 434 bp, Setaria italica
  Peptide Sequence Number=SeqID_82659
cctaaaggaaagaattgtgctgtttgaatcacatggtacgaccaattgttttccagtcaaattgtgctgtttgaatttttccatgagtttatgcccttctttttctcctcaggcaatcacgaaaacattgggaaaatggaaaataaatggtaagattctctgttggactacttctagcatgatctcccttaatttttgtttgttcggagcaacgcacaaataagtaacccaacggtgcaagcaaattaggcaaccctccctcgcttccgcggcacacgctaccactgctggacggaggaaggaggaagcaaggaagcaagcactacctagcatgcgaaatcaacgagaaacgacgatcacatgcgacccccaacgttcgaaatcaagttggtaaacactaaccaaaacgccgcagagattcatttcgggagcag

SEQ ID NO: 16686 - DNA, 1164 bp, Setaria italica
  Peptide Sequence Number=SeqID_82660
agccgcctctcctcctctctgacccaccagcccacgcgccccgaggcggaggagagggagggaagggaggcaatggcggtggtgggcgtcctcgcgctgcagggctcctacaacgagcacctggccgcgctgaggaggatcggggtgaggggggtggaggtgcgcaagccggagcagctcctcggcctcgactcgctcatcatccccggcggcgagagcaccaccatggccaagctcgccaactaccacaacctgtttcctgcacttcgagagtttgtcagtggtggaaagcctgtctggggaacatgtgctgggcttatctttcttgcaaacaaagcagtagggcaaaaaacagggggccaggaacttgttggaggactggattgtactgtccaccgtaacttttttgggagccagcttcaaagctttgaaacagagctttctgtgccaaagcttgcagagaaggaaggagggaatgatacatgccgtggtgtatttatacgggcacctgctatattggaagcaggttcagatgttgaaatattggctgattgccctgttcctgctgacagacccagcattacaatatcatctggcgagggtgctgaggaagaagtgtattccaaagatagggtaattgttgcagtacggcaggggaacatcctagcaactgcttttcacccagaattgacatcagattccagatggcatcgttacttcttggacatggacaaagaatcccatgcaaaggccttctccacgctatcattatcgtcatcttcaacggacgctgaagacctgccaaagaataagccgcttgatctgcccatttttgagtaatggaagtagaaagaaagaggtcaaaggattgaagaaaggaagatgaagaaactgaccacattgttttcctttagctggttacgaaaacaaacagctgggcatctgttgtgctcagtccatatgtgtcacttggtacaaactgttaccacccaaaataatgacggtgtgttgtacgcaattcttcagataaaagtgctgtggagattgtaacctgactgtgcaaagaagctgctcagttgaatatatgatatttcccctattttttctacaaaaaaaaaaaaaaaaaaaaaaactaaagagacacgcaacagggagtaggcaagg

SEQ ID NO: 16687 - DNA, 2444 bp, Setaria italica
  Peptide Sequence Number=SeqID_82661
ttacataacaatccagagctttcgtttaatccacaagcaatgttcagaacagaaacggagcaaaagatggtttccagcattaaattcttgcaatctgattcattgcccagaacgctttacaaagcttgcacttgcacatactgtacaacaagataaaacactgaattgtacagaagcctatactaccagtatacaccaaacattcccccacacgagcagtcagctgcttgttcctactgtaccactcactgtccattgcatgctacagaaatactgctgcctgctggtgaactgaacacaatggaaaagtatcctatatataccaattccggtcaccgcataaccatgaaaggctcataacttcagggccatcactttggcgcaggccctgcactacaactctgcagtgaacagaagattgtattatcgaatctacaactgtcaggtatatcatcgaatctacaactatcaggtaagtgcaatcactggtcagaatataggagctaccacaatatagagctcgggatgacctgtaaactgcatttaagctgtgattggatgagtagatgacataacagcatacggtcaccagctatgggtcattttgtcgcctctccatctgtattgaacggaaaatccgtgctgctgactctgaagcagtctgcgcattatgtgggacaaccctgatcacatggttctgctggtccctgcttccagatgagggctgaggctgggcattctgagctggagctgagggaaagactgacaccgggccacttccatcaccttgaacttgaattctatcaaaagggctgctggcgctgctggcttgtggctcgctgtcccttgatgcatgaaatctccaaatgccactcggatgcgacatgttgcacgagatcagcgactgttgttccgcacgcccatgaggctgcggcacagcagcatggctcccttgctcaactgcagatgctggtgcccctgggttcatcaccggcacactgaaaggcgggaagtagttcatatgcatggcaggagcaccaggaggggccatatgctgtggctggtgaggcataggaacgccatatggtgtagatgggagctttaacggagtacaattggcgtaaaatggcgccaacaaacttccaactgggggacagggaccagcataaggcttatagacaagaccttcagagggagacataactgggacaagccactgattctgtggtggattcatgcaccagttattctgtttgttgtcaggagcagcaggcatgactggagggttgcttgtaaaggtttcgtttgttgcagcttgatcatgaccgttgcccccaagcccatcatcacgacaaggggatggtgggtttccttcagtgttttgtttcgataattccggttgctctggagttggttggatatcatccttgtttgcaattgacagggtttgcactttcaaatttcctttaggcagtttggtcttctttcccactaaggcactgccaaggacaggatctccttcaataagcaaatgtggagatgctgcaattaacttctgcacttttatcagcttatgcagctcgaatacttggacagcaaaaaccctctgctgattctgaatagcttttcttgccttccagaaatgctttggaccaatagcaccaacaatttcatctggagagacctcccacccaggtatgcattccactgaagagtctgatagatcatcattttgctctacatcctgatgtcctcgttttctctttgaaccagcttcccgcaaacttctatccagtaaattagaattcttgttacagtcatttaaatcagtgcatggtttacaggacactgtatttctagttgttgtagggttctttgcttccatggaacttccgttcatgcttgtaggttgacgcctgctattcccaaaatgtgggttatcataactatctatattattcgcattatcccccatctgacatgctttagcatctttgtttttgaacttttctttgaatgcctgaactggtaaactcttttcttcaacttccacaatttttgatccttgcactgattctttctcctttacctttgaagagctcattgatctcatatcagattcatcgattctctccaagtgcctgttcacagcactataacattctgcggatgatttgggcattgcagaaggacttttgtgtgggtttgtagcggatagtggatttgatttgtcttgaacccctgcatgctcttgagtagaatatcgagaaaatctgggagaacagatggaaggaaccataaattcatcattattagccactttcttcccagaagaattcttattgatgttgcccaccctatgctgtgaggtggactcagcaattgattttgaagcataaacatcgttgttcttggtctgtgtgggcatcctcccagattctctt

SEQ ID NO: 16688 - DNA, 488 bp, Setaria italica
  Peptide Sequence Number=SeqID_82662
atctctcttggttcaacgtcattgtatctaaagactagaagctggcagaatggaatcctactgtggtggtcttgttcacactttagtggcagtctaacatcacaatatacgccatacgctacccggcatctcacaaacctactttttgtgcttttggcatcctgtatggacgtatggtccctggtccacgtatattgctagcattcgctacttggagctcaaaggatgcatgtgatcgttgagaattgattctacaacttccactgaagcaaagatcatgtttggtttaggaggcacaggtcacacctaacgcatgatgggtggctttgttcgtatctcggatcctctctacaaggtcagcatcaaccgcttggaactttgctgttgcagctttgcgatgggcccaaacccaaagcattcttggcgcaaagaggttcacaagcaaggctccaagggaaactcccgcgcgtgaagaagacacctttaag

SEQ ID NO: 16689 - DNA, 540 bp, Setaria italica
  misc_feature (531)..(531): n is a, c, g, or t
  Peptide Sequence Number=SeqID_82663
cggtagggggtggcggagaggtggggacgtcatcgggaggaggcggtgacgccgggacgccgctgggaggaggaggccgcggtacgggcggaggaggagatggcgtcggaacgatcgccgccggtggaggaggagatggcgttggcacggtcgccggtggaggtggggacggcgtcggcacgatcaccggtggaggtggggacggcgtcaccggcggaggcggcgggggaggagacggtgtactcgtaggtggagataccggcggctgcaccgttggcggtgtagtgggcggtagcgccgttggtggcgtagtcggcggctgcgccgttggcggcaccggcgctgtaacgggtggcgtcaccggtgtagtcggggccaccggcgtggtgggcgcctgcggcgccggagccaccggcggcgttggtgtcggggaggacatggtgtcgctgctcgatcgctcccgccggtgcaatttagtctcccggtgtgggcagactacgaccagacaaggcagcagcagcaccaacggancagaagcga

SEQ ID NO: 16690 - DNA, 838 bp, Setaria italica
  Peptide Sequence Number=SeqID_82664
aagacgtaccagagggcgacgctggcccagatgcaggcgtgctggaccagggtgaagtagctcactgtgatcgccatctgggcgttcacggcccagaccacgcacgtgtacgccgcggcgccgagcgccgccttgtcggccacctccccgccccgccggaacgcctcatgccccagcgacacgaaggcaatgttccttgatcttgcaattggttgcggatcagtcatttgctgccgttcttcacccaagcagaaagcacttgtgactaggcttgtcaaaactggcactggtaaggtcacattggcaattggtgatggtgcgaacgatgtcggcatgattcaggaggcagatattggggttgggatcagtggtgctgaaggaatgcaggccgtcatggcaagtgatgtttccatcgcccagttccgcttcctggaccgcctgctacttgtgcatggccattggtgctacagcaggatctcatcaatgatatgctacttcttctacaagaacatcacgtttggcgtgaccctgttcttgtacgaggcgtacacatcgttttcaggccaggctttctacaatgactgggcgctggcttgctacaacgtcttcttcacgtcgctccctgtggtcgccatgggcgtcttcgaccaggatgtttctgctcgcttctgtctcaagttcccgatgctgtaccaggagggccctcagaacctgctgttccggtggcggaggatcctcgggtgggtggcgtacggcgtcgtcagcgccgtgatcatcttcttcctcaccacggcgtcgctggggcatgaggcgttccggcggggcggggaggtggccg

SEQ ID NO: 16691 - DNA, 431 bp, Setaria italica
  misc_feature (401)..(401): n is a, c, g, or t
  Peptide Sequence Number=SeqID_82665
cctaattcgtcctccatttacactatgtattcctcacctttcagttgcgtaacgtacaacgattcgggcacaactcgagtgtacaaccgtgcatctcaagttgtacacaaatggttgcaggtggagcagtacttttacattacagagcatgagttttcttttatgctttcaaactattccagtcaaacatttggacagacgacgactggagcttgaattcctgctggggaaataaaactgtgttcatcacgttctgggcgtgactgcgattggcatccctcgcctgagccgcacggtggggaagttgacgacggcgtcctcctccgccacccacctgaagtcggtgacgaggtggtgcaggaagatggaggcctcgagcctggccaggtccagccccgggnagagcctctgcccggccgccggaagggggt

SEQ ID NO: 16692 - DNA, 1274 bp, Setaria italica
  misc_feature (1220)..(1274): n is a, c, g, or t
  Peptide Sequence Number=SeqID_82666
cagcagcagcaccccggtgccggcggaggcggcgccgtcgccggcggcagcagcggggagctcgtgaagaagaagaggggaagcgcgaggaagtacggcccggacgggaccatcggcctggggctcaagcccgcggccgcgacgggcgctgaggccggcgggcagtccggcggaggcggctccaactccaaccccgacgggaagcgcagggggcgtccccccggatccggcaaaaagaaacagctcgacgctttgggatcgtcagggacatcatttactccccacataataaccgtgaagcctaacgaggatgttgcttcaaaaataatggccttttcacaacaaggcccacgcactacatgtataatttcagcaaatggtgctctctgcacagcaacactccgtcaaccagcaacctctggtggcatagtgacatatgagggccacttcgatatactctctctgtcgggctcattcctgcttgcagaggatggtgacactcgcagcagaacaggtggtttgagtgtggcacttgctggaagcgatgggcgcatagttggaggttgtgtcgctggaatgctgatggcggcgacacctgtacaggttgtagttggcagtttcatcgctgaaggtaaaaagccaaaggaagagcagcaaccaaaacgtgagccaacttctgtgccactgcacgcgcccggctttggggccacctcgactgccagtcccccatctgacggaacatcaagcgagcactctgatgatccagggagccccatgggacctaacggcagcacgttcgctaacacggggcatcccctgcattccacatttgctccggttggctggtcactgtccggcaaccaaggccgctacgatcccgacctaaagatgatgaccgactgatggctgccgttttacagcgttgttgttagcagttgacctagttgagtagggctcaggccttcctgcaccggttccaccagcagcagcgtcggacaataaacccggaatgctagaagtgataaagccccaaggaatgagtagatcacgagtaataagtagcaccagtgcatgcctttgccatgttattatgcagtagctagttgtttgtatctgtatggtttcactgtcacgtgtttatgcagcctgccttctggtttctacttgtatcagtgtagtgctacgtttcccatgtccatggattggtattttttaacccnnnnnnnnnnnnnnnnnnnnnnnnnnnnnnnnnnnnnnnnnnnnnnnnnnnnnnn

SEQ ID NO: 16693 - DNA, 407 bp, Setaria italica
  Peptide Sequence Number=SeqID_82667
tctgagatagattcttcttttttccaaggtatttcatctgatatagttgtggtgttaatgtcccaatttgtgaacttttattattaaatattgttgtaaatctgcataagtattttatttccaatggtaatattgtttgttttgtgcttcttattctggtgcattatctggatattcggcatcctaactgcagcttttcaatcttagcagtgtggaaatcagtggctctgtggactgtgatcagggaaaagaacagccaacaaataagcggtttgtatctttgttctttgtattctgtatttcagccatacgtttttagtttttgttcctattatcgttgaatgtttctatggaaaaaatattccagtcctaggtcagaaagtactgcacaaccaagcacaaaagca

SEQ ID NO: 16694 - DNA, 557 bp, Setaria italica
  misc_feature (545)..(545): n is a, c, g, or t
  Peptide Sequence Number=SeqID_82668
tcagcataccatttcattggcgaactgctgatccgtgcagataatgaggcaattctgcaagcgcgcataggaaggaatgtcgacggcctcgacctgaacctttaccagcagtctctgcttatccggcggaaacatgaagccaagctacggagctccaggagagcatgatctgttgctggggaatcaggcacatgctctttgcagttcaattcctttgtttggccacgatggaatgacatttgtacatgagaacagaactggaccatctagaggatttgatatgagaattgatcaatttggagttcctgaatatgatttcagggacctcacatatctgtttctggctgttcaggggtctggcatttctcttgctccttaaagggctgcgttgacatgtatggatatctggttgcgatgatctgattttggaacgagacattttcattctcagttattctgctggaggcaggtggaacttggccgcagaatgtcagtgttttattgtgaatctgagtctattggaccattgtttaccatgaaggttnagtgatgctttg

SEQ ID NO: 16695 - DNA, 393 bp, Setaria italica
  Peptide Sequence Number=SeqID_82669
cgagaagaagctggtcgagtatatctaccagaggacgcggaagggggctgtcgtcgacaagatcgagaagaaggtgatcatcaaggaggagaaggtcgaggtgaagaaagaggtgaagaaagatgagaagaaagaggagaagaaggaggtcaagaaagaggagaagaaggtcacggaggtcgtcgccccctacttcatcccctgcacgcacccgcggttcgtcgacttctcgcacccgttccaccgcggcggcggcggcggctacggttcgccgtgcggcgatgggggttacggctacggcggctgcggcgggtacccgtacggtgtcagctacacgcactccgagctcacaggataccgtgacacggcgttcttgcactgcacacaccacta

SEQ ID NO: 16696 - DNA, 466 bp, Setaria italica
  misc_feature (4)..(4): n is a, c, g, or t
  misc_feature (38)..(38): n is a, c, g, or t
  Peptide Sequence Number=SeqID_82670
ttcngtttcctctctctcagcccatcagcctcagctgnttccgctgcccctgctgctgcaggttgtggcggtggcggcggcggcgatgatgacgaggaagcgggggagtcgtcctgggggttagaggagcggggcgaggaggtcgtcgatgggcagggaggggtcgaggcgcttggccttggagaggaacttgatggcgcgcgcgcggtcgccggcctcaagcgcgcccctgccgatgcgcaggcacttgaccgcgtcgtccttgttgccctccatcgcagatctggccgccgccgtccccggccgatcgagccgagcaggcgggcgaccggaaggagcccacgcagcggcggcgcaggaaccggccccgatcggatcggatcggctcggccccaacccaaccggcgaggcgacgtggagtagggttcaggcggggcggatcgccggagtcgggggcgccgggcgg

SEQ ID NO: 16697 - DNA, 601 bp, Setaria italica
  Peptide Sequence Number=SeqID_82671
acgaagcaagaacaccacaaccattagctggcagctgctactcaaagaggaaagaaagcatcttgatctcgagtggtagggtccaggggcgagcagctcggagcgcgcggtgagccatggagaagacgccgaagaacgtgagccaggcggcggcggcgccgctgaagctgctcgggtcgtgggcgagctcgtacacgcaccgcgtgcagctggcgctgcggctcaaggggctcgagttcgagtacgcggaggaggacctcgggaacaagagcgtcgagctgctccgcctcaaccccgtgtacaagaaggtgcccgtgctcgtccacggcggccgcgcgcttccggagtccgtcatcatcctccagtacctcgacgacgcctggccggaaacccgcccgctcctccccgccgacgccttcgaccgcgcgctcgcccgcttctggtgccacttcgccgacgacaagctcgggccggcggtgggcgcggtgttcgcgtcgacgggggaggaccaggaggcggcggtgcggcaggtgcacgagaacctggccctgatcgaggcggagctccgagacggcgcgttcaagggccgccgcttcttcgg

SEQ ID NO: 16698 - DNA, 852 bp, Setaria italica
  Peptide Sequence Number=SeqID_82672
gcctaccaagaagctgttgtcaagcgcccccagcgcgaggctctggatgctgtcaccgtcgccggcctcctcctcgaactccttaagcaggtccctcgctggtgccgcgacgggaggggtgaggctttcctcggcgtcggcccaaacggcgtcgtcggcctcgtcggggcgcgcccacgcggcgaagtcagcgccgaacacctccttccggccctcatccgtggcctcgaccccgtacgtgttctcgaagaggcaccggtcgtagtccacccggaaccggcggaattcggcgtcggtgggcagtcgcagagcccacacggagccgcccgcggcgaagtccacccggcgctgagcagggttcgtcttgagctggagcgccgagtccacgggcgcggagacccgcggccccgggccgacctccaggaaccacctgggggaggaggtgtcgtcgctcgccttgtcgacgaaggcgtagctcgcgcggcgctcgtcgagcacccagcgcgcggagggcgtggccccgccgacgtggaggtagagcttggcggccgtggggcgctggtacttgagatcgagcgaccggagcttggcgtcgatggcctcaagcgacgcgggggtggcggtgcggaggaggtcgtcgtcgcgctggcccgcgctcgcggcggggtcggagatgggggatggggcgtcgtagtcctcctccccgtactcctcctcctcgtcggaggaggtgaggtcgatgtcctcgcggctgtgggagccgcccatggcggttgcggtggaggggaattcggcgcgcgcgggggttgcgaggtgcgtgcggtgcgggagaggagatcgtgaattcgtgac

SEQ ID NO: 16699 - DNA, 616 bp, Setaria italica
  Peptide Sequence Number=SeqID_82673
ctgtcaccatagttgcaaattgatgaaatccagtctctgttagcatctgaaggcagtgcgtggtaggagtgaacaaagtaaacatggtggccatcagctccctgcagcagctgtgtatccttggtgatctcaagagcgttccagccaatgtgaggaactatagaagaacccttggaggagtcaaatcgcctaaccacacccggtattacaccaaggccgctcaccgggccgttctcctcgctggagtcgaagagcagctggaggcccaggcagatgcctaggaaagggcggtccctttggatgtactcgcggagcgcgtcggccatgccagtgctgttaaggacgtccatggcggagccgaaggcgccgacgccaggaaagacgaggcggtcggcggcgaggatgtcctccgggctccgcacgtcgcggatgccgaaaccgaggtggcggatggcgttccgcacgctgcgcacgttccccgcgccgtagtccagtagcgtcaccgtgtttgcgtcggaggacgcacggacggagagggagccggagccggagccgcggcgctggctgctccgcttcgggccggcggcacgcggagcatggggacggtgaggatggg

SEQ ID NO: 16700 - DNA, 329 bp, Setaria italica
  Peptide Sequence Number=SeqID_82674
taagtatagtcgtggttatatgcgtcaaccgtatcccaacgaaatatgggtcgtcgctatatactcaatggatatcgcaacggcgagaaagcgtcgtaataggcgtacaaggtatcgcaacgatgtatgtgccgtcattatatgcttcaaccatatcgccacagaatgtgtcgtggttatacgctcaaaggatatagcaatgacgtaaaatcgttgcaatagatggtacaaggtatcgtaacgatgtttaacaatggttatatgcttcaaccataacgcaacgacatatgccgtggttatacgtttacaagtggtaattaagtacgacc

SEQ ID NO: 16701 - DNA, 924 bp, Setaria italica
  Peptide Sequence Number=SeqID_82675
ttaggcatggtgatattattaatcttggaatggagagaacatatctacgacgattgaggtaaatgtggtgctgtttattatattcccacaaatgtattacattagctagtttgtagtcccaagtaagcttatgtaaagctgagatgagatccaataagtgtcactggtaaagaggatatggaaataaaaaggggtattactagtagtaaagattggataagatagtaactatatttgatgtgtattatatcacctcgatattcttattactattgtcagctaaagaagaatttcttgttggatatgtgcgagaagcatctggacaaaggaaacagcattggttcctctgtggatttatcaattggtatctttcatacgcggaaaggcaaacatggcactatcaagatgacagtaaatgtatcagatgatgttgaagtgattgcagaaggcacctatcctgtcactactgcggattgtacctcgggagatgacgatgattctggtataattcaaggtgagtgcttgtttgctttcagttgctaaacatcaaattgtcattttatatattttgtgaagaaactcctataaggaatcttagctgttctaaattgttgtcattatccagtattttccctatctgattgcattgattgacatctcactgtataatatgttacctgagcacgttggatattagaattgatgtgattgcattagttcacgttggatattagaattgatgtgattgcattagtctgagatgtgagaattgatgggactgcattagtttggaatgtgagagagggtatctcgtgaaactcctgatgatgaagatggtgacatggaaagttatttttctgagcatgtaagtactgttatcctagctagattcctatttctgtgcaataaagttaagaaactaaa

SEQ ID NO: 16702 - DNA, 535 bp, Setaria italica
  Peptide Sequence Number=SeqID_82676
ttaggcatggtgatattattaaatcttggaatggagagaacatatctacgacgattgaggtaaatgtggtgctgtttattatattcccacaaatgtattacattagctagtttgtagtcccaagtaagcttatgtaaagctgagatgagatccaataagtgtcactggtaaagaggatatggaaataaaaaggggtattactagtagtaaagattggataagatagtaactatatttgatgtgtattatatcacctcgatattcttattactattgtcagctagagaatttcttgttggatatgtgcgagaagcatctggacaaaggaacagcattggttcctctgtggatttatcagtaagtgtagttgttcttagacgtggtttaatgtctactttatgcgcctttatatctctaattacgaaatattgctataagtagggaaagcattgagaggcccaaatatacaaatataatgaaacatttattcacaatataaaaaggcaggagcactactcacactgagtcggagaca

SEQ ID NO: 16703 - DNA, 2394 bp, Setaria italica
  misc_feature (2376)..(2376): n is a, c, g, or t
  Peptide Sequence Number=SeqID_82677
gttccctaccttcgcttcctctcctgtcgcaccccccgacgtcgatctccgcactgtatggcgccgaccaccaaggaagaggaggggggagaggcgtgggagtcaaggctgctgcggcggcggactcctgcaggttcccccacaccgcctgcagggaccgccccgtcgccaccgccgtcgcagcgggggaagagagaaaggcccggatcctcaagagggcggaaaagagctagggcgaccggccgcgaggacgagaaggatgccgaggctgcggcggcctcagcttcaccacccgccgggcatgcttcctccggagcatcctctggaaccagctctcctctccgttggcctgaactccctcgcgccgtcttaggtgaagattcctacggagagcagattttggagcctttccatgagatcgacccggccattgtcagggcccacggcaagctgaaaaccaaatattttgctaaactggatcgccagctcaagttagtttcgttggaccagcgtattccatcttcatgcatggtagatccaagattgctttcagtccgtaaggcggctacaaattcaattcttcaaattgctaaagtcacagtgggtttgtcatcatatatcgatgataaaatgttgggacggacctctggttttctcatagattgggatgtggagaatagaattggaactgtgttgacatctgctctcgtgatccaatcaaagtctccatcacttgatgagtggtcagcaacagacgagtatgctacccatgctgaggtccgcgttcatttcatggataaggctgcgactacagtagttgctaacttgctgcactacgacaagcattacaatcttgctttgttcaaggtttctatggatttatctgctcagataccctcatttactagtgagctgaagtttgctgaagaggtttttgtgcttggaagagatgagggtcgatatctgacaatagatcatggaaatgtggcatatgagggcccaagcaggttgcaacgccaccattatatgtttatcacccgtagaataaataagcttggtattggtggacccgtcatcaaccacggtggacaagttgctgggatgtatagtcatccaggactggcatttacaccctcttctattatattgaggtgcctgcaaatgtggaagagtttcaactgcatactgcggctgcacgttgggatgaagttttcagctattagcctcctcgaccttcctcatagagaggtcatcgcctgcaagtgtgatatcgatgatggtctcattgttacacaggtgtctgaaggatcgattgctgagaaacttggtgttaggcatggtgatattattaaatcttggaatggagagaacatatctacgacgattgagctagagaatttcttgttggatatgtgcgagaagcatctggacaaaggaaacagcattggttcctctgtggatttatcaattggtatctttcatacgcggaaaggcaaacatggcactatcaagatgacagtaaatgtatcagatgatgttgaagtgattgcagaaggcacctatcctgtcactactgcggattgtacctcgggagatgacgatgattctggtataattcaagggtactctgcgatgatgaagttggcgatgactacggtttagtcgaccacttgatttcgtagttgcactagaaccaaagtgatcttttgtgtaaactaaccaattgtgcatgcaagacaaaccgtgagcttagtttggtcgacactgatgaagccacttgtgaaccgtcaagtttttgtaaaaagagttgtcgattgacctgtaggctatgaatgctcattgcaacaatgcacaatttatgagtcaagtttacttaagccttgagtgcttgtttgctttcagttgctaaacatcaaattgtcattttatatattttgtgaagaaactcctataaggaatcttagctgttctaaattgttgtcattatccagtattttccctatctgattgcattgattgacatctcactgtataatatgttacctgagcacgttggatattagaattgatgtgattgcattagttcacgttggatattagaattgatgtgattgcattagtctgagatgtgagaattgatgggactgcattagtttggaatgtgagagagggtatctcgtgaaactcctgatgatgaagatggtgacatggaaagttattttttctgagcatggtactctgcgatgatgaagttggcgatgactacggtttagtcgaccacttgatttcgtagttgcactagaaccaaagtgatcttttgggtaaactaactacttgttcatgcaagacactcagtgagcttaagtttggtcgacnctgatgaagccacttgtg

SEQ ID NO: 16704 - DNA, 389 bp, Setaria italica
  Peptide Sequence Number=SeqID_82678
gtgcacttcacgaggttcagcagaatcaacaagcaaacctatgcgtgtcctctcaagatttgagacaagatgttgatgaacagctccaactgccaataggggactgacaggtacacgatccagagagaaacctctatcagagagaactaaaatagtgtatccctcatgtatagcttcacgcgcttgagcacaaagtttatccaaagtctgctctaatccttttctgccatactttttaggataagttatgtcaagcactttgctgcgccaatcacgaaaattcatctttttaatagcctccatttcatgaatatgcagtaaaggaccttcaagtttcaggcgatggcactgatgttctgttgtttcagataggtcaccttctggaccaa

SEQ ID NO: 16705 - DNA, 1436 bp, Setaria italica
  Peptide Sequence Number=SeqID_82679
attgttggaattcatgatgcctgatatatttgccactggagatattgatctgaagaagctgctgaatgcagaagaccatgaactaatttcacgcataaagtccattttagggccttttattcttagacgtttgaagtcagatgtaatgcagcagcttgttcctaaaatacaacatgttaagtttgtcaccatggacacagagcagtctaaaacttacataaatgccatagatgaataccgttctgcttgtcaggctcgtagtgccaagtcttcagttgacatgaccaataatgttgttggattgattccaaagcgtcaaatatcaaattattttacacaatttcgcaagattgcgaatcatcctttgcttataaggcgtgtttatagtgacaaagatgttgatcgaattgcaaggttgctctatcctaaaggtgcatttggctttgaatgttccttggagagagcaattcaagagctaaagaactacaatgattttaatatccaccaactattaatatcatatggtgatgcgggtacaaagggggctctaacagatgagcatgtttttgcatcagcaaaatgtcaggccttagcagagcttttaccttctctagcaaatgatggtcacagagtactcatatttagtcagtggaccacaatgcttgatatccttgaatgggcactggaaataataggagttacatatagacgtcttgatggggggacaccggtaacagaaaggcagactatagtggacactttcaacaatgatcgttctatatttgcatgtttactttctacaagagctggaggtcaggggctgaaccttataggagctgacacagtcattatacatgacatggattttaacccccagatggatcggcaagctgaggaccgctgccatcgcatcggacagcagaaacctgtcactgtctacaggctagtaacaaagggttcggttgatgaaaacatctatgagattgcaaggcggaagttaatactagatgccgcaattcttcaacctggagcagagttagacaatagcactgatgttccagagcagacaatgggagagattttggcatctcttctcctggcctgaagtactaatcatggagtgtcttggaggtatttgatcctatccttatcaatgggtttatggccttcatttaagcatgtcagccaccctggttaatttcttgaggtcctaagatgtgcattcatgatgcctttgcaaactgctggattgccagcgtggttctggttctgcagtgacatagtatttaagcttactctaggttgcaatttagtctgatttagtttctcctacatagcaaggactggaatctgagaaagtagtatatctgtaccaaagtttcaacatgttctaaatgaaatgaagaatagttgcaagttgcaactactacatagga

SEQ ID NO: 16706 - DNA, 597 bp, Setaria italica
  Peptide Sequence Number=SeqID_82680
accactgctgtatgaaggaggtgtggtccatggactccccgggcatgacgtcctcgcccttcttcccgccgatcagcctcgcggggttccccaccgcggtgctcctgggcggcacgtcgatgagcaccaccgacccggcgccgaccttggccccggccccgatcctcacgttgcccaggatggtggcgccggcaccgatgagcacgccgtccccgatcttggggtgccggtcgcccaccgccttccccgtcccgcccagcgtcacgtggtggaggatggagacgttgtcgcccacgatggcggtctcgccgatgacgacgcccgtggcgtggtccagcaggatgcccttcccgatcgccgcggccgggtggatgtcgacggcgaagacctcggcgacgcgggactggagcgcgagcgccagcgcgcggcggctctgtgcccacaagacgtgcgcgacgcggtgcgcctgcacggcgaggaaacccttgtagttgaggaggcagtgcgcgaagcccgcgcaggccgggtccctggaccgcgcggcgatgaggtcagcgacggcggcggcgcggatggacgggtgcgcggcgagcgagg

SEQ ID NO: 16707 - DNA, 684 bp, Setaria italica
  Peptide Sequence Number=SeqID_82681
atgtgatgacagattcagcattcagtctcacagcgtactcatgggcacttgcatatctggtgaccataacaactgaaatggtgtacatcaagcatattgtgacaaacctggggctgaacacttggggctttgtgctctacaacaaccttctgtcattgatgctggcccccatcttttggttggttacaggggagcataaggtggtctttgcagcgattgaatcgaggggtgaaggcttgtttcaactgggcgcctttgtggcagtggcactgtcatgcgtgtttgggctgctcatcagtttctttggttttgcagcaaggaaagcagtctctgccacagcgtttaccgtgactggggttgtgaataagttccttaccgtggctatcaatgtcatgatctgggacaagcatgcaagtgcatttggtttggtttgcttgctcttcactatcgttggtggggtactctatcagcaatcagttacgacaaaaggaaattctgcggttccacgaggtccagtatctgagcaacctaaggagggcaatgatagcatagagtttgataacgagaagcaaagcttagtttcatctgctaagtgtccggtgcgtgaattactcacatctatagtattaaattttgcagatatattatttggccttgaattaggctttttgtgtctcaccttgg

SEQ ID NO: 16708 - DNA, 703 bp, Setaria italica
  Peptide Sequence Number=SeqID_82682
agaaagaatagagtccatctcactatggatagcttctttctaatcatccgcatctggagatgcaaatgcctctgaaatagtcttaggagtatcgtctacgagatagacagtgaaatcatcaccaaaggactttgcagttctttgtctcttgctcttcttaggagcttcactgttaacctcctcatgaactggctcaagtgtttgttcagcatgatcaggaagcacaataggttcaggagttgtctcagcaatcatatcagaagatagtctagacatactatgcaattgtttcataggaaatatattctcaaagaaagtaacatcacgagactccatcaaggtattaacatgaacatcaggcacctctgatttaaccactaaaaatctataggctatgctatgatgagcatatcccaaaaagacacaatccacagttttaggtcccaacttacgtttcttgttgattggcacactaactttagccaagcatccccaagtgcgtaagtataaaagtgatggttttcttccaatccattcttcatagggagttttctccttattcttcatgagtattttattcaggacatgacatgaagtcaatacagccttcccccaccatgccttagataatccactggtgtctaacatggcgttcaccaagtcagtcaaggtgcgattctttctttcggcaaccccgtttgat

SEQ ID NO: 16709 - DNA, 285 bp, Setaria italica
  Peptide Sequence Number=SeqID_82683
aaaagatgtttttacaggatccctatccacaacaattttaacttctggttccggcgaacgaataatcattaagtcctcctctttccggacaagacatacaaagagacccgccaactgtctttttattgaatctttgaaagatagatattatgattagtccttttctttactatctaccgtccttctattttttttagttattcactggagcaattatatattgaagtcaatccgaggcaagtgaataactaaaaaaatgaaggacgatagatattatgattagta

SEQ ID NO: 16710 - DNA, 2207 bp, Setaria italica
  Peptide Sequence Number=SeqID_82684
atcgcggggtatggggagcaacggcgaggtgtgggagggggcgggagtgggcggcggcgttcggaggcggaagggtggcgtggagtcggcgggcgcgggcgcgtcgtcctccttcgccgaggggaatggggagttcgtgctgagctccatggacgccaggttctccggatcggccgacgacgatgggttgttcgtctcggcggcgtcgtcgcgtcagccagcatttgggcatagtaaatcgacagctgcaagttctggtacctataaagggcaagagtacgcttttgtaagatcatactctgataggttgctaaagtgtgacctcactctggatatgctatcagaaaatgagaagataaagatatttgagaagctggttaagttccagaatgatggtaccgtggaggtagatgtgacacgcagtgctcttgttacctcagagctctcagagattgatgcgtttggttatgtaccacgtggtattgaagaagttacacctggaatcaccaagtcagtccccaagctgaagattgccatacttgtagttggaacccgaggggacgttcagccttttatagcattagctaaacgacttcaggaatttggtcattatgttagattggcaactcatgtcaatttccgtacttttgtgaagtcagctggcattgatttttacccattgggtggtgatcctcggattatggctcagtacatgacaaaaacaagggttttgcctggctgcgccaacagagatttacgctcaaagaaagcaacttaaggaaatcatcttctcagttctacctgcatgcacagaaccagatttggatactggaacaccattcagagctcaggcaataatagcaaatcctcctgcttatggtcatctgcacatcgctgaggcacttggaatacctctgcatatatttttcacttttccatggacgccaactgatgaatttccacatccattggcacgaatgcctcagagtgcaacctacaggctatcatatcttattctggatttaataatctggtggggcaccaggggattcataaatgatttcaggaagaaattaaatttgccccctattgcttacttcagcacataccatggatctatatctcacttacctactggatacatgtggagccctcaacttatgccaaagccaaaagactggggccctctagtagatgttgtgggatattgcttcttaaatcttggaacaaagtatcaaccgccactggagttatcacagtggcttgaacaggggcccaagccaatatacattggttttggaagcatgcctcttgatgatgagaagaaagtcactgctaccattttggatgcactaagagaaacaggacaaaggggaatcattagccgtggttggggatctcttggaagttcttcagaagttccagttgatgtcttcatcttggaggattgccctcacgactggttatttcctcgctgtgctgcagtggtgcatcatggtggagcaggtactacagccgcagggctgatagctgggtgtcctaccacggtggtgccattctttggggaccagttcttctgggctgagagagttcatgcacgaggagtgggtcctgcacctatacctatagcagcactcaccgatgaggcactttcaaatgcaataagattcatgcttgatcctgaggtaaaatcacgggcactggaactggctatagcaataggcaatgaggatggtgtggcagctgctgtagacgcatttcaccgacatctgccttcggagttgccacttgctcctacacctgtagaggaagaacacgtagacttattccaatggttttcccgagccctggaaaagtgttgttttccattcaatttttagttgtggttcgcattttagctagttataagattagttcattcatgggttgaaaataaaacacacaatcgtcggaaaggagtgcaataaatgatgatttatgctggggtgatttcttttacttgtttccatcatcccatcgtagatgcaataacaataaacaaagattgtggtgtttatagcgttgccactgtaactggctcggcaatcggcaattggagttgtattcattactacattcagaatttgttgttggtctgagaaatttgtattgcaacgtgccattccagcataactgcaaaattacatttgtctgcagtctgtatcata

SEQ ID NO: 16711 - DNA, 223 bp, Setaria italica
  Peptide Sequence Number=SeqID_82685
gtattgggtaaaaattagccttagttcagcagcaactcacttcaagaatggcacaatgcttctactctatgcacacactctcactgttcatgtaagtgaacttgcaaatctccgcaaagaaatcatcagcagcctcatggcaattcttcatctgcgatatcctaatgatcatcctccgtagcctcacgctgtacctgacaagagactcgagggtgctcagctt

SEQ ID NO: 16712 - DNA, 525 bp, Setaria italica
  Peptide Sequence Number=SeqID_82686
ctgaaacattcgttgctaaatcatgcattaagtcatgcatgacatagtatccagattctctgtcttcttgaccaacaagatctacacggaatctgagatcgaagaatgattttctggtcagttgaaccaggtatttttctccaacatccactagactttgagttccaaacgcatcctgcgagatcaaacctgagtcaacccacatctccactaactgattctttccaaatcgataatcttgcgggaataagctgcaaaaccgaaaacaagtttgcagcactggtggtaggtggtagtagcttagctttagaacatccataatatcctctgaacctccataaaaatgtttcaaactttgcgtcaggaactcgttccaataatccaatctcatattatcacgcagatgcgcaccaacaacctttgtcaccaagggacagcctctgagattcttggcaatttgttctccagttcgtttaaaggctgcatcatcttggagaccacagctgggaaaagcatgatggctag

SEQ ID NO: 16713 - DNA, 1020 bp, Setaria italica
  Peptide Sequence Number=SeqID_82687
cttcttcttggttatcaacattctcaagggtatcaacagaaagactacggaggcttcccaaatccttgagagcactcatattgtaaccttttattctcgtgatacgataattttctaagactcgaagagaagtaagtcttgctactgggaccatactgcatttccatccaaattgtaagtattgcaagcggtcaaggtacccaacatccctcacttgtgttgatcctaactcatatgataatagttttcttaagtgatataatttgaaaaccccagacatgctctcttgtgctgtggaaccccagacatccctcacgtattgtaacatgacgcaacggaggtgctttaacttggcaagtttgcttgcaaaatgggatctgtgccgcagttctgtttgaaatagacgcaatgattttgaactctcaacaagctcttccactgtatttagaagatctatgttctcttccacaataaaaaattttttgacaataataatggtacgcagattttccaaacaggaaattttcttcatcttttccgtaggaaaattaggaattaattcaacacgaacgtgtcgaactgtgctcggcacattctcaaggctgccaccatcaaccatgcgtaaacattctccaaatgaaacattcgttgctaaatcatgcattaagtcatgcatgacatagtatccagattctctgtcttcttgaccaacaagatctacacggaatctgagatcgaagaatgattttctggtcagttgaaccaggtatttttctccaacatccactagactttgagttccaaacgcatcctgcgagatcaaacctgagtcaacccacatctccactaactgattcttttcaaatcgataatcttgcgggaataagctgcaaaaccgaaaacaagtttgcagcactggtggtaggtggtagtaactcttaagactttaagaaacaataccaataaataatacctactagaaacctaccaataaaaaatagtttacaaaactttagacga

SEQ ID NO: 16714 - DNA, 1456 bp, Setaria italica
  Peptide Sequence Number=SeqID_82688
ttaaacaaaacttaaaaagaactaacaaagtaaggaaagacgaattaccaaattagaacttttagatatgcatagatgttgtagggatgtacaattccgtagcaaccatggctcaattgcgtccaacatttctgacccgtcttcaatgcgcagacgataggttgggcatagactcctcactggctcaacaagcagcaaggccgggtggtcgatcataatatccttgatttgcttgaagcttccaggctcttcttcgcaaccagatacaccaaaagttagggatagcccagcctctgcgagtttactgcagttccagagttctaaatcctcaaggtgtggaagggatctgagcccacccagggatgacagattcctgcatccattcaggcaaatggttcgcaacgacgtgagattcgcaaatacatctgcggatgggagggattccactaccgagcagttgctgagactcaagttggagagattggtaaacacttgcagtgactcaagcagcagaagttctaattcaccacaccgccccattactagagttttaagtgatggtagcgggagtttatctccagcaccacttagcagcctcaactctggacaatttgctatgcgtatctcttgaagttcattcatttcttcaaatggaaagggtgcagactccagatgcatgcagtcaatgatggtcatttcacgtattacttggatgcattgtttttgctcaaataagctcactactcacactgagtaacactgacaagatctgaccatgatgtgcagccatttggatgatatactttcatcactactgatatgcagctttactatccttggaagcctgatcaacccgacctcttgtatgtccaacctcaccaagctaggaggtagaagaggcaattcctaagttttaagcattgtgctatattaagtttttgaagacttggtggcaggaacaactccatacgcccatctcctgaggcatttaatggctgaccaattcttctcagcctatcaagaccacataatgttaaatcctttagcttcagtaactttccaaggcttggaagttcttcgatacgttcacagaagtcgaagtcaagcttcacaaggttttctacgcgggattctacaatccaatgtggaattctactgccactgaaatgtgaaatacatagtttcttaagattgacatgtggctcaaggctgtcaagaatcagttcatccgttctacttcggacaccatcgcattcagtccatcctagccgtaatgacacgaggcatttcttttccttcatcttggccttcttagcttcttcttggttatcaacattctcaagggtatcaacagaaagactacggaggcttcccaaatccttgagagcactcatattgtaaccttttacaaaaaataaaacaaaataaactaaagaaacggaaaattaaaggtaaa

SEQ ID NO: 16715 - DNA, 706 bp, Setaria italica
  Peptide Sequence Number=SeqID_82689
caccaccgccgcaggcacaagcgcaaccgcgcaagcatggcgtcgagttcgagcctggatttggcgatgacctccggcgttctcctccaccgccgcgcgctcccacacgcctccttcatcccgggaaggggaaggagcgcgagcgggaagaggagcaggaatctggctctctccgcctcctcctccaatggtgcagcagtcccatctctgacaagtgactcagataagaagggccctgtgatcatggaaattccactggacaagatccgaaggccactgatgcgaacgcgtgccaatgatccagtcaaggtgcaagagctcatggacagtatccgtgtcatcggcctccaagtacctattgatgtgctagaggttgatggggtctactatggcttctctggatgccaccgctacgaggcacaccagcgccttggtctcccgaccatccgctgcaaagtccgtcgagggacgaaagaaacactgaggcatcatatgcgttgagttggatgttattgactaaatcagaagttatctgtgtatctagagctagatcaagaccttccctgttccttttcatcatctgtaaattgtaatcctccgtacctgtacatgttgccgaaacagattggtgaatactactgaactcaacagcatgagaaaatattaactcttgcctacaacattctttttaacgaaaaaaaaaaaa

SEQ ID NO: 16716 - DNA, 1538 bp, Setaria italica
  Peptide Sequence Number=SeqID_82690
tttttttttttttttttttttttgtaacccaaaactccaccattttaattacgagttacccatccagtgtcacgctagcacgcacaacagttttaattaccactactagctcatcacagtcacagtctttgccacgacagattagttgctgatcatcgcgtcgatcacgggccttggacgatcatcagaggagcctggggctggtgtaggggccgttgaggatgctgttggcgatggcgtggtaggcggcctccgtcaggtgcacgccgtcccagttggcgtacgccgacgggtccgtgcacacgctcgaaccccgcacgccgcagctcgccttcgggttgaagttgtacggcccgccgccgccgcagcacgtccgcagcggaccttgagtgaagccgaactgcttggggttcttggcgaaggacatggcggcgccgtagtagtcggcgtacatgatcctggcctgcgggtacttggcccggagcgcctgcagcttctgctggagcacggcgttgtggtgctgcgcgaattcgttgtacgtcttgaggcagccggcggcgtcgtagtcgctgccgttccggccggggtgcagggtcaggtacgccgacgagcagcccatcggcaggttccccggcaccaccaggtgcgtcgcgccggctttgatcagcctctcagtggcatcggtgaccgcgccggcgaccgtgggaacgtaagttttggcgtcgtccagggtcttgcccttgaagaacgcgtagttgtagtcatttcccccaatctctccgaccaggaacagggacttgctgaagtactccttgcacttctttggcgagctgcagagcgacggcttgagctgctcgaaccacccgagctggacgctgagggacaggttggtccagagcttgtcggaggcgccgatctcctggaagaagggcggatccatggcggtggcgccgccgacggcgaagttgacaccccggcggaggtccttgcccttggactgcaggtacggcggcagcagcggcaggccgaacgcttgcgctaggaagtcgacgacgaggcggccgtcggagcagcggccggtggggcggtggaagtaggtgatgccgtaggggtagcggccgacgatgtggttggagagcgggctggacacgagcaggttgccggtgtcggtgagcgagtcgccgaagctgaacatggaggtgtagttctgcggggcgcctccgccgccgccgcattgggcgaccggcgcgagggcgcagcagaggaaagcggcggcgagcgcgggcagcagattgccggagggcgccatgggaacgcggccgcagggcgctggtggtactgtacagtggcagagctgcgcaggcgcagggagcggtggcagtggctgtcgactgtagcctgctagtggcgctagcagctagctatggcacactgctagtactagtagcagcacagcagggtaggccgggagcggcatgaggtggtggcgcttccgcgcggcgaagggcgatgggctcaggtcagtaatggcggatggc

SEQ ID NO: 16717 - DNA, 302 bp, Setaria italica
  Peptide Sequence Number=SeqID_82691
tccggctccggggacgtgtgttgccctgtagtagagcaccaggcatatctcctgtagtaggttgtgtcattgtgtgtgtcatccagatgcagttgctagcaccaaggaccaatccacgggtcaggttagaatcgcagcaacctcacaggagctaggcaactagtcacggggtacagatgcatgtttactaccttccggcttctttgttgtcgccttgcgttgggcgtcatcagctgcctctttccatggaaagaatcactggttcctgatgccctgtcacctttagcagccgaaaacgatgg

SEQ ID NO: 16718 - DNA, 414 bp, Setaria italica
  misc_feature (364)..(414): n is a, c, g, or t
  Peptide Sequence Number=SeqID_82692
atttctggcaaagtatctgacgaagtatctggtgaagagctgtattgccttggcaaactcgcaccaacggtcgagaagatgaagcgcgggttcgggatgcgagtccccagggtcattcagtgaggctgaagaggggcttaaaatccggaggatctgcttttgtgcgccgcggcggcgtcttgcgctatagtagattgttatgtcccaccttctaaccctgcactgaatcgttacatctgtagaaggccttttgatcgagtgtgtcatggtgtgatgatgtaattttgctggctcgagctagttgttgcctgtggattgttcaagctttacaaatgcaagtttcagtcaggattgtgcagaactnnnnnnnnnnnnnnnnnnnnnnnnnnnnnnnnnnnnnnnnnnnnnnnnnnn

SEQ ID NO: 16719 - DNA, 446 bp, Setaria italica
  Peptide Sequence Number=SeqID_82693
tacaggtatgactaccgtgctggattctggggtgttatgggacagtcctgccttggcatgatacctccatatattccggaatttaactatcctatgcccaagaattgtgctggaggaaatacagatgtgttcatcaacggccgagaacttcaccagaaggacttggatttactcgtgggtcgtgggctcccagattctcctgacagatcctacagagttgagatttctggcaaagtatctgacgaagtatctggtgaagagcctgtattgccttggcaaactcgcaccaacggtcgagaagatgaagcgcgggttcgggatgcgagtccccagggtcattcagtgaggctgaagaggggcttaaaatccggaggatctgctttttgtgcgccgcggcggcgttctttgcgtcttattagttagtatttgtttattgttccctacta

SEQ ID NO: 16720 - DNA, 299 bp, Setaria italica
  Peptide Sequence Number=SeqID_82694
taaacaccaatgaattctattaatgctagaggaaaatgatagctccaagaatttctttgttctcaacgcctcctatttagaggaattagccacttcaacgacctttgatggttataagggtatccaaagtacaaacctgatggttgtttgttatcctaaccattcttcccaaccctgataccaatcaggaaagggctaatttctaacaaagtttttctcttgttgattcctatttcgaggtgtagtgcttttctcccctatgctgcctattggtactagtagagtcgattggcctgtaa

SEQ ID NO: 16721 - DNA, 393 bp, Setaria italica
  Peptide Sequence Number=SeqID_82695
agctccagcatgaaccgggacgaccgaacggaggctgcgcgacgcggatcgccgctgcacggccgcgtaaccgagctccggccgtcgtcgcggagaaccaggcggtcgagcagcggcgatgtggacgtgcgcagcgacggaggatccggcaccgactcggagtccgacgtgccggcgatgccttaccggcgacgggcatcgccgctaagctcccaagaactcgaggtggcgtcggtcctgtctggactcgagccgacggtcaatcttgaaaaatcaccgctgagcgacccggcgttccagaaggacctcctccatgcgctcgacaacctccggaagctcatcgccgccgtcgaccacccgcgcagcatcgaggggcattggcaaggcatgatg

SEQ ID NO: 16722 - DNA, 312 bp, Setaria italica
  Peptide Sequence Number=SeqID_82696
tggcctcactcgctttcctcttcagcagcttcacttggtctaccactctcgcaagcaaggtggccttgtccatctgcctagtatcagggaccatcctcctaagcgtagtcagatgagcattgatcctctcccggcggcgccgctcagcctcactgtggatcttcagagccctcgcctccgtcgcgctcctaccagaccccgacgaagacgacaacgccggcggcgccggaggggccgagctggcctgccggggcagcagaagtggccctacgaacactgaaggatcgcagccatcgtacggctgcagcccct

SEQ ID NO: 16723 - DNA, 415 bp, Setaria italica
  misc_feature (360)..(415): n is a, c, g, or t
  Peptide Sequence Number=SeqID_82697
atggcgtggagatcctcacagggtgtccgtagcgggcatcagatcatgaaatcagggtggaaatttgctaccgtcgtcgctgacggacggacgacgtgcaggcgtgatggtatcgttagaggattttggcagaatgaagctgcactgcagcagcacaaggggatgcacgagattgctgtgacgtgattgtcacacacccaattttaaaatctatatgtataacaggacctaattttatacatatagtgatactaagtgaataacaacaatagtattagtgacatatagtgatattataagtgaataacaacaacggtatcacgtaaagaataagagattatattagagatttaacgtttnnnnnnnnnnnnnnnnnnnnnnnnnnnnnnnnnnnnnnnnnnnnnnnnnnnnnnnn

SEQ ID NO: 16724 - DNA, 868 bp, Setaria italica
  Peptide Sequence Number=SeqID_82698
atcggaatggggaggaaggcgcagaggaaggagatggcggcggaggcggtgtcgtacgaggagcagcggcggaggcaggtggaggcgaacaagcgcaagctcgaggagctccagctccaccacctctccgccgccgtcagagaagccgccgtcaagccctcgccggccaagaagcggaaggcgcgggtgccgcgggacgccgccgcggagccgctccggcggtccggccgggtcgccaacctccccgataagcccaagtaccgcgaggaggttctggatttcgggagaaaggttaggaggacgtacagctcggggaggaaggatctggacaaaccgggtgtacgcgaccgacgaggagaggacccacgccatcacgaaggccgaggagctggaggaagagctgggctctcgcttccctatctttgtgaagcccatgacccagtcccatgtcaccggaggcttctggctgggcctcccaacgccgttctgccggaagcacctgccgaagcgtgacgagaccatcacgctggtggatgaggaggatgacgagtctgacacgctctacctcgccaggaagatgggcctcagtgccggatggagaggtttctccattgagcacaagctggttgatggagattgcttgatcttccagttgatcgagcggacaaagttcaaggtctacataattagagcacgttcctactacaaaaatgaggactgatgaaactagtagcttctaatatggtggttggagctcagttcaggaaattgacgcactggacaaaaccagtgtaaactggatggaacaagtaactttaaaggttaaaaactaaaaaattaaaaaattaaaaaaggtaaaaaagtaaaa

SEQ ID NO: 16725 - DNA, 785 bp, Setaria italica
  Peptide Sequence Number=SeqID_82699
cttccttgtataatacatacaggtaaccgtagcatttggtcgtatgctagtttccggtgagattgatggatggtagaatggcactgtgctttgttgttagttgggtaggaaatatactccagttagtagatggtaagttaatcccggctgcggcttgcagcggatggaatcgtcttgggtggatggccctggcccctctttgatttataagtgttgtgaattactgttgacactcacaataatgtaatcctcctcggccgtcactgacactcatttgttgtcagtaagtactctcatgccgcctccaattccaggtagcatgcagtctatttatagtctgtttggtttgggatatttgtttggcttttctttttggtgtttgggatatatttgtctgtcagtctatacgcatggcagtactagggaggaagggaggaaggaaagaggctggaatgaaatcccgtcaccatctcccgcactagcagtggtagatggtgacgggatggcgggcgggaggactcggaggttggagctccgagaatgcaggcaggttcgtgcacctggacctgtccgccgccgttgacgagccgaacgaagctgcggggatggaaatgaagcatgcgatgcactgcactggccggctgactggtggaagcatgccgagacgaggagctggcaatccatacgaatattattatactgttgcacatactagtggcagctaaattttttttaaaaaacctagtggcagcaatagaatgataccatttgcctgaacaaaaaaa

SEQ ID NO: 16726 - DNA, 548 bp, Setaria italica
  Peptide Sequence Number=SeqID_82700
aacaatgacgttttcaatttgtgatttgcaaccacgtaaaagaatcttctgagctagctttcatgataacacatttaaggaggctacaatggacaattggaacggcacttgtctgagataaaaaagcaaatggacgaataacctagctacaaaatcataactagcctcatccccacgctggagtcactatgtcaactttaaacacaaacctaaccagataaaagttacaatggatgatagaatctttgacagatggaggttatggcatccagacttccagagtagatgtgccagccaatctactcttgtggaggaggtccccggcctcggcctcggcctccgcgcccacgaccacgtccacgacccctgcctctgccagcttcatatccttgcataggtggtgcattatatccatcatcatatccaccagcttcttccatgggataaccatcaccaccataaccccttcctggcccaaaagatccacgccttccccgacccctccctcctctgccacgatatccacgtggagcctcctctggttcacc

SEQ ID NO: 16727 - DNA, 489 bp, Setaria italica
  misc_feature (18)..(18): n is a, c, g, or t
  Peptide Sequence Number=SeqID_82701
tccatcacatgatgatanaacttttgaacaaacacaattaactagttcatcacatggatccgaggacacctcagcatcaggcacaagctgtgcagcaatgggagcagttgttttggctgatgaatctagcaagcctggtaacttgacatctgatgttgtaattgacacagttgagacaatggaagtgcacacaacttcagaatgtgtggctcagaaggatgaaacaaagcttgagggaatcagaagcttgacgagcagcaattgtgctgagtttctagagggggaagttcttgctgagaacgtgcacttgagtggagatgaagtgatttgaaatggcatggcagatagaggtgatgcaggcctaaaactgaatagagctcaaagaggctagaaagtggagaggacttcattcagatgctgttaacggtacaagaagggaccaatggctgctggttgctggatggaagttgagtttgatgtatgtggtcg

SEQ ID NO: 16728 - DNA, 308 bp, Setaria italica
  Peptide Sequence Number=SeqID_82702
ctcttattcttcctcgtcccctccccctccgagagctcgaaggcgagccgaacccagcgcgccgccgcgatggcctcgccggacgcggagcagccggcgcctacggagcccgcgcggtggcgtgacctggacatgctcctctcccgccccgggaacctcgtcgaggcctccttcgaccctagccccaccctgcgggacctgctggggagcctcgtggaggtgctggtggtgggcgccggcggcctcgggtgcgagctcctcaaggacctcgccctctccggcttcaagaagctgcacgtcatcgacat

SEQ ID NO: 16729 - DNA, 1190 bp, Setaria italica
  misc_feature (1150)..(1190): n is a, c, g, or t
  Peptide Sequence Number=SeqID_82703
ggagtgccccactcgctcgctcggcccgggcacgggcaccaccgcacaaggcttttaccagctccccacgcgtcgccgccgaccgcaacgccgccggcgaggcggctcctctccctctctgacgccgccggatcctccacccaccgcgcacctctctggttcccttggggggcagagatccgttcgcgcgaggactggtcccttcttgggttgggtctcctcctccagcgcgcgagatcgacgctggttggcactgactagagtacttcgtggcgcctgatttcgggggtgcggtttatcctccaggaaattttggggggtttggttcggctgaacccccatggcccaggcgaagtctgctcccggaaagaaggaggtgggccggggacggtcgccggagccgctcgatttcttcatctggactgtcgaggatgttggattatggctggaagaaataaatcttggtggctacagacaagtatttgaagaaaatggtgtcgatggagaatatctggaaagcttgtctatgtttactactgagcagattctgcggtttatcaggcgatgccatatgaaatggggagactttatcacactgtgcaaagagttgaggcgcattaaagtcgcctgcctgaagggagagcaagaagttcggcggccatggtgggcgccagcatgtctctccgtggtgtttgtgagggcggccaagcagaacaggaagtctcgggtcgtctccttgaagctggaaccctgatgcttgtaaagcgccttgagtccctgcctgcactcttctcctccagctccatgggaggtagcctgcgcacacaccatcgtgcgctagttataagtggtctgagagctgttttgctatgagagtagtatgctcctactatgtacaactagtctcttatcctttactagatctgttgttttacttcatatgtaggtttggaatagtaatctgatgtagacaaagaaagaaacatatgttgtgtagatggtcctggtaaggtctgcttctggcaaatcgtcctgagttgttatgcattttcattgctaagaattggcctggatcttcactatctgttctgttatttccgaggttttttaacttaattagtacttaatttactaagtaaaaaaaaaaaannnnnnnnnnnnnnnnnnnnnnnnnnnnnnnnnnnnnnnnn

SEQ ID NO: 16730 - DNA, 288 bp, Setaria italica
  Peptide Sequence Number=SeqID_82704
tcttcctcctggtcggcggccggagcagcggtagccgcgcgcgcctccgcaaacgcccctcctccccgctcctcctcgccttcgtcaaggacgagccgcagggccatggaccctgccgccggcgccggccgcggccgcgtccgcatcgcagtcgtcggcgacgtgcacaatgattgggcccttgaggaagattcaaaggcactccagtttcttcagccggatttggtactttttacaggggactatggtaatgaaaatgttgaacttgtcaaaagcatttcggacctt

SEQ ID NO: 16731 - DNA, 1260 bp, Setaria italica
  Peptide Sequence Number=SeqID_82705
gcggccggagcagcggtagccgcgcgcgcctccgcaaacgcccctcctccccgctcctcctcgccttcgtcaaggacgagccgcagggccatggaccctgccgccggcgccggccgcggccgcgtccgcatcgcagtcgtcggcgacgtgcacaatgattgcccttgcaatagatgctaccactcccagtgacattagaatttgacagaaaatatttgtatgaaaatcactctgttttcaccataagttctaacttgctctctctgtgaaacacagccggatttggtactttttacaggggactatggtaattgttttgttgaacttgtcaaaagcatttcggaccttcagttgccaaaggcagcaattcttggtaatcatgattgctggcacacatatcaattctcagagaagtaagcagatcgtgttcgtcttcagcttggaagccttggtgagcagcatgttgggtacaaatgtttggattttccaacaataaagcttagtattgttggtgggcggccattttcctgtgggggtgatagactatttagaccaaagcttctattgaaatggggtgtcaacgatatggctgggagtgcaaagaagatatacgatgctgctacaagtgcaccagagggccattctgttgtactgcttgcacataatggaccaacaggtctaggttcaagaatggatgatatctgtgggcgggattgggtacctggtggcggtgaccatggcgatccagacctcgagcgagccatctccgatctgcaaagggaaaccggagtctccatcccgctggtcgtgttcgggcacatgcacaagagcctagcctacgggagaggcctgaggaagatgatcgcctttggagccaatggcaccatatacctgaacggagcggttgtgcccagagtgaggtacgcgcaagcgagtcccagcgacgagcaaaatcaccctgagggatcggcgtcggtggctccaacctcgcgcgccttcaccatcgccgatctctctgaagggcgcgtcgagaagatctccgaggtctgggtgctggtgagcggcgacaggaccgagctcgaggaggagatcgtattgtacaagcatccgcgagagcatatgtgatatgttatgcgacgaatatgtaactcctgtgaatgctcctaaggtactggtgcgatcagttgttaaacgagtgttatactgccttacgccaaacggaaaagtaccctaaaagtactaagttcttacttttactta

SEQ ID NO: 16732 - DNA, 426 bp, Setaria italica
  Peptide Sequence Number=SeqID_82706
tccgtgctggtcgccgactcgccgatggccgggcgccgccagcacaagcagcagctggcgccggccggcgggcgcgcggggaagcgccggtcccgcgcgtccaagcgcgcccccaccacgtacatcagcaccgaccccgccaacttccggatcatggtgcagcagatcaccggcgtgcaggccgacatcgagatgctgcacccgacggccacaacggcgatcgacgcggcggcggccgtgctgatggccgcggacgccagcgccagtgccacggttggagcgtatggtgggaaacccgctgcagctgccagtgccaggcggcgacgaggcgtcggcgacgcttcaccatcatcagcagctccagcagccgtgcttcccgacgctggactcgtggaacgtcatgtacgagaggagcgagctgctctg

SEQ ID NO: 16733 - DNA, 912 bp, Setaria italica
  misc_feature (464)..(464): n is a, c, g, or t
  Peptide Sequence Number=SeqID_82707
atctcggaagatcaaactaggaagttgtatgtagtttacaccttatactctgcatagcttaggtatctgcctgagaagctagttaagtttttcaaaagagaaacatgtatggtttgaggattgagcaaaacattaagacatcccttacaaagacacagatccggtgcaggactacacgcaactggtagtctgggacagctgatttctcagatgaacggggagtactacagtagtgaaactgtgcgacccttacaaaaacctggtgtggaaggactgttctgttaacaaagatctcttcaaaacttctttcaaagctaggaggaacttagctcagttcatcgaattctctttatgtgattcttaaaacaaaaatatctgactccaattaggttctatgcttctttccgatcatgagatgctagctttcctcttcttcaaagtctttattcgacaggtcgattaancctttttttctgtgagcatctggcctagcctatcatgatcatgcactgaacagaaaaagggtccatcggctatcattgtcaaggtccctactaggttacaaatggatggtagagagatccaccgtgcaagctgccccaacactgtagtgcatttggctcaagtggtcagatgggaaatggcaatttggtggttgctggtcattttcatgtgataatgcgtacacctagatgtgatgttgtcctcttcacaccacttctattgggccacattatcctctcaaatgaaatatgaaaaacgattgttaagtgtttcagtttcagtagagctaatgctttaaatcctgactcaaactgtgaataagttcttcggtaattaattctggttaaatattgattttctatcacaattctactaacggggggtctttgtttctttgtttttctagta

SEQ ID NO: 16734 - DNA, 1144 bp, Setaria italica
  Peptide Sequence Number=SeqID_82708
aactacaatggaagttacagtccagggccctctaactgcatttgacctttggatcatttagtaaacggctgcctgatgtggtttcatggaagaatcttggacaaacttcaatgcttttattcttgatgcatgaagccattgctgaaatagctgtcgggtttttatgggggcatctgtattgcttgaggtgattactaccaaccagaaatattggttgatgctggttatgaattcagcatcggttagctgttctggtttattattattcttttccatctgtggataatatggaaacttgcttaggaatgtcagcaatctattttgtgctctactcgagtggatacattgtaactcctcatccatctgggctcgttgattcagggtcctttccaaatatagtaatgatgcatgtattccatgcttaaagaaaacttggggattcagcaggatagctttcattttaattaggggccagctacagagggacagtgtgtgttctacccggcttgcgacttacaacttgtttaacttaaagtggcttgatatccaatttggattggctgcagcttccaatgtgtttgataccaaatcacactatgcaaagattacgaagaggtatcttagaagtttgtgattttgttagcatgtttcaactgctctcaccagtttgcctatctcgcaacaaatagataggcatgcgaaaaatgatcaagtgtattcatccccgttactatatccgactttcaagagctacatactgcagcacaagggctcaagataaaggttcctgcatctcagtccacaacaatctgttcgagaggaggcaaaacatcaacgtatgtcatgctggcactgacgtggtttattccatgtgatttgtttgaatgccaggaatggtatgagctgcttataacattatgaggaagtcataacacctcttgatttctccagctgcagttttcttgtggccattttgtagccaatggtcatatgaatttccttaaaatgataatgtactatgaactgtacattaattatccaagagctgttaacgtgcctaatggtagtgcttggttcaagttgttgaagtgaacctagataattcacatgtttatactgataaattttggtgtccatcctccca

SEQ ID NO: 16735 - DNA, 2240 bp, Setaria italica
  Peptide Sequence Number=SeqID_82709
cctcctgccatgacattttggtgagtgacatttgccgccctactttaaaacaaagatggagtttaacactttcagtttttccagggagaatctgtcctgttaactgtatgcgacttaattcatctctcatttaacaagcaatgaatataagaatttatgtgcaaacaatttcctcagaaataaaaatgaatcacaaaccatgcctgtaaaatgacatctattatgactgggtgagtagttatttaatgaagttgcagccgatgggagtttttacttctcaaattataagttaatttatgttgtgtaaatgtatttttgccatccttctttgggaatttatctttcctttattgctatgtacaggaaagcagtaaaactaatcatccacagttgctatatgaggctaaactgtacaatgctcttcagggagggactggtattgcaaacatcaaatggtgcggcattgatggtgatgaaaatattcttgttattgatttgctcggaccaagccttgaagatcttcttgtttattgtggccggagattctcactgaagacggtcttgatgctagcagatcagatgataacaagaatagaatttatgcattctaaaggctatctgcacagagatatcaagcctgataacttcctcatgggccttggtagaaaagctaaccaggtttatgtcattgacttcgggcttgcaaagcgatatcgtgactcaactaccaaccgccatataccttatagagaaaataaaaacttgacaggcacagctcgttacgcaagtcgcaacactcatcttgggattgagcaaagccgtagagatgatttggaatccattggatatgttcttctgtatttcctcagaggaagtctcccctggcagggcttgaaagcagccaacaaaaaacagaagtatgacaaaataagtgagaagaagctttcaactcctattgaggctctatgtaaatcccatcctgtggaattcgcttcctatttccactattgccattctctgacatttgatcagcggcctgattatagtttcttgagacgtctctttcgggatttgtttgaccgtgaaggttatcagtttgattatgtctacgactggactttgttaaagtgtaagcaatcccagaaggcgaaggctcaacaaggatgctctcaagatgcaggggcaagcagccgtccagttgcaacgaacgtggacaagcaccaagttagtgttgcacgcccggttgaagctgcaggtctgcttgatgcagagcaacgcccggcaatcagaatgcaattcaagtccagtgctgaaaatagccgttcaaataatctgcatcctgatagattgagagtggctgctagcccggataatgcattactgcaatccgcaccacttggccgtgttgatgctccaagaaaaaatgcgacaatctcaaaaacacatggatccattgacccacacactcatggaagttacagtccagggccctctaactgcatttgacctttggatcatttagtaaacggctgcctgatgtggtttcatggaagaatcttggacaaacttcaatgcttttattcttgatgcatgaagccattgctgaaaatagctgtcgggtttttatgggggcatctgtattgcttgagggtcctttccaaatatagtaatgatgcatgtattccatgcttaaagaaaacttggggattcagcaggatagctttcattttaattaggggccagctacagagggacagtgtgtgttctacccggcttgcgacttacaacttgtttaacttaaagtggcttgatatccaatttggattggctgcagcttccaatgtgtttgataccaaatcacactatgcaaagattacgaagaggtatcttagaagtttgtgattttgttagcatgtttcaactgctctcaccagtttgcctatctcgcaacaaatagataggcatgcgaaaaatgatcaagtgtattcatccccgttactatatccgactttcaagagctacatactgcagcacaagggctcaagataaaggttcctgcatctcagtccacaacaatctgttcgagaggaggcaaaacatcaacgtatgtcatgctggcactgacgtggtttattccatgtgatttgtttgaatgccaggaatggtatgagctgcttataacattatgaggaagtcatataagaaaggaaaagtaacaaataaaacaaacctaacttaaa

SEQ ID NO: 16736 - DNA, 362 bp, Setaria italica
  Peptide Sequence Number=SeqID_82710
ttctaagttgtttgtttattgcagtgtttaagaattgcttcggttaaggctgctgatataacaagcaaaataaagaaagcagtagactcatacaccactgagaaagctttaaagaaagtaaagcgtttgccaacctcgttgcctcagaaaattaatgttactgatgtaactatggaggataaaggtgatggtgaattggaaacgcaaactgtgaagacacccagtgatgttcaggagataagcaaagggacccatattctaaaggagtttcattaagctccctcagaatttctcagttgccggatcccggacaaactataggggtaaggccagcagccatgaggatgcccaaccatgttaac

SEQ ID NO: 16737 - DNA, 260 bp, Setaria italica
  Peptide Sequence Number=SeqID_82711
acaacctctactgcatcatgcctctgagaagggaatcatacaccatcattttcctgtaaattttatattgaaaccgtggagactggggacgcggttctacctgattatcaaatttggaatcttccaatatgtatttccacgagcccttcttgcaaattcttgattctgaaaagtcgaaaataaaacttagttgcgttcttctacacctgcagatgatcataaagaccctaacagctagcttatctcttcttctagaacct

SEQ ID NO: 16738 - DNA, 219 bp, Setaria italica
  Peptide Sequence Number=SeqID_82712
ttggcacctataaagcctctcgctaagtttctttctttcaaatctatagtattcttgacttggtggcaaggtgtggtgattgcaatattgtatgctctgggccttcttagaagtcctttagcccagagcttggagttaaaatcaagcattcaaaacttcattatttgcatagaggacagatgggcattgcttcggctgttcacctctatgtgttcccag

SEQ ID NO: 16739 - DNA, 348 bp, Setaria italica
  Peptide Sequence Number=SeqID_82713
ttcgagaaaaaattctggtcatgttttggtacttcatttagggctgatatacattctactccatcccaaattactattcattttggcttttctagattcatagcttttgctatgcacctagatatatgctatgtttagatatatagcaaaagtcatgtacctagaaaagccaaaacgaatagtaatttgggatggagggagtgctttcagtcctttaaattctgatatgtataaatctgcctcagccagtccagagacatccttcagtttacggtcatttttatttgacatacttaatctgcttgagccttccttgaggaatcttttttatgtcttaattttgccaag

SEQ ID NO: 16740 - DNA, 462 bp, Setaria italica
  Peptide Sequence Number=SeqID_82714
tttatatgttaggttggttttaagtttttttgtaacaaagtggaacaaattttatttacatattcaaatatgttatgttctactccttccatcccaaattactattcgttttggctttttctaggtacatagttttttgatatgcacctagatatatactatgtctagatacatagcaaaagttatgtatctagaaaagccaaaagaaattgtaatttgggacggagggaatattatgtactctatgggttatatggttagcagcatatgtttgtgagcataatccacatggtttgtctttttttccctccccccttaggtgatgaaggatttcaagttcactgttaaccaagcagtaaggccagtggagaagcgctttgataaattgatgaaaaagaaggacaagcataagaaaacccaggatgacaactgggtgagtgcagcaacaccagagagaccaat

SEQ ID NO: 16741 - DNA, 622 bp, Setaria italica
  Peptide Sequence Number=SeqID_82715
ttgcacggtattatgagccaactcaaggctgcatcactgtggcaggagaagacatccgcatttttgacaaaagagaatggtctcgagtggtatctctagtaaatcaggtatgccatcacaaaaacacaaatttccacaccatgtattttgctgctatatctacgaacttattactccttccgatcaaaaatataagcagttttggacagagacaaggtcttacaaggtggacttggactgccaatttctacaacaatatattattttaaatagaaatggctttatattatgaaatgactatattttgaaataacttttcatgattaatctgattgcatcaaccttatgttgctacactatttggattgttagctcttaatgatcaaaatttaaaaactttgacttaggccaaacctaaaactgcttatatttgtggtcggagggattatatattttgagaatagaaaaaaaaactcgaccggtgggggaagaaccgcccccacggcattgcattaagaagggaccgtatgatcccggttgagaaaatcccccgaaccctggcccatgcctgtttaggtccaaactgaacttgggtcggcgaccaccgttacacacaggctgg

SEQ ID NO: 16742 - DNA, 115 bp, Setaria italica
  Peptide Sequence Number=SeqID_82716
ttgggaaaaggttattgtcatatcatatactccctccgtcccaaattactattcgtcttgacttttctagattcatcgttttgctatgcacctagatatatgctatgtctagata

SEQ ID NO: 16743 - DNA, 479 bp, Setaria italica
  Peptide Sequence Number=SeqID_82717
atgatataataaagctgctaaaggctgccaatgctcatgaatttatcatttctcttccacaggtagcctatcattgattggtactccctacgtcccaaattattattcgttttggcttttctaggtacatagctttacatatgcacctagatatatactatgtctagatacatagcaaaagttatgtatctagaaaagccacaatgaattgtaatttgggatgggagggagtactagttatctccagttgtatgctaaaatctttgtttcattgcattttaggggtatgacactcttgttggtgaacgaggcagtctcctaagtgggggacagagacagagaattgcaattgcacgagcccttctgaaaaatgctcctattctaatacttgatgaggctactagtgcactggacgcgacaagtgagcggcttgtgcaggaagctctcaatcttttgatgaagggaaggtacttctctta

SEQ ID NO: 16744 - DNA, 369 bp, Setaria italica
  Peptide Sequence Number=SeqID_82718
ggagatccagtttcctgggcctcttctgactctccagcagccccagagcttgatgtgcttttcacctcagcattggatgatccggcaactatgggtaaggccagcagccatgaggatgcccaaccaatgttaactgaatcatccaatgctgaggtgaaaagcacatcaagctctggggctgctggagagtcagaagagacccaggaaactggatctccaaagagcctaaaagatgctatcaaaccaaaacacaaaagaaagaagaagaaaactgacaggagttagattaatcgcaagcctaaggtaaatcaaatgatagcctacaactcccattcaaattctcctgactgatggctcttcttcggagcg

SEQ ID NO: 16745 - DNA, 537 bp, Setaria italica
  Peptide Sequence Number=SeqID_82719
ccttgcttccacccaagaacataaagcgccattagggatacataaaccactacacgagttaatgattcattagcagatttcagcactcctaattttgtgccactattttggtaagcacgtgccaaattgtcaaagaaagaaatttgacgtttttctaccgccaaaagacctaactgtacgaatagctgagaatgtctctgatgcacaatctgatatttgtgcttgcacgattccataagatttaaaagtgggaacagttgacctcttgaaaagagcaactagcccggagacggagaccattaggagcccgagaacaggagctagctcagtagatagtgtgaaaagtatacaaagtgtaccggtgatctcagagagtgcccttagtccccggtctctggatatgttgtcacttacaagattcttcaaggaacccaaatcagatgtcaacaagccggtcaattcaccaaccttgtggcgatacaaaaaacaccatcttttggatgagaatcctccgaaatatctggctccgcaacctgg

SEQ ID NO: 16746 - DNA, 812 bp, Setaria italica
  Peptide Sequence Number=SeqID_82720
gactgccaaacgcagcaatgttagctgcatcaatgagattccctccattatccaagatgtgaaggtaacatcgtggttgttgaccccacatacaaggaagaagcagtaatgggagggaggatgactgctacaattaactcaaatggtgatatttgttccatccaaaaagctggtggggagggcgtcatgtcaagtgttgttatgcagtgtttaagaattgcttcggttaaggctgctgatataacaagcaaaataaagaaagcagtagactcatacaccactgagaaagctttaaagaaagtaaaacgtttgccaacctcgttgcctcagaaaattaatgttactgatgtaactatggaggataaaggtgatggtgaattggaaacgcaaactgtgaagacacccagtgatgttcaggagataagcaaaggtgatgaggaccatcgaaatataaaagggaattcacccttgactggggacagaattgctaaacacaaacaaacatcaacattcattggtggtccatcaaattgggacccatattctaaaggagtttcattaagctccctcagaatttctcagttgccggatccggcaactatgggtaaggccagcagccatgaggatgcccaaccaatgttaactgaatcatccaatgctgaggtgaaaagcacatcaagctctggggctgctggagagtcagaagaggcccaggaaactggatctccaaagagcctaaaagatgctatcaaaccaaaacacaaaaagaaagaagaagaaaatctaaactcctgtcagttttcttcttcttt

SEQ ID NO: 16747 - DNA, 1123 bp, Setaria italica
  Peptide Sequence Number=SeqID_82721
atattctaaaggagtttcattaagctccctcagaatttctcagttgccgggtactgctaattttgtttacataccatgagttctctttttgcttctaactgccaatacaaactctctgtgatgtgcttgcaaacattctttggttggcatttttagtgcccattgatgatgaaaataccatcgttatggcttgttccccctgttattctggtcatgtttttactgcctcttaggctatggcatttgcttggtcgcccttttccatgtttaggggcgcgtatgtaatctagttccagtggggtgtgttctgtactcaggttggacacatttgttttctcctccttaatgaaatgacacgcagttctcctgcgtcgttcgagaaaaaattctggtcatgttttggtacttcatttagggctgatatatattctactccgtcccaaattactattcattttggcttttctagattcataggttttgctatgcacctagatatatgctatgtttagatatgtagcaaaagttatgtacctagaaaagccaaaacgaatagtaatttgggacggagggagtgctttcagtcctttaaattctgatatgtataaatctgcctcagccagtccagagacatccttcagtttacggtcattttgatttgacatacttaatctgcttgagccttccttgaggaatcttttttatgtcttaattttgccaagactgattctcctcatgagttcagatacagtttcttatgatcgtttaacgctccacatgcagatccggcaactatgggtaaggccagcagccatgaggatgcccaaccaatgttaactgaatcatccaatgctgaggtgaaaagcacatcaagctctggggctgctggagagtcagaagagacccaggaaactggatctccaaagagcctaaaagatgctatcaaaccaaaacacaaaagaaagaagaagaaaactgacaggagttagattaatcgcaagcctaaggtaaatcaaatgatagcctacaactcccattcaaattctcctgactgatggctcttcttcggagcggcatgcttgaggggtttattctgtgtttttagacgttactgatgcaagtt

SEQ ID NO: 16748 - DNA, 686 bp, Setaria italica
  Peptide Sequence Number=SeqID_82722
caagcttgcccgtcttcctctacaactactccacccacccagctccacggcatctttgaggctgcaagcttcggcggatccaacatcgatccaacagcttgggaggacaagaagtgccctggagagtcccgtttccctgctcaggtgagggttgcaacgaggaagatctgcgacccgctggaggaggacgcgttccgccccatccttcaccactacgacggccccaagttcaggctggagctcagtgtcccagaggcgctgtcgctgctcgatatcttcgcggagaaagtttttgcctgagtttgagtatgatgagctgaccatgtatggcgattggcgaggcgagtagagtatacatatatactactccctccgtcccaaattactattcattttggctttttaatagtatacatgtctttgatatgcacctagatatatactatgtctaatacatagcaaaagttgtgtatctagaaaagtcaaaacgaatagtaatttaggacggaagagtacgtacgaatgcatctgcttaccatggactgtagaggcaagcccatcaggcaatgctccagtataacttatactagacacaatcagatgctgctaaccagcatatggtgctaaaattatacacattattatagttattatgttggtcttgcactagccttattccttccctc

SEQ ID NO: 16749 - DNA, 1078 bp, Setaria italica
  Peptide Sequence Number=SeqID_82723
tccacggcatcttcgaggtaaccaaaccatgcaattcgatctgcaaataatccgacaaacttagtctgttattacgtaattcgggctcatcgatctcacctcaatcggtcgtgttcatatcaggccgcgagcttcggcggcacgaacatcgacccgacggcgtgggaggacaagaagtgccccggcgagtcgcgcttccccgcacaggtacggtacccccctcacagttttcctacctgctccgatgactaagcttaagctcgagccactctagtcatggcggacgatcgatcggcccaactactagcgtttcaactgttcaacgccgaacagtgtatcgcgtgtcgggacgtgcaaaagggtctttgtcggtctatcgtgcactcacagcagcgattcgttttctaatttgattaaaaagtggaccgatcggcgcggtttctagatagtggattagttggcagaggtgtgcagtgaccgcctaacctagtacacctgtctgaaaaagccaggtcaggtctgtttggcttggtcagtcagcagaggattcgcgtcccggccggagtccgacacgcagatgattcaaacagcacttgggacgtttccacttgattgggtgtatgctgatggcagatgcgatgcttgcgctgcgcaggttcgggtggcgacgcggaagatctacgacccgctggaggaggacgccttccgccccatcctccaccactacgacgggcccaagttccggctcgagctctccgtcaccgaggccctcgcgctcctcgacatcttcgcagacaaggacgacgcctgatccggcgatcggtcgtcgtcaggccgccgtcgagcaacaggagggcaagaccgagagtgcataccaccagtatagcatttattacctttgtttgataagggctatcaggcatgcgtcccattgtttgtttatgagacactagcgcgatgattgcagaggaatagccctcgttctcatctggtactgtaagaatatgtaagacgtatattcggattcagctgccatgtacaaaaatcactttcagatatgttcctgtgttgcacccct

SEQ ID NO: 16750 - DNA, 1221 bp, Setaria italica
  Peptide Sequence Number=SeqID_82724
aacaagtaataataaggtttagaagtagttttagttaaaaaaattaatgaaggagaaaaacaaaatgtactcaatatgtttaatgcaccagttcagttcctaataggcggtgatacacttcatgagctcaccagttcatttcattttcttttttggtttaacaggcacgtgcttaccaaaatagtggcacaaaattaggagtgctgaaatctgctaatgaatcattaactcgtgtagtggtttatgtatccctaatggcgctttatgttcttggtggaagcaaggtcaatgcgggaaaattgtcagttggaaccatggcatcttttattggttacaccttcacgttaacctttgctgttcaaggagctgttaatacccttggtgatctacgcagcacactggcttctatagagagaataaattctattctgtcagcaaaggacattgatgattcacttgcatatggtttagccaaagaactcgatagcaaagagattggagattccaatggtggactgtatgaaaatggatctgttaacaaacatttcatgtcagaactgaaatcatcgagtagctgtagtaatctagcctggtctggtgacattcatctgaaagatgtccatttctcttatccactgagatctgatgtggagattttgaatggccttgatcttatgattgagtgtgggaaggtcacagcacttgtagggcctagtggtgctgggaaaagcactgtggtgcaacttcttgcacggtattatgagccaactcaaggctgcatcactgtggcaggagaagacatccgcatttttgacaaaagagaatggtctcgagtggtatctctagtaaatcaggacccagtcctattctcggtgtctgttggagaaaatattgcttatggtctcccagatgacgttgtctccaaggatgatataataaaagctgctaaagctgccaatgctcatgaatttatcatttctcttccacaggggtatgacactcttgttggtgaacgaggcagtctcctaagtgggggacagagacagagaattgcaattgcacgagcccttctgaaaaatgctcctattctaatacttgatgaggctactagtgcactggacgcgacaagtgagcggcttgtgcaggaagctctcaatcttttgatgaagggaaggacttctctggtgattgcccacaggctaagcactgtgcagaatgcac

SEQ ID NO: 16751 - DNA, 1561 bp, Setaria italica
  Peptide Sequence Number=SeqID_82725
accccttgggccgctaaaaccctagctctctcccgccgccggcgagagtccgcggccatggagcacctccggtggcgccccacggtgaacgagcgcgcattcatcgagcgctcgctcgagtccgacctccgcgtcgacggccgccactccttcgacttccgcacactcaagattaccttcggcagggaggacggttcgtcggaggtgcagctaggggagacacacgtgctcggctacgtgaccgcgcagctggtgcagccctacagggacaggccgaacgaggggacgctggccatattcacagagttctcgcccatggccgaccccgtcttcgagcctgggcgtcctggagaatcagcaattgagcttggccgagtcatcgaccgtggcctcagggagagccgggccgtggacatggagtccctgtgtgttgttgctgggaagcatgtttggtctgtgcgtgtcgaccttcacatcttggataatggagggaatctcattgatgcagctaacattgctgcgttggcagccttgtctactttccggaggcctgaatgcacaattggtggggacgatggtcagcaagttatagtacatgatcctgaggccagggatccaatccctcttacaatacatcatatgcccattgctgtaacctttgcatattttggtgaaggtaacatcgtggttgttgaccccacatacaaggaagaagcagtaatgggagggaggatgactgctacaattaactcaaatggtgatatttgttccatccaaaaagctggtggggagggcgtcatgtcaagtgttgttatgcagtgtttaagaattgcttcggttaaggctgctgatataacaagcaaaataaagaaagcagtagactcatacaccactgagaaagctttaaagaaagtaaagcgtttgccaacctcgttgcctcagaaaattaatgttactgatgtaactatggaggataaaggtgatggtgaattggaaacgcaaactgtgaagacacccagtgatgttcaggagataagcaaagatccggcaactatgggtaaggccagcagccatgaggatgcccaaccaatgttaactgaatcatccaatgctgaggtgaaaagcacatcaagctctggggctgctggagagtcagaagaggcccaggaaactggatctccaaagagcctaaaagatgctatcaaaccaaaacacaaaagaaagaagaagaaaactgacaggagttagattaatcgcaagcctaaggtaaatcaaatgatagcctacaactcccattcaaattctcctgactgatggctcttcttcggagcggcatgcttgaggggtttattctgtgtttttagacgttactgatgcaagtgaccacaagcaaattttgtacaagctgtaaaattgtattctaggaatggtcaagttttcagtaaactttgcaattagccttgtgatgcatgatgtccctgcttatccttattcgatgtcatgctcgaatgtttgtactgagcagcaatgctggaagcctggaatggaattaatttgttaa

SEQ ID NO: 16752 - DNA, 1856 bp, Setaria italica
  Peptide Sequence Number=SeqID_82726
tgcgcggccgcttggcgattcgttggctcagataatagactcgacgtgtggatccctggaagtttgatctcattgatttggattgaagtgcccaacctttaggtcagtattgtttggccctcattggtgttagctgcctgctagctggaaggaaggtgatgctggatgatgctgaggggctttgaaagcatactggttcgaagaagtgttattcgccaccatgagggttaacattgggctcatagtgcctgtgatggcacaatactctgcgcccacatgggctactatagttgcagggctcttcacgctggttgcgctttcgctctccatgtacctgatattcgagcatctctcggcctacaacaatccggaggaacagaaatttgtactgggtgttatcctcatggtcccttgctacgcaattgagtcgtatatttctttgataaatccaaatacgagtgtttactgtggcatcctgcgtgatggttacgaagcatttgcaatgtactgcttcggaagatacattactgcatgtttaggtggggaagataaaacgatagcttttttgaagagggagggtggctcaggttctggacaacctctactgcatcatgcctctgagaagggaatcatacaccatcattttcctgtaaattttatattgaaaccgtggagactggggacgcggttctacctgattatcaaatttggaatcttccaatatatgatcataaagaccctaacagctagcttatctcttcttctagaaccttttggtgtctattgtgaaggagaattcaatttacgatgtgggtacccttactttgctgcagttctcaacttcagtcaatattgggccctgtactgtctagtagcatggtacacagctacaaaggatgaattggcacctataaagcctctcgctaagtttctttctttcaaatctatagtattcttgacttggtggcaaggtgtggtgattgcaatattgtatgctctgggccttcttagaagtcctttagcccagagcttggagttaaaatcaagcattcaaaacttcattatttgcatagagatgggcattgcttcggctgttcacctctatgtgttcccagccaagccctatgcacttttagctaatcagtcacctggaaacatatctgtacttggggattatgtatcctctgatcctgtggaccctttcgaaattaaggaaagcaaccggcccactaaaatgaagcttccacagttggaaccagatgagagaagcgtgacaaacataaaagaaagtgttcgggactttgttgtcggcagtggagaatatgtgatcaaggatttcaagttcactgttaaccaagcagtaaggccagtggagaagcgctttgataaattgatgaaaaagaaggacaagcataagaaaacccaggatgacaactgggtgagtgcagcaacaccagagagaccaattcgtgggattgatgatccattattaagcgggagtgctagtgacagcggcgtcacgaagggcaaaaaacatcacagagttgtgagctcgaatgctgctatggacagctggggaggtggtgatcaggcatctgatgggtacgagatcaggggtcgccgctgggctgtaaagaactaagctcgagtgcaggattggtgaattcaagccaacatcacgttgaaaaagacactgatacgtttgctggtaaactcgctgggaaagtgcttctgctacagtgtcttgtgtagatagctgacagatagcctctgtgaataggttactaatttttctttttaaattttggccaactcattgatatttggtattgcaaaatctaagaatgaacttttct

SEQ ID NO: 16753 - DNA, 1446 bp, Setaria italica
  Peptide Sequence Number=SeqID_82727
tccatctcttttttttccgtttccattcctctgctccgcgtttccctatctctctttttccggcgaactgagttcgcagcaacccagaagaaagaaacaggggcgagcgaacgaggagggccggccgggcatggagggctacgaccgcgagttctggcagttcagcgaccagctgcgcctgcaggcggccgctttctccggcctctccctcggggactccatctggtccccggccggcgccgcggccgaccgccgcaactcccaggccgacgcgggcctcttcgccacgccgtcgcccgccgacggcaccttattagcagccaagaacaacaacatcagcagccacctcaacgacggcgggcccgggctcatcggctccggcaagctggccttcggcgccaccaccaccagcaaggccgaccggtacaacaacctccccaatctcccggccgagaaggccgccgcctacaacaacagcagcagcagcatcaacggcggctatggtgccaagaacaacaccttcaacaagatggggagctacggcggctacaacagcaacagcaacagcggcgaggtggtgaagagctacttcaacaagtccgccgggaggccggcgagcaacaacagcaatagccacggcaagaagcagggctccgagtacggcaagaagaagcacgccaagaacgagggcggcaacgcggcgtcggccgcggacaagcggttcaagacgctgccggcgtcggaggcgctgccgcggggtcgagaccgtcggcgggtacatcttcgtctgcaacaacgacaccatggacgagaacctccggagggagctcttcgggctgccgtctcggtacagggactcggtgcgggcgatccggccagggctgccgctcttcctctacaactactccacccaccagctccacggcatcttcgaggccgcgagcttcggcggcacgaacatcgacccgacggcgtgggaggacaagaagtgccccggcgagtcgcgcttccccgcacaggttcgggtggcgacgcggaagatctacgacccgctggaggaggacgccttccgccccatcctccaccactacgacgggcccaagttccggctcgagctctccgtcaccgaggccctcgcgctcctcgacatcttcgcagacaaggacgacgcctgatccggcgatcggtcgtcgtcaggccgccgtcgagcaacaggagggcaagaccgagagtgcataccaccagtatagcatttattacctttgtttgataagggctatcaggcatgcgtcccattgttttgttttatgagacactagcgcgatgattgcagaggaatagccctcgtttctcatctggtactgtaagaatatgtaagacgtatattcggattcagctgccatgtacaaaaatcactttcagatatgttcctgtgttgcaccccct

SEQ ID NO: 16754 - DNA, 1655 bp, Setaria italica
  Peptide Sequence Number=SeqID_82728
attcatcgcatcccaatcacatcctcatcactcctcagatccagccaggcctcgctgcaatccgaggaggaaaggatccgctgccatggagggctacgaccgcgagttctggcagttcagcgaccagctgcggctgcagaacaacttctccaacctctccatcgccgactccatctggtcctcctctaccgcccccaacaaccccctcgcccgaccagggcgccgcagccgccgccggctcgtggaaggccgccaccaacaacgcccccggcctcatcggcgccggcagcaagctcgccttcggcaacgccaccaccaccaacgccgaccgctacaactacttccccgccaacgccgctcccgacgccaagagcaacgccaacaacaactccggcggcctcgccttcagcaagaacctcaacagcccggccgccgccctcggcaacgactactacttcagcaagaacgccggcgccatgaacgccaacaccaacgccggcggcgacgtcatcaagagctacttcaacaagtccgtcggcaggccggccaacaacaacaataacaactccttcaacgtcggcaagaagagcgccgccgcccacgacaagaagaagagcgccggcaacggcaacggcgccggcgtcgacaagaggttcaagagcctgccggcgtcggaggcgctgcccaggggcgaggccatcggcgggtacatcttcgtctgcaacaacgacaccatggaggagaacctcaagaggcagctcttcgggctgccgtccaggtacagggactcggtgagggccatccggccaggccttcccctcttcctctacaactactccacccaccagctccacggcatctttgaggctgcaagcttcggcggatccaacatcgatccaacagcttgggaggacaagaagtgccctggagagtcccgtttccctgctcaggtgagggttgcaacgaggaagatctgcgacccgctggaggaggacgcgttccgccccatccttcaccactacgacggccccaagttcaggctggagctcagtgtcccagaggcgctgtcgctgctcgatatcttcgcggagaaagtttttgcctgagtttgagtatgatgagctgaccatgtatggcgattggcgaggcgagtagagtatacatatatactactccctccgtcccaaattactattcattttggcttttatagatacatgtcttttgatatgcacctagatatatactatgtctaatacatagcaaaagttgtgtatctagaaaagtcaaaaacgaatagtaatttaggacggaagagtacgtacgaatgcatctgcttaccatggactgtagagggaaggaataaggctagtgcaagaccaacataataactataataatgtgtataattttagcaccatatgctggttagcagccatctgattgtgtctagtataagttatactggagcattgcctgatgggcttgccttttgaggagcaatgtgtgcttgtatcacaggaaaagttaagcgcggtgatgacatgccgcccctcgctgtattactattatacataccttcaaaaaccggatctgctgtggatctgctgttattcggaaagtatggcatcatccaacaagtgtttttcgatttc

SEQ ID NO: 16755 - DNA, 544 bp, Setaria italica
  Peptide Sequence Number=SeqID_82729
tcgtcgtcgtcgacggcgccaccggcgtcttcgtccgcctctacatccccgaccacgtcctcaccgccgagcacaagaagctgccgatcctcgtgtacttccacggcggcggcttggtgctccactgggccgcctctccgatgtaccacaggtacctcaactccgtcgcctccaaggctgccgtcctggcggtgtcgatcaactaccgtctcgccccggagcacccgctcccagcggcctacgacgactcatgggcggcgctcagttaggccgcgtcaggcgccgatccgtggctgtccgaccacggcgacaccggacatgtcttcttggccggcgacagcggaggcgccaacattgttcacaacatagtaatcatggccaggttctcgccgtggtttgccttctggggcgtttctggagggggcgatcctgttgcatcctatgtttagcggaaaggagccggtcgacggcgagtcaagggagacgagaagaagaatagaaacaaagaaagaaaaagaactaaactaaaggtaaacgaaacaaa

SEQ ID NO: 16756 - DNA, 1674 bp, Setaria italica
  Peptide Sequence Number=SeqID_82730
tggttgtcgagtggtgagtacatccagatgagtggccgtgctggtcgtcgaggtattgatcagcgtggtatctgtatcctgatggtagacgagaaaatggagccttcaactgccaaaatgatgctgaaaggaagtgctgatagtttgaatagtgcctttcatctgagctacaatatgctgttaaatcaaatgcgatctgaggatggagatccagaaaagcttcttcggtattcattttaccaattccaggctgatcgagctctccctgatcttgagaagcaaatcaaggaactggaattggaaagaaattccatggttattgaggaagaggagagcttgaaggattactatgaactcttacagcagtacaaaagtttaaagaaggatgtccgtgatattgtcctctctccaaaacatgttctgcctttcttgcaacctggaaggcttgtccgtcttgaatatagtacagatgagccagctaccttctccattgatgaaaatatcacatggggaattattataaactttgaaaaagtgaaatcccatggtgaagataggaggcctgaagattctgactatacagttgatgtccttaccaggtgttctgtaagtaaggacagcagcggaaagaaagcaatgaagattgttcctctgaaagagcgtggagaaccagttgtaatttcattgccactttcacaggttgatggactaagcagcattcggatgtatatacctaaggatcttttgcctgtagaagctcgagaaaacaccttgaggaaagttgaagaagtgctttcaaggtttgctaaagatggggtacctctgttggatccggaagaggatatgaaagtacaatccaaatctttccggaaagctaccagaagaatagaagctctcgagagcttatttgagaagcatgacatacgcagttctccacatatccagcaaaaactgaaagtcttgcatgctaagcaagaattatcagctaaaataaagtccatcaagaaaacaatgcggtcctccactgctttagctttcaaggatgagctcaaggcccggaagcgggttcttcgcaggctgggatatgttacaagcgacgatgttgtggaagtgaagggcaaggtggcttgcgagataagctcggctgatgagctaacattgacagagcttatgtttagtggcactttgaaggatgctactgtggaacagatggtggcgctgctttcttgctttgtttggcaggagaagctccaggatgccccaaagccaagggaggagcttgatttgctcttctaccagttgcaggagacggcaagaagggtcgctaaccttcagcttgagtgcaagatccaaattgacgtggaaagttttgtaaattctttccgacctgacataatggaagcggtgtattcatgggccaaagggtcaaaattctaccaaatcatggagatgacccaagtgttcgaaggcagcttgatcagggccatcaggaggctggaggaggttctgcagcagctaattctggcatccaagtcgattggggaaaccgaattggaagcgaaacttgaggaagcagtcagcaagatcaagaggggatatagtgttcgctgcatctttgacttgtaacatgtcttgacggcgtcatggtttaggaagagctccaaagcaaataga

SEQ ID NO: 16757 - DNA, 1037 bp, Setaria italica
  Peptide Sequence Number=SeqID_82731
cagaaacaataaaaagaaaacgaacccatgcactgcattttacgtaaaaccaagtcacaattcctacacagccgcctctgaggggtggaactacatcctaataatattcacacatcgtccggtctcagcccagaccatagctcgcgtctggggccgccaggttggtgtcgaatggtacctccaccctctccttcacgacgcagtgagccctgccgccctccaacaccatcaccttaccaggtgggcagcggcgctcttcctcattggctgtcgcccctgctttaccaaacagcccggcgatgtccagcttgatgctgtttgtcccgatcactggctcgtagccggcggccttcatgatggacacggcaccgacgaccatgaccgccgtcttggccatccatccgatgaatgatgtgatcccccctcgcagaccacagctcggtgtgctggtgttcctgttctctgtcccgttcgttcttgtgccgtcctgcgttgctccgtcagaacccaatccgttatgcaagctcttcttgggcttggacacgtagttcagagggtacaggtcgtcgagcacgaatgagttggtaacatgatttgagtaaggaggcaggatgaggccatcgtcattctcgatcttctcgccagcaaacgcagcagcctcatggattacctcacagtcctgccctttgtattccttgagcttgcaaagcagggatctccgactgcggtcgatctggctcaagatggtttctcgctcatatctttgctggtgctggaggtcctgcagggacgcgagctggcgctcgagcgactcgagcgcgtcgccgatgccgaccaggctctccacctccccctgctcatcctcatcctcgcctccatccccaccccccgccgcgcccagccgcttcaccgcgccctcggtgggccgggccgcggcggcgcaggcggatatcctggagcggaggtcggaggcgcgcgccaggacgaggccaatctcctccccctccatctccgccgccgccgccgccgacacgggg

SEQ ID NO: 16758 - DNA, 310 bp, Setaria italica
  Peptide Sequence Number=SeqID_82732
gtgcccgccaaggtgtggctgcattcggcctcccgctcctcatccacgcgcgcccgcggcctccctgcgaggctggctctggaggctcaacctgggctcgcagctcgcctcctccaacctttcgtgtcgctgccgcacagtcactccctccctaagcctgattctcggtccaccgccgccgccggcgcggtgctcctccctcggtctggtggagtggcgtggggtggagatccgtcctgccgtggagtgattccttctttccttgatgttggagctcaggtagaagttaataatggacgtgatggaggcc

SEQ ID NO: 16759 - DNA, 395 bp, Setaria italica
  Peptide Sequence Number=SeqID_82733
cagagtcttcaggaatttgcttcaaggtcacaggataagatcaacgggaccagttactgtcaagccaatgcttacaagaaatagcaaagaatagaatcagcctgcttgagagaagaaccaccattgtattagcaaccttgtagcttgcaaggcatgcatcgatatggtgttttgcacatccatatccatagatgactgagttgttagtaaaatatgctaggaatgtgctcagttcagtcagttgaaccctctaagctgagatgctaaagcagcagcaaatgatctgtataaatatttttttcttgatttcttccattatcttcccaactaatgaaccaacataagcagaaatttcactcaaaattaccagagagaaaagataaggaaaagctcag

SEQ ID NO: 16760 - DNA, 907 bp, Setaria italica
  Peptide Sequence Number=SeqID_82734
aagggaaagaaaagaacaagttacaaccaaacgaggtgtccctgctgtcaaggatacaccacaggaacctggtggcgtttctgggttattgccatgaagatgggagaaacattctggtctacgagttcatgcacaacggaaccctgaaagagcatctgcatgggcgcgacaagcacattagttggatcaagcggcttgagattgccgaggatgcggcgaaagggatcgagtacctccacactggatgcacgccgtcgatcatccacagggacatcaagacgagcaacatccttcttgacaagcagatgcgagccaaggtgtccgacttcgggctgtccaaattcgccgccgaggagtctcacgcgtcgaccaacgtgcgagggacgctgggatacctggatccacagtactacatctcccagcagctgaccgagaagagcgacatgtacagcttcggcatcatccttcttgagctcatctccgggcgtcctcccatctccaccctctccttcggcgaccacttccgcaacatcgggccctgggccaagttctactacgaaggacgcgccatcgaggccatcatcgacccctccatctccggcgccggcgggtaccaggacgtgcagtccgtctggaagatcgccgaggccgccgtgcggtgcatcgacgcggagccccggaagcggccgtgcatgccggaggtggtgaaggagatccaggacgccatggcgctggagcggacgtcgtcggaggccgccaggtgtggccccttctcccctgcggcggcgagcgtcaggtccggagggaccatgaggtcgcacgacatggtcatggacaacctgctgctcatggacgacgaggacgactcctccttctcaggctccgtcagcaagctcaagtacttgag

SEQ ID NO: 16761 - DNA, 535 bp, Setaria italica
  Peptide Sequence Number=SeqID_82735
taataaggtaaataaacagcagttatggacactgcagttattgttctgagctggacaataccattggaggcaatgctaaccagctataccccaaagctgttgtacatggaacccagtatttacttacctctaactaaatcatattcataggttcagggggttcagtgcctcattaagattggatatactgtgcaccacacaagctgacactgattgttagcaagaggcctattgaaaagtgcaggaaggaaggaatctagtagttccatgcacagaataaaaaataagcaaagtgcactctttaaagcaaacattctatcaccgcgatataatctgtcttggtacgagagcatagtgagaaccaataggcctctcccagatgaagtacaggagcacaataacaagaaaataggtgtgcatcgaaagagatgttatagagggaagagtcaccttaacaacccaatttttatccactaaaagatttggggatttcaggtcgcggtggacaatggtaggatggctagagtgcaggtag

SEQ ID NO: 16762 - DNA, 2893 bp, Setaria italica
  Peptide Sequence Number=SeqID_82736
ttttttttttaaagaagccttcttcgcccccccttgaaagagatccccaaaagtattaaaatgcacattcacaaaagaagcaaggtagcatccgtatacatgatatacatttgcatgtggtcaacattgggctgcaactttttgcagacaccatgaaattttgacatctttttccatctttcgtaagacgtggtgaaaaaacttcaagatcctatctttgtggtgaattctgattctcagaatcaccccgttcaaaatccagaactgaacaattatttaccatggcacagagcacttcgtgtcgcaccacttttcttcacttgagactacacactacgctttctccagcagcgcctttgcacagcttcagagactcacattttcacaaggtgatgtgtagaaccttcgcccatacacatctataccgcagagattctgaatatatctccacgagcttcaacatgaaaattttagccctgtggtagggcttaaatacttgaacacctgtgtcctgagatttgtctcaggaaaggtatgtcagcagctttctgtaacaactaaacgctgtagttgctttagaggtgacaagagctgggaaaacgacggccttttgcttggatcgttatcccaacatgaagatattatgctagccacctgcgggtccacttccttggggatgtctagtcgtctgttctggaatccaactgctccaacaacttgcattggattcaacccactccatggtacacgcatggttgctagttcccataggattactccaaagctgtagacgtcacacttctcatttgatggttcattacgtagtacctcaggtgccatccactctggtgttccagcagttgacttagaggaaaggaaagtatgatgtttcaaccttgacatgccaaaatcagacaccttaacaacccaatttttatccactaaaagatttggggatttcaggtcgcggtggacaatggtaggatggctagagtgcaggtagttcatcccttttgccacatctagtgccatttttagcctgcgtacttcatcgacttgactatttggtcgatgcaacaggcgatataggcttccccttgggaggtactcagttaatatagagagatttggcgattgtgtcacatatcccaagaaaagaacaacattgggatgtcttaatctcgacatgattctcacttcacatttaaattgctctagtgaaacacctgataaatcctgatcaagaaatttcttcactgcaacctccgtgccattccaatctgcatgataaacttccccatatgaacctaaaccaatacgttctccaatatcaagatcttcccatggtatttcatattcagcaacgtcatctataactgagctgatcgtttttgtactagaccagctcaacttgtccgaatttccgttgctacctcctgacatgcccaccaaataatcttcagcaaccctctgatcctcattggaaatagcactagcggtatgaccacgcaaatctaaatctcttataatgtcttctgcattttccacagggtgttgtgcattttcataaagtgatgaagaatctttagctgcaaaaccatttggcaaattttgccgtgtttgagcaactagcaaccatcctgcactttctttatcatgaatgttacgactattttgatcaggtaataaatcagcaggaagcaatgcaccactctccaaaagtaagtcatgcaaattttgcgcaaactgtgggttcactacatcaggcacaacatacttggaaacatcattgactttaatatccccttcaagatctttatcagagataacattttgtttaagttctgcctgagataaatctgccagatttgaagtgagtgctaaaatagaactgtgatcagatgagcttcctccaatgtcatttctgttctcacatccaccattaatctgctcaagagctaggcataattctgcaacactctcttcaatagcatcaccgcgcagttggctattgttggaatcctgaaactgactgccagaaatgtctgaagggattaaggtgcctggagctcccatcagatcaataatatattcagtgctgtcaaaatcaactttgaccaaattaacagctccttcatcagttccggtgtaacatattcctttcacaagcttacatggcagattgactcgatcagcaagtaccttaaatagcagtgatcggtgccgtgacagcccaacccgaagcgacccgagaggaagaaccacactgttgagctggagcgagagctcacgtctcttgatgctccagtccatgttcatcccatcggcatcctccacgagaccgcccatcgcatcaacaacgagacccgcaatcttctgcgcgagctcagccgaagcagcagggccatgttgtgccctagtctgcacagcgatcgccgcagccctatcctccaggcgttttaaggtggtgtcacgctcccgatccaccaagacggccaggaaggcgacgtcgcgccccggcgggaccgccctgaggtagtcgagggaagggaatttcgcctggaatccggggtgcagctgcgcgccgcacacgtcgtagaagccgtcggggagctgctcgtcgtagttgacggcgctgtggttccagtagcgcgcggagagggcctccgcgggggtccggtcgtgcccgccggcccccaccgtggcgccgaggctgatgagctcggccgcgcggatctggacggagtccgcgtcgacgagccccgcgtggtccgaggccgagatcgcgagcgccagctgcacctggtagtcctcctccagccgcgtggtggccgcctccgcaccgagccccctcggctcctcagccgccgcgggggcgaccgccgccggctgc

SEQ ID NO: 16763 - DNA, 413 bp, Setaria italica
  Peptide Sequence Number=SeqID_82737
gcgaggcgcggcgcggcgcggcgcgggggtgggggatagaaatacgagcgagcccgagcagagcagggcgagacgagacgagacgagaggtgatagataagcaagcgggcgcgccctaaccctagctcgtccccgcccgcccgccgccttcgctcgccggagggtcctccgtcctgccgccgccgccgacgccgacgccgcctgccgccgcggggatccgtacccgcgccgggcctgcctcgaccggcgtggctgactcggtcctagtaatccggtggtggcaggccaccgcaggggagcaatggctgttgtcaacactaacaaccctgttctattcgacaatgacgatgatgacggcccgatttcgttcaagaggtctagcaactccgtgaagagcagcaggcctaccccct

SEQ ID NO: 16764 - DNA, 492 bp, Setaria italica
  Peptide Sequence Number=SeqID_82738
cggccgaggagatcgaggccaagctccgcgaggcgcatctccggaggcagcaattccacgagacactgtcctccaaagcaaggcgctcaattaggagcccttcagggtcatctcagaaggaggatcgtgggcagctcctggaagcaaagcttgtggccgccaagcagaagaggttgagcctcttggcaaaggaacagagccggttggctaagctggatgagctgcgacaggctgctaaaaataatgctgagacgaggtttgagagggaaaggggaacttggaatgagagttgaatcgcgggttcggcaggctgagaagaaccgtatggaactcctgcatgcacgtttgcagaggcaggctgcattgggaggagaggacaaaaaaagttcttgtgcaaagactgacttggagaacaagtacagggagcgtgtacgttctgcaatcctgcagaagcgtactgctgcggagaagaggcgatcaggctgctggaat

SEQ ID NO: 16765 - DNA, 1084 bp, Setaria italica
  Peptide Sequence Number=SeqID_82739
ttttttcagataagatatcgctttatacacttcattcagtccttggagcttgatacataaggccagtggcaaaacccaaccaactcctctatggatatacaactttattcattcatcaatctcaatttattagtatctgagcatggcacacagctgacaaaacgattgatcataaaaaccatgcttctacagtacagttcatcgcagacaaaagcatagcacacaacaaagagtacatcactatttggtacatcaccactactaatgatacagagggagagtaatagaccttgtaaaattgctctcaaatggtgtagtccgaccactgccgtatgaaggatgtgtgatccatggactcccccggcatgtcctcgtccttctcaccctccgtctttttcccaccaatcagcctcgcggggttacccaccgccgtgctcctcgccagcacatctatcagcaccacggatccggccccaatcttagccccggcaccgattttgacgttaccaagaatcgtggctcctgcgccaatcagcacaccgtccccaatcttggggtgcctgtcgccgaccgccttgccagtcccacccaaggtgacgtggtggaggatcgagacgttgtcgccaacaacggccgtctccccgatgacgacgccggtggcgtggtcgaggaggatgcccttcccgatgacggcggcggggtggatgtcgacagcgaatacgtcggcgacgcgggactggagcgcgagcgcgagggggcggcgctgctgcgcccagagcacgtgcgcgacgcggtgtgcctggatggcgaggaaccccttgtagttgaggaggcagtgcgagaacccgacgcaggcggggtcgcgggacctggcggcgaggaggtcggcgacgatggcggcgcggagggaggggtgcgcggtgagcgtggcgaggaagaggtcgtagaggagcgtggagaggagggtagaggagcagagcttgttggcgaggtggaaggagagggaccgcgggagggacgggtgggacagcacggtggcgtagaggaaggaggcgagcgccggctccgcgtccgcgtcgcggcg

SEQ ID NO: 16766 - DNA, 600 bp, Setaria italica
  Peptide Sequence Number=SeqID_82740
cgccgacgccaacggccacccacaccaccacggccaacctcacccgccaagccgcccactccgtcctcccatgccgccgcgcgtcagctgcctcgatcgtcccccgcgttcctcgacccgtcgtcaatcagccccacgccggcactgatcccggcgcgggttttgtcccgtgccgccgcccgccgcggtcgcggggaaggatggcgtccgcgacttgctctcttccgcatggacactcgctccgcggctcataaagcagccgctgcctccgtttctcgcccatcggccccgcctgttcttcttccggcggaagcggcaccccctttcaggattccaaaattcccaccagaaaacttatattttcatccagtatcaaggggaagtcctgtttcgtgttcattaatggatacatccagaagcaagcaaggaccagatcatctccttgttcttgtccatggtatcatggcaagccccaaagactggacatatggggaagcagtgctgaagaggcggttgggtgataatttttcatctatgctagttcatcgaacacctacaccaaaacgtttgatgggattgatatagctggaagaaggttag

SEQ ID NO: 16767 - DNA, 524 bp, Setaria italica
  misc_feature (479)..(524): n is a, c, g, or t
  Peptide Sequence Number=SeqID_82741
ctcagctcactaaagaagctgtgcctgcttaatctgcataagaatttcaaaactcagtggttcaggaatggaatggacaagaagatgtcagatgttctcgagcttcgcatctaggaagtgacagtttggttcttcctgcaataatattcctgactatatttggtggacctgcgctttacgtctttacaacgtcatgcatccactcaatttcaataaagttcttgactctgctagtaggctagtagctatatatttccaaactgtcttcaggcttctttttccttgtatgcgtctccttggttgtaagagatgcataaactaaataaaagaaagcacagccaggtttatgtacctgtgcgccatgttactgttgtttcttcagagttcgattttcataggtgaaccttgttattgtaatgcatttgacaataatgttgcctctataaaaatctgaatgtgaaatttagtcctgtaattgnnnnnnnnnnnnnnnnnnnnnnnnnnnnnnnnnnnnnnnnnnnnnn

SEQ ID NO: 16768 - DNA, 686 bp, Setaria italica
  Peptide Sequence Number=SeqID_82742
cagctccacaggttgatcatccgaggccactgggctgatgggacactgcagtgcccaatatttcacggccatgggaaaaatctcaagtatctagctctaagctggtctggtcttcaggaagacccactccaactgcttgcgccacacgtcccaaacctcacctatctggggttaaacagggtaagcagtgcagatacattggtaatacctgaagggtgcttcccacgactgaagacgctcgtgcttaagaacctttccaatgtcagcctattgactattggaaaggatgctataaaaatattgaaggtttatatatcgtggctctgcccaagctggataaagttcctaaagacatcgaatccctctgttctctaaagaagctgtggttgttgtatcttcataaagacttcaaagctcagtgggacagagatgaaatgcaccagaagatgccatatgttttagagcttcgtatctaagagtaatcatttgacctgaaataatatccccgtttcttctcagagcaacaccatggatcgacttctttgttgattctgcaaatagctatctactttccatcatttttatccttgctattcctttttcatattagcgatgaggaaagtaattgttgttcgtacctatatggcatgtttactttgttttattgcagtttgattttctgttcc

SEQ ID NO: 16769 - DNA, 593 bp, Setaria italica
  Peptide Sequence Number=SeqID_82743
tcctatactgcagcctttttcctgaagattacatcatgtcaagagagagccttgtcaggcagtgggttgctgaaggatttgctgtgaccaatgaaaacaacacaccggaggatgtggctgaactaaatcttgtggatctcattacaaggaacatgctgcaagttaaggattatgatgagcttggcagggtggacacatgtgtgatgcatgacattgtgcgtgacctagctctttcaattgctaaagacgagaggtttggctctgcaaatgatcaacgttcagtgatacagatgaaccaagaagtacgtcgcctgtcattgtgtggatggaacgacagtgatgtacgtgcagtgagattcccgcaccttcgcactctgttttcacttgatggtgtaacatccactcctcacatgctggactcagtcttctctaaatcaagctaccttactgttctagagttgcaagattctgaaataactgaagtgccagcatctatagggaatctgtttaatctacgttatgttggcttgcggcgtactaaagttaagtcactcccagaatgtattgagaagctatccaacctacagacactg

SEQ ID NO: 16770 - DNA, 1782 bp, Setaria italica
  Peptide Sequence Number=SeqID_82744
aatgtccaggcaatttgaagctaagctacaatgacttaccagggaacctcagaaactgtttcctatactgcagccttttcctgaagattacatcatgtcaagagagagccttgtcaggcagtgggttgctgaaggatttgctgtgaccaatgaaaacaacacaccggaggatgtagccgaattaaatctcatgaagctcatcactaggaacatgctgcaggtggtggattatgatgaggttggaagagtaagcacctgtaagatgcatgacattgtgcgagacctagctcttactgctgctaaggatgagaagtttggctctgcaaatgatcaaggtgcaatgatacagattgacaaggaagtgcgccgtctttcattatatggatggaatgatagtgacgcatcaatggtgaccttcccatgcctccggaccctgttgttacttgatggtgtaatgtccactcagatgtggaagtcaatcttatctaaatccagctatcttactgttcttgagcttcaagattctgaaataaccgaagtgccagcatctataggggatctgtttaatctacgttacattggcttgcgaagaacaagagttaagtcactcccagagactattgagaagctgtccaacctacagtcattggatatcaaacaaacccaaattgagaagctaccacgaagcatagttaaggtcaagaagctgcgtcatctgtttgctgatagaattatagatgagaagcaggaagatttcaagtactttgttggtgtacaaccaccaaaggatctctctaatttgatagaactcctgactcttgaaacagtggaagccagtgatgacttggcagcccaactggacaaacttaggaaactgcagagtctgtggattagcaatgtaagtgctatgcattctccaaagctttttgctgccttatccaagatgctacttctttcaagcttgcttttgaacgcaagtgatgaggagcagagactttgcctgaaagccctcaacccacagtcaaaacatctccacaggctgattatcagaggttgcttggctgatgggacgctggaatgctctatatttcacagctatggcaaaaacctcaaatacttggctctaagctggtctggtcttctggaagacccactccaaatgcttgagcttcatgtgccaaacctcacctatctgagccttaataaggtgaccagcgcagagaacttggctatttctgaagattgcttcccacagctaaagacgctcgtgatgaagaacattctcaatgtcaatcagcttacaattggagacagggctcttccaaatattgaatgtttatatattgtggcgctacccaagctggataaagttccacgtggcatcgaatccctcagctcactaaagaagctgtgcctgcttaatctgcataagaatttcaaagctcagtgggacagagatgaaatgcaccagaagatgccatatgttttagagcttcgtatctaagagtaatcatttgacctgaaataatatccccgtttcttctcagagcaacaccatggatcgacttctttgttgattctgcaaatagctatctactttccatcatttttatccttgctattcctttttcatattagcgatgaggaaagtaattgttgttcgtacctatatggcatgtttactttgttttattgcagtttgatttttctgttcctgaattaagctcctatgtaattgaacgtcatttgaaataagagtgtaaatatgttcatcttgatgaa

SEQ ID NO: 16771 - DNA, 1319 bp, Setaria italica
  Peptide Sequence Number=SeqID_82745
caaccacccctcccactactactcccctccccctccccaaactccccaccgcggcttctcctctcgcgcccatccacggcgcccgccgcgccattccgtccagttcttgatccgtgatcctgccgtcgtcggtcggtcgcccaaggactcgccgccgcctgtcgcctgggcgagccgatcctgaatcgccgccgggctccggcgctacccgctgttcttccgtcagccgcggattctgaggcagacggattcgattcttgtggtgatcgctgaattaggggcaggcaactggttattgttgccggcgacgagggttggcggcgcggctgatccggctgtttcgattgatgaattcgcgccggtcgagatcagtgaagctcgtgtcggcacgcgccagcaaggccctggaggtggatatcgccgagtcggacccccggatgagctcctcggccgacaacaccgtctactgctgcatcgcgaagggccgcagggtcatctactgctacaacagcaaggacggcgacccggagacggaggccgccgccgcgctttgcctcgagcactcgccgccgcaccaccggcattacgtccacacctcggggtcacggagctacgggtacctcatggccgacgggcacaccttcttcgccatcatcgaccccagcgtcgggaacgccggcgccctgcagttcctggagcgcgtgcgcgacgtgttcaggaatagtgtgaaccggaatgggttccatgactcgctggtgccggcggtgcagaggctggtggcgtcgctggagaagatgccccatgccgcgttggtgctcgaggagagcgcggagaggggagggacgaacgagggctccggctgcacgtcgtcgaaggtgcctctgctggggaagagtggcagcaggaaggagaagaagaagaagtccaaggataagttggcgtcgacaggggatggcgaggatgaacgccatgggactaggggggtgaggatagatgtgccggcggaggaggtcggaggaatgtcgctggagcggagcttgagccagtccaggctccgacggcagcagccgtcgcggtcgctgtggatgcgccatgtgaagatcatcatcgttgtcgacgccgtcatctgcctgttgttattcgctgcttggctggccgtgtgcaaggggttccggtgtgtttcttcatgatgagaagagaatgtttgcatctgctgtgtacagtttttgagggactgggaaggctctgaatggatgtggtgaggtttgatgtcttccttgttggaaaggtaaatataaggcaaacaaaaaatgatggta

SEQ ID NO: 16772 - DNA, 272 bp, Setaria italica
  Peptide Sequence Number=SeqID_82746
gcgacaaaagtatcttggtaagcatttcaggttgactttcttgttctttttaaaggttatatttggttgtgtcattagttgtatggatcatttatatttttgtcaatgctttctaggtatatttgatttcatggctcgtaattgtggtggttctgcttgttatgaaggtaaacgtgaatgtttagtttgtgagaaaatatggatcataaaaaaatgttcttaacatgatagttctggtgcatttcttttctgccatttctgctttctaagtt

SEQ ID NO: 16773 - DNA, 442 bp, Setaria italica
  Peptide Sequence Number=SeqID_82747
ctgtgcttttctacacggaagttttgtaagaaaacatttgctcgaaagaaagttatggcttcatcaactatgtctgctttatctgggtcagaggctggggctgggcccttaatatgagtttttagtggaagcaaaggacagccgcaagctttggtgataccatcatcatcaacgaaactagagtgataaaccattttgccggttcctcaggtgctgaagctgctttctcgtcctgaaaggctgcgccggcgatctggccggcccagcagcggcgtggcagttccccgagttggaataggcggatcaagcctggacgtggccggagaagagagcaagccggaggaggagaacgaaatctggggggagaggaggattggggatttggaggaggttgtgaggtataaatggcaatggaatggaatgtgttttgttcttgtgaagg

SEQ ID NO: 16774 - DNA, 371 bp, Setaria italica
  Peptide Sequence Number=SeqID_82748
attttttttttttttttttctttccattcatccaaatttgcaacagataatttaatttagtagagaactttgacttcacataatcataagtgataccaaccaggattcctacaaacaactctaacgtgttgctgaaaatgcctatgtcgtctaaaggatgacaatgttcatgaacttcctcttcgcaaaagccaaccaccatttgtttggaaagccattagctctgtatgcacagttgagcagtcttccacttgtttcctcccttatctgcttcaaataattcctcaaaagttctgaatttagacagaaatgctcagtcatcaatttatcatcgcaattccaagggcacatgaatgataacttaactactc

SEQ ID NO: 16775 - DNA, 980 bp, Setaria italica
  Peptide Sequence Number=SeqID_82749
tttttgtactaagaaaaactggccagtaacccagctcttattgccgactaattctgagaacatccaagggtcaggatctcagggtcgggatcaccacgaataattaataattactacaatatatatatgccacatttgcagtaggcaaaagattaaaaacatctatacaaaatatcaacacaagtacagactcaacttttcatttgagaatatgcccagtttaaggtttggattcagagagaactggggagaaaataggctagacaacatgacagcttgagttctccattcatccaaatttgcaacagataatttaatttagtagagaactttgacttcacataatcataagtgataccaaccaggattcctacaaacaactctaacgtgttgctgaaaatgcctatgtcgtctaaaggatgacaatgttcatgaacttcctcttcgcaaaagccaaccaccatttgtttggaaagccattagctctgtatgcacagttgagcagtcttccacttgtttcctcccttatctgcttcaaataattcctcaaaagttctgcttcctcctgggactcgggaggagtgaaaagtccagggaaaggaaaccctggttccccaggcacaggaactttctccaagcccagattaatgatcgccttagtcccaacagctaacgtcctgcagccttctagccttttcaaggcaatatttatgtaaaatgtcagatagatcagtaacttgtctgctgtgcttttcacacggaagtttttgaagaaaacatttgctcgaaagaaagttatggcttcatcaactatgtctgctttatctgggtcagaggctggggctgggcccttaatatgagtttttagtggaagcaaaggacagccgcaagctttggtgataccatcatcatctaacgtaaaacttaagtaagttagtaattaaaaccttagtaccctaactaagttttagttaatttta

SEQ ID NO: 16776 - DNA, 492 bp, Setaria italica
  Peptide Sequence Number=SeqID_82750
agctatcatccatactataaggagtcgatcaccgtcacgctcaaggggcaagaaacaactctggtacagatactttcagtcttcatgtacatcgacctctccaacaacaacttcgagggtgtcatccctgacgagatcggcgatctgaagcttctcaagcagctcaacctgtccaggaactccttcactggcgtgatccctcctcggatagcgaacatgctgcagctggagtccttggacctctcctacaaccagctctctggggagattcctcctgcaatggccgcaatgtcattcctcgaggttctcaacctgtcctacaaccacctgtcagggcagataccgcagtccagccagttcttgacgttcccgaccacatcatttttggggaacgacgggctgtgcgggaagccgctgatacgctcgtgtgacatcaaccacgcaccatcagctcctgctacgccgggcatctttcttaaaggtagtcttgaa

SEQ ID NO: 16777 - DNA, 781 bp, Setaria italica
  Peptide Sequence Number=SeqID_82751
tcaacctcgtgcgcgctgctgccaggcgctctcggctctcgtgcagcctgcctgccgcgcgctagctgctttacctgctctctgccaagctcgctgcagcgccgtctccgtgctcttttgctacaaagcagcgtgctccgcgcggggccggagccgcggccgagaaatgcccggtggagccttcctcctcaacagcggcggcggcggtggcatggcggactacggcggcggcctcaccgtccccgtagtggtgacctgcttgatggcggcctccggcggcctcatcttcggctacgacattggcatctcaggaggtgtgtcggagatggagtctttcctgaagaagttcttcccggggctgctgaagaggacggcgcacgccaacaaggacgtgtactgcatctacaacaaccaggcgctcacggccttcacctcgtcgctgtacgcgttcggcatggtggggacgctggtggcgagccgcgtcacccgccgccttgggcgccaggccatcatgctcatcggcggcagcctgttcctggtcggcgccctcgtcaacgccgccgcggcgaacgtcgccatgctcatcgtcgggaggatgctgctcggcctgggcctcgggttctccggccaggccacgccggtgtacctcgccgaggtgtcgcccccgcgctggcggggcgggttcatctcggccttccccctgttcatcagcatcgggtacctcgtcgccaacctgatcaactacggcacgtcgcggatcccgggctggggtggcgcctta

SEQ ID NO: 16778 - DNA, 1455 bp, Setaria italica
  Peptide Sequence Number=SeqID_82752
cactcttccaataaatgatggagaagacacttccattttgataacaagacttttcttgtacatcaaggaaacatactcaacgcagttggcatttgaattcctcagcaatatacataaatcaaggaatggtgaagatgactacaatgaagatcttattgaagctcatcacgtagaaggggcatttgttgattcattattgtcaagtgctaaatctcacccacaggatgtgctgcttaagctgcaaaaagagaacatgtacagggaggaggctgaacaaagttctcgttttgttcacaagcttgggttgtataagcttcagtgttgtctattgatgaatggactcgtccatgaagcaaatgaggatgcgaccatgaatgctatgaatgacgagcttcctaggattcaagaacaagtttattatggacatatccagtctcacacagatgttttagagaagtttttgtccgaaagtagctacaagcggtacaacccatcaattactggcaagagtgcagggaagaaatttgtttcgctatttgcatcgtatcatcaggaagactctgtatttaatgatattaagtacttacaatctcctgcaactgtagatgatgcgaaacctgtaacccatctacttgctattgatctttcgtcaaaagttggaataaaattgcttcatgaggccatacgttacctgatggacgggactaatagaggtcgtgttggtctgctactctatgtccgcactgctagttcactgcctattttacttctgaaagatatctttgatagaactatttcatctttcagctacaaagaaaaggtattggtcttcctgcacgaggtcttgaaattttatggagcccaacctacacctgtctcttcagttgctggtgattggactagaactatgatggaaaaggtctatagcttagctgctgaaattgctttgcccgttgatgactataaagcatggtttgaaagtttctctgctgatacagttctcaaagggatggataagttatctgacttcgtatttgggcaactggggcttgtgtttggtagtaatgctgtgatcaccaatggacgggtctttgttatgaaggaaggagaaccatttttagccgatgacttaggtctcctcgagtctatggagtacgatttgagaacaaaatacatatttgaaataattgaagaggttgaatttgctggtgttgaccccgatgacctgacaagccaattctacagcgacattgcaatgttgatctcgtcatcgatgtctgttcgtgaaaggccatctgaaagagcacattttgaaattttgcatgcagagcatagtgctatcagattgaataatgagaattcaagtattcacatcgatgctgtcattgatccgctaagtcccactgggcaaaaacttgccccacttctacgcatactctggaaacagattcagcc

SEQ ID NO: 16779 - DNA, 475 bp, Setaria italica
  Peptide Sequence Number=SeqID_82753
gcccgaaccgggtcactccgtcgggctactggaaggccacaggggcagatcggatggtgcgcgttgagggtaaccgctccatcgggctgaagaagactctggtgttctacgtggggaaggcgcccaagggtctcaggagcagctggatcatgaacgagtaccgccttcctcatggcgaggcagaccggtaccaaaaggagatttccctttgccgagtgtataaacgtcctgggattgaagacaactttcacctcaccaccaacacaagatcatcaggctcaaaggcggcagcatcgatggaaaagaagcaccaccggacgtcagcatcgccacgcttggcaccaatgttcgacggtggccactcatcatcagctcacatgaacaagccatacagtggcacaatcaatggcatcatcagctgcagctcgagcagcagcaacaatggcgcctcagacatcaatggacgttcctgtcc

SEQ ID NO: 16780 - DNA, 948 bp, Setaria italica
  Peptide Sequence Number=SeqID_82754
tctttgttattccacaattaaaaaactttcctttttgttacttgctttcaggcagggagcatgaatcaatggtcgtatggttcgattctgctgaaaccacagtatggatggtttgagaaagagggtatcgatgtttgtttttagttcatctgccagagacccggctcagtttcagtgaattttctgcatactgtccaaacagttaggtcttggttttgtcatggctgccctgataagattcagttgatgttgtacttatcgattgatggtggttctttttgtgtttctaatcgtactccatcaccagcagctcatatggcacatatatatatccatttagagtggccctaatgctattatttagtttttgtattcttgactgagcttgatgctgacaagtgagaacttatactatgaaagatatattcggttgacctcatgctgactgttttttcccctttccatgtgtatctcatcagaatgtcacaccagccacttacattgcaactcacaggacagatccgcctcccaatcaagtgataacaacagagcccaggaacatcctgttgaggcacttctaccagaaatccgaggagaagctgaggccaaagagagcagctcctgacaatctcgctccagagaacaacaacaaacagcccaggggccctgtcgccgatgttggaagccagtcaaacgcaagaagctgaatacagctggtgcttgtcctcccctgcgtctctcaatgccgtgtgcaacctgcatgctgcatgccagctgaagccctggtcctcttgatccaaagagctacgctcattacatgcatgaatgtacataacaacctcccccctttccctccaacattggtttgttatttgttagcgactggtggctgcattttagtgacagattttagtaaagaaaaaggatggttcggcatgaaaagaagta

SEQ ID NO: 16781 - DNA, 1032 bp, Setaria italica
  misc_feature (22)..(22): n is a, c, g, or t
  misc_feature (146)..(146): n is a, c, g, or t
  Peptide Sequence Number=SeqID_82755
agtttgacagaatggacaaaanagggtacaaactttacagaaccacagactggacaccaaggaaggaaggtacaatatgcaaaatatcaaccaggttcataataatatccaatgccagaattccatctccatccaagctttacccngaaaaaaaaaatagtgcctacttcaactccaatagaactgaccaattttgagcccaaaaaaagattctgagtgcaatatttagtacaaattgttgtagtacatacatctgcagaaaagcaatgttgagcagtcaaagacgcaattgacagattgaatatggacatgtcatcctcacagtatgctactgcagtggagctcctggtgaacttcctgtcttgtcctttctatacctaactatctcaacacctaaatagtcaacaattccttgtacagcgacatgaggtttcttaacttcaacccggacagcagatatttgtgggaacttgagcaatgtggcacttgcaatctggtgagccactgactccaaaagattctgagatggaccttcaaccacattcttggcaattctgtaaatatccgtgtaactgactgtatcagatatgctgtcagtttcaccagcagtgctcagatccatccaagcatcaacatctacaacaaacttttggcccagagtcttctcctcctgtttcactccatggaatccatgaaactgcaaacctctaagcacaagcttatccttcccaatcaactccctttcagccataagaggacctgcagcgcctcttgtcggttggctgtgttgggagctgaaggacgcactgtgaaccaagtaaaatggggatgccgctgcttgacagcaaggaaggaaggggcagcggctactcctgaatttgcacttggtgggcagatgtgcaatctgacgagcccacaaggtagtgagcataacagcagttggaatccaggaacaccccacctgcctgctgtgctgagagcctgagaggctggggaggaccggaggagccctgagaatccgagacggggcgc

SEQ ID NO: 16782 - DNA, 770 bp, Setaria italica
  Peptide Sequence Number=SeqID_82756
tacatacaccaaggaaggagtacatctgtcagttatgctcagatccaaaaaaagactcttattgcatcttgtcggttggctctgatcttgcccaaatgaaactgaaacccataaagggatgctgattgaaactgaaactgaaatcacatactatgaccaggatcacgccatccaacagttcgtgctggtgaaccacgcatgcaatttcttccaaatgtgaaagtttcagcaggtgaaaacatttgatgtccgcctttggattttcaaacgtcactttgtttgagacagcaatcagcttcggagctgagaggcctcaagagaagagcgcaaaggcgaagtccgctctctggttgatcagctgcagcctcaaggaccccttcccactcttgttgtaggcatcattcgtgaagttcgcatactggaactgcagcgcgtcttgttggttggctgtgttgggagctgaaggacgccctgtgaaccaaagtaaaatggggataccgctgcttgacagcaaggaaggaaggggccgcggctactcctgaatttgcccacttggtgggcagatgtgcaatctaacgagcccacaaggtagtgggcataacagcagttggaagccaggaacacctcacccgcctgctgtgctgagagcctgagacagagaaacagaatcgttaggcagcaatccattcctacccacaggtctccggctgcagggcgtgttgcgttccaggatgcgcttcctcgcagcttccgtccgtccttaccggttt

SEQ ID NO: 16783 - DNA, 457 bp, Setaria italica
  Peptide Sequence Number=SeqID_82757
cttggccggcttcctacctgtggtgtggtaattgttgccagcaaactcgccgacaataagaggataaggaaacagagaacttgggatgagaaaactagattgattgtatttgcttgatctcaaacttaagagaacaatttgcatatatagccagccattttacaatcagactcacacaaatttggaaattgtaatctaaacaaactctaaagtatatacttctagcaaaaactggactcggactgcactctaactcagactcaacactggctccagcttcttgtgaacctgacacctacttctgagctttccgtttctgttatttctgtccgaccataacagaaatattatgagtgccatttgcgaatgagtatacttaactacttatccttttgatatttatagtcttcaaaatttctctacttacattaggttaaagaagaggcgcaacaacttg

SEQ ID NO: 16784 - DNA, 549 bp, Setaria italica
  Peptide Sequence Number=SeqID_82758
tttttttttagaaacaagaattttaccagaggccagtgaatatattaatctcgaagttgaatgggttacatgaatcaagaagcccatccacttcatatttaaaagaatctaagaacaacccaagtgtaagcccagctttccagtaattgaacatggtaaccatgttcctgatcctaccaagaaatccaaaggaagcgctgtacatcagtgcgccaataccctccacaatggcaacagcaagtccggctgacaatatatcccagtcacctgtttgcccaatgacagtagcaaatgccgtagcacaataaaatccaatcagaaagaacatgatcttcgttgctagccctttccttgctttcttcagctttgcagaaaacttgttccagaaagattgaattgcactgaaaaggcgagtgctattgcctggttggccactgctatcatctgacatagtcctgatggcccattgcatctgccttgagtttctgcggtaggaaggagatgcccacagcaaggaaaaggtccctggcttctcccagcggcaggaaa

SEQ ID NO: 16785 - DNA, 877 bp, Setaria italica
  misc_feature (1)..(23): n is a, c, g, or t
  Peptide Sequence Number=SeqID_82759
nnnnnnnnnnnnnnnnnnnnnnntccttattccccttgttgttgtcctttggtctagttcttcttttagtttttttttttaaggtaaattcagtttcgtaatcactctttcaagtaaaactttttaacttggcgatgagaccaagttcaattgaaatttgaatgatacaaaatgagccacacagatgctgttactctcttcgtggtgtgtatcagtacgatcaacctctcacttcatcagcaaaactacagatcctaccaacaaaagaatcatcaggctgaacggctggaccggagcggcccagttggatcccggcgtagccggcgagtagtcgccggagcccgtgctggtgctgagcacgacgacgacccagtccccctcgttggcgatcccgacgccggagaactggctgtcgttcaggaaccggttgtactgcgacttggtgtagttggtgagcacgacgccggggacgagccccggcacgcacgccggcatcacctggccgtcctcggtcaccgacgcgttgaggtggcagtggtcaaggtacttggggtagtccgggaactgctgctcggtgccgatgacggtgttggcgcccgtcgtgttggtgcactgctgccccttgaactgcttcgcgagctgctcggcgaggcacgccgcgttcttgttctccgtcagtgccgggaccttgagcgaggacctgtagctgttgatgcccttgagaagctgagcatcgttgccgtcagatctggcgcagtgcaggagggagaaggcgaggacgaggaagcagaggagggagatcctggaatccatttctgctcctgaccaacacggtgctgcggcaacagcttagccactagtgcgactgagtcggaga

SEQ ID NO: 16786 - DNA, 374 bp, Setaria italica
  Peptide Sequence Number=SeqID_82760
cggctgcggctacgactgcgatatctaggacttcggctgcggcccaagatatcggaggagcccaagctacggcagaaggagctacagcccacgggatcgttctcctaggaggcggagtgacagcaggtctccaccgccacctcgtgcacggagtctcagcaggtcgcctccaccagctcgagcgcgcagctacagcaagtcgccacctccaccacctccgcggaacaacagcagatcgtcaccgccagcccgtgacctgagcaggtcgccaccaccacctcctgccaggaggagctatagcaggtccccggcagcagccccagcgcgatgagtccccatacggcaatggcaatgatgcgtgagatccttagctg

SEQ ID NO: 16787 - DNA, 1138 bp, Setaria italica
  Peptide Sequence Number=SeqID_82761
cctcttctcctctggctgcggctcgaacttaaaccctagagccgctcccccggccgccctcgcgaccccaaatctcaaatcacccggagggagcacgcgctcgaagggtttcgctcatggctcgcgtctacgtggggaacctggatccgcgcgtcacggcgcgggagatcgaggacgagttccgcacgttcggggttctgaggagtgtatgggttgctagaaaaccaccaggatttgccttcattgactttgatgaccgtagggatgcacaagatgccattcgtgaattggatggtaagaatggatggagggttgagctgtcaaccaaagctggtggtggacgtggccgggaccgtaatggttctgatatgaagtgctatgagtgtggtgaaactggtcactttgctcgcgaatgtcgcttacggattggttccggaggcttgggtactggaaggcgccgcagccgaagtcctagatatcgcagtcgtagccgcagccgcagccgcagcccaagatatcggaggagcccaagctacggcagaaggagctacagcccacgggatcgttctcctaggaggcggagtgacagcaggtctccaccgccacctcgtgcacggagtctcagcaggtcgcctccaccagctcgagcgcgcagctacagcaagtcgccacctccaccacctccgcggaacaacagcagatcgccaccgccagcccgtgacctgagcaggtcgccaccaccacctcctgccaggaggagctatagcaggtccccgggccagcagccccagcgcgatgagtccccatacggcaatggcaatgatgcgtgagatccttagctgctccaagatgctgggaaaatgttaggggccccagcatgtttttgcccgggcgcatcggtacaacttatgtaattctataggattcaaagtcttgcatttttatcgtttcagtgtttttcgtttcctgggaggacaccgctgctgatacaattgtggaggcaggagcctataacgtttctgtttcgagttttgactgcatgactctggccgcttgtagttgtcaagacaaagatctggttcctatgagatttgtattcctagattgcttggaatttggaaaacaaaaaaaaaaaaaa

SEQ ID NO: 16788 - DNA, 358 bp, Setaria italica
  Peptide Sequence Number=SeqID_82762
agttggtggttaagcggtaccgctgtacacactctgcgacctgtgtttgcctcaagggccacatcagtgaggatgcaatgtatctcgtgtttgaacacatgaaatggaacccgaagatgattgctatcttctccagcgtatgtaaatggtttgatgaatttgcgaagagggtgctctggaaggaattctgccatgccagggcaccaaagatgatgacggatttgcactctgatggaagccatattgttgatggcaactggaaggccctagggaagcttcttatctattgctctgcgtgccctaggggagacctgttcagttaacatccatgtcccaatcccagggcactttgtctaca

SEQ ID NO: 16789 - DNA, 577 bp, Setaria italica
  Peptide Sequence Number=SeqID_82763
ccaggcaccaacgccaaatctcgcgacctgtcgaaatgggcgaaaccggaggcagcgagtagcgcgagacgaacgccgcccacgaatccaaaccctagcgccaggaggaagacggcgagcgaacccagcaccggtcccggccctccaaaaccctatcccggcggccgccgctgccggatctcgggggtagcgagggatgtcggactcggcgtcgatggcggccgccatcgaggcgcggttcagcagccgcgacctcatcggccgcggctccttcggcgacgtctacaaagggtttgacaaggaactgaataaggaggttgctataaaagtcattgatctggaagaagctgaggatgacattgaagacatacaaaaggagatatctgttttgtcacaatgccggtgcccttatataactgattattacggctcttatcttcaccagactaagctatggatagtgatggaatacatggctggtggttctgtggccgaccttcttcaagccggccctcctctggatgaaatgtctattgcatgcattctgagggacttgttacatgcaattgaatatctg

SEQ ID NO: 16790 - DNA, 1033 bp, Setaria italica
  Peptide Sequence Number=SeqID_82764
ggcgctggctttgctctgattcgctctaccgaatcttatcctctttgagatttcgaatccaaacatcatccgccaaggtggcagtaccacctcgagatgttcacctccctctcgtttaacatgttccaagtcggctacgttgctagtaacaaagtaaacgttcccggatggttaggtgggataacttgaatagagctcataaaagtccagtttttttttgccaaaacagccattttgcactaaaaaccaaatgatagctgtgcgatgttcatacacgaaatgatgggaactgtgctctgaccattcatcaggcgcttattaagagtagccaattatgtatccaataccagggaaatagagcagcaagtcttataggtgctgagatgtgaatgttcgccaacagggccggcatctaaccctggagcccaatgataccacaagcaacacggccaccagcatttccagtgctcttgctaagctcatgtccacccttgccaaggtcatcaggatcagcatggacaactacagctcggccaatgattgagtgtggcccagtgaggggaatctggcagtcagtaatattgacattagcaacaccatcttctccagctgtcacattcccaagatcaccggcatggcggttctcatcttccggtgcaccatgctccttaccagcaggattgaagtgtggaccagtcgacatgcagccattggtggtgtcaccaagcgcgtgcacatggaacccatggagccctggcttgagcccagagatacttccggtcacagtggttggaccatctccctcttgggaaaagaagatggtgcccttgacatcactgccagcgaggacagcgacagccttcaccattgtctatgtgatctcaggcgacccctgggcgcgacgcgagttgagaagttggaagaggaggcgagccgcgggcgctgtggaggactcgagaaccgagggccaaatggagagaggaggagaacccttgtgacttgtcacagctgcagtgcctgtccaggtacacac

SEQ ID NO: 16791 - DNA, 248 bp, Setaria italica
  Peptide Sequence Number=SeqID_82765
gaaatgcaagctctccgcggacaccgcccgatgaggagcggaagccggcggcaggagaggcggggagcggcaatggcaaggggaaggaggtcgccgccgagccgcccaaggactacatccacgtgcgagctcgccggggccaggccacggacagccacagcctcgccgagcgggtacgccggcggcgaacaacgtgtctgactcaattaacgcgtttcgttgtaaagcttcagtcgttcacgtggttg

SEQ ID NO: 16792 - DNA, 1533 bp, Setaria italica
  Peptide Sequence Number=SeqID_82766
ctcgtgccgtcgcgttcgccgtcgccgtcgtcgctcgcggcggcggcttccggagctgccgccgtcgacaccgccctgatggagcagcttgcaagcaggctcggcgtcagcgtgccgtcatcgtcacggtacgcgtcctgctacagctctcccgtgggctccccatctaagccggcgccggcgccgttcggggctccgctgctcggcgcggacgccgcgcggctctcgtgcttcgcggcctccggcgggaagctgtcccgcgttgccagcagccagttgctcctcggcgagccggtgacagcgcccgcgcctggcactgctcagcagcatgccagcgacgggtctagcagcgacagccctagtcggaagcggaaggcaccgggaggaaagtccaaggccaaggaggcagcgaccacggccacaccaaagtcccgggagccggagacgagagccaagaaatgcaagctctccgcggacaccgccgatgaggagcggaagccggcggcaggagaggcggggagcggcaatggcaaggggaaggaggtcgccgccgagccgcccaaggactacatccacgtgcgagctcgccggggccaggccacggacagccacagcctcgccgagcgggtgaggagggagaagatcagcgagcgtatgaagctgctgcaagacctcgtccctggctgcagcaaggttaccgggaaggcggtgatgctggacgagatcataaactacgtccagtcgctgcagcggcaagtggagttcttgtcgatgaagctctctaccgttaacccgcgactcgaaattgacgtggacagcttcatccccaaagatgccaaccagccgtgcgcgcctgcagcgtcgtccctgccgccgccgccagtctactcactggaggattcaagccctgcgctttgctacgcctcatctcaaggtactgcagcgccgagtgcggtgaccagtgccaaaagctttgcaacaccgtccacctttgtgaaccatggcatcccagaccactcacttgaaggatttcacaatgctaattctcagatggggagcttgtgggaggaggatgacctccaaagcctggtgctgatggggttccggggcaatacgtgatcattgacgctctgattgagggacagttcagtttcaccgatcaccaatcaaggcaagagatgatcaatggggggcatgtctggcgcagggcctcagggccacttaacaacagggttgggctgcaatcattggaaaattctccatgattgtacatacacccgtgcatagaaagaggactcttactcgctaaatgcctcagctgaaagtttccagctcagcgaggccgagaagaacgcgaaaaagatgatgttaatttccttgcatttccaaaagaaattccaaagtaatgtacttgtaatgtaatgtagtgtaatgatgtttagtcctttagacatcaagttgatggtttttatatacatgtgatgtttcctgcttttggtaactgctgctggatgcttttagttttgtgttggt

SEQ ID NO: 16793 - DNA, 463 bp, Setaria italica
  Peptide Sequence Number=SeqID_82767
acatcacacacctctaagcctccttttttccccttcttctctgaagaatccagcaacaatatatatataaataaagtaaaatggcccttcttattttctgcaccaacaagggacacgaattggacaaagaaaagaagagggttccaataagtcacaagaaaaacataacacatcagcgcacaccttaggcccccaacgccagcgccgcggccaccatcgcagccgcggtgccccaccgggtgagcatggatggcgcggcgccggccttgtccgcggcgtcgtcggctgagtcgtcggcagctgggccgtcagcgctgtcgtcgtccgagggcatgtcgctcgcccagatggccgggtgtgggtcgcgcgctttagcgccatccattttcggggctagttgattttcggcaggtgagttgttacacactccttagcggatttcgacttccatgaccaccgtcct

SEQ ID NO: 16794 - DNA, 1831 bp, Setaria italica
  misc_feature (11)..(11): n is a, c, g, or t
  Peptide Sequence Number=SeqID_82768
ttttttttttnttttttttttttttttttttgtttaccccgaaaagctaaaacttggacagacggaaagcgaaacaatggagtactaaactccatgatgcattatagtatcacatgtaaacacacactatccgattccactgaccactatcattacaaaatgatcaccacaacccaataaacaatccaaagagctacatcacacacctctaagccttccttttttccccttcttctctgaagaatccagcaacaatatatatataaataaagtaaaatggcccttcttattttctgcaccaacaagggacacgaattggacaaagaaaagaagagggttccaataagtcacaagaaaaacataacacatcagcgcacaccttaggcccccaacgccagcgccgcggccaccatcgcagccgcggtgccccaccgggtgagcatggatggcgcggcgccggccttgtccgcggcgtcgtcggctgagtcgtcggcagctgggccgtcagcgctgtcgtcgtccgagggcgcggcggccgccgatgtgcttccaggcttcttcttggtcttcttcttgggcacctccggtgcgggcgacggcgccaggtcctcagcttttttgggcttgaacaactccttgggctgcaggaacttggagacggcgtagatggcgagagggtcatcgtccctgacggtggcctggatggtggaggtggtgaccgtggtgtcgagcgtgacggtgtctgcctcggtctgcgcttcgtaggtgtagtccttcttggcaacgctggtgctggcgagcgtggtcaccttgcctttattggacttgaggaactgcatggagtagtagtccggcacggcgtggtagagcaggatggccgtcttggccttggccgtcaggttcttgaactttggcatgaaggcggccacggcggcgtcgacagggcagaagagcgtgagcgcagtgtccttggttccgttgatggtatcgaaggctttggcatcggcagctaggaggccggcgaagctcttgcagtactttttggagaggagttcggtgaggttgaccggagccggcggggccacgggcgcctcggcctccggggagggacagcacactgctgacctggagcaccgagtaatcgtagcggtggctctcgatctgcttgacgaaggtgacgggcttcacggagtcagcagcgtcatcgacgatgaacgtcaccttgccgccgcggtgctgcgttatgttgacgtaccctgccatgccgggggcaaacccggatcgctggaaaagggtcgatgcagcggtggcgccgtgcgacagctgcttgagcttcttctcgtcgtagtagtcggcgacgacgtgcagctcgaggatgtggcggatggtcccgagcgagtagtgggcgctggtgaggtggcccatgtcgccgttggcgacggcgagcacggtgatggtgcggtcccggttgatgtcgccggcgaggtgcgtctcgttgagcagcttgcagaactgtgagaactcgtcgtgcttccccaggatctggaggatgtcgaacccctccaccgcggcagcgcacacggccagcaccgccgccgccacggccagccgccgcaggcccatcactccgggctctggcctggctagctagctgctgctgctgtcggcggcgagctttgctaggggaggggagctagctaggggagtgagtggagagcagagcacagcaataacggagtgatgatgcccgagcaggtggacggtggggtaatgtaatgcctggccgtgtgcagccagcaagatctggcgggggacgcggtgtgctcaaagt

SEQ ID NO: 16795 - DNA, 958 bp, Setaria italica
  Peptide Sequence Number=SeqID_82769
ccgagaaggacatctttctttgcctcccccttccagagcaccaccgtagataagcacaggcagcatgccttggcttttgccttgccaagcacagacgagccatgaccagatgcaattgggagacagcataaattgtgtgatcccacaggccggagtgtcccacatctcacaccttccttctatctctgtccaattttgcaacctctttgaggggagagagcggttgaaaagacctttaattccatttgtatgtatgcagcagcaggataccttgcagctaggccccccacactggagatcttcccttcatggccaatgagtcatctacagcagccatacagtggtaactcgcactcagtagggagcacctctgaatcgagctcaggtcagaacgccatgccgcaggccgagttggtgtccccagggagcatgagggccgactctgggcagcaacaggaggttttgatggtgaccgttgatgactacaactacgagcaaggccttggagtggcagcaaccactgctccaatctttcagcagcatacagaaagccaggacaagaggaagcaaggatccacaagaaaagatggcaagctgttagacgcaaagactgaaaggcgattggctcagaaccgagaagctgcaagaaagagcaggctgagaaaaaaggcctatgtgcagcaattagaaacaagtcggattaggcttcagcaaatcgagcaagaactacagggggcacgttcacagggcctgttcccgggaggaggcagcgcgtctggagatatgaattctggggctctgatgtttgacatggagtacgcccgatggttagaagatgacagcaagcacatgacacagcttcagggcattctgcaggctcaaaatatcgatgcaaaccttgggaccattgttgaagagtgcatgcggcactatgatgagctgttccacctgagagcta

SEQ ID NO: 16796 - DNA, 864 bp, Setaria italica
  Peptide Sequence Number=SeqID_82770
aacctgggaggagttctatgcatatgaggaacagagaacaccaagtttgtcaggtcagcgaggcacttgtgttctcatctctgcttaggtacgagaacatacttcttgccactgatatattgcctgatgttctaagtgcttcagtgaacagaaattctgtgtcagcaactgccaggcatcctggttcagcagcttttgcttatgtccgatattttttgaagaaatacagagatgtggctagtgtggccaggtgggagaaaaactttaggaccacatgtgaccagcgactgttagctgagcttgataatgggcgatcaattgatggtgattttgtttcttcttcgggggtttcagcaggtgaggagattgatgagcaggtccgccaaaagttgaatggaaggagttcaagacttatgcagaatatgaaagagatagtacagaggcaagctgatgaggttcaacgcagtttaaaggaaaagaaagttcttccagcacccaagagtccaccctctttcgagaaagaagatagttatcagatttctcatgacattgttttcggcttagtagaatgtatccggcaaaatgggggtgcaaatccagatggagatctttcaatagttgcttctgctgtttctgcagttgttgtgaatgcagggcatgtgatagcgaaacatttggattttgcagggggtaactatcaaggtgttaattctgtgagcaattcgctaaattttgttcgacacactttgcgtatccacataaattctctttgcttactgaaagacactcttggggatcgcttcagtcgtgtatttgaaattgctttggcagctgaagcttctgcagctgttacagcagcttttt

SEQ ID NO: 16797 - DNA, 556 bp, Setaria italica
  Peptide Sequence Number=SeqID_82771
cgatacgtctggtatactccagggtagtcaagggcccaaaagctcagctgatgattccatacgcagccatctactgcagtttaccgaagctgtcttcaaagataggagcagggatgagagtgtgacaaaggctgcagttgctgtccttggggatcttgcggacacacttggcgcaagttcgaaggatatgttccagaccaacctcttccatgttgagttcttgagggagtgcatcgactcagacgatgaagttcgggagactgcatcttgggcccaggggatgataaaccaagtggtggtctcgtaatgtgagatagtttcatcttgttggttagaggtttttgtggctgtgccaagtccatttgccaatatatatgtagtgccagtcttaggatccttgtaggcatctgtgcattgttgtcgatctttcgagctgtcgtgactcacattagacctgttggattctgtctgtcggtgtcttgaacagcaaaacttctttcatttgtcttattgctggtattattcagtgctgctgatgacgcttccttttcaaaaa

SEQ ID NO: 16798 - DNA, 2705 bp, Setaria italica
  Peptide Sequence Number=SeqID_82772
aagaaattactttaggaatagacgatgcgaaggattctgcaaaaaaggagctactgactcagcaatgggtcagcatggatccatctatcaaattgaagatcaaggagtcgttgctggtaacactaggatcttcagtccatgatgcaagacataccacatcacaagtcattgccaaggttgcatcgattgagataccacgtcgagaatggcaagacctcattgcccaattactggggaacatgacatcaccgtctgcatatgctcctttgaagcaagcaactctagaggcactggggtatgtatgcgaggagatttctccgcagcacttggagcaggatcaagtgaatgctgttctgacagctgtggtccagggaatgaaccagacagagctcagctttgaagtccgtcatgcagcagttaaagccctttataatgctcttgactttgctgagagtaactttgcaaatgaaatggagaggaactacataatgaaggtgatttgcgatactgctgtgtctaaagaagtggagatcagacaggcggcatttgaatgccttgttgcaattgcatccatatattattcgcacctagatccttatatgcagaccatattcaatctgactgctaatgcagtgaaaggagatgaagaacaggttgcacttcaagctgttgagttctggagcgctatttgtgatgaagagattgcactccaagatgaatatgagggatctgatgatggcaactctactatacatttccgctttatagaaaaggccctcccttcacttgttccgatgctgctagaaactctattgaagcaagaggaagaccaagatcaagatgataatgtatggaacatttctatgagtggtgggacgtgccttggactcattgctagaactgttggtgatgcaattgtccctcttgtgatgccgtttgttgaggccaacatcacgaagcctgattggcattgtcgcgaggcagctacctttgcatttggttctatccttgaaggcccctctgttgaaaaacttgctccgctggtccaggctggtcttgatttcttgctcaacacaatgaacgattcaaacagccaggtaaaagatactactgcttggactcttgggagggtttttgagatcttgcattctcctgctggtgccaacccaatcataaataattcaaatcttcctcgtatcatggctgtgttgcttgagagtagtaaggatgttccaaatgtggctgagaaagtctgtggagctatttatttctggcccaaggttatgaagatgcagagtccatgtcttctgtgctcacaccttatctacctaatgtcattgctgctcttctttctgctgcggatcgtgctgataccacccatttcaggcttcgtgcttctgcttatgaagcactgaatgagatcgtgagagttagcaacatacctgaaacttcaggcattataggccagttattgcaggagatcatgagaaggttagaccttacatttgatctccagatactctcttctggtgacaaagagaagcaaagcgatctgcaggctttgctgtgtggtgtactgcaggtcatcatccagaaactgagcagtacagatgcaaagtccataattatccagactgctgatcagctgatgcttctgtttctgcgtgtctttgcctgccacagttctacggtgcatgaagaagcaatgcttgcaattggtgctcttgcatatgctactggttcagattttcagaaatacatgcctaagttcttcacatacctggaagctggcttgcagaattatgaagagtaccaagtctgctccatctctgtaggggtggtgggtgatatttgccgtgccttggaagataaaattctgcccttctgtgatcggattatggctgttcttctcaaggacctatcaaactctatgctcaatcggtctgtgaagcctccgattttctcatgctttggagacatagctcttgctattggtgagaattttgagaaatacttgccatatgctatgccgatgcttcagggagctgcagaactccttggtactcttgatcagagtgatgatgatatggttgattatggcaaccagctcagacggggcatttttgaggcatactctggtatactccagggtatcaagggcccaaaagctcagctgatgattccatacgcagcccatctactgcagttcaccgaagctgtcttcaaagataggagcagggatgagagtgtgacaaaggctgcagttgctgtccttggggatcttgcggacacacttggcgcgagctcgaaggatctgttccagacccacctcttccatgttgagttcttgagggagtgccttgacttggatgatgaagttcaggagactgcatcatgggcccagggtatgataaaccaagcggtggtctcttaatgtgagatggttttgttctgttggttatgggaggtttcttttgtggctgtgccaagtccatttgccacaggtgaacgaaaggataccaatatatatgtagcgtcagtcctaggatctttgtcgtagcagtcgcgtggtgttgttggtctgtcaaagccgttgtgcgtcgcattagactgggtggattctgtctgtggatgtcttgaacagcaaaaacttggttaatttgtcttactcctggtttaattagatgctgctgctgatgcgtcct

SEQ ID NO: 16799 - DNA, 1068 bp, Setaria italica
  Peptide Sequence Number=SeqID_82773
cgcgggcgtcttcgactcagtcctccgcgacgcgctccgcgtcgcccaccgattcgcccgcgcgctagccgaggtcctccggtgcgctgggtgggacctgaccgcggcggcggcggctgcctacccaggcgtctcctactccaagggcggccactgccgctacgccctgctctcccgcgtctgcctctccatgttcgacggatttgattcctacgaattcggcgccgcagctgacaacgcagagcttgaaggaatcgagctggcaatccgccggaatgagtcgctgcagcaattcatcgagcactcagatgcagacccaatagagctcatgaattcaagcccagattgtgagtttgcccaattttgcgaccgcaagtacaaacagctgatccatcctggcattgagtcctccctgtttgggaattcagactgtgggacattgccggtgatgagtgtggccggcccactctacgagctgtttgttgcaatggcaagctcaatatggacgctccaccggttagcttgggcgtatgacccggcagtcggcatattccaggtcagccggggcacagagttctcaacggtgtacatggagaacattgtccggtcgaagggtttttcagggagcaaggagcttgggaagacagcgcgaccgaaggtcgggttcacggtggtgccgggcttccggcttggagggacagtgatccaatgtagggtgtatctagatcatgggaagagggaagaaggcattatagattcaatttgagctgatgtgaaactatatagtcataaaagaaactgtacattcggaaacaaaaggaggctgtgtaaaggcgatgaagaacagtgtattgaaataaccttcgcaggatcaaagcagctgctcaatgatgagtataaagaaagctatttatcttttcttttagtttttttgttcggctgaaaggagagggggtgtttgtagtgttgtacaaaggtcatcaggttcagggaagctttgtgttctaacagggtcgaagagctattatctaatcttcggtaacttatttgtgtgtaattcgacttcat

SEQ ID NO: 16800 - DNA, 355 bp, Setaria italica
  Peptide Sequence Number=SeqID_82774
tctttgtctaggtactttatttgtaactttgttctagtcttcgtcttttcgttcttgttgtatttgtttcttttctacctttgttttcacttcctctgtatctgtaaccatatcatctaagagttgttcttgatgcatcatcagctgtgctgtacggtgtgttctccattgattcggcctcttgaataccatcactttcatcattatttttacttgaagatgatccctggtccactgatactgagtttgctttcatcagaggccttcacatctttattatcctaaaaatcacagttcagaggaaataaggatcatgatcagacatgcacgttccaaaattttgatcaaaagaaag

SEQ ID NO: 16801 - DNA, 419 bp, Setaria italica
  Peptide Sequence Number=SeqID_82775
agtgatcacctctggcatgatctcaacagggttcctgctcgaatcatgatcaattctttcaacatgatcaattttctcaacatgttcattcgtctgacacatatcatgtgtagtgatatcgacatggttcctgcttgaattctggtcaatttttttgaacatgttctttgtccttatcatccaagttgacctcgacaggattcctgcctgaattctgatcagttctctcttcacgtttgctgtccaattgatccgcaacgatctcattatccttgtgaatctggtggctttcctctgtcgccttgccatccaatataccggatccaatctcggtgttgccagcgctcaagttctcattggactgatcaagactcgataccaatgcgctaccctgaaccttcccatcctcgacacgaaca

SEQ ID NO: 16802 - DNA, 1346 bp, Setaria italica
  Peptide Sequence Number=SeqID_82776
tgtgtgccttggctagtctcttttagttttttttgtttttttttttagttttggaaataacgttttctgggcagcattattagcagtaaggacagagggtaataaagcaaagacagacgacatcgagaagccttatgataaatattttcagcactaacatacgctacaaaattattgataaaaacaagcacttcgggagaaccctagtgttctctgatctctctctttctttttctttttcttcttttttttgcgaaaagttctctctgatctccttggttgtgccttttggtagatggtgccacacctgtaactatttcagtatagagacatcgtgctggacaatggccatttgaattctttcattgctcgctcgtttttccatcttgcacattccagctgagacgttgccattcatatgcgagcgcatgaggctatgaaacccagtggaactttgcaacctcggcattttgtgttgatcactggtagaacttcattacgcccttggaaatttactacagatccatctggagctttgttgctcggtaggggcgtataagcgcacgatgattgttattccaatagtcatcgcgaatataagagcaagaatggccagagcagggctcctgcgatccatggttgcgatagctcctccctgcactcctcccttgctgatcaggtcgtgctcccttagctcaccattggtataatcttgctctatcttcatccctgtctcgttcagtcctggaaactcgggccctttcttctctgctggcttaaccagagatgccactgcaggtgagctgacaagttcaataagtcctgcaagtgctttcttttcgtcctgttcgagctcgctttcgtctgtgattgttctttcaccttgtttcacttcctctgtatctgtaaccatatcatctaagagttgttcttgatgcatcatcagctgtgctgtcggtgtgttctccattgattcggcctcttgaataccatcactttcatcattatttttactgaagatgatccctggtccactgatactgagtttgctttcatcagaggccttcacatctttattatctttttgggctatctctttctcgatgttgttcctgcttgagtcctcatcaaccttctctacatttccagggaccaaacaaacagtgatcacctctggcatgatctcaacagggttcctgctcgaatcatgatcaattctttcaacatgatcaattttctcaacatgttcattcgtctgacacatatcatgtgtagaaaaatcacagttcagaggaaataaggatcatgatcagacatgcacgttccaaaattttgatcaaagaaag

SEQ ID NO: 16803 - DNA, 264 bp, Setaria italica
  Peptide Sequence Number=SeqID_82777
ttaaagtggctttcagaggtctaacactatcgattggaaaaagaaacttctgcaatgtgttacaggaaaactttcaccaggcagggtaacagctatcatgggcccttctggagctggaaagactacttttctgaatgctgtgttaggtaaaacgtcagggtataagaaggatgggatagtccttataaatgggatacctggattaatgcagtcatataagaagatcattggttttgtgccacaagatgatattgtccacgggaa

SEQ ID NO: 16804 - DNA, 381 bp, Setaria italica
  Peptide Sequence Number=SeqID_82778
caataagcaacctagaaatccagtaaagagaatcaagttagtacggagtactttgttaactttggacgctgggtgcaaaatgcaagcaaaaaaacgagagagaaaaatgcaagattgaagaggatggagacagtgacagtgagaagagaggaatgtagaggaagagctgtgggaggaaacggccaacctgcaggtcactgttggtgggcccggggccacgtgaaagtcaggcattgttggcgcccccattgaccgccggacctggcagtgacgccgatcggcgacgtgaacgtgcctggccgtgcgctcccggtggcctcttctgcgaaagcgttggctcctttgatcgacctgctgtgcttctctgtatctgatttggaa

SEQ ID NO: 16805 - DNA, 3088 bp, Setaria italica
  Peptide Sequence Number=SeqID_82779
aagttaggaaagtcattcccaagaattcggaaaatgatgaaagcatcactttccacaaacagcaggtcaagaagaccacttcccagagttcaaagagtgacttctcatcccagaaaaacatattaagaagccagtttgctcaactagagaaggtccagatctctcatcccgcaaggagcctgttgaggatcccatttgcacaaatgttgacgatgcgggcttcttatccacaaaaaggctagaagagaagcccattagtcgaaacagtgaggacctgggccattgccaccaggagtcgcctaagaaacctagttgcagagatgggcaagatgatctaggtaactcttgcagcgaagaggctgctaagaagccagctcgtatgaatagccaagacgccatgggttcagatatctctgctgcaactattgcttctgtgggagacggctctaatggcttgagcatgtcgcaggctaatgctactgaacctgctggttgtactgttgccaatgggtttttggacaaagatatcagctctccattagatgaaataagatctgagaagaccgacgacatttttgccaagcctaactacaagtcaattgtggtagatgagactagacggaaaacttatgatacttacgaagaacagcctgcagtggagtctgacctagtttttgacatattctccacggaaccaaaggagctcgttaatgttgggcttgatgctgagcactcgtatgcatatgcaagaagtctggctcgttttgctggttcgcttggtgctcaaggctggagaatcgcttctgagcgcattcgacaagcattacctgctgaagtaaagtatggtcgtggttgggttggagaatatgagcctccattaccatctattctggttgtgaatgatcaatctagatatctgaagagctctgaggcaaatgtgcgaaggaatgcttcgctgcctagggataatgacaggctcagaccgacagaaagtaacaatccaaaggatatgagtttgagtcttaaccgaataaccactagcactaatgtagttggagtgcctgggccacttgagagtccagaatttaagccaagattgtttggtgttactgctgagccccaacacaggagcactgacgcattatcaccacatgagaatcatagagtacctggtaatgttgcaaagaccaaaagaacagccaatgagcaaacgagaaaaggcaactcatcctccggtgcccgccctattgagatgaaaccacagaaaggagcttctggtgcacctgatatgcctgccctgaacaaaactgctggtcagcctagaccctttttccaaccagcagaatcaaccagaactcagcaaatgagaaaagttgactcattaaaaagcaacgtccctattgaaatggcaccacagcggcttgagtgtgcaaaaggtgctgcttctggtgtgtatgatacaccttcctcaaatgggcagcctaagcatttcttcccgtcacaagcagcagcagcttctggtgtgcatgatataccttctccaaatgggcaacctaaacgcttattccagtcaaaagcagtggcttcttctggtgcgcatgatgcgccttcaaatgggcagcctaaacacttcttccagtcacagggaccagcttcatctggtgtgcatgatatgccttctacaaatgggcagccgaaacccttcttccagccacaagaagcgactgtaccacagcccagaaatgaagcgacgtgggtgtaccatggacgacctggtgatgggaaagttggaacatccaacaaaagcagaccgtcgaccagtgttgggtttgtcaataaaaatcaagcagtaaatgctgcgacttttgccatgaatttgaatggacaaaagaatgtcagtgaccatgcaaaatcagtaggctcaactgcaatgcctggccttgcaaatataccaaatagaggtgttgatgcttcccggaacatgttctcagcatttccagcagctgttagggagaatcagagcattccgccagctccatctgctcaatcttggatttcatttggtgctgctacagagaacaaaccagccattgttagcccaactttccttgacaataattcttcttggaagatgccatttgcaaatgttcgtccttctgatgatacaaaaatcggtgctgttccccaattctttaggcaacctgttcaggtagttagagaaagcccagttcaaaacaacggtttggtaatatttccccagttggtccagccagatttcatgagatcgcagggccaaccccaatggcaagggctggtcccccacatgcaacagaagccgagcaaggacgtactccgcccagacttgaacattgggttcccatctccaggttcgccaccagctcgacagtcatctggcatcaatttggaggcacaacagccagaccttgcgttgcagctatgagctgggaacagacaatgagtacatgcgactgctaggttgtgtgtcacaaacactgagcatctaaaggcatgtggagctcaggcgcgaaacatgccagaaacagcaatgggacatccattaaatatactggcaagaattgaccgggatgaggagctcaaatgtaagcaccgttgcaacttcatcaacacatcccgccgctgaacaaagatatcaaaaaatggatggatgaacactgcttggaatcaatcatgtctactgggggcattttgatgggaactccgaatccagcatttgtacaaatgctttggtggcacatatgtaggtagcatactggtatgctcgtgatccagatactttgtgctcctctctgaccacaatacaggtttcttcggtggaaattttggcaccagaatttaggagataaatcgttcttttggtagcgtagatctcgtggtcacccctatgtaatgcccatgtcaaaatgtatgttggttgtaaatggttcagcattgaatagtgttagggtagagcagtggccagtggcctcacctcttctgaatgaaattgcttcttttgttcatgatatgtgtagcaagaagccaggaactgggtctatgatcgttgatc

SEQ ID NO: 16806 - DNA, 327 bp, Setaria italica
  Peptide Sequence Number=SeqID_82780
ctacgttctcacacgtgacacgtcgttcttggagagagcgccggtagcccaccgcgcgcacgggagcggaatggccaccatgggcgtggtcagagcatgcgcgcctcccgccgccgcggccacagctgctgccaagaggaatccctccaggagcgcccgcgtgctcgtgctcggcggcaccggccgtgtgggaggatccacggccaccgcgctctccaagctccgccccgacctcaacattctcgtcgggggaaggaaccgggagaaaggtgaatcctttgcagctaagcttggagagcagtctgaatttgtccaggttgataccgg

SEQ ID NO: 16807 - DNA, 270 bp, Setaria italica
  misc_feature (251)..(251): n is a, c, g, or t
  Peptide Sequence Number=SeqID_82781
ttttccttgtcatttggtccgtcagaactaagtttgtcgaattccttctgaataagcttgagacgctggtcgtgcttgtttgttggtgtgcctacgtgccgcgtagtcgtcgtagcaaatactttcggttccatgcatatcgcctgtgactggaccgggatgttcttcaatctgttatggccctgtattctgtttttatatggatcccacatataatcaatttccaaacaaaaaaaaaaaaaaaaaaaaanaaaaaaaaaaacaaaaaaa

SEQ ID NO: 16808 - DNA, 1091 bp, Setaria italica
  misc_feature (1082)..(1082): n is a, c, g, or t
  Peptide Sequence Number=SeqID_82782
tcttcgtacttccccttaaacccctacccttgtgcccgccgtcgccgcggccttcgacctcctccccaccccaccgcatccgaatcccgcacgcctcccctgccatggccacctccagcgacggcggcgaccagcggcgcctcctctccatccccaaggagggcgagcgcatcatcgcgccgacgcgccgccccgatggcacgctccgcaaggccatccgcatccgcgctggctacgtgccccaggaggaggtcgccatctaccagtccaagggtgccctaatgaggaagtcagggcccgacgtgccgccggggtacgacccggcgcttgcggtcgatggcaagcccaagacgaaggcggccaaacggaacgagcggcgcaaggagaaacggcagcagcaggctagttcgacaaatgataaaggaaagggcctggatatagaggaggctggtgctggggaaacagacaaggttctttcttccaaaactgataagcagagggattcagtggaaagtgtaacaaagcagataaaaggcattgccatttctgaatcacctgcagcgccatccacaaatgccaatgatagctcacaaccagaatcatctgctccagacatagacaagaaaattcgagcactgaagaagaagatacgtttagctgaagcacagctgcaaggtgaccctgaaaaattgaaatctgagatgcaggaaaagttgaaaaagattgaagggtggcgggctgagctgaagcttttggaggacaacagagctccgacgggttcctagacagaatcgggttcagctctgatgtagagtagagccatggctaccagacaatcaccatggtgttgtgctgatccaaggtccaatcaatcaccataggcttttcaattacctgcgggttgctggaaaagcctcgcagtagatgtgccgatgtgtgctcgcgcagaacgatggagaatttctcatcgcacaatttgttgtctcatgttcgccagagttccaagtttgtaccacaagatgatatccatttgtcagagaccacacaatgagataattcaaccgatcattgtgaaaaaaaanaaaaaaaaa

SEQ ID NO: 16809 - DNA, 444 bp, Setaria italica
  Peptide Sequence Number=SeqID_82783
ggtttgtacactatagggttgttttggaagaggagctacctgttgtttatgtgtatgagctacaaatggagccttctgcccagggtaaggggctgggaaagtttttgatgcaattgattgaacagatagcttgcaagaaccaaatgggagctgtgatgctaacagttcagaaagctaacacacaagctatggctttttatactaagttgagatatgtaatatctagtacctcaccatcacgagtggatcctcagataggacttgaaaaaagctatgagatattgtgcaagacatttgactgtgaagctaagtccaaattagaggatggcgacgaagagctctgaagtcaaaagtctcaggaacaggaagggcgtgatctgtagttaaggcacaagtttacacgtcatattgtcatgcggccctgttactgcaattaaattcagt

SEQ ID NO: 16810 - DNA, 483 bp, Setaria italica
  Peptide Sequence Number=SeqID_82784
aaaagggaaactttattcctctctcaatgtgcggaaaattgtccttgtttgtggtgatgagagcagaatttgatagctctgctcgagatgattttggtgagaaaaggaatacactgcctaatgcagaagattcatctaacttggggggaaccctagtttcaatccttgtggatagaaccacgaaagtgcatctttgtgattcagtctgcacggagaagcctggcttggataagacagatttaccatcggaagtttacgactattataataagggaaatgatgattccaatcatgctccaatgcttggtggtttatctgaagagtcaaaaaccataaaagaaataatttcgttttcactttctgatcaattggtttgccaagatacaaaggtattcttctttatggtccacctggaacagggaaacttctcttgtttcttcctgtacgtatgatgcaggattcaaccttttcacaatcaatcgg

SEQ ID NO: 16811 - DNA, 334 bp, Setaria italica
  Peptide Sequence Number=SeqID_82785
gcacccgcccccaccgtctcgagtctctcgactcctctttcccctccccgagtccgtgctcggctcgtctcgtcgccgcccgaacccctcgctttgcccccccctcctcgaagtctccctgctccccaaaccctagcgccctccccgatcgcgccccgagccccattccgcgggggaggcggcgatgttcttctccggtgacccgtcggcgcggaggcgggtggacctcggcgggcggagcagcaaggagcgcgaccgcaaggtgctgctcgagcagacgcgcgaggagcggcgccggcggcagggcctccgcctccagaactcatccgccacg

SEQ ID NO: 16812 - DNA, 246 bp, Setaria italica
  Peptide Sequence Number=SeqID_82786
ttcgaattctcgagaagcagcggcggcgatcgcgaggcatttggccatttcggggttgttttggtggcactgttccgccgcgtagtcgcgtgtcgcgctgcctgctcagccgccgccgccgcgcctctggcagctgctgccacaacctgtggcattcgcgcgcgcgggcctctgtcctcggccgccgacgctgttggtcccgtcgtcttcgctagcgcacgcgctaggaccgcctccgccgtggcg

SEQ ID NO: 16813 - DNA, 383 bp, Setaria italica
  Peptide Sequence Number=SeqID_82787
aagggaagggggaagtgggcgcgaccggcacggcccattaaccccacctcacctcgcttctggagcgggggaacggctacagggaggcgtgccgtgcgtgggcgcggccgtgtaggtgtagggaagccctttcccactggcgccgtgccggtttgtaaccgccggggcggtcggccggacggcgagatcaagaccggccggcaaccagaccagtcaaactcaccagtggattcttcgcacgtaagcaaaccaggccatggctgcggcgtcgtccaagatgaggagagctttttagccgtgcctcgtcagtcaggtgcggacaccaggctgccgtgctaacgaaagccacaccaccacacggctgacggctcattcatctggcg

SEQ ID NO: 16814 - DNA, 554 bp, Setaria italica
  Peptide Sequence Number=SeqID_82788
tccaacagcttcccaaccttccttcccccccggttcttgcagctgagcttccgcgaaaaaaatccacccaaaattccagcgatttcctcttcaagattgctgtgctcgccggattctcggccggccggaaatcttgagttcgccgcagtcccgtccgcgccggactgcttcctagctagttcgaggagcagcggctccgcattgagctgccggtgatggcgaggctcgccgcggcgctgctgctgctggtggcggtggcgtgctgggcggtggcgccgggggcggaggcgctggggatgaactggggcacgcaggcgtcgcacccgctgccgcccaaggcggtggtgcaggtgctccgggacaacggcatcaagaaggtgaagctcttcgacaccgacttcgcggccatgagcgcgctcgccggcaccggcatcgaggtcatggccgccatccccaacaacatgctcgccgacctcgccgacgacgccggcaaggccaaggactgggtcaagcgcaacgtcaagcgatacgacttcgacggcggcgtcaccata

SEQ ID NO: 16815 - DNA, 263 bp, Setaria italica
  Peptide Sequence Number=SeqID_82789
aaccctgactgcggtctcaagacccgcaagtacacagaggtgaagcccgccctgaccaacatggtttccgccaccaagctcatccgcacccagcttgccagcgcgaaatgagtcgtttgttagctccacggtttgttgaacaccaaacttaacagtacaacgtataccggcaataccatatcaatgagactaacctaaccatggaacagggatgaggcagacattattgaaaacaattggccctgttggctttgcgttcaaca

SEQ ID NO: 16816 - DNA, 266 bp, Setaria italica
  Peptide Sequence Number=SeqID_82790
cagccaatttttgagaatcaaggtcaaggacaagggtgggctcatcaaactgaatccatgaagcaccagctgccttcaactcagcaatgacctccttgtagacagggaggatgccactaagaagggaaagaagagggaatcccttctccacacccttggcagccttcgagagcaacaagtatgagactggtccagtaagtactggcacggtatcaacgccaagcgccttagcctcctactcttcccacaaggctgttaatgaatac

SEQ ID NO: 16817 - DNA, 285 bp, Setaria italica
  Peptide Sequence Number=SeqID_82791
tgttggtattcttggttggttgttcctttgtattcttcgtctagtttggttgtatttcttgtaaagtagttgtaactagtccctagttccaagtagaaagcgtgctcagccttgcggagtggcagaccttctcttaaagcagcctcgtcaatttggatgacctgaataccagcagcctcaagatcctcaacctccttcttgattgcaagagcaatctggtagcaggtctcaaaccttggctggtcattcctgacaaaggaccagttaaggattgtgacaggacca

SEQ ID NO: 16818 - DNA, 591 bp, Setaria italica
  Peptide Sequence Number=SeqID_82792
cgccttctgattgaatgtgcttattgagacttactttgctgatgttcccgcagaatcatacaagacccttacatctttgagcggtgttacttgcttatggtttttgaccttgttccgtggagcccagactcttgatcttgtcaagagtggtttcccggctggcaagtacctctttgctggtgttgtggatgggcgcaacatctgggctgatgatcttgctgcatccctcagcactctccagtcccttgaggctgttgttggaaaggacaagcttgttgtgtcaacttcttgctcactcatgcacactgctgtggttgtgggaaggactggaaggttcagcttcttctgctgagcatccaatctagcactaacgttggtagcacggcggtggtcagagcccttgagagcagcagcctgtaacagtatagagaaaaaggttggtgagtgccaacattggattagaatgtgcaagtatattagtcccaggtacttacagccttctgaacttcttcgtttgtcacacggggtgatgacttccttgacgcctgagcggcagcgtttgccgcaaagtaagcctgtagatgacatttg

SEQ ID NO: 16819 - DNA, 518 bp, Setaria italica
  Peptide Sequence Number=SeqID_82793
tttgttctagtcaagatcatcagcccagatgttgcgcccatccacaacaccagaaaagaggtacttgccagccgggaaaccactcttgacaagatcaagagtctgggctccacgaacaaggaggctaaggcgcttggcgttgataccgtgccagtacttactggaccagtctcatacttgttgctctcgaaggctgccaagggtgtggagaacttggtgttagggcccaattcagggacaataaagtggtagttggtgtcaaaccacttggtcatctccatagcagggacagtggcattgcccctagccatcgagaagtaggtgtcaaaacccaatctctcctccggtccatgagtagcgctctgggacagcgccgagcatggcggtggtgtcaaggacctggtcatagtaggagaaggtgttgctggggatgtacttgatccagcatcagccatctgcttccagatgctggccctgaggtcggtggcgaccttctccaaaatcctcagcggtgctct

SEQ ID NO: 16820 - DNA, 635 bp, Setaria italica
  Peptide Sequence Number=SeqID_82794
agcacggcggtggtcagagcccttcaaagcagctgcctgtaagaaatgtatttctggttaagaattgctgtgtactaacatccaattgagcatttattgagtaaagctctgttacttaccgccttctgaacctcctgatttgtcactctcggtgatgacttccttgaggccagagcagcagcattggctgcaaagtaagcctcatccttttgacctgccaaagccttggcaagggcattgacctcaacaaccttttgggcagcaaatgcgagccatgacttgatctcatcatcgagcttagtctcatttacaagatcaacagcagtgtgcatcagcgagcaggaggttgacaccacgagcttgccttgccagcaacagcctcaagagactgaagagtgctgagagatgcagcaaggtcatcagcccaaatgttccgcccatctacaactccggcaaaaaggtattttccagaggggaagctgctcctaataagatcaagtgtcttggctccacggatgagatcaaaaccataagcagtcacaccactcaaggatgtgagagtcttgtaggattcagcaggaatatcagcaaagtatgtctcaataagcacattcaatccaagaagaagtagacta

SEQ ID NO: 16821 - DNA, 1126 bp, Setaria italica
  Peptide Sequence Number=SeqID_82795
ccagccaaggtttgagacctgctaccagattgctcttgcaatcaagaaggaggttgaggatcttgaggctgctggtattcaggtcatccaaattgacgaggctgctttaagagaaggtctgccactccgcaaggctgagcacgctttctacttggactgggctgttcactctttcagtagcacatgtgggtgtggatctgggtggtgtccttgatctcgcagttggtgattctgaaagagtgaacagcccagtccaagtagaaagcgtgctcagccttgcggagtggcagaccttctcttaaagcagcctcgtcaatttggatgacctgaataccagcagcctcaagatcctcaacctccttcttgattgcaagagcaatctggtagcaggtctcaaaccttggctggtcattcctgacaaaggaccagttaaggattgtgacaggaccagtcaacattcccttcattgggcgagatgtcatgctctgggcagtggtcgaccagaaaacggtcagtggggttggggcggctcacatcaccatagatgatcggtggcttgacacaccttgatccataggattgcacccaaccattggcagtgaatgcaaaacctgagagaaacgatatggttgagtacttcggtgagcagctctctggtttttgcattcactgccaatggttgggtgcaatcctatggatcaaggtgtgtcaagccaccgatcatctatggtgatgtgagccgccccaaccccatgaccgttttctggtcgaccactgcccagagcatgacatctcgcccaatgaagggaatgttgactggtcctgtcacaatccttaactggtcctttgtcaggaatgaccagccaaggtttgagacctgctaccagattgctcttgcaatcaagaaggaggttgaggatcttgaggctgcttggtattcaggtcatccaaattgacgaggctgctttaagagaaggtctgccactccgcaaggctgagcacgctttctacttggactgggctgttcactctttcagaatcaccaactgcgagatcaaggacaccacccagatccacaccctaactaattagttagtacttaacttacctaaacttactaaacgta

SEQ ID NO: 16822 - DNA, 1968 bp, Setaria italica
  Peptide Sequence Number=SeqID_82796
taattaagacaaacaagacaaacgactggcttccagacaattttcttgcccaaagatcattaatacgagccgtaacacacctcagagttgcagatgaaacactgcagacatccactcggttttacaatacaagtacacgggaaactttgcctcaaaaccaccaaattcacgaagactaacacaggtatgagcagggtgcgataatcgtgccaagaaaaatactaatctaacccacagacgagcagatacacggtccatattattcaagacaaatggcttctttgatggcaccctccttgtaattaaacgaaaagccactgcagggaacggttctcacttggtgctggcgagctgggtagacggatgagcttggcggcagagaccatgttggttagggcgggcttgacctccgtgtacttgcgggtcttgagaccacagtacagggttcacccagaggatgttggtttcgagcaccgcaagcatcttgttgatgcggtcggcaatttcctcagtggatgggatcctgggggagtggatgtcgtagacaccagggccaatgccggcgccgtacttcacaccctcacggaagacggagaggagcttctcatcggaccgtgagttctcaatggtgatcacatcagcgtccatgttgatgatggagtggatgatgtcgttgaagttggagtagcacatgtgggtgtggatctgggtggtgtccttgatctcgcagttggtgattctgaaagagtgaacagcccagtccaagtagaaagcgtgctcagccttgcggagtggcagaccttctcttaaagcagcctcgtcaatttggatgacctgaataccagcagcctcaagatcctcaaacctccttctgattgcaagagcaatctggtagcaggtctcaaaccttggctggtcattcctgacaaaggaccagttaaggattgtgacaggaccagtcaacattcccttcattgggcgagatgtcatgctcttgatccataggattgcacccaaccattggcagtgaatgcaaaaccagagagctgctcaccgaagtactcaaccatatcgtttctctcaggctcgccatgcacaagcacatcgatgtcaagctcctcttggagcttaacaaccttgttgatttcctccttgatggcagtgacatactcctcctcagagatcttcttcgccttgtactcacggcggaccctcctgagctccacagtctgtgggaacaaccattgtgggtttgtgggaaggactggaaggttcagcttcttctgctgagcatccaatctagcactaacgttggtagcacggcggtggtcagagcccttgagagcagcagcagccttctgaacttcttcgtttgtcacacggggtgatgacttccttgacgcctgagcggcagcgtttgccgcaaagtaagcctcatccttttgaccagccaatgctttggcaagagcatcaacctcaaccaccttctgagcagcaaaagcaagccaagacttaattcagcatcaagcttagtctcgttcacaagatccacagcagtgtgcatgagtgagcaagaaagttagaacaacaaacaaagcttgtcctttcctaacaacagcctcaagggactggagagtgctgagggatgcagcaagatcatcagcgcagatgttgcgcccatccacaacaccagcaaagaggtacttgccagccgggaaaccactcttgacaagatcaagagtctgggctccacgaacaaggtcaaaaccataagcagtaacaccgctcaaagatgtaagggtcttgtatgattctgcgggaacatcagcaaagtaagtctcaataagcacttattcaatccagaaagggcggactcaagttctgtgtatgcagcggagaatgcagcctaattttgagaatcaaggtcaaggacgaagggtgggctcatcaaactgaatccatgaagca

SEQ ID NO: 16823 - DNA, 1274 bp, Setaria italica
  Peptide Sequence Number=SeqID_82797
ctttgatggcaccctccttgtaattaacgaaaagccactgcagggacggttctcacttcggtgctggcgagcagatacacggtccattattattcaagacaaatggcttctttgatggcaccctccttgtaattaaacgaaaagccactgcagggacggttctcacttggtgctggcgagctgggtgcggatgagcttggcggcagagaccatgttggttagggcgggcttgacctccgtgtacttgcgggtcttgagaccacagtcagggttcacccagaggatgttggtttcgagcaccgcaagcatcttgttgatgcggtcggcaatttcctcagtggatgggatcctgggggagtggatgtcgtagacaccagggccaatgccggcgccgtacttcacaccctcacggaagacggagaggagcttctcatcggaccgtgagttctcaatggtgatcacatcagcgtccatgttgatgatggagtggatgatgtcgttgaagttggagtagcacatgtgggtgtggatctgggtggtgtccttgatctcgcagttggtgattctgaaagagtgaacagcccagtccaagtagaaagcgtgctcagccttgcggagtggcagaccttctcttaaagcagcctcgtcaatttggatgacctgcaaagaataatgatgaaataaatgagcagccataaactgtgcataaaactcttgattaaatgagaaaccataatgtaaaagtgccaacctgaataccagcagcctcaagatcctcaacctccttcttgattgcaagagcaatctggtagcaggtctcaaaccttggctggtcattcctgacaaaggaccagttaaggattgtgacaggaccagtcaacattcccttcattgggcgagatgtcatgctctgggcagtggtcgaccagaaaacggtcatggggttggggcggctcacatcaccatagatgatcggtggcttgacacaccttgatccataggattgcacccaaccattggcagtgaatgcaaaaccagagagctgctcaccgaagtactcaaccatatcgtttctctcaggctcgccatgcacaagcacatcgatgtcaagctcctcttggagcttaacaaccttgttgatttcctccttgatggcagtgacatactcctcctcagagatcttcttcgccttgtactcacggcggaccctcctgagctccacagtctgtgggaacaaccaattgtggttgtgggaaggactggaaggttcagct

SEQ ID NO: 16824 - DNA, 2869 bp, Setaria italica
  Peptide Sequence Number=SeqID_82798
tttttttttttgtaaaggctgaagcagctccttcagcatagcccattcaaagattcagctcgaaaacctggacgtaccacgtatccaagctaggcagacgctagacatcacaatggcaaccaaaacaaagttacagagcaacgctagtggaccattcatctaatagcaacagcaacgactggcttccagacaattttcttgcccaaagatcattaatacgagccgtaacacacctcagagttgcagatgaaacactgcagacatccactcggttttacaatacaagtacacgggaaactttgcctcaaaaccaccaaattcacgaagactaacacaggtatgagcagggtgcgataatcgtgccaagaaaaatactaatctaacccacagacgagcagatacacggtccatattattcaagacaaatggcttctttgatggcaccctccttgtaattaaacgaaaagccactggcagggacggttctcacttggtgctggcgagctgggtgcggatgagcttggcggcagagaccatgttggttagggcgggcttgacctccgtgtacttgcgggtcttgagaccacagtcagggttcacccagagggatgttggtttcgagcaccgcaagcatcttgttgatgcggtcggcaatttcctcagtggatgggatcctgggggagtggatgtcgtagacaccagggccaatgccggcgccgtacttcacaccctcacggaagacggagaggagcttctcatcggaccgtgagttctcaatggtgatcacatcagcgtccatgttgatgatggagtggatgatgtcgttgaagttggagtagcacatgtgggtgtggatctgggtggtgtccttgatctcgcagttggtgattctgaaagagtgaacagcccagtccaagtagaaagcgtgctcagccttgcggagtggcagaaccttctcttaaagcagcctcgtcaatttggatgacctgaataccagcagcctcaagatcctcaacctccttcttgattgcaagagcaatctggtagcaggtctcaaaccttggctggtcattcctgacaaaggaccagttaaggattgtgacaggaccagtcaacattcccttcattgggcgagatgtcatgctctgggcagtggtcgaccagaaaacggtcatggggttggggcggctcacatcaccatagatgatcggtggcttgacacaccttgatccataggattgcacccaaccattggcagtgaatgcaaaaccagagagctgctcaccgaagtactcaaccatatcgtttctctcaggctcgccatgcacaagcacatcgatgtcaagctcctcttggagcttaacaaccttgttgatttcctccttgatggcagtgacatactcctcctcagagatcttcttcgccttgtactcacggcggaccctcctgagctccacagtctgtgggaacgaaccaattgtggttgtgggaaggactggaaggttcagcttcttctgctgagcatccaatctagcactaacgttggtagcacggcggtggtcagagcccttgagagcagcagcagccttctgaacttcttcgtttgtcacacggggtgatgacttccttgacgcctgagcggcagcgtttgccgcaaagtaagcctcatccttttgaccagccaatgctttggcaagagcatcaacctcaaccaccttctgagcagcaaaagcaagccaagacttaatttcagcatcaagcttagtctcgttcacaagatccacagcagtgtgcatgagtgagcaagaagttgacacaacaagcttgtcctttccaacaacagcctcaagggactggagagtgctgagggatgcagcaagatcatcacgcccagatgttgcgcccatccacaacaccagcaaagaggtacttgccagccgggaaaccactcttgacaagatcaagagtctgggctccacgaacaaggtcaaaaccataagcagtaacaccgctcaaagatgtaagggtcttgtatgattctgcgggaacatcagcaaagtaagtctcaataagcacattcaatccagaaagggcggactcaagttctgtgtatgcagcggagaatgcagccaatttttgagaatcaaggtcaaggacaagggtgggctcatcaaactgaatccatgaagcaccagctgccttcaactcagcaatgacctccttgtagacagggaggatgccactaagaagggaaagaagagggaatccccttctccacacccttggcagccttcgagagcaacaagtatgagactggtccagtaagtactggcacggtatcaacgccaagcgccttagcctccttgtattcattaacagccttgtgggaagagtaggtgaacttggtgttagggcccaattcagggacaataaagtggtagttggtgtcaaaccacttggtcatctccatagcagggacagtggcattgcccctagccatcgagaagtaggtgtcaaacccaatctctcctccggtccatgagtagcgctctgggacagcgccgagcatggcggtggtgtcaaggacctggtcatagtaggagaaggtgttgctggggatgtacttgatcccagcatcagccatctgcttccagatgctggccctgaggtcggtggcgaccttctccaaatcctcagcggtgctcttgccatcccagaaagactcgagggcgaacttgagctccctcttggggcccatgcgcgggtatccaacaatgtgggacgccatctttccggggaggacgggagcggaagagaaggcgcggcagtgggcgacgataagggtagcggggggaggagagcgtcgtcg

SEQ ID NO: 16825 - DNA, 740 bp, Setaria italica
  Peptide Sequence Number=SeqID_82799
gaagtactgatggaaaactccagtccaaccaaagcacaaacggaagaggagaggaaagacacccgttgctaacaagaccaattcttgcaaggagaagcagacatgagaacccaagtgttcttcctcacattcgccttgctcgcagtgctcgcgcaatccagcaacaggcaccaccaccactcccatgttcagagcaaagggcatggagggggaggaggaggaggaggagagctagcgagccgggggaaggcggcggcgcgggcatggccgtgctgcgacaactgcggcgggtgcaccaagtcgatcccgccgctgtgccagtgcctggacgcggtgccccgcgggtgccaccctgcctgccaggactgcatcaagtccagcctcagcgccgatccgccggtgtaccagtgcatggaccgcgtccccaacttctgcgaccgccgctgcaccgccgccgccgcccactgaccggccggctgagcgaacgactgattgctgtggattatagatttttgtgtgtagagagagagagagacgaggaatctgttcgtctgatgagcaaccaaccaaaccaatcttgggaatttttttcttccttttgtttttttgttcttttgtcttgacactgctctttgccggctactactgcttggttgactgttcttggttgcgacttgcgaggagataagcacggtgaatcaccggaatttggaaaaaaaaatttgaactaaaaaaaaaag

SEQ ID NO: 16826 - DNA, 630 bp, Setaria italica
  Peptide Sequence Number=SeqID_82800
acgagatgcggggagtcggaggtccgctgctcaccatcggggacctcctcagcgacctcgccgtcgacggcggcgatgatcccctcgccgccggcggagatgcgtccataccctcctctctctcggcggagcagcaggcgggggaagccgacccgtccgatctcagccggctcttcgaggaacactacaaccatttgatgaaggcgctccaagagaacgatccctcgtggccatcgctgatgctgaagctatgcgctgcgttgaagactgcagataagctagtgagctgcgcgaacacgaatgccgaacggttggtggagaaggtgaaggcactggagggcgtcctcgagaagggagaccgcgcggtggcagagattgtagaaagtctccagaggtcaggcgtcgccaaggatcatcggagttcccaatcgaaatcagctagcaagtagcggcatattggtgtgctcgtgtttgtcatgtaaatgtgggctcttgtcactgatcctgggtattgaaaagagttgtatgcccatctttgtttttaactcctacagtctgcttgtgctttagcactgttggaatcttgttggaatgtgttttgtatttatctcgatacatgttgctcgtttc

SEQ ID NO: 16827 - DNA, 289 bp, Setaria italica
  Peptide Sequence Number=SeqID_82801
ttgtcgaaactcttggaaggtgctaaccagcatgttcctccacagctgctggacatggctgcacgaggtgctactggaggtccaagaaaccaggctactggaatgagtcgctgggatgggcctggtggtggtcgttttgaaccagctgttggtggccctgttggttatggtggagttagggagggccctggaggctttggcagtcgtgagggccctggagtcttcagcagtcttgaggcccaggcggatttggtggtcgagaaagcccaggcggtttgctggcagggaa

SEQ ID NO: 16828 - DNA, 508 bp, Setaria italica
  Peptide Sequence Number=SeqID_82802
cagagatcatctccagcagtacaacaccaaagccatacacgtcactcttcacatacagatggccggtagaaacatattctggagctgcatacccataggttcccatgactcttgttgtcacatgagactcctcgccatctggaccgtgtttggccaacccgaaatctgaaggctttgcgttgaagtgcgaatctagtaagatgtttgaagccttgaagtccctgtagatgatttgtctttctgatgaatgaagaaaagcaaggccacgagctgcaccgatgagaatcttcagcctgaggctccaaggcagaggctcgtaaaccgcccctcttcgaaacaggtggttctccaagctcccctttgccatgaactcgtacacgagtagtagctcgttgtcgtccatgcagtagcccaagagtttaacgagattgggatgtgaaatcctcccaaggaaattgacttcagactgccattgctccattccctgcacgctctcaggattgagcta

SEQ ID NO: 16829 - DNA, 314 bp, Setaria italica
  Peptide Sequence Number=SeqID_82803
agagcaatggcaaccatcagcgccgctggatccgccgccctcttcgctggtgcctccgtggccaggccagctcaggctcacggtaagctcatccatcatcttcgagatctggtgccagaaggccggcagccatctggccgcggcgtgtaaggcgtctcttgacatgagggaggctgctgtgcaaactgcagggctgcctcagctgagagcgagagccgacaaggtgcggtgcagcgcctgctcgaggcagcaggacggcagcggcaagggggcggcggctccggccgccggcgcgtcgtccctgctggccgtgg

SEQ ID NO: 16830 - DNA, 249 bp, Setaria italica
  Peptide Sequence Number=SeqID_82804
ctagaaccacacccagacaccagacctcgcgagtgagagcaatggcaaccatcagcgccgctggatccgccgccctcttcgctggtgcctccgtggccaggccagctcaggctcacgggctgcctcagctgagagcgagagccgacaaggtgcggtgcagcgcctgctcgaggcagcaggacggcagcggcaagggggcggcggctccggccgccggcgcgtcgtccctgctggccgtggcgagcgcga

SEQ ID NO: 16831 - DNA, 743 bp, Setaria italica
  Peptide Sequence Number=SeqID_82805
aaagtccaagtccctcaacacatatgcattattggtgtatgatataatgtatcaatcaacaatgttctgtgtaattagataaaaggagaagcaataaacagtttgtttcatttatctatagccagatgaaaaggatgaggaagacggcaaggacatccctccacatcctgcagaagccctgccttctcgtagtattcaatgctatcagacaatgtttcctctattgtccttggtttccagcccagattcttcagtttctccgacgtaattcgtgtgattatagatttaagatccgaatcattgtcacagtttacgcagttgtagttagggtgagttttcttcaaaatgttcagtagatcttttgtgctaactcgatctggtgcacagaggtatctcccagatgattccgctttctcgtataccaggagcaaagcatcagccacatcacggacattaactacatgccacagcaagttgttcattatagtaggacctccttaatataatcaagctaagagaattcagcagtgttacgtaaacttctgtagttaagcgatgtaaactattgtagtttagcgtgcatttaagaggaatgagtatgattcagcagaaccacgacaaaatagaaaataaaaacatacttgatttaatattagaattaacaatgaatagagatacctacagtcactgctgaaaagatatcagatgctagaagtttacatcagaaggtagagaatggttta

SEQ ID NO: 16832 - DNA, 525 bp, Setaria italica
  Peptide Sequence Number=SeqID_82806
attatggccatatttggatgtactagattaatcgttaccacaagctaaactttggctagctaaactttagcatatccatttggagatatgggtaatggatagatttaaaggctatgaaatatcacttttgctcttgtttctctcttcctctccataaaattaagggttattgacgctcgttattaacacacttttagtgctatttaactagtattttcatgcttaatcttatgctaacccgccacttggcacttgaaataatccattatatgtgttgtattttggagtatactgcattatgataggaaatacgacataatcaatggggtttgcataaagagcttaacggatatttggacatgggtcatcaagagaatccagcacgaggaaggagaggactaggagagctagaaagggcccagaccaatcgacctggttcttgggcccggtcagcctcccgtttcttcagcgtgacgtccacaacatctctaggtttttccatcgacaaatgacccagagacgccg

SEQ ID NO: 16833 - DNA, 561 bp, Setaria italica
  Peptide Sequence Number=SeqID_82807
attccaagcaaaggagaaaggaccacaaaagaaaacagagagaaaacagaaaagattacagactcagtgtagtacatcgcagttgccggagccctccctccccttgctgccttgcaagcaagagtttgtccatctaggggcctgcgtccctgcacctggtgatgctctcgcagccccgggtgtaggggttggcggtggtggagaccctgcagttgtagtacggcacaccggtcctggagcacggcaccacgtcgcccctcagcgcgtcgtagctaatgtatcgccggccgccggtcgcctcccacagcagccgccggtgcgcctccgagtccatctccatctccgccgcatccatgcccaggccgacgcagtggcctcccctgccatggagggcgagcaccagcatcagcaggagcgacgcggtcgcccatgccctggagagcgatatcagcttggtggttgccggcattgtgggagagactggctgagatctctctctctctttcttgttcagagtgtcatgaagatcttctctctctctctctctctctctctcctcct

SEQ ID NO: 16834 - DNA, 781 bp, Setaria italica
  Peptide Sequence Number=SeqID_82808
ccaacgccctctgtttcctgtgtgagttgtagcaccactcagaaaatgcatcaagctgaggttggagtaccaaacatgaaacaccacagtgataaagtgtgagccttgccagctagcgtgcttctccaaaaattttctggtcacagcaaagtacctgacttgcttccatgcatatctgcagctgaggtcttcctgtttcatctctcttgcactacagcaaagtccaagcctgcctccataacttactgcagctgagatgttgcttcctgtttcatctccattactcaaatgacgttttgacattctctgtctcatatgtagcagacaccaaatcttctcagcgtggtgtttcgtatgatgcctggagtatgttttcataatttgttgatgggcagtggaaggtgctaatgaacattgtacagtatcctgcttctggtgaagtccacagcccactattaagactgctccatcaaaatgaatgaagatcacataacttctagagactgttgattatacaaagacaccaattttggcttttatgcactgtggcaagattgcgcacacaactatggtggtgcggggttcaaaacagatttagaacagggccttccagcattaagagaagtgatctattgcagatcaacagggtcaggtagccgttcttgcaagtgttcttctatggaagagtaccaggagcacgggtcgaagatgcatcttgagattttccagctccaagaggtcctgccactgatctctgagttttcagcttcacagaagatgt

SEQ ID NO: 16835 - DNA, 632 bp, Setaria italica
  Peptide Sequence Number=SeqID_82809
ttttttgacaggtaattgatgcaatactttactgcctggtggggaatttcaccaacgaacggaacccatagaatgacaagtaagctgcaagccccagtgttagctctcagttgctcacagattaagtgaaaatcaccaaaaatcctgagtgtagtttgttttattacaattaggagtttaggacctagaaaagaaaatttggcttcatggtgggaataagtcgctgaaccagcttctcctgcctactcggtggacttgacgatgaagttctggcggctgatggggttcatgacaaccggtgggccggcagtgcgaggccaagcctggaatttggtgtctgttgctttaaaccactccttgtcagaaacagtcttggggatggtacctccaaatgccttcttgtccgaaacaaacgagtcacacaggtacgcaacggcaaaggatccgaccagtgagccaacaatgtagccagccgtcatttttgctcgtcgccgatcgaataccactacccaccggagctggacgagcacgaatcggaggagaggaagggagagcggctggctgatctcggacggagaagaaggcggcggctgtggaggaagagtccggtatgggaggggacaaggttgact

SEQ ID NO: 16836 - DNA, 545 bp, Setaria italica
  Peptide Sequence Number=SeqID_82810
ggcaagcctcttttgtatcaaacattatttatccttataaggttaaagttcttggaccaatcaatgcttcccgtgttatggctattttatccatgatgcttctatttacatatccatctatgacacatctcccaagaccatggttattaattgttctgaatatttcatcagcgctaaaagcaaatttggtgactactgtggtcacatcctctgtaattcttcagaataattctgtgcgtcaagatcaaagaggtattgcaaatggcttagcaaacacaatgatgtcattttccaaagccctcgctccagcaggagctggtattgtgttttcctgggcacaaaaacatcagcattccttcatctttccaggtgaccaaatggtgttcctctttttgggcattgtggtgtttatcgaattcatttggacattcaaaccattactagttgtgccagatcaattttgttcaacttgacctcctgttcataatattgagcattaggggtccaatatgagacggccgtctcatattggacccctaatgctc

SEQ ID NO: 16837 - DNA, 1599 bp, Setaria italica
  misc_feature (44)..(44): n is a, c, g, or t
  Peptide Sequence Number=SeqID_82811
tttttttttttttttgtttaccctagcaacatcgaaatgcaatnaacattgctgactgaactcagttaacagcagatacaattttacttgtcatatacatatgtgatatgaactttcctaggtacaccataaaatccaaagaaaacggcacccctcgcacctgctctcctgcctcatacgacgagcatgcacagtacatatgagctagtaaagtccactaacttgctagagatttcacatatacatgatcaacgaaacaaatttgcaagggaccagagaagaactagatcttcttcttgaagcccctccttgcagcagatacagatgacgaagctttcgccccccagcccaaaaggttatactactcgcatagcatcaagagcaatcagccttacaggtgtagcttcttcccttaccagaatgactgctcatgatgttatgttccccagcaaccctgcacccccttctcttttcttagagacctctctctaccctgtagcctcatgaacatatacttgcaaagaaacagctcgccaaatcgatctctaggccatgaaagcgtcgtcaatggcggcgaatgctctagcggaggatcccgccgagcggcgccggggcccagtagtcggcggcgttgtcccctccgaagtgcgatgtgcacgataccgggacgaggcacaggccccggctcctcaggtccttcttggcctcctcattcgcaccctgctgctcatcaggctggactgcaggctgctgtgctccagtgttgctattatggtttagcaactggccggggtattctgggaagagcccagggttcctttctcccatcggtccattttgcatggaggtcccgttgccgtggcccatgtaggggtagctgagagcctcaatttgactcaggaggaatctgatatagccaatggtctcttgcagtacagacgccgtgtcagtcttgccaaacggggaaacgatctggtgaagtgcagttattctatcccccagcctctctttcctcacctttagagtagattgtgctgaagaggaggcctgaaccctaggcttcttgatggctgaacctgttgcagtgctgttgcactcggatgagttatcagaatggtgatggtggctcctcatctccggcgccggcgcggtgtttgagaagtcgagcatgttgctgccgaggctggtggtgatgcacgacctaggagaggaggcctgcaggagcatctggctcagctgagacttggctcctcctgccgccggcatctcatggtcaccgccggcaaggtggctcccatagaagttgtaagcaggctgaggcatggcggagccctcctccttcaaagcagccatacacgcagcctgatccccccaactctctagcccctttgacaggagggctgcggtggcgctgtatcgctcatgatccccaactaatccccctagaagcatctggctccatgattctggcatgtggttctcctggccgccgccatcgtgcatacttggaagagaaccagctgcgccgttcatatgagctagctgtcccgaagaggtgtgtggaaactgctgggagaagagcaccgatggagaagacaa

SEQ ID NO: 16838 - DNA, 436 bp, Setaria italica
  Peptide Sequence Number=SeqID_82812
tggtgaagaaaatcgccacttcagcggaggctagtggtagaaacccaaaggagcattgtgatgctatttcaagttcatataagatgctctgggctgatttagacatagaatacgacaagtttatccgcacaactgattataagcatgaggctgttgtcaacgaattctattctagagtattaaacagtggtgacatttacagagctgactatgaaggactttattgtgtgagctgtgaggagtacaaggatgaaaaagagctagcggaaaacaatacgtgtcctgtgcatttgaagccttgtgtagcaagaaaagaagacaactatttctttgccttgtcaaaataccagcataagttggaagagctgctggcaaaaaatcctaattttgtaaggccgtcacatcgcttgaatgaggtccaaggctggattaaaag

SEQ ID NO: 16839 - DNA, 301 bp, Setaria italica
  Peptide Sequence Number=SeqID_82813
cgtccactcccgcggcacgcggtcctcctccagcacaacaaccccctcgtcgtcatcctcctcctcctcgtcctcctccccgatgctcggtatccagctcgcgctcgggctcctggtgtgctgcgggaagccacgcacgaccttggccgcctcccaaggcggcggcggcggcacggatctcgcggccgccgccgtcctcatgtaaccgtagccctcggcggcaccgtccgacgcgaagcccgagtcgtcgatgacgcccgggtacgcggcgaggcggctgttgcggtggaagcggttgccc

SEQ ID NO: 16840 - DNA, 328 bp, Setaria italica
  Peptide Sequence Number=SeqID_82814
atgtttagcatagcttcaatcccttaatatatgcagtgttttcttagaagattagtgtgacccggagctaaagatgtggctgtcccctcaaaatatctcattccttaaccgcaaacttcaatgcggaaaggtggacaatgaccccattacatattcatgaaacctcaaagcatgcaaatgtgcttaagagtttgaattttgaacaggaagacatcaagatattgcctgtagccttcttcgtaagcttgcaacgcaccagcccagtcaccacaagaatcaaagaacattgccaatgttcactttggctaatgcttgcccctcaagttcc

SEQ ID NO: 16841 - DNA, 328 bp, Setaria italica
  Peptide Sequence Number=SeqID_82815
gttgctgagcaggaggctctcgagcgacgtcaggttgccgagcacggcggccgggatggcgccggtcagcttgttattcgcggcatcgagcagccgaagcgcgtggcacgacgacatcgagtccggtatgggtcccgagatgttgttgctcgacaccttcagaacctccagcgacgcgcacgcgttgccgatgctatcggggatcgcgccggtgaggtggttcgacgagacgtcgaacacctcgagcccggcgatgccggcgacggcctccggtatcgacccggtgaggccgttgtacgacaagttgagcgtcgcgagccccgcgcag

SEQ ID NO: 16842 - DNA, 551 bp, Setaria italica
  Peptide Sequence Number=SeqID_82816
caggaaaataagtctgcatataggctccagtttgcagaatgaaatggtgcaggcaacggttcctgatgatcatgaggcaaatcaattccttaatagggattctcaagaaaatcattgtggagagggagataaaaagcatgatgttgaggtttctaatccgctttcctcgtcagaagtcgaatgcgtggcagaattcgcttcagtaaaaagtgaaaatctgcacatttcgcagtcaaatgagcttatagttattccagaagaggcgtggtcagattttgggaatataaaatttataccagaacaagaaggaaaacaccaactaagcaatggagtttatggtttcggtggcttgtacgctgctggtttgtcagcacaaaagacaaacgagaagcatgaaatagttgttgattataaggatatggatttctcatctgcaggttgcaacaaagctgcagattcagaagaaaataaatcgaatggtgctcctaaacaggaagatatgctgagtcctggcctgacagcacagcaggaaaaaggtgaacatggcaatt

SEQ ID NO: 16843 - DNA, 270 bp, Setaria italica
  Peptide Sequence Number=SeqID_82817
ctcacctctcaggacagtgactgaatcatgcgtaggggatgctaatgaaattaaggatttcagactacaaacatggaactggtgttgaagatgtttggaatcttgtaaaagtataggctctagttgctggattgcgatttgggtggaaggaaggcatacgcgtttgctcctgttttttttttttgaagaaacatacacgtttgctccttcgaccgctcaaaatattccagctgctataaaagcagatattgtagtcaacatacaatttta

SEQ ID NO: 16844 - DNA, 365 bp, Setaria italica
  Peptide Sequence Number=SeqID_82818
tcttcagagacaccaaagccaaaggcaccaccaccggcgtcctgcggcccccatcaccgctccccaacccctgtgctaagggatcccggtggccaacgccgcagctgctggttgagcgtcgactaggaacggtaacgccagctctgcccgtggtcgggaacggtgttccttctcacgcgagggagatagggcatcggtgccgtgttgggattcatgggctcccgcacctcgcctcctcacgactatcttcacatgcatgttgagcaactaaggaggcgacatcagtcattatcagaattgacttatgcaagggatgaagatgcaaaacttgagaccacaagggcaaggctgtcaaacatcctacg

SEQ ID NO: 16845 - DNA, 428 bp, Setaria italica
  Peptide Sequence Number=SeqID_82819
agttcaagcggtgctgccgttttgaacgttgagcaactaaggaggcgccatcactcattatcggaattgacttatgcaagggatgaagatgcaaaacttgagaccacaagggcaaggctgtcaaacatcctcaaaaggcatgaagacttgaaagagcgcctttcacgggattctgataagctgatttttgagcgtctgcagaaagaatttgaggctgctcgagctgctcaaactgaagaaatttcaatagatgatgatgattggaatgatggtttgctagctaccatccgtgagaaggtccatatggaggctgacaggaaggccatggctaaccaagtaaatgttccagcagatcttccatttcaatcaaagactacatataggattagaaataaggttatctattgcttggtattggtagtcgtagt

SEQ ID NO: 16846 - DNA, 868 bp, Setaria italica
  misc_feature (828)..(868): n is a, c, g, or t
  Peptide Sequence Number=SeqID_82820
ttttaaggttttaagtttttacttttttacttttttaattttttggggtttaaaccttaaaattttggtcgtaacttgtttcctactagttctttcctttactaattgtgatagagtttgtcttggaggattttgagtgcaagattacagtcagtatccgatattcagatctacttctgaccctgccgagtcaggcaagggtcttggcttggccacttcgctcgtcaaagagaatatccacacgaagcagcagcgcgtcagctgtgcagctggtaccatttcgcctttcatacgccgaggaagcactcaagaccttgtgcctaccagaagcctacgcggacattgtgctggacctacccaatgctctgaagaggagcttttcctctcagcacagcgactgaatcttgtggaggatgctgatgagaccttaaggtttctagactacaacatggaacatgtgtttaaagatgttcgtaagtgttagtataggctctgccgctctagtttttgactgacttcaatcctgtggaagcaccaagactgctgcagattgaagatgcaaacccagaggaggacgcatggcgtgacgcctgaatatgggttgtcaggatgtaaaatcttttgcctggagagaatgagagggggtctgcagtatcttgcatgttaaaactttgtaggtgccttccgtgcatgacttgtaactgggggcgttggttttccttctgtgcgaggtcgtttgcctaggtacccagattctgaaatttccgttcaaaacttcattggaaattggggggttggtccttcgtatttctaaaaggtaaaaaaaannnnnnnnnnnnnnnnnnnnnnnnnnnnnnnnnnnnnnnnn

SEQ ID NO: 16847 - DNA, 1098 bp, Setaria italica
  Peptide Sequence Number=SeqID_82821
tgtagtctattctttctagtaaagtaattttgtaggtcttgtcttcgtagtcttgcttcaaactcggggattctgataagctgatttttgagcatcttcagaaagaatttgaggctgctcgagctgctcaaactgaagagatttcaatagatgatgatgagtggaatgatggtttgctggctactatccgtgagaaggtccatatggaggctgacaggaaggccatggctaaccaagtaaatgttccagcagatcttccatttcaatcaaagactacatataggattagaaataaggttatctattgcttggatggagcgagaattggcatacagtatgagacattctttgctggtgagccttgtgaaatatttcattgtgttttggaaagcaagtcattcctggaaaagatgactgtgattgagcacaccttacctttctttctgcccatacgcgaattggaaagtgatctcctgtcatctaatgccattaaatttattgatcaccttgaagaaattttacaggcttatattgacaggagagaacaggttcggcttatcaaggagctctatgggaaccaaattggcgaactgttccacagtcttccttacaatgtgatagagtttgtcttggaggattttgagtgcaagattacagtcagtatccgatattcagatctacttctgaccctgccgagtcaggcaagggtcttggcttggccacttcgctcgtccaagagaatatccacacgaagcagcagtgcgtcagctgcacagccggtaccatttcacctttcatacgctgaggaagcactcaagacattgtgtctaccagaagcttacgcggacattgtgctggacctaccccatgctctcaagaggattctcacctctcaggacagtgactgaatcatgcgtaggggatgctaatgaaattaaggatttcagactacaaacatggaactggtgttgaagatgtttggaatcttgtaaaagtataggctctagttgctggattgcggagttctttttgactgacttcaatcctgtggaaagcaaccaagactgctgcagattgaagatgcaaacccagaggagg

SEQ ID NO: 16848 - DNA, 535 bp, Setaria italica
  Peptide Sequence Number=SeqID_82822
aaaagctgagcattacagcagttgggaagcgcgagaagcttcttaatgttgttaaaatcctgttacccgctatcttcctgtggtgcatggaaattggcctttcatttagcgctgacaagtcagtcaacttatttgactatgttgccaaatccagtgatgatgaaccccttgtttgtggttggtgccatggcccatggaaagatcgacaaggaatacactgatgattacatccaaagtaagtagtgatatcttgaaacaataaaactagcgatgctgagaagtaagatcaactcagtggtcagggtgacattctatatgtgttaattagttctgcgcttgcgcatgcacgtgtgcaggattatgtcataggtgtccacacagccttgtaattttactatccagatgatttgtcaaaaactttctaattccaggattttttctcttagaaagtttcaactcagcagcaactagccttaacttggtagcaacttggaagtacgaccagtttgttttattaaatttctattattaatta

SEQ ID NO: 16849 - DNA, 1006 bp, Setaria italica
  misc_feature (979)..(1006): n is a, c, g, or t
  Peptide Sequence Number=SeqID_82823
ggtggcgcgggaggaggaggagcacgcggcggtggaggggctcccggtcgtgcccaggccggtggacgggaagcggcggcccggcgcaatcttcgtgctcgagagggcctgcctcgaggttggcaaagtcggcaagactatgcaaatcttgaactcagatgatcatgctaattatttgaggaagcagaatcgcaatcctgctgactataggcctgatatcattcatcaggctctactggcaatatttgacagccctttaactaaagctggaaggttacaagctgtttatgtgaggactgaaaagggagtattgtttgaaatcaaaccttatgtccgcatgccacgaacatttaagcgtttttgtggtttaatgtcacaattgttgcaaaagctgagcattacagcagttgggaagcgcgagaaacttcttaatgttgttaaaaatcctgttacccgctatcttcctgttggtgcacggaaagttggcctttcatttagcgctgagaagtcagtcaacttgtttgactatgttgctaaatccagtgatgatgaacctcttgtgtttgtggttggtgccatggcccatggaaagattgacaaggaatacacagatgactacatccaaatttgcaactaccctctaagtgctgcctgctgtttaaatcggatatgtagcgcactggagcagaagtggaacatccagtgaacggaagttttgaaagagacatctgtgtactcagtagctagtagcattattttttttccatgttacatgtactgccttttttatccatacctcaagctccagatgtagaaatatggccattagatgctttggtgttgcatggtgttgtgttttagacattaacgctggtgcttgcgatacttgcccttaaactgggctgatgaagacattttagtgaaaagcagactgttacgtgattgtacttggttcaattcaacacgtgcatctcagttnnnnnnnnnnnnnnnnnnnnnnnnnnnn

SEQ ID NO: 16850 - DNA, 263 bp, Setaria italica
  Peptide Sequence Number=SeqID_82824
aaggcggcgacggcgcgctcctcctcggcgtcgcggacgtcctcgatggagatggccgccggcgggaagcggaagtcgacgcgccgcctcccgcgcttcttgagcgcgtggatggccttgcgccgcagcgagccgatcttgcggcgccgccgctcgtcctccgagttgccgtcgcacagcgatatctcgatgtcctccgcatggctcactgacatcttcgtcgacaaatttgcgttccacaatagctcagctcagacgtcgcg

SEQ ID NO: 16851 - DNA, 835 bp, Setaria italica
  Peptide Sequence Number=SeqID_82825
gcgtcgtacgtacgaccacgcggttgccccgcgtcatgttggagcggttcgccaaggagcacctcggcgcacacgaggtggtgggctgcgagctcgagtacagccgcctcaggcggtgcacggggctcctcaggggcggcggcgacgaggccgtcgcgggccgcgtccgcacgctgttcgccggcggcaaccggccggacctcggcatcggccggtcagagatggcgcgctccttcttgccattctgcaaggagcagctcaagccgccgttcgccgctgggggcgccgcgacgacggacgccccgccgttccggccggtcatcttccacgacggccgcctagtgtgccgtcccacgccgttcatgtccctcgtcatcctcctctggctgcccctcggcgcgctggtcgccttcgttcgcatcgccgtcggcctcatggtgcccatctggaccatcccccacatcgcgcccatcttcggcggcgccatcatcacgcacggccgcgcgcctgcccccgtccgcgccgcccgcgacgacgacggtggcggctcgccgtcgggcgtgctcttcgtgtgcacgcaccgcacgctcatggaccccgtggtccttgccaccgtgctcgggcgccgcgtggccgccgtgacctactccatctcccggctctcggaggtcctgtccccgatcccgactgtgcggctgacccgcgaccgggacgtggacgcggcgcggatgcgcgccgagctggcccggggcgacgtggccgtgtgccccgagggcaccacgtgccgggagcccttcctgctccgcttctcggcgctgttcgcggagctcagcga

SEQ ID NO: 16852 - DNA, 1844 bp, Setaria italica
  Peptide Sequence Number=SeqID_82826
ttttttttttttttttttatttttttgtgaaatgatatataaagcattccttcgctcataaccatgctatatatcacgataaccacagttatacctgacttaaacatagccacacgagttaaggtagcaaataccacgtagtcgatgttcaggcgtaacactacctgacggctagactgaaaagccaaatgcaaaaggcatttgtgatacaaacttgctactataaacaactttgagcaggcaattagcatggaccaatcaacagccgaccccccacaaatgcggaaaatctcacaccaagacttgatgtagggaactgaaaccagctagaccagctcccagtccccgtcaatgaaggggatgctgtcgtctgagcggtccggccgaaacatgtcgacaacaatgtcatccagaccaccactgagtcccctttgcagcctacttgtccccatcagatcgttgttatagtttagctgactattaacagcttgctgatcaattctgccatcttgcaaagggggaacaccacctgaattaccaccatccagtgtctgcctcggaaccatagaattgtctaggcgaaggtttggcaaagaagagttgatgcctgaattactaagcgcaaggttgttattcagcatgtctcttgagttggtgctgcttctgtatgcgaatggcaccgcttcctgattgaagggcattggaagaccgttactagctagtgacgctacctggctctgcatttcattgcccagcaaaggaatctgactggatgcttctgtaaaacttgagagaggctcaagcttggggccatttgcacgcaggtttggttggggcatgctgtccttctgaccaagttcatgaatgttcgatgatgaaactgcagttggccaggtggtgttgcatcttccaaggtctggaaactggggagactcaccaacaaatgagttaaatgggtcggcagaagaagagtgcatgcgaccaaggtgttgctggttgcttggctcaagagactgtaatggcaagttattcgttggaaccaatgctgtgctgtttgatatatttggaaaagagttaccggaaggaccagtaggaaagcatttgctactatcctgcagtggcatatgagcacccctgatcaggttaccactgttcatcccaccaacattgcccaaggaagtgctcatattattctgggtgtgtccaatctgaagtggctgcgaaggcagcaaaccatgcatcccaaatgcaggagagttcatccttgcaagaaggttgtttgactgtgaatggttagtggttgggactggccgatatctcccatatgcgttgtagtgcctgaaggcttcgagccccatgttaacataagcagggttccttcctccaaatgcagcagttagattggcctgccgactcgcatcagcactaagtcttttcagatacagccgatacttctgcaaatgactcgcaacattctcccttgtgatgttctcaacattcatgagatccaatattttcttcggaacagccttgtcaatgccaagctggttcacagcagccacgaactttcggtgcaactcaacagaccacacaacccgtggcttcttctgggttgaggagtctccattctcattactgtcatcagaatcatcaccgtcgtctccattgtcatccctacccttgcgtgaagttctcttgttgcgattgacgccaccattgtcaccttcagcactagccaactgcaacttcttgtcagaatcatcgttatcattgccatggttcttggcatcagaactcttccgcctaaccacatgctgccatattgtcctcaactgctcaatacg

SEQ ID NO: 16853 - DNA, 689 bp, Setaria italica
  Peptide Sequence Number=SeqID_82827
taaaaagaaaaaagaaaaacaaaaaaactaaaagaaacctaagaaacgggaacaataataaatacggaaagaagttagttactaacccaatcccaaactgcaggccttcatataatataagtattcaaccagaggttatgttgtatgatcaatggaaggatcttaagacagactcaaagagtggactctcaacatggattaaaggtgcattttactggaagcaaaagtgacatgcaagattcagtactccagaatctacattctattctcagcacatcgcctatgtgggacaggttggaactcaaaggagacaaaaatgttcttggtgaattcatcgagttcaaaggcaggcatgaggacattcaacttctcaaaaatcttaagaggtcaaaagtcagtcgattcatcatccagaagtcaactctctttggtggatttggtaggtcacgagttcaaatattgtattctcctcgtgattatcgagctgaggggacttcatcttcagaatggaaagagatttctgtgaagcaatacacagagattgttttccagccattgcactccaagaaagttcggaaattcaagctgtcaagtgttgtttctgtcacactgagtgcctagctaagtctagtaaattctttaagttctttgttcggtttcttttttcttttgtttgtttattttatttt

SEQ ID NO: 16854 - DNA, 618 bp, Setaria italica
  Peptide Sequence Number=SeqID_82828
gatggtggtggggattaagaacttctctggctttgttgaggctgacaaggatgggaattggtcttgtccaactgacaagaagcgtaagcaagagataattccaaacccagtacgtgacttctgcactaccttttctgcatattcttcgacaacttcatggcacggcagaatgttattgagtcacacatgagttgttattaactttgtgcagcggagaaccatgtcgacataattgagtgttgcaataagacgatagatatgatgtcgcaattgttgatatctttcactggatatctgctgtttttatagtgttattgtggcaatggaatgctcgagttgtgtatatctactgttgtgaagggagattctttgttacaaatattcttgataataagctttagtttccatagtccctctggtctgagttgcattcctatcttttgatccgctgcattttgttctttaggtacaagaagtcaacagacttgctgctaatcttcaatcctacttggagcaaaggggagcaaaactgcctgacgggcatataatcggaagagttgttctacccaatcccaactgcaggccttcatataatataagtattcaaccagaggttat

SEQ ID NO: 16855 - DNA, 1653 bp, Setaria italica
  Peptide Sequence Number=SeqID_82829
aagtaaccctaactaaggtaactaagaagttagacaattacctaatacttttagaataccgactagcattttgttctttaggaaaaaggacgcgctgcactgaaagaacacaaacgcggtgactgaaattcttgcttagcgcttaagattccaccccggccggacactccatcgaaattcagaacacgtctggccagcaagattgaaattctaattccaatctagcggaggggaaggcgaaacaaggcagaaattgctggaccggaggtgaggtgaggttcgctaatcgctgtgttgaaagagcagaccgagtcgttcgcttcagttcgttcctcctcttctctgctgccacaaactgcccggaaacagtgaaacatctcgaagggggagggcccaggcgagatcgaagccgccacccgccttcacctccgggaccggggaaaagggcggcggcgatgtgggtggagatcctgtgcggcctggtggcctacaaggtcatccgccgcttcttcttcgacgatgacgacgcttcctacctcgccgacctcgactcctcccactccgacctctgcttcgccgtcgcctccaggttagagaagctctacgccggccgatgcttcgtcggcctccgcatccccgaccccgacgccggcgagcgccagcacatcgatgtcgtcctcgtcaccaagagggaggtgatggtggtggggattaagaacttctctggctttgttgaggctgacaaggatgggaattggtcttgtccaactgacaagaagcgtaagcaagagataattccaaacccagtacaagaagtcaacagacttgctgctaatcttcaatcctacttggagcaaaggggagcaaaactgcctgacgggcatataatcggaagagttgttctacccaatcccaactgcaggccttcatataatataagtattcaaccagaggttatgttgtatgatcaatggaaggatcttaagacagactcaaagagtggactctcaacatggattaaaggtgcatttactggaagcaaaagtgacatgcaagattcagtactccagaatctacattctattctcagcacatcgcctatgtgggacaggttggaactcaaaggagacaaaaatgttcttggtgaattcatcgagttcaaaggcaggcatgaggacattcaacttctcaaaaatcttaagaggtcaaaagtcagtcgattcatcatccagaagtcaactctctttggtggatttggtaggtcacgagttcaaatattgtattctcctcgtgattatcgagctgaggggacttcatcttcagaatggaaagagatttctgtgaagcaatacacagagattgttttccagccattgcactccaagaaagttcggaaattcaagctgtcaagtgttgtttctgtcacactgagtgcctagcaagcagaaatcttaagctgcggcttttcttgtgtacttattttcttcccgtgcaactaactggaattgtgcttttctgtttccacctgtaattatgtgtgatgggtgtgataatgcggaggaaagtgacttgtagcaacgcctcagtggaataaacttgagtacttgactaaaattgttgcctgactaaaaaaaaaaacaaaaaaaaactaaa

SEQ ID NO: 16856 - DNA, 507 bp, Setaria italica
  Peptide Sequence Number=SeqID_82830
aatggagagaaagttgttgtcacagatagcctgttcagcatggatggtgattttgctccattccctgaacttgtcaaattacgcagaaagtatgggtttttgttggtcatcgatgatgctcatgggacacttgtttgtggtgagaatggtggtggtgcagctgaactgtttgaaatgtgaaaatgacattgacattagtgttggcaccttaagcaaagctgctggctgccaaggtggttttatagcatgcaggggataacttgtttcgccaaataccggaatgtcagtagtaaacactttttttatatgaaaaaacagtaggagaatcatctctatttgctctatgaataacagagcactagatggaagaatttgattcaatcacgaggtcgctcattcatattttcgactgctttgccagtgccagtagttgcttctgtgcatgtctacgtcggtctctcaaggaaggagagatggcgaagatcagcagttctggaggcatgtgca

SEQ ID NO: 16857 - DNA, 369 bp, Setaria italica
  Peptide Sequence Number=SeqID_82831
tttgaatgtgaaaatgacattgacattagtgttggcaccttaagcaaagctgctggctgccaaggtggttttatagcatgcaggtaatgtattcaaatgctcatatttcatttattagaaaatgaaattcacctgagcattaccgtatattaaactgttggaatttagcagatctgtctaaaaattgaggctgcacgaaatatgtgagacaatatattaatagaacaatatgcagagaaatgtgagaatcaggttataacatgtaactgcaaagtcatgaattcatagattttggtacctgatttctgtattactgaatccattcagcaccagtgcaccaccatgctgccagtctgagaacttactgac

SEQ ID NO: 16858 - DNA, 1046 bp, Setaria italica
  Peptide Sequence Number=SeqID_82832
ggaggaggaggcggcggcggcaacagtagccgcaccgatctcctcgctgccgggcggaagaagctgcaacagttccggaagaagaaggggaagcgggagcccgggaagaaggcggcggaagccgacgccgacgcggaggccgaggagggggcggccaaggcggaggagtccaccgtgcccgagccgaaatcgcctgtcgggctgaagttcctcgccggggtgggcggcagcagcactccgtttgaggaagcggagacgtcacaggcggagcaatgcaatggcgaggggcctggggctgtggagtccggctctgtggagaatgctgatgcagtgcgagaacaggagacggcagctgatggctctgatgcgcataatgctggtactagtgagcagggcgtttcggagcagcatgaaagccaggcagctgatggtgaggatctagcaatccaggctaccagtggagacggcagtggtgatcttgtggaaggagctcagctgggtgaggtgcatgttgatagaaactgccagatatgactttgaaggataacatggagttggatgcttcttctgaacgtgatggagacggtgatgattgcaatcaacttggggaacaccagcaggtggaaatggagcctgttgaaaagccaacaagctctgattccgaagaagtcgccgaggtgccaattccttctcaagacactggagctgataataataatgatgaaggagctcaagaaatgttgacagatgtttctaggattccattagatggagatatacaacatgacatcgagcccactgtttctgctgaaatagttgctgcgactgcacttgaagaagagttgactgttgcagcttcacatgagattcctgagagtactgcgggaagaggcactgaggaggaaactgatggagtgggtagggaagctgttgaagaaaatccaagtacaacacatgtaactgatgaagatttgagtgtacaggccaagccaacagggcagtggatactccactttgtgaacaagatggtgatccagctttattag

SEQ ID NO: 16859 - DNA, 863 bp, Setaria italica
  Peptide Sequence Number=SeqID_82833
ctccgctacagctagagctagcacactcgactttgcagccgttggatgagccgatccaatggtccacaaacagcccaggtagccctgtcttcttctatcccgctcccgcaggctcgatccgccgccgccgccgcccaacgcgctcccgagtcccgaccgccgttggccagcataggacgacgccggcgagccaccgcgacaagcccaggtgcacaagctggcctccggcttctcatctttgaactccaacaaagcacgccatcgctcccacccctcacttcttccccgtctctggccgctctctgccgccggatccactgccgccgcagtaatccgttgactccccggccctaaccaacccaaccggcctcctccacctccgccgggccggcctgccagcggcggcctttcccctataaccaccaccactcccagaaggaacccccatccccaaatcccaaaccccgaacactaaccctcacagtcacaggagagcagccggagttggggaagacgtggatcgttgattgctctaaaaattcgggtgctggccatggagaagaagaccgtcgttctgtacccgggcctcgccgttagccacttcgtccccatggtgaagctcgcggacgtcctgctagaggaaggctacgccgtagtggtcgcgctcatcgacccaaccgtgaaaggagacatcgccctggccgccgtcgtcgaccgtgccgccgcctccatgccgtccgtggccttccacaagctcccacggaaccaggactcccccgccgttgtccacgacggcaacttcgtcgtcaggtacttcgacctcgtgcgccgctaccaccagcacctccatggcttcctcctgt

SEQ ID NO: 16860 - DNA, 317 bp, Setaria italica
  Peptide Sequence Number=SeqID_82834
caaagcgccgcaatcgggaggagctgagcaaggccttgatgcactaccgccgtatccgtgattacatagggcagcggaaagactgcggcctcacgcccgagctggagcaggactacctcgacctcatctccgcctcccgaggttgtgaaagtgtacaatgttttctgtctttgccaattcctcgatttgcttcacactgtcctactgacaactcgaggcagcgactaaagttaccatcaacatgtacaaatgcaacatggccactgtaacaggagggaagggttcgagtggtattgcatacaagctctaactgtctt

SEQ ID NO: 16861 - DNA, 433 bp, Setaria italica
  Peptide Sequence Number=SeqID_82835
ggttgctaagatggtgccatcaccagatttgatcgtgcgctttagtgtgtccagtgttggagcaatgcattctccatatatgatgacccgcatcccataaaaagcaccatggccagtacgcagcttcagttggcgccatttccttggagcatccaagctaattgtatcaccgctgttgaggccatcaccatgccactcaaatggctcttcctctaagaacttgccagcctcattgcaagcagtcaagtaatcaggcctgagtatccacctgccagcagctgcagctgcaaagaatttttcagtcctgcggagctcagtggtgacaagatgtgttgcttggaaacccagtgatgtgaattgcctctgcctttccaacgtctaagggaactcattcggatttcatcaaaacataaaagaaaaaggaagaatgatt

SEQ ID NO: 16862 - DNA, 346 bp, Setaria italica
  Peptide Sequence Number=SeqID_82836
acggtaaccacatccaatgtttagcaagctgaaataacagtaaccagatcatgcttaattcccccctatcactattaatttccattaaaacgttcatgcaactacgatgtaagggtcatctttattaccctgatattagcatcaatataaaacccagtatttcacaatgtacaccagaacttaatacattcattaatatgagcatgccaacaaagtagaactatcaacaaaaaaaaatgagcatgccttccatgtattcacggaggtcaggtctctaaatagtgattgaacagaggacacatcctttgacccttgaagactcattggacgcattattatacagttc

SEQ ID NO: 16863 - DNA, 247 bp, Setaria italica
  Peptide Sequence Number=SeqID_82837
tggtggctcgtcatcacaatcaccgccattgtcctgtctctcaaagaatgcatgccgaaccaggctctccttgagtgtatacggagtaatcttgagattgcggccgttgcaagggaaactttcccgcagagtcccgttcatgtcgtagtgcagcagcttctgctctggggtgacaaccacaaccccctcctccgacatgaagaacacgcgccaggactcgtcgaagacgaaggtgctgacctccacc

SEQ ID NO: 16864 - DNA, 794 bp, Setaria italica
  Peptide Sequence Number=SeqID_82838
cggccaccacgtccggcggcggcaacgaacgcagctcctcgtcggcgtcgtcgccgccgcgggccgacctgaccagcgagaacgagcagctcaagaaggacaaccgcacgctggcgaccgagctggcgcaggcgcgccggcaatgcgaggagctcctgggcttcctctcccgcttcctcgacgtccggcagctcgacctcgggatgctcatgcaggaagacgtggtccgagcggcggccggggacgcgcaccagcagtgccgcagcgcggtggccgaccagctggagtgcggcggcgaggaggggaagagcgtgaagctgttcggggtgctcctcaaggacgccgcgaggaagaggggacggtgcgaggaggcggcggccagcgagcggccaatcaagatgatcaggatcggcgagccatgggtcggcgtgccgtcgtcgggcccgggccggttcggcggtgagaactaaggtctggtctctggaacagatgcgcgcgcgctccgcggcgggccgcgacattgccggctttacagcgagcgcgtgccatgtatcgtgcaagacgtgaggttgatggtaaaggatgattccatcgatcaaccaagtaatcaaagccagtgctgtggtaaaactgtaaaggcagaacacaggacgccggagatatgcgcgtaaggcgtgtgaagaattaatcatgggatgctttataggtaggaagattgaaagtagtagagacgagagctagaaggagccctgtgtgttcagaatggatcattatctattttccaagttaaagta

SEQ ID NO: 16865 - DNA, 405 bp, Setaria italica
  Peptide Sequence Number=SeqID_82839
cgctggactaaatagtacggtttataatctagtaataagcagtagtgatagttagaacggtgatgggctgggccgggccgggctacacttggataaagggctggcacgggctcggcacgacttgggctgcgagggcccggagcttcatgtccttgagggcagggtcctcgaggaggaggaccttgtccttgtccctcaccccaaccatgtggaggtggtcggtgtcctccctctccttgcccctgaacagcagcctctgctccctgggctctagaccagtcagcatggacagcattaccttcagctccccaaaagtggaggtggctccgatggacacatcatgccaggagaagccggtggagaccctgaccacgatcacctcctcgccgcccttcccactccctc

SEQ ID NO: 16866 - DNA, 807 bp, Setaria italica
  Peptide Sequence Number=SeqID_82840
ctcatctccgactggagagacacgcagtcatgcaggattttgaaagaaatggccaattcttcgcagcatcggcctgctgtccggagcacgtctccacggcctaaggccgtgcacagcagcattggtataagccttaaaaaggtgaggctgatgcaggccagaattgaagaatttgttaggcatatgtcagatcttcttcggattgagcgagatgtggagctggagtttacacaggaggagctgaatgcaactcccatgctagatgatgattccgagccacccaagccagtcgagtacctggtgagccatggacaagctcagcaggagcagtgcgacaccatttgcaacttgaatgtgatcagcagttccactgggttgggaggcctgcatttggtcctgttcagagttgaaggtgggcataagctgcctccaactacattgtctcctggagacatggtttgtgtgagaacatgtaatagccgtggtgagggtgccacttcttgcaagcaaggctttgtttataattttggggaggatggttgtagcataaccgtagctcttgaatcacgacacggtgacgccaccttctctaggctatttggaaaaagtgtgcgaattgaccggattcagggattggctgatgcccttacatatgagcgtaaccttgaagcactattgcttctccaaaggaacggtctacaggaagataatgtttccattggcgtggtggcaacactgtttggggacagtaaagatgtggtgaagatggcaaagaataacctgactgactgggatgaatcaggtgga

SEQ ID NO: 16867 - DNA, 330 bp, Setaria italica
  misc_feature (5)..(5): n is a, c, g, or t
  Peptide Sequence Number=SeqID_82841
caacncggggtgctggtacaagttcctttcagctgccagcgcgttaatcctgccgggccggccggccagctagatcacaagaaccatgaaaaatgaacgtcccagtcaatgtctgacaagtaattgtggactccatttattccgatgcgggtacgacgacgagacctgttcgcggctggtcgcagcccctccctaggcggcggcggaggggagtcgtctgggcaccgtcgggtcgcggcgggcgccgtcgccggcgggtggaggttgggggggaaccgggaacgctggaccggggcgacgcgggcctgtgaaggctgggccaagttaaga

SEQ ID NO: 16868 - DNA, 739 bp, Setaria italica
  misc_feature (1)..(46): n is a, c, g, or t
  misc_feature (716)..(716): n is a, c, g, or t
  Peptide Sequence Number=SeqID_82842
nnnnnnnnnnnnnnnnnnnnnnnnnnnnnnnnnnnnnnnnnnnnnnttttttttttttaggttattgtacgaggaaccacaaccaaccaaagctagaatgaaaaaaatcgaacacatactatatctgtagctacattttggttaaaaacgtgtacccaaatttgcatcgaagacgactaaaattcaggtagctttaacatacaccaatatccacaactgagctaaacagactccatagcctaagattaggataggcttcattcagccgctgttggcagaagcagaaccactgaaaaccactcttctgatggtacaacgtgttgactaggcaacgcggggtgctggtacaagttcctttcagctgccagcgcgttaatcctgccgggccggccggccagctagatcacaagaaccatgaaaaatgaacgtcccagtcaatgtctgacaagtaattgtggactccatttattcctgctcataaacaacaatgaaaactatcagtcttcaataaatgtcttattatgttctacagaaaattcacaaaacagctaattcacggaaacgtccaataaacttttgacgctatgaaacgaataatagaaatatccaggaaactggccaaaaagtaaccaaacattcctcttgaataatttcaacctccttgttccaatctgatcaccagtctaagtgaaataaggcacgtagcatgatcccanatgtataatctcgtactaaattc

SEQ ID NO: 16869 - DNA, 478 bp, Setaria italica
  misc_feature (179)..(179): n is a, c, g, or t
  Peptide Sequence Number=SeqID_82843
tttgcaagggatctttgctttccagactcccggtctcatttctggttacctgttaatacactgattttgtgtttaactcacaccactgctccttttattccgtagcccttgatccttatccacagaacagctagtcgccagaatccggcactatttgcattttcacatcagcgtaaggnttactccattgcacacaccaaaaaacaaaagggaaaacgaacaccaaacaataccgcctacacaactcccttttttccaattgccagagatacatgctctctcttttcttttcttttcttttctttcttttcatacacatgtttccgtaaacaatatgcacttagacacactttggatcaaaatgctaggacataatccatgttacaaaccgcttgatggcataatgttacacgacaaagtgactaaatcactccagtctccactaacagttaacacgactacgctggggccccttcct

SEQ ID NO: 16870 - DNA, 293 bp, Setaria italica
  Peptide Sequence Number=SeqID_82844
tgtattccatcttactcataagttgctgattattccagcaggtacaccaaattataaatattcccaactcctttagaacgacgtgaatttcgatccataatgaggcgaacatcccggacctttccagccctagaaaagaactcgtacacgtctctttcatctgccttcaaagataactggtaagcaaacacagttctctgatctctttcaggatcaacttcaggttccagctgtgactgaccaagccggtatgtacacaacgtattccgtctcaaagtacaggtccaacaatt

SEQ ID NO: 16871 - DNA, 685 bp, Setaria italica
  misc_feature (672)..(672): n is a, c, g, or t
  Peptide Sequence Number=SeqID_82845
tattcgttcttgtccctacttagtctttgggtaactttctattttctattacttgcttggggcgtcatgaaagttgctgtaatcatcttccccgcaaaccatcttccgtgaagtgctttctgtgcactcatagctgctgttatgctatcaaaccgaaggtacacaaaacctgcagtatttttgtctacaaaaatgtgctttaattggccaaacttggaacattcgtcctgaacatcatccctaatatccaaatcaaaatcaggatccgtctctacagctggatcaacatattcttcagcaataagcattcactaggtggagccaactcaatagacggggtagaaattggaagagttgccccaggaattgaaccaagaccaggcacggtagggtgcagaacaggagctgtagctggagcagcaccaaggacagatacagctggtattccaaccggagtattcaaactagcagtgcccatcccaccagccaaacttgacaagctagatatatatggaaacagcgttgctgtagtggtggatgaatcctggttgtaatgccactccggtctaatttctgcataagaagtgctctggaactagcattcagtgccaagcctccaccttcatcatcatcaaaatctccagtagttgctccactaacttgcatacccgnttggtcagtcaca

SEQ ID NO: 16872 - DNA, 582 bp, Setaria italica
  Peptide Sequence Number=SeqID_82846
caacaggaaaccctatgttttcaataatatgaaactgtgccagttaattggagtgtttttttgttgttgcacaaaatttacctattcagcatatcaagccaagtcaagaaataaaaggaacgaaggaaagaccgcaatattgctccctccatgctaaaaacagaagtgcagggctatgcaccgagaatacacgctgtataacagtgtaagttgctaattgttattagtattagtataggtactcacccaactcctttagaacgacgtgaatttcgatccataatgaggcgaacatcccggacctttccagccctagaaaagaactcgtacacgtctctttcatctgccttcaaagataactggtaagcaaacacagttctctgatctctttcaggatcaacttcaggttccgcagcctcctctttcctacgtctgacatcgcggtcacggtagcggtcacgctcttcgtcatcacgccgccgctccgcatctccatcgccacttccctctcgagcaaaaaagagaagcatcgccatgtcgggcatcatccacaagatcgaggagaccctccacagtgggggg

SEQ ID NO: 16873 - DNA, 1312 bp, Setaria italica
  Peptide Sequence Number=SeqID_82847
cgtgcactgagtagatatacagagagaaagaagaacatatccacacaaacttctagcatatctgcttcaggacttgaaaatggaacaaaattaagccactaggactaaagcttcttatgaaaccaacttaaattttgcatcgaattggcacattaagaatattaaggtactgtaatgagttttaaacgtcatcaattcaccctcttgaaatttgcaatcaatgggattggcactagacgctagaactgcaggaaacagaatatttcagccaaaccactttacaccaaagaactggaggaggtccatggagaatgaccttgacaagctagatatatatggaaacagcgttgctgtagtggtggatgaatcctgacgataatatagtagaggtcaatgatgagagatttgggtacaaatgacagcacttgtgcaagcaagataattgacattctaaaatgaaatggagcctctgcatcccaggacaacaaattaatcaaaccatggaggcatcgtccattcagcagctcagtaagcacaggccccacaccacttaataattaatataaaatccaattaataaataatcaacaaagatggaatgatactaaaataagatttaaggaagtagcagcgatcgaggtatgtcaggataattatcatgcaatcaacctctaaaaatcaggatccgtctctacagctggatcaaacatattcttcagcaataagcattcactaggtggagccaactcaatagacggggtagaaattggaagagttgccccaggaattgaaccaagaccaggcacggtagggtgcagaacaggagctgtagctggagcagcaccaaggacagatacagctggtattccaaccggagtattcaaactagcagtgcccatcccaccagccaaactggttgtaatgccactccggtctaatttctgcataagaagtgctctggaactagcattcagtgccaagcctccaccttcatcatcatccaaatctccagtagttgctccactaacttgcatacccgcttggtcagtcacagctgaaaccttaattactctccctgcaatatcaagttgtccatttaaactctgagccgcttttgcatcttcaaggcgtgcaaactgcacaaaaccaaaacctttgcatagcccagtcagtggatctaacggcagctggacaagctccacttgcccaaatggttcgaagacctgtcgcaattgttcctcattaatgttggagtgaagatttccaacatacaacttccttgctccacctgaagcggctccacttgaagaag

SEQ ID NO: 16874 - DNA, 491 bp, Setaria italica
  Peptide Sequence Number=SeqID_82848
ttgtgctttcttcaagagcacaacttcctctctttctttcttcaaaataaattggcgtacttggacaattcttcaggttcctatcaccagaattacggaggcaaatcatcttcctctgacccttccctatgacaacaaaagagtcagccagcttctcgaaaagctgaacaagtttaacagctccatattctgatacatagaggtgtcttccaaagagttttagatactccgaaggaatacgaacaagtgggacacatccaccagataattcaaacaaacgtattagttgacccttcaagccttgaagatcaccaggacgaacccaccatgacctttcacctgcaaaaccttggtctgtctcaggactttcactcagaccgcatgataaattatgagtccttgatgatgtaccacagttcccatctgcaacagtataaaaagctttgtttggttctctagttgtctggaaagtgttatagcaatacatctgg

SEQ ID NO: 16875 - DNA, 364 bp, Setaria italica
  Peptide Sequence Number=SeqID_82849
cgcccagtccccggccgccaccgctcgcggttctctcgcgagccgatctgtctcgccctcgccacctcccttctcgcatccgcgaggcgcgaaaccctagtcacgcgacgccatggcgaaggaccagaacggctcgccccgtgatggtcgaggcgaggaggaggaggaggaggcccgcagcggcagcaagtcggtagaagccgacagggacgagcgctcgaaggggagtcgggaccggggccaccgcggcaagtcgaagcgtcgggaggaggagaggaggcggaggaggaaggagaaggagaggcggaagaggaaggagaaggaaaaggagagggagaggaggaggaaggagaagaagaagagg

SEQ ID NO: 16876 - DNA, 961 bp, Setaria italica
  Peptide Sequence Number=SeqID_82850
cgccgcgacctagaacggtagaaatggcccccaagctgcgaggctgtcgatggccccccacgttgatgaacccccaagtcgcgaagctccaatgttcccaagatccagccacgtttcctccatctgtagttgccgcacatggtacaccgaggcagcctgttatccccgtcggctccgtcctccccttgctgatccggtgcaagttcatggtggcatcctccttgacgtgaagaaagcaaggtataccatgggagaatctctccaggaaggtcaccaaaagaaagcaaggtattgagtttcttctcttctagcagttcacatgacaaatccaggaaatctgtcatatctctgaactcctatcatatgtatttcaaattgcagtaaccaattgatagttatgattaatttgtgataggctgatatatagtgaggtagggtactagactaatgctagtgcttgctctacctacctggtgattatttcctcaaaataatttgtgtcatgttttaacagaacaattagattgtccaaaacttgaagtattctggtgatatagcatcgactagcatacttcatgttttaacagaacaatttagattgtccaaaacttgaagtattctggtgatatagcatcgactagcatatattggtgtgatgctttcatgctacaggtgtatggtacttgatagatttaataagtgcaatactactgtcatttgcccagtgatgaattacagttaagttgtgaggactatttcttacaatgttatcttatgctattttgtattagttatgtactgtgatagttgctttagactggaggcgacactggaggccgctgtggccgagactccggcaaggtagcgagtggcaaaacctccagcaaaggctgcaacctgacatgagagcggagaccacctgaccggtaagtccaatctaagaggtatagttcaactgcaa

SEQ ID NO: 16877 - DNA, 511 bp, Setaria italica
  Peptide Sequence Number=SeqID_82851
ttaattgagtttatacaaccgtgtgacttgagaatttgaaaattgtttatcaaacaaattaattcacgtgtgtgtacaggttgctggaaatataccaattggaatgttaccaaataaattgactgtgcgtcacttctttctgttgtctgtctagaccaaatgcaggttgttggaaggttacttctctctgtagagaaggctgtccagtttatttccctctttgctgcttcatgagaaatatttagccgtccaaattctattttgatgcctgttgccataacatctattcggaaaataattaacagtcgcattccttgtaggatgtcttgccttatttccatctttctaaatacttatgcgccaatgtttggagacttgcttatatgcaacttgatctattctttgtacataagacattaggaattagatggataaataacggcagtagctaatctaacccattcacttgcaggctactgttgctattgtggccaccatcattgtcattgtt

SEQ ID NO: 16878 - DNA, 991 bp, Setaria italica
  Peptide Sequence Number=SeqID_82852
ccgcttcctaccccgccgcctccgctcgagccctccccaagccgtcgcacgctggagaaagcctcccgaggccgcccgctcgatatcgtcgccccggggccgcccgctccagcgccccgagccaccgcgccaccccacgctcacatcgtgtggagagctcacggatccgttgcggttcgtgaccaaggccggcggcggtcgcgggcgagcgagcgatgtggtggcgcggcggctacgcgtgcaagaggaggcgcacggggagcatgtcaccgcagggcacatctgtggctgctggccgaagccttcatctcagccatggagttctggctgccaggctgctccagcatgcgctcctagcggatgcgttcctcgtggaggcgacactggaggccggactgcggctgagactcggcaaggtagcgagcggccgaactctagcaaaggtggcaacctgacctgagagcggagaccacctcgaccggtaacccaatcctgacaggtttattttaactgcaagtaaggtgtttgacgaaatgcctcctcagcagtcgacaagacaacaaatcaggaacacgccatgagatccaggctactggttcttctcatgctgcctcggaatccgataacaatgacaatgatggtggccacaatagcaacagtggaagccaagctatgtgatgggctcgtcagttgtgcaaaaacagcatgctatttggtagtttctgaactttcactgatgtgaattcaacttgtaacgttttgaagtgtttggtctgcatacacttaggtggtaggagatacacttgctttagggaagacatgtgacacagtgacaatggtgtttaagccaaacaattggacatcatcttatatgtatgctgtgtgtaatggtcgagctctggtgtagttaagcaatttgtatggttaagttgtggtgtgccataattggactattatgtgaatgattcagatttaattgaaattaccattt

SEQ ID NO: 16879 - DNA, 1901 bp, Setaria italica
  Peptide Sequence Number=SeqID_82853
tttagtttcttaaggtttattttgttagtttttcttttctttcttttcttagtctagtttctactatgacaaatccaggaaatctgtcatatctctgaactcctatcagatgtatttcaaattgcagtaaccaattgatagttatgatgaatttttgtgataggctgatatatagtgaggtagggtactagactaatgctagtgcttgctctacctacctggtgatttatttttcctacaaaaatattagaacaacatgtttaaacagaacaatcagattgtccaaaacttgaagtattctggtgatatagcatcgactagcatatattggtgtgatgctttcatgctacaggtgtatggtacttgatagatttaataagtgcaatactactgtcatttgcccagtgatgaattacagttaagttgtaagaaatagccctcacaatgttatcttatgctattttgtattggtgcaagttcatggtggcatcctccttgacgtgaagaaagcaaggtataccatgggagaatctctccaggaaggtcaccaaaagaaagcaagttatgtactgtgatagttgctttagactggaggcgacactggaggccgctgtggccgagactccggcaaggtagcgagtggccaaactccagcaaaggctgcaacctgacatgagagcggagaccaccttgaccggtaagtccaatctaagaggtttagttcaactgcaagtaaggtgtttgacgaaatgcctcctcagcagtcgacaagacaactcaggaacacgccatgagatccaggtgatactcctcttcgttggtcccacctctgttgtctacatgtggtgctctgaaactctgatatgttcttgtagagagtagagactagatattagagcactagatattagatattattagttcttgcagttctctgttcttgttgagatatatggtttatgagtgattatagatgcagccagtattcgggattgatgtggatggatccatgtctatggatcttggatatttccattttgcacatgtgtgacttgctggatagagaataattgagtttatacaaccgtgtgacttgagtaatctggaaattgtttatcaaaaaaattaattcatgtgtgtacaggttgctagaaatataccaattggaaagttaccaaataaattaactgcgcgtcgcttgatacctgttgcccaaattctattttgatgcgtgttgccataacatctatttggaacataattaaacagtcctattccttgtaggaggtcttgccttatttccatctttctaaatacttatgtgccaatgtttggagacttgctgatatgcaacttgatctattctttatacataagacattagacattagatggataaataatgacagtagctaatctaactaattcattgcaggctactggttcttgtcatgctgcctcggaatccgataacaatgacaatgatggtggccacaatagcaatagtggaagccaagctatgtgatgggctggtcagttgtgcaaaaacgtcatgctattttttagtttttgaattttcactgttgtgaactcaacttgtaatgttttgaagtgtttggtctgcatatacttagttggtaggagatacacttgctttagggaagacatgtgacacagtgacaatggtgtttaagccaaacatttggacatcatcttatatgtatgatgtgtaatggtcgagctctggtgtagttaagcaagttgtatgattaagttgtgatgtgccataattggactattatgtgaatgattcagatttaattggaattaccatttcttgaagacaaaaaaaaaaaaaaaaaaaactaaaaaagagaactagaccaaggacacacagggat

SEQ ID NO: 16880 - DNA, 673 bp, Setaria italica
  Peptide Sequence Number=SeqID_82854
tctcgtaagaacggatggtgcaccacgtcttgggcttcatgccgatgccgatggcggcggccggcggcacccgggtcgtccgccacaggtacacgtgcgagtcctcgctcgcgcacaccgcgtaccgcccgtccgaggtgtaggccgccgtgatctggctgctcgtgttcttgaagcctctgaacttttggaccatggtcacgccatcgaagacacggatctgcgagtcggcagaggtgaccagcacttcggcagcgttccccggagcaaactggaatggtagaatctttttcgcttgcgccttgcgcttcttgatctggatatagatctgtgcctccgcactaagcttgcagcctgttgtcttgtacaaccggcagctccctttgtgcgagccgatgatcgcgccctggccatcaggggtgtaggaggcggcggtgaccatctcgttgaggtcagtccagtcgacgacctgccggtccgggatgctccataggcgtaccttggcgtccagcgacccactgatgaagtaccggtcgtccaccgggttgaactggatgcaagtcacgtaatcgctgtgcgtgaacgtcttgaggcacgccttgctctccgtgtcccacagccggaccgtcttgtccatcgacgacgacagcagctgatcggatttggaccaggt

SEQ ID NO: 16881 - DNA, 715 bp, Setaria italica
  Peptide Sequence Number=SeqID_82855
tcccagataaattggagtcatgactcttgagtccatcgccgtgatccgtcgcacaaataagcaaagtgtccagctgagcccatccggtctacgtttttctttccagtcatcgcagcagcaccagctcgatcgtagtagctcgctagaggagagaacagaacgccatggcttcctctgtgtcttctccgtcgtcgcccaacccggtcggcctctggttctgccagatctcatcggtcctgcagggcaggtgtcagggcggccgcgccgatccgccgcaggggcccaagagcggcgccggcggcgcggaggggaggcaaggcagagcacctgacgccgcggggagcaagggcgacgatgacacgccgaggaggacgtgccgcggcgacgcgatgccggaggccaccgtctacctgctgctcgaccggttcgcgcccagctgaaagcccaaccgatcgctgcgacggatcacggcgatggactcaagagtcatgactccaaagtgtcccagataaattgggttcgccgtgacttgttccttcctgcctgatcctgtacagttttttcttcttttgtacatacggttcctgcatggttccttgcttccttttctgctctctcttcccccgttgtaactctgcatcttgaccttgcgcacgtgtacactaaatgttaacaaggttctgtacaataacaaggctctgcatcttgatcaaaa

SEQ ID NO: 16882 - DNA, 457 bp, Setaria italica
  Peptide Sequence Number=SeqID_82856
aagggctacctagtaggaaaccctgctacaggtgagagcattgacaccgattcccgagtgccatatgctcatggatttgggatcatttcagaccaattgtatgaggtatttaactacgctcaattttaactactaaatattccatcaagtgaggtatatatgttatcgatgtgcgagcatataattttttaaggccacactggagcactgtaaaggagagagctatagcaacccgacaaatatgatttgtgatcaattgctaaagagagtccacgaacttctgggtgaatgttcaaagccacacattttgtataaaaaatgcttttatgtttctcctggacaaaacgatgaatctccaaggagaatcatactgaagaaggagatcgaaggattaaaacgtccaccacctcgcctccaatggattgccagaactacgtaaattatctgtcatacttct

SEQ ID NO: 16883 - DNA, 527 bp, Setaria italica
  Peptide Sequence Number=SeqID_82857
tctaacattaccaagactgaatacatctgtcacactatattttaaatacataaagtcaaaaactccagtttaccaggactgaatacatctgtcacactatattttgaatataatcctgggataaataaatagtgctaactaaagttctgattgaatcttgtttgcttctttaactcacagaactacgtaaattatctgtcatacttctgggcaaatagcatggccacccgagatgcactaggtatcaagaagggtaccaaggatgagtgggtgaggtgccacgatggcgacctaccatattcgaaggatattaagagcagcataaagtaccatcgaaatgttacattaaaaggttatcgtgcattagtttacagtggggaccatgattctgtcataccgtttcttggtacccaggcctgggtgagatcactcaacttccctattgttgatgagtggagggcctggcatgtttatggccaatccgcagggttcagtatagtctattcgaacaacttgacctttacagt

SEQ ID NO: 16884 - DNA, 1418 bp, Setaria italica
  Peptide Sequence Number=SeqID_82858
agtcaaattcatcagggagccctacaatggcagcgtgcctcggctgaagtacaatccctactcttggacaaaggctgcaaacatcatctttgtcgattcacccgtcggcgccggattctccttctcacaagataccaagggctatgctgttggggatgtatcttcgtctctgcagctcaaaatatttctctacaagtggttcgaagggcatccggatttccttgcgaaccctttctatgttggaggggattcctacgggggaaagattgtaccatatcttgtgcagaagattacggaagatattgaagcacaagtcaggcctgctcttaaccttaagggctacctagtaggaaaccctgctacaggtgagagcattgacaccgattcccgagtgccatatgctcatggatttgggatcatttcagaccaattgtatgaggccacactggagcactgtaaaggagagagctatagcaacccgacaaatatgatttgtgatcaattgctaaagagagtccacgaacttctgggtgaatgttcaaagccacacattttgtataaaaaatgcttttatgtttctcctggacaaaacgatgaatctccaaggagaatcatactgaagaaggagatcgaaggattaaaacgtccaccacctcgccctccaatggattgccagaactacgtaaattatctgtcatacttctgggcaaatagcatggccacccgagatgcactaggtatcaagaagggtaccaaggatgagtgggtgaggtgccacgatggcgacctaccatattcgaaggatattaagagcagcataaagtaccatcgaaatgttacattaaaaggttatcgtgcattagtttacagtggggaccatgattctgtcataccgtttcttggtacccaggcctgggtgagatcactcaacttccctattgttgatgagtggagggcctggcatgtttatggccaatccgcagggttcagtatagtctattcgaacaacttgacctttgctactgtaaagggtggaggacacactgcaccagagtaccagccggagagatgcctcgccatgttcaagcggtggatttccaacaagccactttgacgaacagttattccagacaaatttatatgctgggcagcaacgtatgtgcttgtttctgaattttcattgcacaaaatttcacatatatggagtgataaggttgtccgtaccagttcgtcagcagggcttccatgagacactctctcatgagcatagcagtcttttccaaacaattgttcaaatgactcttttccattcttatatattaaattatttaagataagcaaatgtaatcttagaagtaagtcgaaactcaagaataaccttaagttaatttaactttttccttagttccttacgttta

SEQ ID NO: 16885 - DNA, 412 bp, Setaria italica
  Peptide Sequence Number=SeqID_82859
tgtaacaaactggccacccaaccaaatcgccataaaggagggcttggagctttgcgttcatgcatgtgtatgtgcagtgtgtggcccatgaatcttccaagggaccatgcagagtgacgggtgcactagtacttggatcatccatgcccagccatggcatgagagagagaggagagggtggtggttagagatgccaacaaaaactccaactaatttcagagagagaaatgtccttgcaaggaaaggtcaagaagtacaaagagaaaacctcaggaagagaccatttcatttttatttgagctgggcggacagatggagtactaaatatccaccccccccatagtacaaggcccaaaagaggagaaaagtgcgtgcaatcattgtctaagggtacttagttgtcgtacttgta

SEQ ID NO: 16886 - DNA, 461 bp, Setaria italica
  misc_feature (365)..(365): n is a, c, g, or t
  Peptide Sequence Number=SeqID_82860
aacaaggcatgcactaacttgcacatatgaggacagttgattggaaaatttagttgtactgaatttttttcttcagatttcttagcacttccagaacaagccatcagttttagtcaagtaaatgacagttcactacaagaagtaacttttagtcaaagattacaaggagttagtgcataacttttacttcttgaaagaaaaaaacaaaaacccactcatttattcttcttaatataatgatacgcagttctcgtgcgtgttcgaggaaaaaacaaatgacaggagctccatagttatggttgcataacatgaatataaaaatataaaagtcagaaccatgcctcttaagttcagataaaacttangataccttattctatggacagcttacattgaatttacaagttcaaaagggagtcaaatggctcttcattagatttacaagaagataaatggagaaa

SEQ ID NO: 16887 - DNA, 404 bp, Setaria italica
  Peptide Sequence Number=SeqID_82861
tgccagccggttgctgttggtgtcaccgccgctgtcgtcggatgacagcgcgatggggccgatgttggagtcgactgacgacgacgaggaggagggcacgatgatggtggactccatctccatggccgccggcggatggagtgaagggattcgtgtggaagggtgtaatcagattgcttgataatgctgctggtcaggagtagaatttataggtgaaggcaggaagctagcgcggaatgctagcagacgatatcaatctcatctcgtgatacccgccggcgggaatcctgcggctgcttagcttcctaattaatatatactatactccttgatttgcatgcatggaccagcgatgatcttggattggatgacctgccttctctgctgcttgatgacccgttcag

SEQ ID NO: 16888 - DNA, 823 bp, Setaria italica
  misc_feature (467)..(467): n is a, c, g, or t
  Peptide Sequence Number=SeqID_82862
ccatcctcgattggttaggatgcgtagctaggttgggcgggtcgctcgttttggtctgcaggatttagtcctgaaatcgaaacatgattcgtctacgagtgctaataccggtttatttttctgaatcttttgtgtgttcaagttcaattgagttccccccatttgagataatatagggacgcaatacgcagagtagcttcttcccttccgttcaacgtgaatgtggagttgtgcgccatagctggtgtcttttaactggcgatctcatgaccgtttcacctacaaggctacaatgttttgctgattctgaatttcgttcctgatgcagcggctgaaagatggatgcgaacaggcgccagagtggaattcagcagttgttggctgcagagcaagaggctcagcagattgtaaatgcagctagagctgctaagtcggctaggcttaggcaagccaaggaggaagctgangggaaatagctgaataccgttcccaaatggaggctgaattccagagaaaggttgcagagaaaagtggtgattccggtgcaaatgttaaacgtcttgatcaagagacagcagcaaaaatcgagcaactcaatcaacaggctgcaagcatctcccctgaagttattcagatgctgctgaggcatgtgaccactgtgaagaactaaacgttgataataagctgctgcagtttagcagcaaacctgcctggtactatcagaacttggtgatcatttggtaacagtaaatattgctttttcttgtttctttttgaggaaatgttatttttcatgtgtttctgaaagatcaactttgtggcc

SEQ ID NO: 16889 - DNA, 701 bp, Setaria italica
  Peptide Sequence Number=SeqID_82863
aagagtttgaaggacatctggagcgttcctccccacaaccttggcaacctgcaggatcttcagcgccctccacgcctcgatccagatccagcggctgaaagatggatgcgaacaggcgccagagtggaattcagcagttgttggctgcagagcaagaggctcagcagattgtaaatgcagctagagctgctaagtcggctaggcttaggcaagccaaggaggaagctgagagggaaatagctgaataccgttcccaaatggaggctgaattccagagaaaggttgcagagaaaagtggtgattccggtgcaaatgttaaacgtcttgatcaagagacagcagcaaaaatcgagcaactcaatcaacaggctgcaagcatctcccctgaagttattcagatgctgctgaggcatgtgaccactgtgaagaactaaacgttgatgtgcggcaaatatgattgcaaccttgtattttctatatatttatctatatcagagtgttaataaatgatttgtcacttatagctgtaatcccatgttcttgatcacagaataagctgctgcagtttagcagcaaacctgcctggtactatcagaacttggtgatcatttggtaacagtaaatattgctttttcttgtttctttttgaggaaagttattttcatgtgtttactagaaaaaaaaaaaaaaaaactacgtag

SEQ ID NO: 16890 - DNA, 328 bp, Setaria italica
  Peptide Sequence Number=SeqID_82864
aaagtcaaggcaaaagactttaaaggtgccaggcaagtcagaaaagggttcaaagcttactgagaagtcaaccaagagaagcatgtcaccacaggccaccaaccattgctgacaactcaggcctgcatccatgtcctctccccacataactgctatttcctgcatgctgaactgaggtgccaaacgtattctgtggagcctcccaaacaagtccatggcaaacatctcacctttgaagaacacgatctgaaggatgcgttcaacatcaagagggtgctctgaccaagagtttgatccaacctgccactggaacattgatgatttcgag

SEQ ID NO: 16891 - DNA, 284 bp, Setaria italica
  Peptide Sequence Number=SeqID_82865
ttttttttaagtaggaaactagaagaaattcattgcgattgtatatttgggtggttcgttcgttcggcacaattacacatttgtaccatggcagcgaagtaggtaggagctatgaagagacgaccacggctggaaatccaccagtacagatctcacccgtcgtaaaccgtaatgggcaccgagtgcatgcagagagcagcatcccatctcttcaaggcaaagtgggatgcaattgtgaggaccagaaattctcacatgctctcatacagaacaatgcgttagcg

SEQ ID NO: 16892 - DNA, 1180 bp, Setaria italica
  Peptide Sequence Number=SeqID_82866
gcatgagccaccaccactggtttactccgatgcccgcccagcttagcattgatctcagaaaccatttgaataacaagaggtaatttcattgtaatcgatgacatccgatcaaaggatcagtggaattgtataaaatctgccttcccacgacttcaagatgttagcagcagaatagtggtgacaacgaaattccagtcagtggctaatacctgcagctctaccaatggttacgtgcacaacatgagaagacttgacgaggaatgctcaaagcaactgttactaaaagagtcgtgtctgcaggaatattcagattcctcttcctcgcagtcggattcgaaggtaatactggataaatgtgatggtcaaccacttgctttgactgccgtgggccaattcattcaaagtagaaactcggtagaacaacctgaatgggaagttgtttgcaaggacgtacgttgtcatctggacagcgacgactgcttaaagagaatgtaccaggtgctgacccatgactacaccagccttccaagccatgaactcaaggcctgcttactatatttcgctacgtttcccagtaaccatcgagtcaggacactaatgctaatgagacgatggttagctgagggatttgtggtaccatcaactttatgcagtgatccagaagctcaaagtttcaaggagctcatggaccgcaacataatccagtccgttgatgtaagcaacaacttgaaggtgaaaacatgcaaaacttatggcatgatgcacgagtacattatgcgcaagtctctctctgaaaacatcattgctttgtttgatgatggaaagctccaatccaaatatgctcgtcgcctttctcttcatgatagcagtattacagatgccaccaatcttgaaattgatctatcccttgtcagatctctggtagtcattggggaggcaggtaaagctattttgaatttcagaaagtatcagttgctcagagtattggatcttgaacaatgtaccgacttacataatggtcatctcaaagacatatgcaacctattacttatgaaatatctaagcttagggggcaagattacagacctccccaaggacataaaaaactgaaagttttggagacgcttgatctaaggagaacatatgtaaagatcctacctccagaagtcatccagctgcc

SEQ ID NO: 16893 - DNA, 1417 bp, Setaria italica
  Peptide Sequence Number=SeqID_82867
tgagatgaccattatgtaagtcggtacattgttcaagatccaatactctgagcaactgatactttctgaaatatctaagcttagggggcaagattacagacctccccaaggacataaaaaactgaaagttttggagacgcttgatctaaggagaacatatgtaaagatcctacctccagaagtcatccagctgcccaatttaattcatctctttggaaagtttaagcttccaaatacagtcgtccaaaataaactgcagaagtttctttcttcaggacaatgtaagttacagacattatcaggatttcttgttgatgataatgaaggattttcagaacttatggttcatatgaataaattgcgaaaggtgaagatctggtgtgaatcatccgcaacaagtagtagcttgactaatgttaagaaggccatacagaatttcattcatgatgtaaaggacccatcggatgaccctcgttctttgtcagtccattttgaaggatgctctgaagacttgctagaaggcttggaagctccctgctatcttaggtcattgaaattacagggtaacataccgaaattgcctgagtttgtcacagcactccgtcgactcagggaattgtgccttcgatcaactagaatgacagctgatcttctaacagctttgggtaatttgaaagacctgttgtacctgaaactgattgcagatgaacttgagcaaattacctttcgggacagggcattgccaaacctgctctgcctgtgttatgtggtgaaacatccaacatttcctagaactgaagatggtgctttgccacttctcatatcactccagctgttctgtgaaaatatggatagccagtgcagtgtccagatcaaaggctttacacgcctgagggaagtagttatttatgatgaagtcaaccctgatattaaagcaaattgggaacgggcggttaaggaacatcaaaacaggcccaaagttcttctgctcaaaagggctgatccacccgaagaggcaactggaaacgagaccacagaatgtttcgctccattagagggaccagtacaagaaactgacatccaaatgccaccagaagagccaaaatttgcttccaacagtagcaagggacatccagtgctttgtgttggtctatctggtttgcccattgctgggattggcacagtatcttcttaatcttatgggataattgcatacgtgcccttgcttttaaactcttgctacaggatttatctcgctatggtagctgatatgtcttttgtttttcttaattttatttaggctgtgtgcagcctagctatgtagaggcaggaaaagatcttagtatgattgtatcaccttgatgtatgtctaagattaataaagcttcccttatcgaatttaattgactttgcccaa

SEQ ID NO: 16894 - DNA, 475 bp, Setaria italica
  Peptide Sequence Number=SeqID_82868
tcattaccttcagatggagatgaggaaaattcaaacaagggtgaccatcttgccaaagagcagcctcagccctgtgtcacaaaggagtccttgactgcacaaccgcatgatagtgctgaaatcactgaagtaccgcagtgccaaaacaaagacgcaggatctcatgatgctggttttgttagccctaccaagactgtgataccattgttgcatcggcattgtgcacagcctgaggattctgtaacttctgttgatgatcagcttcgtgacagtgatgtacaaatgatctgcaggccttctgatccttgtgctgttgacagatcattgtcagtagaggaaatgtctggatgtattccgctcactgaatcaggatgcaaagcaggcatatcccggccaagaggtctccattctaacggaaaaaagaggtttttctcctaagaagctttctccaaagaaaggaatacttaagaggcac

SEQ ID NO: 16895 - DNA, 740 bp, Setaria italica
  Peptide Sequence Number=SeqID_82869
aataccaactaacaagacaaaggtttttactaactaggtactaattacttaagaagaccaaaataggattttaatcagggcaatgaaacagaaaccaggctcacgcttgctacatacactgaccatatacagattggattagctggtaatctgaagaactatgttctaaaaatctcatactggagaagctaagaaaggatccgaagtttgcactttcgatggatcacctgtcggctatacttcatcccctatagaaataatcaactatgcttctgctcatgacaatgaaacgctatttgatattattagtctaaagaccccaatgagcctctcaattgacgagagatgcagaataaatcatttgtcctcaagcatgattgcattatcccagctttcaccacttttgtatattctgctgatctgcccaccatggaataccattttttccacgctggtgatgaaatactgcgatctaagtcgcttgatcgagattcatataactctggtgattggtttaacaagcttgattttacctacgaaacaaacaattggggtgttggacttccaccaagggaaaagaatgaagggagttggcctttgatgaaaccaagattggagaacccgtcattcaaacctacaaaagatcagattcttgctgccttaaacaattttgttgacatcctgaaagaattaagaataactacaatacgaccgaactaactttaacgtaactaaaataa

SEQ ID NO: 16896 - DNA, 610 bp, Setaria italica
  Peptide Sequence Number=SeqID_82870
aaaacaagctaaatagtatatgctaaattgtcaaagctcacattctagaaagctcattgtgttttctgatttgcaacaagccctgattggacaagttattgtctttgtcttgcttactaaactctgctcaaaactataattacttaaatgcaccactatttcttccatttcagatcaactatgcttctgctcatgacaatgaaacgctatttgatattattagtctaaagaccccaatgagcctctcaattgacgagagatgcagaataaatcatttgtcctcaagcatgattgcattatcccagggaataccatttttccacgctggtgatgaaatactgcgatctaagtcgcttgatcgagattcatataactctggtgattggtttaacaagcttgattttacctacgaaacaaacaattggggtgttggacttccaccaagggaaaaatgaagggagttggcctttgatgaaaccaagattggagaacccgtcattcaaacctacaaagatcagattcttgctgccttaaacaattttgttgacatcctgaagattagatactcatcgccgctctttcgtctaactacagcgagtgacgttgagca

SEQ ID NO: 16897 - DNA, 1023 bp, Setaria italica
  Peptide Sequence Number=SeqID_82871
tttagtttagtttcttttactttgggtttcttacgtagtctccctgatttaccctaaggtaagcaaccaagaaacctctctgtacttgtatgcaagcagaagtgctacaatgcacatgtcaaatggggttattgaaggttatgattccaaagttcagctgcaaccagaacatggtggccttccagccagtgtgacccagaaattccctttcatcagctcctatagagccttccgcattccaagctccgttgatgttgccagccttgtgaaatgccaactggctgtcgcttcttttgatgctcatggaaaaagccaagatgttaccggattgcaactacctggcgtattggatgacatgtttgcctacactggtccacttggtcccgttttcagtgaggaagctgtgaatttgtatctatgggctcctacagcacaggatgtgagtgtgagcttctatgatggtccagtggggcctttactggagacagtgcaactcaatgagtcaaatggtgtttggagtgttactggtccaagaaactgggagaacctgtattatctgtttgaagtcacagtatatcatccagctacatcaaaaattgagaaatgtttagctgatgatccttatgctagagggctttctgcaaatggaacacgaactttgttggttgacataaatagtgaagcattgaagccaccttcgtgggatgaattggtggctgaaaagccaaagcttgattccttttctgacataagcatatatgaactgcatattcgcgatttcagtgcccatgatagcacagtggacactcattctcgaggaggattcggcgcatttacatgtcaggatacagcaggaatacgtcacctaaggaaactttctgatgccggtttgactcatgtgcatttgttgccaagctttcagtttggaggtgttgatgacattaagaacaattggaaatgtgttgatgaggctgaactgtcaaaactccctcctagggttctagtattttactaacaagtatt

SEQ ID NO: 16898 - DNA, 2461 bp, Setaria italica
  Peptide Sequence Number=SeqID_82872
gagctgactgtaatcttatttcagcaacggttcacttccacaacaccaaggcccatcctacgtaaactttgttggttgacataaatagtgaagcattgaagccaccttcgtgggatgaattggtggctgaaaagccaaagcttgattccttttctgacataagcatatatgaactgcatattcgcgatttcagtgcccatgatagcacagtggacactcattctcgaggaggattcggcgcatttacatgtcaggatacagcaggaatacgtcacctaaggaaactttctgatgccggtttgactcatgtgcatttgttgccaagctttcagtttggaggtgttgatgacattaagaacaattggaaatgtgttgatgaggctgaactgtcaaaactccctccagggtcagatttacaacaagatgcagttgtagctattcaggaagaggacccttataattgggggtataaccctgtgctttggggagttccgaaaggaagctatgcaagtaacccagatggtccaaatcgtattatcgaataccgacagatggtccaggcactgaatcgtttaggtcttcgtgttgtcatggatgttgtatacaatcatttatactcaagtggcccatctgccatcacttccgtgcttgacaagattgtacctggatactaccttagaagggatactaatggtcagattgagaacagtgcggcggtgaacaatacagcaagcgagcattttatggttgatagattaattgtggatgaccttctgaattgggcggtaaattacaaagttgatgggttcagatttgatcttatgggacatatcatgaaaaagacaatgatgagagcaaaatctgctcttcagagccttacaatggatgaacatggagtggatggttcaaagatatacttgtatggtgaaggatgggactttggtgaagtcgcacaaaataaacgtgggataaatggatcccagcttaatatgagtggcacagggattggtagtttcaatgatagaatccgtgatgctattaatgggggaagtccttttggcaatccactacagcaaggtttttctactggtctattcttagagccaaatggattttatcagggcaatgaaacagaaaccaggctcacgcttgctacatacactgaccatatacagattggattagctggtaatctgaagaactatgttctaaaatctcatactggagaagctaagaaaggatccgaagtttgcactttcgatggatcacctgtcggctatacttcatcccctatagaaataatcaactatgcttctgctcatgacaatgaaacgctatttgatattattagtctaaagaccccaatgagcctctcaattgacgagagatgcagaataaatcatttgtcctcaagcatgattgcattatcccagggaataccatttttccacgctggtgatgaaatactgcgatctaagtcgcttgatcgagattcatataactctggtgattggtttaacaagcttgattttacctacgaaacaaacaattggggtgttggacttccaccaagggaaaagaatgaagggagttggcctttgatgaaaccaagattggagaacccgtcattcaaacctacaaaagatcagattcttgctgccttaaacaattttgttgacatcctgaagattagatactcatcgccgctctttcgtctaactacagcgagtgacgttgagcaacgggttcacttccacaacacaggcccatccttggttccaggagttattgtcatgagcattcaagatgcaaggaatgatgcgcatgagatgtcccagttagatgaaaacttctcttgtgttgtgacagtcttcaatgcatgtccacacgaagtatctatagaaatccctgatctcgcgacaaataagcttcagttgcatcctgtgcaggtgaactcatcagatgctttagtccggcaatctgcatacgaggccaccacaggtcaattcacagtacccagaagaacaacagcagtgttcgttgaacccaggtgctgatgccttttgcgaacaaatgcattttggcatcgaagaaaacgagtgaagaataggagtccttacatacatatataaataaacagatagatagaaggagctaccttggctagtttatatgtaaaaaataaagtgcccaagtcgcccatgcttggctttgtcatatgtatgtttcctgatgatcaaataaaaatgtgttgtatatcgtattgtattctatggtctaaaaaattaaatagagagcgttgctaaaaaaaactaactgttgtcagttgtttttgctgtgccaatttgtcctctcctcagccaaatgcatttgtcacaatcattgttctgttaacgttgtactttcagtccagtcctcaaacctagtaacacgcttgggaagtgattttttagtatgttga

SEQ ID NO: 16899 - DNA, 590 bp, Setaria italica
  Peptide Sequence Number=SeqID_82873
ttttttttaagtagtaattaactaataaacctactttacaatagtttaataataacaattagacaacaaaataaggtacatgatgtagtcttcaatcttgttcctctcagtggatttgccttgaattgaagtcattgttgcttagtactactacctagtataagtcatgtccgagtttgtcagtacaaatggcaggcaagtcgtgtgtgcagctggccacgcatgcagtcagtaacgactgcattttttaacactcatgctttattcacttgtagaagtcgaactccgtctcaggcttcttcacgttggtccggtagcccttctcgaagtccttctggaggatgacataccgattcttccggacagcatgcatgccagcttcttgacatatagccgtgatatctgcagcgctgatcttatctggtctggaaatgaaatcttccaaatcaacttcgtcactcatgttcatcttggcagtacagacttggaacacaagcctcttctgccgtcggtcaggaagagggaactcaatttttctgtcaagtctacctggacgcaacaaggcttggattcttagagttatctgcccg

SEQ ID NO: 16900 - DNA, 309 bp, Setaria italica
  misc_feature (292)..(292): n is a, c, g, or t
  Peptide Sequence Number=SeqID_82874
aaatcacctcaaccgcctgtacacatgacaaaaggaattacttgtaccagataaggtacacgacaatttagtggctgcactcgttgtgaccctaatactttgtcagcaagtacaattttaaggtacgtgaacattgcggcaggcaaagtatcacatcaccattgagaaacaacatgaattgtgacaataggcaacaatccagaatttcaaccctgatgctaaaggatacaagtgataaacatgaaacagttcaacactgatgctaaaggatacaagtgataaacatgaaacngttcaacactcatgttg

SEQ ID NO: 16901 - DNA, 1651 bp, Setaria italica
  misc_feature (1)..(8): n is a, c, g, or t
  Peptide Sequence Number=SeqID_82875
nnnnnnnnggcagtcctttttagttttgttttttttaattacttgtaccagataaggtacacgacaatttagggtcacaacgagtgcagccactaatactttgtcagcaagtacaattttaaggtacgtgaacattgcggcaggcaaagtatcacatcaccattgagaaacaacatgaattgtgacaataggcaacaatccagaatttcaaccctgatgctaaaggatacaagtgataaacatgaaacagttcaacactcatgttgcctcatttgtagaaatcgaagtctgtctctggcttcttcacattggtccggtaccccttctcgaagtccttggggaggatgacataccggtttttacggacagcatgcatgccagcttcttgacagatagcagcaatatcagcagcactgatcttgtcaggtctggaaacataatcttccaaatcaacctcatcactcaagttcattttggcagtgcagacctggaaaacaagcctcttctgacgtcggtcaggaagagggaactcaattttcctgtcaagtctaccaggacgcagcagtgcaggatctagagtatctgctcggttagttgccattataactttcacattcactgtttgatcaaacccatccatttgattaagtagctccataaggatacgctgaacttctcggtcggcaccggtctgagcatcgaaccgggcagttgcaatagcatcaacctcatcaatgaaaatgattgctggggcattctccttagccaaacggaacacatcacgaaccattctaggtccctcacccaagtacttctgtacgaactccgaaccgacgactcttataaaagcagcagtagtgtgatgtgccactgctttggcaagcatggttttgccagtacctggaggaccatacagaagcacacctcttggaggatcaataccaatctgcttgtacaactcatgatgtgtcaagggtaactcaaccgcctcccgtatttcttgcttttggatgtcgcaccctccaatatcgttatacgtgacgttgggcttctccgacgacccgagcagggagatgctggagtcggcctcgggcggcagcacgtcgacgagcgcgttggagtggcggtgcaacgcgacggacgccgagggcttgagcagctcgcggttgatggtgctgaggatccggacgtagtagttgctgcccgtggtggagcccacgatgccgttgttgccgtcgaccatctccatgaactggccgatgacgagcggcacggactggatccgcttgacctcctcctgcgcgcggagcagctcgcgctttaggttcttctgctcatccttgacgtattcctcctggatctcaacgaactccatgtgtcgctggagcgacttgaggcggccgtagaggtcgtcgtcgtcctcggcggacgcagtggtggaggcggaggccgcggatgaggccgggtaggatggcgggggcgccatcggggtggccgcagggggggccggagcggtggtggcagccgccatcgcaaggaggcgctggttagggtttcgagaggtgggttcgagtttgcggacggatcggaggacgagaggttcgactgcacagctaaaagacgggtcggctttgctttgcttggaggaagg

SEQ ID NO: 16902 - DNA, 382 bp, Setaria italica
  Peptide Sequence Number=SeqID_82876
gcgtcccacattttcaatgtcatttgttcgtatgcatttctgggaggtagtggcgcatggcacacgcctaggttccttgccaagaaatataggcttgaactgaagcatccctgcgatggtaaggaacactgttgggtcatcgggcacaagcgacgagctagggaggatcttatggccgcgggcagcataaaattcaaggaaccgtcgccgtattgcgtccccgctccactcccctggaatagcggtgcccacttcctgggttgctggttctactgaggctgacgagttgtttgttaggaagaatccgttctcacgagcagaatgcctttgtccccagccatctctcacgcagccaaacccttggtgtcgaggtgaggggcgg

SEQ ID NO: 16903 - DNA, 361 bp, Setaria italica
  Peptide Sequence Number=SeqID_82877
cgggcgaggttgcgggccaggatggagacccgcgcgccctcccgcgccgcggcggtggccatggcgagcccgatgccgctggacccgcccgtgatgaagacgtggcggcccttgagagggacgcgcgccgcgcgggggcgcgccaggaaggcgagggcggcgaggaggccggcgggcgtgagcagcaggaggaggagcgccgctgccatggcgacgggaggtctgctggctggagctagcggcgaacctgtggggggcggtggtggagtgcggggccggatcggggtggcggagttaagaaggggacgggcggccgtcggagtggactgggcgggatgcgcgagggaacgggaacacgagg

SEQ ID NO: 16904 - DNA, 737 bp, Setaria italica
  Peptide Sequence Number=SeqID_82878
gtttgtacacattacgccgagttatgttaaatttctgctaattgatatactgcgtttatcattgcaagttggaggagaggtcgggcggtggggctgctgaggtgcaggtcgctaaggctctcctggcgatggagttcgatagttctacacatgctgtctgcctcacctgcagcatggcgttctcaagctctgaggcaagtgatcatgctgaacatgatatgctctccatcgtcatggagtcaggtcgcctgccccgtctgcagataccttcagcgcactatttagctcatgtgtggagaaacataaagggatgggatcctgacggcatgggggacatcctgattaaagacaactcatctccgcggtgccagacgtgccagatgcgcctagtggacggcggcagtaagacatgcagcttcgaatgctgtctgccgcagccctctctactgccaagaccgctgcagcggcagcagcttgctgggtgaattgattcttactgttggagtcattcttaactcttctgctgttggcctgtcgtggcctaaccctgtgtaatgaatggtttagtttcaatgcgttgagctgtgtaaggaagcaaacttgggatgaactttgtttttgagctgaagatctgacgaaacatgtactttagctgaaatcagtttcaatgcgtggttgtagatgtacaaagaaagagactactcacactgagtcggagatgacaatctacttacatc

SEQ ID NO: 16905 - DNA, 1130 bp, Setaria italica
  Peptide Sequence Number=SeqID_82879
cgccccgcccggagcgccgaggtgcggctgctcccgccgtcgcggatgcccaagctgggcaagggcggcagcgcgcagagccggctggcgatgctccactcgctggcgcacaccgagagctgggccgtcgacctctcctgggacatcatcgcccgcttcggcgcgcggatgcggatgccgcgggaattcttcgacgacttcgcgcgtctcgcgcaggacgaggggaggcactacacggtgctctccgcgcggctgagggagctgggctggcgctacggcgcgctcccggcgcacgacgggctctgggactctgcgatgagaaccgcgcactgcctactcgcgcgcctcgccgtcgagcactgcgtccacgaggctaggggattagatgtccttccaacaaccatatcaagattccgagcaggcggggatgaacaaacagcaaaactgctagaagatattatttatcctgaagaagttacacattgtgctgctggtgttagatggttcagatacctgtgccttaggccctgcagtgatgatctgatctcatattcagttcctcattctgaaccccactgccctgggatgccaggagatggtactgctgatgataagacagttctggaggggagaaatgaactaacatcagtccaacaggtagaagatgagacgtccaagatttcacaagacttcaacagtaatattaatatgacccaacaggttgaagatggcttggcaaattgcaaactaggcaacaatgtagacaaagatgaagcagcagttattcggactttccataggattgttagagaatattttaggggaccactgaagccccctttcaatacagaagcgaggaaagccgctggctttgtgcctgcctggtatgaacccctggcagtgaaggaggtacatgttgagggaaaggcggacaattgagtgacatgccttatgtgtattggatccgctcttctgttagcatgaacacatgaatgcttgaaggccccgctcacccgaagtgatttagaaaaattctttttctcgatggtgatcaggtaagacggaaagctggtaagccattggctggacaagctgcccatttctttgtacccctgccttatcactacacg

SEQ ID NO: 16906 - DNA, 333 bp, Setaria italica
  Peptide Sequence Number=SeqID_82880
atcctggcggcgcacgtcttctcgtcgcggagcctcgcggcggcgcgcggcgtccgggagcgcaaggtgcgggacctggtcgcacacctccgcgcgcgcgccgggcgggaggtggacgtcggcagggcgctgtacggcggcatgatcaacctcgtgtcgagcaccttcttctccgtcgacgtggtggacgttgacgccaccggcgaatcggcgcacgggatgcgggagcacgtggagaacatagccgacctgatgacgaagcccaacgtctccgacctcctccccttcctgcggcggctcgacttgcaggggcggcgccgcgcggcggcctgg

SEQ ID NO: 16907 - DNA, 448 bp, Setaria italica
  Peptide Sequence Number=SeqID_82881
attttggaatggagggagtaacctttaatcactttagtttaggtaggtcggagttttaccatgacatctgaaaggtgagtagagctgaatttctcttgttttatactccctccatctatatttataaggcgtggtatgacttggcacggtcttccaaataacactttgaccattcatttatcttatattatattgtttatggttataaacttataatcattgtagagtatatttgaatacgaatccaaccatataaagtttgcattataaaaataaaaatttatagtcaaattattagtcaaagattgcaaagtttgaatcttgatatgcgtgcgcgccttataaataaaaaacggagggagtacttatttagtcttaccttgatttcacatggttaagaaaggattgtcttcgtgtggcacgcggtatgaattatttaagatatatt

SEQ ID NO: 16908 - DNA, 799 bp, Setaria italica
  Peptide Sequence Number=SeqID_82882
aattcacaaattttataacaaaagctgcgggccactgaaaacgttttggaagaataattttgtctaataactctattgtagtctgcatgaatggattttactgaactgcacatcaagcaagcatacgcaagtcaaatatccctccatctatatttataaggcatggtgtgacttggcacggtcttccaaataacactttgaccattcatttatctcatattatatttcttctggttataaacttatgatcattgtagagtatatttgatgacgaatccaaccatataaagtttacattaaaaataaaaaatagttaaattattggtcaaagattgcaaagtttgaatcttgatacgcgtgtgcgccttataaataaaaagggagggagtacttgtttatgtcatccacacaactcgagcggcattttgtaaacatcaatatgcgcatgaattaatttgacaaaaataaataaatgtgatgagtgtaaaacaccaactgttactcacatacagtaaatgaatatggatacttataaggagcgtaataaatatctcacaaagcaacatggtgtctaataactccaatatcaacagcagcaatgaatcttaattgaattgcacaacatgcacatgggcctagggtacaataatatgattacttatgctgcaaacaactaaagaaaaagtttgtaaatcttaatgtcgatgctttataagatctgaccgaaaaattacaaatggagagcaaaatgtcaactgttcaaagatactaatgatatcacatactcgctagtgtagat

SEQ ID NO: 16909 - DNA, 551 bp, Setaria italica
  Peptide Sequence Number=SeqID_82883
gttctgttggaaaccaagcaactggagggtcgtccttcctaatgaatttcagcaggatgaactcgagataatctttaggtacaagacattatttgatcagcatgtagttaagtcagtcagccttgaggtctatagagtcttgcagttatgtgctaaggagtttcagttcatacaacaagcagattagagatttgtttgttcttgactcatggagtcatggttttcctggcttctggaaacaaggtgtggctgctatttggaatttgacttcagcaactgggtaatgagcacaactcatgatcgctgacagagaatttcttccagcactggatttcaagactggcaatggtattagcaggacaagatatccagttgggatcttctcctaaagtgactggcattgagatgtaaagtcagagactgatggatccagaggtaactaagcttgagaacattgaaatgtcttggtgaatgaatttccgtagtctaactctatgatgcccttggtaaaaaatcggtctgcttcttcatatcacacagaactaggcacg

SEQ ID NO: 16910 - DNA, 524 bp, Setaria italica
  Peptide Sequence Number=SeqID_82884
aaacccgaaccaactcaaccgagtcctcctcctccccttctccggtctcctccccaccgcggccgaaccctagcaagcagatcgccggcggccatggagagctgggccacctgggtcggcaccagcgtcgcctccgccttcttcgcctcccttgagcgctgctcctgcatcaacctctccaccgacgacgacgacgaccgcgacgacgacgaggaggccaaggaccgacccctaatcctctcctccgcgccccgccatgacgacgccgccgccgctaagcccgccgacctcgacctcctccccgactccaaggaccagaagcaggagcaaccgcccgtgccgcccgtatgaatgaatcgcttgcttcttgtcacctctatcccctagttccttcgtactactactactagttctatgctcctcttgttatgattcgtcaactctgctagctgctgttacatctcgccttccattcgctgccaaataagtcgtgtgctctcgtgtgcaatctgtgtccttggtgt

SEQ ID NO: 16911 - DNA, 412 bp, Setaria italica
  Peptide Sequence Number=SeqID_82885
atccatcagccaaatgtccaggtggaattatcatcagcatggaaattttcatgttcacaaacagcatgactagagttacactactactggtagctactaaatttgctttaccacgaccaagcttgacgaatctgtgaggcatgcaccaatttacgcatctatgctactcactggctagaacatggggcctagcacgtcagacaacaaattgacacaccaattaagcatcgctaaacttatgccctattcgccaatagcccaatttaatttcctgacaaaccaattgcttaataacatagactgtaattcctcccgagcttaatagcacaaaacagttgcttataataacacaaacaccctctttctgtacgaatactcatggcagcaacgcaattcgctgctctcctcaacg

SEQ ID NO: 16912 - DNA, 814 bp, Setaria italica
  Peptide Sequence Number=SeqID_82886
tttagtctttcaaactttctttcttaatttctttcttccttgtcttttgggttcctcggtttgaggtttggagtctaagtactcgtgtaatttctgactatgtggtcagatttgttgctttatggtcatagacattcacatgtgaatctccaagatcggatattttcctaattaaaaaacatacaattcgaaagcatatatgcgcatacatctgcatctcttcaaatttagtaggcacttctccaaaatacgatcttattacttgcttgagcctagattcttatgcaaacaatattgcttgtcttattatgatatttcacatggtctttcctgacaaagtacaatcacagttctccattaaagattgaattaacctgacaaaagaattatgaagtacactggcggactcaaaatgggcgcggcaacggccgcgcctgtgtttctagtggaaccactaaaattgcaccaggcggcagacctgctcgagattatggtgtgttcaatgtagccaacagctcgtggccaggtccggtagttcaagttttcaacggtgtcgcatccatgttcatgttctgactatgtgatttccatttcccatgatttaacactatatagaattatagatcatttattctgatctatggagcctggtaaaagtgaagcatcatgtctgaacattgtccttcccactaacactaatggtactgtacgtcattgtgctagtacattctttaggggtttctcacggaactcctatcttcttcaagagcgtgcctgatgaagtgctgagcacactagtgcgacttgagttcgt

SEQ ID NO: 16913 - DNA, 818 bp, Setaria italica
  Peptide Sequence Number=SeqID_82887
ttaaagcttgaagaattagtactacaaataatgaaattgctgttagcattcgtagatttgctgcagttcatgagttcacagttgatgaaccactctcaacactattgcccaagaactgattccaacagtacaactatatatttacatgtatcaaatcactgagtgcagtgtgctaaaatatgatccacccacccatacctcactcaaggatgatactctactgacaaatcatacctctgcggatacacccttgctcaggttcattacttgtatttctccattatgcgccgggcctcttcaacaggatcttccgatgggttgccacctgtttcatccatcctagagccagaggcctcctttgggttcatagccaggaagccaagatatataagccccatcatagccagcacaaataatgcagtggagacaacggatttgagaaggaaaagggcaaccgacacagcagcaaaagtaacacctatcctagcgattggccgtggaactgaacctgggacaaaattactccctgcctccacagcatcagtaccaaccctccatgctgtttgaacagctctggcgaagtcgaactgcgcggatgcgacgacgaggcgcgaccttcgagggatgggattgggactgggacaaggaggcggcgcccgccgtggcacgtggatggagataggcgctacgaatggagagcgcagcgaggataagctgctccggcgggcggcggtaggggggagccaggcggcggccacggccatggccacggcgtggggagaggaagcgtggctagaggctgaacgagcggtggaagt

SEQ ID NO: 16914 - DNA, 239 bp, Setaria italica
  Peptide Sequence Number=SeqID_82888
ccagatgggatctccctggggcagcttacgaccggacccgaggcaacaggaggaactggatcctggcgtgggaggacggtttctgcaacttcgcggcggcggcggcggcaacctctgccgcgtgcggcgaagagggggcagcggcggcggtggttgcgtatgccggggactgcgaggcagctgtggcgccgcaggaggcggcgaagcatcaccagcagcagcagccgcaggggctgcag

SEQ ID NO: 16915 - DNA, 384 bp, Setaria italica
  Peptide Sequence Number=SeqID_82889
ttttaaaatttaagtactatagcaccataacgtgttgcattactccactccagaccaaatcgccaaaagaacagagagatccaaagcaaacaaacaatgggcatgcttcgcgtctcctgcatccaaattgccatacgccctgctcgtttttacccacaccaagagctccacacaggcatctaccgaaacaaacggtaccatcaagaagtgtatagcccatgagaggtcagctctcctcaccttcagagctggcctatcagaccctgcaaaccgcctttcatcatgggaaggtgacagctgctgccaatggaagggcgtccagtgtagcaacagaagcagtcatattgttaagctcgatctacaggccctgactgcgacaacagt

SEQ ID NO: 16916 - DNA, 306 bp, Setaria italica
  Peptide Sequence Number=SeqID_82890
gaaagaaattaacgaaaaagaggttatgcttgcgcatccccaatcatgtttcgcaaaagcttgtccattgcaatgcacctctatagctacaacaacaccatcactcgaatcggtccgaatgtccagaggtgagttgattccatacatatatgttttaaatagccaaggtttgttcccgtttccattgggcgaatgggcatcccgaacaggcaagaactttttcctgcctgaatgcaatacacgttgaagcaagctccggtatgtaaagctcgaaggtgaaggtaaaaagcgcaaaagacctgtaca

SEQ ID NO: 16917 - DNA, 386 bp, Setaria italica
  Peptide Sequence Number=SeqID_82891
tgtctccattggatctgtacacggccatgattgaattgaaggtcaagaacacaacaccgaccaccgtgagcaacgaggggcaacgaccatctttattcttcagtgcaagctgattcgcaggctccttgagcagagcttcatccatgcacaggttgtgctctgaactcataacactgccgagatgtagttagcgcaaatctcgatgggaggcggtgatatgcaaccggccgattaccgatccggcggcggcggcggagcgcagcgtctccggacggacgagctggggcgaagaaagcacctcaccgctgaatccctggtgttcgccgtgatggagagcacttgaggtgaaaggtgtctttggagagcactggagacacgcttggatg

SEQ ID NO: 16918 - DNA, 291 bp, Setaria italica
  Peptide Sequence Number=SeqID_82892
ctttgcccatgccgtaaccaaaaccaattccaacaccgcatccagctccaacaccaaagcctaaagtgagtccaggaaatccaaagcctaatcctgcaccgccgaagaatccgactccggcgccagcgccgcagccgatgccgaggccgaaagcggggccgatcttgccgagctcattggacgtgatctccggcagcctccagagaagggccttctcgtcccctccgccgccgcctccctgcttcttcttccccatcgcctcctccctctctcccaaagtcccagagtccg

SEQ ID NO: 16919 - DNA, 2597 bp, Setaria italica
  Peptide Sequence Number=SeqID_82893
tagtacagtcatagtggaactgtactgctcttgatgttgatggagactgtttctttctgctgaattgctgtacagttccactatgacaacacgggacatacacataggacacaaagaaactgttcagtttaaggatgtctatgaagtcagcgaagaaccaataagaacataccatcttcaggaccaaacttttcctagcggggcgtcttccaggagcaagagggacataaggatggaaattgttcgtcagaagttcatggaagcaaagcgccttgctacaaatgagaaactactccattcaaaggagtttcaagatgctcttgaggttctcagttcaaatagagatttgtttcttaagtttcttgaggaaccaaactctactttctcaaagcagctggctggacttcacaaaagcccatcgccacctcatacaaagcgtattactgtgttgaaaccaaataaatctgttgataatgaaggcagaagggaaattagaacacacagaataaatgaagaacacgaacacgtgatgccgaggactcaccggagatctcattcagcagaagttaccttctcccagccaactaggatagtggtgctgaagcctagtcctggcaagcctagtagaacaatggccaggctaacaccccgagcagccccaggtcagctgaccgagcagatagatttctatggaggtttagaagatgacaattacctgccagatggtctacatcggcgggatgagtcattattatcttctgtatactcaaatgggtatggtggagatgaaagctctttcagcagatcagaagttgactacatcgatgaagatggtaacctaagtgactccgagatagtcagtccagtatcgcggtcgcggcattcatgggatcatatcaaaagatacaacagtccttattcaggctcatctttcagcagagcatcacgatcacctgagtcatctgttatcagggaagccaaaaaacggctttcggaaagatgggcatcggtagcatataatgagatcaaccaagaacaaatgcgattaccaagaagctcaaccactttgggcgagatgctctcccttcgaggagcaaagaaagaagttggtggggtgggttctgtttcaagtagtcagccatgtgatgcagaaaatgagctgaccctgcaagctacgtgtatatctacttttatagagaatgaaggagatgggcagagctcccccaagaatttagcaagatcaaaatctgttccagtgtcatcgtcaaagtttgataacatagcaccaaatgccccatcatccaattctgaaggctgtaaaacactaaacgtggttacaaggtcagataaagtaaagtcatcattcaaagggagagtttcgagttttttcttcccaaaaagtaaaggcagttaaaagagaaaatcaccctatctgctagctctgatgagaaggttgaagtcacttgttttggcagcatgaaaccagaggctgctcaaaatattggcgctgatgaaaatatgtcatttcgcgaggacaaagatgatagttcgactactcaaacaatctgttcttcgaaagatattgtttccattgaagcacctatttgttccgtctgtccaagtggacattttgatggattgagatcaggtggaggtctgaatggtacccgtgatgagccgagtcctacttcagttcttgatgcatcatttgaagatagcaacattaatgaatctgaatcattgagaagcattacttgtggcaatgagagaattggcttacgatctgatgcaattgaatctgtcacacgctcattatcatgggaggatatgagctctccttcacctttacttggtatgacaaagttgacccatctctctagtggggacaatgatgaactagaatgtgttgcctttgtacaaaggattgtatcatcttctgggttaggcgatctgcagttgggtacggttttcactggctggcacttgcctgattgccctctggaccctgcattgtgcgacaagttattggaccggaaagaggaggctgccaagtcgagggagcgaaggtcgaaccaaaagcttctttttgattatgtaaatatgaccttagttgagattggccaggacaccttactacgcgcctatccctggagtcaagcgcgttcaatggcttggaaagagtccctatctctagatttggtggaagaaataccacatcttatgacggattggctatatggatcagggaagtttgcagtgaacgagaacgacgacgctgggacaatactggaaagaattatgcaacaggaggtggaaggaagaggctgggtgaagtccatgagatgggaattggatgggatcacagagctgattgcaggggaggtgttggaggaactagtagaagaaaccgtggatgatctcgcaatttgttctccacaccaagagatgccaatggcaacactgcagctgtaggaaacaattgctttgtgtatgagaactgctcttaaaattattgtgctaaaagaactcgagcatcctcgtatcttgtatgtatgttcacatagttgcttctgcaaataaaaaaaaaaaaaaaaaaa

SEQ ID NO: 16920 - DNA, 744 bp, Setaria italica
  Peptide Sequence Number=SeqID_82894
ggtcctgaagatggtatgttcttattggttcttcgctgacttcatagacatccttaaactgaacagtttctttgtgtcctatgtgtatgtcccgtgttgtcatagtggaactgtactgctcttgatgttgatggagactgtttctttctgctgaattgctgtttaagtggcttttcttcaaatttcttttagcagactgtaacgttgccccttgaccaggtagatcatcttcaagtcccattaatctggcaacgacacttggtggcttcttcttcgactccaattccttggacatttcctttgccaatacaacatttaaaggagacgcatttgatttattgcttgttgagctccagttactagctcctagtttgtcctctgcataaacttttgcaggatcaattgttctcttgacatcttgcctgcttctacaagctggagaaccatctctacgaggtcgatctgtgagcatgttcgagttagacatcccaaggccacggtcgaacaagttgatcattgccttcttctgatcataaacgttgcctctgagcatggcaacattgatacagagtcctgcggcggggaggaggcggcagcattcgccggcgcaggggacggagcagagctgtgcgcgccgcgccgcgctgcgctaagcgacgcggtgggaggttggtgaatgggtgtcgatcgatctccaggcctcagcccagctcttgtgaactgttccttgttgtttcttccccg

SEQ ID NO: 16921 - DNA, 438 bp, Setaria italica
  Peptide Sequence Number=SeqID_82895
gacgagcaattcagcagagggcacaagtgcaagcagctgttcgagatcaccatcgtcaacgacttcgatgatgacgacgagccatcactgatggtgatcacggctggccccaacggaggtctccagggctggtgcaccatgcgcctggtgggcgctgtattcggggagggcgcacgtgtcgtcatcgacacgggcgccacacacaacgtcgtcgactttagcttcgcccgtcacgtataagtctcggagaggcgcatcaacgtcggcatcaccatcggcgatggctccagggtgcgcagccgtggcctatgccgtggggtacccatccgattggaccgcgaggtctttgcctcacgcctacatctccaccctcgacggcgagacagacgtcatccttggtacctcgtggctcgcgtcgttaggtcctatcacttggga

SEQ ID NO: 16922 - DNA, 1144 bp, Setaria italica
  Peptide Sequence Number=SeqID_82896
aagttaccgatcatctgttgtggaggatgacgacgctgaatgtgccgtggagcctctcgctctgaagtcgcctccccctcaacagcagctggatcactctgatcttcttcttcatcatcctgtagtggtactagttgatggcttgaagtagtggaagtagaggtagggccatcaactctcgtagtcgaagtagaaggtataggtgcaacagctggagctcggtcaatctcatcatcctcttcatcaccaccatctacacgctcttcctcttcctcaaatatgctttgccccatttcatgttcacctgcaacttcaaagacaggagttgtgcaaggcataatttcattgaatgtaatctcacaagttttcacgatccggttagtttcaaggttaagtacacgataagcacgactatgagaagcataaccaagaaaatcccatccgtagaacgagactcaaatttatccaaatttccttgcttgagaatgaaacacttgcagccaaacaccctcagatgactcactttgggggaacgtcgatgcatcagctcataagaagttttcttcaggaaagctcgcaagaagattcgattggacacatagcaagcagtgttgacggcttcggcccaatattttctaggagtcctatgctcatcaagcatcgtcctagccatttcacaaagggtccgattcttccgttcaacaacaccattctgaggagggacataaggcgatgaaaactggtgttcaagaccaagatcattgcaaaaggctttaaaacgagcgttcttgaattctgtgccattgtcactgcggatagctctcatggcatcttttggtcgctcatttctcaacctcaagatcaaatctcgaacaaaaggaaatgcctcatccttagattccatgaagaaaacccatgaatacctcgaaaaatcatcaacgatcacaagcacataccacttcccaccgactgaacaaacacgagctggaccaacagtgtccatatgcaacagctcgcctggatgttcagtcatcacctgattcacaggtggatgggaagcagcaaccatcttcccatgtcgacagggagcacaaacaagatcttcccaaactttaatttggcatacctcgaataagatccaaag

SEQ ID NO: 16923 - DNA, 333 bp, Setaria italica
  Peptide Sequence Number=SeqID_82897
tagacgtacctttagacagcccggaatcgcctggacctctgctgattcatttttgcccttggagcaacaccatcaatggccatgtagaggagcttcctggggcggacgaggccgaagaggtggtcgatgtaatcaaaaatcgacttgaacacctcgtcataggtggtgggcgccggccggccttcgggtggaagcagggtgaatgatgccattcatgtcgaggtagaggttgtcaaactcgatgccgttggggttggggcggcggaggtcgacggggacgaaggcgccgggctcgagctccacgggctcctcctcctccgcgtccgacaccgt

SEQ ID NO: 16924 - DNA, 327 bp, Setaria italica
  Peptide Sequence Number=SeqID_82898
cccgtccgatctcacccagcgccgccggcgagatctccaggatggccttcggcgggcggcgggacggtcccctcatgctacggggcggcggcagcggcggcgggaaacccctgtcacgagggtcccggatcgcggtggcggtcgctgtcggcgtcgcgcttggctgtgtctgcgccttcctctaccccgacggcatcttccgcccttctgcctctgccctccactggtccagccacgttgactcaactgcttgtgaatcaacagggcaatttaccaaccttaagtcccagttggtatcattggagagacagaatgctgaaatgagga

SEQ ID NO: 16925 - DNA, 1282 bp, Setaria italica
  Peptide Sequence Number=SeqID_82899
tttttttttaagaatgccaaaaacctagaggacctttcatctcttacctgttctgcagctacgttttcatccagaggaaatgtagacagaaatcacagaatgcacatgcccagtgtaagatggtgcgatgtctacacatgtacgcactgaaacgcaaatgaacacattgtatagctcaagctgaatgttgaaacatgaacagcaaagcacaagtttgatatgtgcgatggtttattgagattgattattggctgactcttcccagaagacttcttgaatcttctcagccaattctaccttccgattgaagcatagatatgcgctatcacagtggccaagtcttcaagcacttcaaatccctgccgaacctgtagacttgacccgaagagaggctgaagggggcagtccggtctgcgtagtgtagccttgcaaaggaaatctgctcactactagaccacagcagagcttcacggaggcccccttccttccagctgatgtttacagtcacaccacctcgggccttcaggcctttaacacagccatgaggccacttgctgcgtggtagagcagggagcaggtacaagtcagtcccagtgctctgtaccagcatttccgacagtgcagctgggaacccgaaatttgcatcaatttggaaaggtggatgtgcagtgaacagattgctgtacaggcctccttcccttgaaacctcatgttttggatccaccaaagtgattagctgcagtatcattttgtatgcatgttcactgttgtgaagatgtgcccatagggccatcttccatgaagtagaccaacctgggccttcatcacctcttttataaagactattggcaaccgctttgcagaggtcaggtgtttgctcaagtgacatagaatgtccagggtaaagaccaaacaagtgagagacatgtctatgatgaacctcaggatcctgaaagtcttgtgcccactccatgattgtaccatctctagcaactttcactggtgggagatttggcagtgccttttttattctctgaaccacattagtgtccgatttccctaaaatatcagcagataatagaacagctgagaaaacttcacgtataattgacatgtccatagttgttgagtagctcacacaggccttcttaccatctggagcaataaaataatgttctggagaagtagaaggattggtttccaaatattccctgtgtccctcaattaaccaatccaacaaaaatgaagctgatccttccaatagtggatatgctgtttctct

SEQ ID NO: 16926 - DNA, 590 bp, Setaria italica
  Peptide Sequence Number=SeqID_82900
taagcgtcggctgagtcaattttggaagggttgagagttgtctcccgctaatcaaagcgtatagcaactcagccttctcctggatatgggccgaggccatcaccttgatgtagtcccagaggaagcaggacggcatgatgagcggcggtcgcacgaaggtgagcctgacgagccggcgcacctcctccggccgccgcggcacgagcagcgccgccgcctccccgaccccggccaccgggaagagcccctcggccaggtccttctcctcgaggcacacccccgcgcagatcatggccaccctctccaccgcctccgggaacatggcggccatccggtaccccagaagccgccgtagctgacgccgaccagcccgaacctggcgaccccgatggcgtccatcgccgccttgatcgtggacgcctggaaggcgtcggagcggtcggggaggctggtgcaggaggcgccgaagaagacgaggtcgggcacgatggggtcgaaagccggcggcgatgagcggccggaggtagggcgcccactgccaggtggcggaggcgccgaagccgtggaggaggagcagcgggttccgtggg

SEQ ID NO: 16927 - DNA, 432 bp, Setaria italica
  Peptide Sequence Number=SeqID_82901
agttccccacgctcttcaccatttgcagcagcgacagaacaggatataaaccgagccaagcaagctctgtctctgccgagctacaagtaacgaaaccatctccacatacaggccggcacgtagcttcctactctgtatgcatgcctgaagtggtctagaggagcagcggtgtttacgtgctgtacctaggaaaggatcggagggagagaggccggagatggtgcctccagctgtcctccccaaggtggccgcgcaatggctcttcacgttccaccgcgccgccaggaagctcaggcgccaggccttccagctctactaccgcaacgccgccgccaagccgccgccgtccaccgccaagccgcagcagggccatgccgccaccgccaagggcgccgccatccttgatgacgccgccgctgtcgcggcggcagg

SEQ ID NO: 16928 - DNA, 484 bp, Setaria italica
  Peptide Sequence Number=SeqID_82902
ggagcataaaacatattgtgtgtggccttcaagtatttcatattgtaacgatattcaatcagcccaaagttccaacaaaggtgcatgtacgattcccaaggatacaagtttggtcaagttgtcgaccaacccatgcccctgacctaggtacattttttcttgggagctcaagaccttgctagcaccgattcactatcatgtaccagttacctttgttacctataccaaatcatgtagtgctggttcatgtgactcactctacaattcagtttggttccttaatttgaataactagagaagtctacaaacacagacagagacgaatataggaaaaaggggagcaaaatagttaattcagtcagtgcacaaaacaaagattcattctgctgcttatagttgcaagtcaagataactaaaagtttatttatttttcattactcactcaaggacaaaacaataaacttatagaaatatttaatatttc

SEQ ID NO: 16929 - DNA, 285 bp, Setaria italica
  misc_feature (246)..(285): n is a, c, g, or t
  Peptide Sequence Number=SeqID_82903
gacgccgcggcggtggccccggcgccgtgacgccatctgctcgcgtcgtccgttttcttgtcacttcttactttagcaattagcaacgtcggtttttactgtccccccggccggccgttcttttctcttttgtttcttctgctgtcgtttttcgccccctgcttcctcctgtaacctgtacatggttggttggcatgctgaggtaacattatggcaaagcgaaagtttttacctaaaaaaaaaaannnnnnnnnnnnnnnnnnnnnnnnnnnnnnnnnnnnnnnn

SEQ ID NO: 16930 - DNA, 399 bp, Setaria italica
  Peptide Sequence Number=SeqID_82904
agaccggacgtcaacggcagctccagatccccaatccacacccgcacggcagcgagccagcgagccatctgctccgcgggccatggccggccgccgcgaaggcgagcacccggcgagcccgtggcgacctggggtcccaggggaggagggggactccggccccttcccctccgccatcatcctcgtcgcgctcgtcggcgccaccgccaccaccgccgccgtcggtcaactgcgccggacggtcagatggttctacactcagctcagtaggtcggaaccatatgtgtactgggaagatgtacctcgaacccgaaggccaaatcggtccggtgaagcctgggaacaatattaccagaggatgcgcgaaaggaatgaggatcaaagggaagagtgaataaa

SEQ ID NO: 16931 - DNA, 877 bp, Setaria italica
  Peptide Sequence Number=SeqID_82905
tgcttttctgcagttgtgacccccaaccttctcagcggactcggcgccattattccatcccacagtttccaaccagccctcgtccttcctgcaggcagccggcctctttctggtgcgccgcccggccgtgctcccactcctccggcgacatgtcgaagaaaatcgtggtgaagatagacctgcacgacaacaaggacaagcagaaggccatgaaggccgtctcgacgctcagcgggatcgactcgatatccgtggacatggcgtcgcacaagatgacggtgatcgggatggtggacccggtgaacgtggtgagcaagctgcgcaaggcctcgtgggcggcgaacatcgactcggtcggcccggccaaggagccggagaagaaggaggaggagaagaagaaagacggtgacgacaagaaggacggcgacgacaagaaggacggcgacgctaagaaggacggcgacgagaaggacggcaagaaggcggctgcgccgacggagcagcagatcctcgccgagctgatgaaccagtaccgggcctactacccgccaatgaacacccactactacgtgcagagcatggaggagaaccccaactcctgcgccatctgctaaacgagaagctgcacgagctgaggtaatcaggcacggttaattactatatgtgcatgtacatgtccgcgtaagaagtacgagaccgatgataccatgcatgcttctgcgacgtgtaaaaaaaaatagtgcctggtcatggtctcatggtggacacgcagcgtgtctccgcatagagaaaaacgtatgacggtatgtgtaagtgaaactttgctttctgagataactagagatgtaatgatatgcagctacagttttagattttt

SEQ ID NO: 16932 - DNA, 385 bp, Setaria italica
  Peptide Sequence Number=SeqID_82906
ccccgtgccgggctccgccgccagcgccggcttcgccgtcggcgcccagaacttgttcgcgcaggtcacgatctccgggtacgctcccgcccacgaccccgcgtgcccaggcatgtcgatctcggggatgacgcgaatgccgaaggcctcggcgaagcggacgacgcggcggacgtcctggtccgtgtagcgcatggcgggggagtaggagccgaagttggcgagattggggacggaggggaggacgatggggaacgactgggcgtcggtgatgtgccagtggaacacgttgagcttgttgtaggccatggcgcggatggtgcgaaggatgtcgcggacggggtagtagttccgtgcggtgtcgaggaggatgccgcggtgggtg

SEQ ID NO: 16933 - DNA, 1361 bp, Setaria italica
  Peptide Sequence Number=SeqID_82907
gtaggtaattcggtattgggttcgggtctagtcgtacgtatttcggtaggtatttcggtaggaggagaggtggaggctcgcggaggggaggtctcgctcggctgagcggcttgcggccatggctgcacgcgctatcgccgagcgagaggaggctgttgcgaggctcgagggggagaaggccggactcgagaagctgctagccgagcgtgagaaggagcaagcacaggaggcttcggagttgcagactagtatgattgaaacaatggaagcagtggagatagagaaacagcgacaccacagcactagaatggaagcccttgcacgtttggctacacttgaggtcacaaacgcggagcttgcaaaatcgtttgccagggaacaatggaatctggaagttcaagtagatcaagttgcacagcttcgagaggaggttgaaatgaagacacttgctcaagataaatacaaaagaaagctagctaagatacaaaagacaagcaccgctccggttgatgaaatagaatcgttgagaaggttcaagctggaggaggaaattattgatgcagaatacattctgacttgtgatagaattgtgagcttgaaggacaaggcaaggaagattgaagaaaacattgagatgactagaagagctatggttcaacctacagaggtagaaatcgaactcaagaagaggcttgatcaactaactgatcggttgattcagaaacaaatgcaggtcgagtccctatcttcagagaaggcagctctgttaatgagaattgaggcagtctctagattgctcgacagcagtgcctcatcgatggcttcctcaagctcatcaagaatggacatcgaagccggtgcatggcaagaatcacattcaccaaaatttcgtgacaggattcaggctggacagcagcaactgggatccgcaatcagacagcttgattcaatcttctcggctgggcatattttcttgaggcggaatccaaaggcccaaatttgggccttcgtgtacctggtatgcctgcatttatgggtattgtacatattaaaatcacacccaacagtatcagaatctcaccctggtgctactttttctttggagacattaaacaagactagtatttgatgtttcccccctgatacattactccagtatactccctgatacattactccagtctactcgagttgtgtaaacgaggcatattcctgctctccagcctaatctagctgtgtaattgtatcatatattttattctcattgccacttgtccccaataacaatcagaacataatagagagatacacagaatgatttcataaatgaagttggaatttcaattgaaaaattgtaaaaa

SEQ ID NO: 16934 - DNA, 273 bp, Setaria italica
  Peptide Sequence Number=SeqID_82908
atggatatcgttggcattgatcaagaggaacaggatgcaatcttcagagtagtagctgcaatccttcacctaggaaatattgaattctccaaaggaaaggaaattgactcatccaagttgagagacgataaatcagtccatcacttgaaaacagttgcagaactgctaatgtgtaacgagaaggcccttgaagattccctttgccagcgagttattgtaacacctgatggaaatatcacgaaaccccttgatccagattctgctgcactaagt

SEQ ID NO: 16935 - DNA, 626 bp, Setaria italica
  Peptide Sequence Number=SeqID_82909
actactcgcacgtcctcccaagtctcatccctccgcccgcggcgcccgcctctgcgtccagaggagggaggtggtcgccgatgaccgtttgatcggccgtcgccatgggatgcgccggatccactccaaagactgacgataatggtaagaagctgaaaaaaccaaagccttggaagcacacccaagcaataactctggcacaactcagacagatgcgtgatgaattttgggacacagctcctcactatggtggacagaaagagatttgggacgcacttagagctgctgcagattctgatttagcacttgcacagaccatagtggatagtgctggcatcatcgtatcaaattctgacatgacactttgctatgatgaaagaggtgccaaatatgaacttccaaagtatgttctaagcgagccgacaaacttgattcgggaaggttaaattcatagaatgtaaatggtccaatgtaaattatgtaaatcacatttattcactgacacaaatcttgaactgattggaactgcaataaagttatgtaccaaatttctgatttacgctgttctccttctagtcacttttcctggattgtagcgcattgaactctcatacggtcgtaaccta

SEQ ID NO: 16936 - DNA, 274 bp, Setaria italica
  Peptide Sequence Number=SeqID_82910
ctggatattttcttctcaagtgaccacccatcaatcagaagagagatcctactccagaactctgatggcatgccttctgcataatgctccattgactttttctcactttcctttattagtttgctgagagtatcatgaaactccactattgagtgttcataaagttcgatttgagaatgcatttcatgattacatgcttggaagcgttcttctactgattttacccttttcttcaaaagatcaacaaaataaagacagaactctgatatttttt

SEQ ID NO: 16937 - DNA, 531 bp, Setaria italica
  Peptide Sequence Number=SeqID_82911
attgatgatgtggacttggtgaagatatctgcgctgaaaaattctctctcttacataaacattagaaactgcaccatgttgacagatgatggcatttcaaactttctgatgaagtgtacaaagatccattcaatagttctttcttatacttcgtttggaaaccgatcgattcaaacgctatgcactacaaatcctgaccacaatgatggacatgctcatgttatggcatttaatatgcaagagttacatctgggtggctgcaaaggtattgatgctgctgctttgtcccagctaatgagcattataaatatcacgaaatttctgtgcttaagggaaacatcacttacagatggtgcactctgcaagtttgttggctctagtcttgagtatcttgatgtttcagagaccatggtttctatggtatcgttagcaccagttatacgaagaaattgtaatttgaactgtctagaaacagctggatgccgtaatctttctgtttgaacgtgatgaagtagaacaatcagtggtaac

SEQ ID NO: 16938 - DNA, 386 bp, Setaria italica
  Peptide Sequence Number=SeqID_82912
agcatccctcttcgtctttaacaacttgtgcagcggcttcccaggcctagaataccatatacaccttaagacatcaatatagcatacaaaacataacttgacattgttagagtaacagaagaatgagagaagcactagattttacaaataaaacaggggaaagaacagtagaggtctgatcatcttcacatgagaaagacattataactgtggtttccaaactaacagaaagtgcaatatgtgcatataggaaacagaaacacaaatgtagaaacatgcggtacagacacacgtccattattcatagtgtttaaagtttaaaaaggcaatagcataattgtatttgttatttctattcttgtattctattaattgttttctttctt

SEQ ID NO: 16939 - DNA, 542 bp, Setaria italica
  Peptide Sequence Number=SeqID_82913
tggtaagcaaaagaaatagaaaagcaacgacgggtagacagcagatcccggcggaatggcggcgccgccgccggcaccgccgtcggccttgaagccggagatcggccccgacggcctcgcccgagattctcccgtaatcgcctacaccgagaaggtcattttggaggagcagctgcagctgaagaaatacattcaggagaattattccaaaattcgtgatgtagaaaaggagttagagaacctgactttagaaatgaaactgacagctggtccgaagaaagcaggtatctaacaggttttcaaatagcaaatatagttcaccttctatacacagaatattcttacctttagtgctttgattaaccttctacaatctacatactgtgtactctcaccttattacttgttcctgttttcgtttgttctggtactccagcacttgagcatttgaggaaaatgattgaaatatcaacagagaaaatacgtttagccaaggtgaaagaggaacaggcaaagaaggttggggatttcaagtttgagtg

SEQ ID NO: 16940 - DNA, 480 bp, Setaria italica
  Peptide Sequence Number=SeqID_82914
gcagatcccggcggaatggcggcgccgccgccggcaccgccgtcggccttgaagccggagatcggccccgacggcctcgcccgagattctcccgtaatcgcctacaccgagaaggtcattttggaggagcagctgcagctgaagaagtaagccgttcccctgctcccctaatctttgaatctcttgtgcgaaattgtggatctacattagcccttttcatttatgtggatataaattttgtgcatttgcaaatcaatgggtgtacacgagttgaaatttcagctgtatgtgtgagaatgcagctatacgaaaaggatagatcagaagcatatactcctcactctttctcgggacgagactcctctgcagaaacagcatagggagtccggtggctgacaggtgaggggcatgagataaacgtctacgttgtaggaaagtattctgcataggaactataattaacatgtcgaactgttcaaa

SEQ ID NO: 16941 - DNA, 860 bp, Setaria italica
  Peptide Sequence Number=SeqID_82915
taagaaagaaaacaattaatgatcagatgaatacaatcattatgctattgcctttttaaactttaaacactatgaataatggacgtgtgtctgtaccgcatgtttctacatttgtgtttctgtttcctatatgcacatattgcactttctgttagtttggaaaccacagttataatgtctttctcatgtgaagatgatcagacctctactgttctttcccctgttttatttgtaaaatctagtgcttctctttcattcttctgttactctaacaatgtcaagttatgttttgtatgctatattgatgtcttaaggtgtatatggtattctaggcctgggaagccgctgcacaagttgttaaagacgaagaggatgctaagcagaaactgtgtgatgatctgaaccatctggtccaggagagtgctgctacccaatatacaaaattagaggaactgaagaagcgtttagaatctctaaatcccagcagggcttctgtcgaagtttcacatgctaccacaaattcagtatctcagccgcccatgtcacaaaatcctgccactccaactggccctttggataatggtatagagcccgcctctattgaacagcagcaaagacctgcagaggcagaaaagaagagaagaccatcaaacgcaagagggaggggtggtgtgatgatccttcccaagggaagagggagttccggatcaggatggaccggtgctgggtttgatgtagatagcggtacatgacacacatgatttttgttgtacttgacacacattgaaaccatacactttcatgcacaggaatcagattgatctgcatcagaatcagccattccagagttcaagtgcggt

SEQ ID NO: 16942 - DNA, 1040 bp, Setaria italica
  Peptide Sequence Number=SeqID_82916
gtgaaaaataaaagtcagcctaagaataaggaagcaaaagaaatagaaaagcaacgacgggtagacagcagatcccggcggaatggcggcgccgccgccggcaccgccgtcggccttgaagccggagatcggccccgacggcctcgcccgagattctcccgtaatcgcctacaccgagaaggtcattttggaggagcagctgcagctgaagaaatacattcaggagaattattccaaaattcgtgatgtagaaaaggagttagagaacctgactttagaaatgaaactgacagctggtccgaagaaagcagcacttgagcatttgaggaaaatgattgaaatatcaacagagaaaatacgtttagccaaggtgaaagaggaacaggcaaagaaggcctgggaagccgctgcacaagttgttaaagacgaagaggatgctaagcagaaactgtgtgatgatctgaaccatctggtccaggagagtgctgctacccaatatacaaaattagaggaactgaagaagcgtttagaatctctaaatcccagcagggcttctgtcgaagtttcaggtgctaatactgcgcagcatgctaccacaaattcagtatctcagccgcccatgtcacaaaatcctgccactccaactggccctttggataatggtatagagcccgcctctattgaacagcagcaaagacctgcagaggcagaaaagaagagaagaccatcaaacgcaagagggaggggtggtgtgatgatccttcccaagggaagagggagttccggatcaggatggaccggtgctgggtttgatgtagatagcggtacatgacacacatgatttttgttgtacttgacacacattgaaaccatacactttcatgcacaggaatcagattgatctgcatcagaatcagccattccagagttcaagtgcggtgaacaccatgtactgttgattatttgtttatcaattgtatatgaataatgtaaggactgtccaatttgaactcgaaaaaaaaaaaaaaacggttatatca

SEQ ID NO: 16943 - DNA, 724 bp, Setaria italica
  misc_feature (44)..(44): n is a, c, g, or t
  Peptide Sequence Number=SeqID_82917
gttgttgtcctttggtctagttcttctttagttttttttttttntttttttttttttttgggtttaaggatttcaattttaaatacagctcaaagtttgcaagttcaatcacatcatcacaagattatgccagcatgcatctagaagcaactatctcaaagtttgcacgtgccgccaggcaacaccgccgaggacattgtacgcggcatgtagacagcatgcatctcatcgcatcatcacaggattatgccgaggactcaagcaaacgatcgagaagcaactaactagcttagcagcgtggcatgtgaattgaatcaaaaggggaaaaaatcactgctaattactcactcttgttgttctttttagtggctgtgcaatgcatttggtctgaaacatagccttttatctggctactggcttctaacatggtcgtggaacatcaaatcttttggcaatcactaccaagcccatcatggctagaaaccgcagcatctcgtcgtgagaccgccggagtcgccggccgacacctgaatcgactgcccctccccgacagagccagcgctggacgccgccatcgccttcttgctgacgatccggtagatctccgtgagcgcggtctcgaacgccgtgtcgacgttggtggcgtccagcgccgaggtctcgacgaacgacaggccctcccgctccgcgagcgccgccgcgtccgcctgcgcgacggcgcgga

SEQ ID NO: 16944 - DNA, 378 bp, Setaria italica
  Peptide Sequence Number=SeqID_82918
acaatacgacgctttcctttactctgggatcggatcatcggcttcctcattggtcagtcttcatcgtccatggacaggctcctcgccggcctgcttggcttcctattgattgcgtcagtaggaagccatgcagctcgtgctccggatcagtactggaagactgcgcttccgaacactccagccggcggcacgaccgtgaacgtcggcgggggcggtgtccatgtcgacgctgggcatggcaagcccgggggcacgaccgtcgacgtaggcaagggcggcgtcggcgtcaacgttaatcctggcagcggcaagcccggtggcaccacggtcggcgttgggaagggcggtgttggcgttaacgtcaaccctggctacggc

SEQ ID NO: 16945 - DNA, 186 bp, Setaria italica
  Peptide Sequence Number=SeqID_82919
tctttcccccatctcctgagccccgatcaaatcgatcgccagcgccggacgccccgatctcccttgtcccggacaccggagcggagagagtcgatggcggcgtcgtgggctgctccgccgtcggggtacccggtcgggcacgggcaggcgtacggcaaccagcaggcggccgcgccgcacgcccca

SEQ ID NO: 16946 - DNA, 810 bp, Setaria italica
  Peptide Sequence Number=SeqID_82920
tccgccgtgaggatgccattatccatgcccttgaaattgaaaggtcccgttttccaaataactatgatgatgatcttgaagaggacaccgatgatgatgtttgtgcatcccagaatatctattctgcaaaatctaaaaacataaatgggttcaacaaaagatcttctcgtggcgcaaggagtatgtatgatatagaagaaagttcagctcaagatatgtctcaagccttgacagtgtataaaaagccacagaatttatcctcttcaagtactaggtatgcatcatcaaaaaagaagaagcgtaaaggacgtaagaatttcgaggatgatacagttcaaggattccagcgtatgagagatcttagggagattggaacaaagaatgttaccaagcagaagtctggtgcgggcatcttttctgatgtacctcttcttgaaagtggaccaagctttggctatgatttgtccagtactaatgggataaaaaagggcaagcaatctcattcatccataaaaaagaaacgatccaatatcgggcaatcctatgaaaattcgaggaagaaagataggcatcgtcctctgtcgaagttatgtgaagatccagaagcgtctggaacatattatcactgggacccttcaggccagtcttctagccagtacccaggaggccagatgcccaatatgtttgaaccaagtagggcaaaaactattttttcaactgatgtaaataactgttcctacagctcaggcacttcaagtttggagacattattagatacatcacacaacaatcacaaaggttctgccatct

SEQ ID NO: 16947 - DNA, 887 bp, Setaria italica
  misc_feature (1)..(10): n is a, c, g, or t
  Peptide Sequence Number=SeqID_82921
nnnnnnnnnntttaacgaagtctgtttggtatgaacctttgattgtgattttttgccccctcctctcaggtattgctgcctagttacaactgacaaaaactgctccatcgtctgcacagaacgtagagtatccaaaactgtttttttcctggctgccaatgcccaatggccatcacacctttacatttcctatgcatatactgctatcaaatatggagtgaaggatcagctggaactcgacgacaccgccgcgacgatctcgtctcgggccttctcaagggcgtccagcaagttctccggcttcctgccaccagcctgcgcgaagttgggcttgcccccgccgcctcccccgcagagcttcgctatgccgccaacgaacttacctgcctgcagccccatcttgacgactgcggggctgaaggcggcgaccaagctgactttaccgtctcccgggcttgatcccaagatcactgcagcagggtcttgcagggtgcctatgaggtactcggcggcgcttttcagcgcgtcagcgtccacgtcgcccatgttctcgaccacgaccctgacattgtggggttcgacggttgtggctttacttgcaagagatgctgctttgagcaccgcgattttgctgcgtagagttgatacttcgtttctggttgctcttagttcttcaagaatcgtttctactctgccattcacatcttcagccttaaccttaagggatgagcacaagcgtcgcatgtagttgtcccgagcacagacatagtcgacaaatgcatcacctgcgactgcctctatccttctgattccagaagctattccctgttctgagattatcttgaaaccacggatctcagcagtattactgacatgcgttccaccac

SEQ ID NO: 16948 - DNA, 431 bp, Setaria italica
  Peptide Sequence Number=SeqID_82922
gcgggactgtgaacccagatagcagcgcaatgtaacggtcgatccgcaggacaaggtccagtgggaacttgtagccgggtaaagaacgagccgcagtgggtgtcggccacctcccagcagtcctcgagccgcgcgtcccggacgacgatctcggggcacagggccggcagcagctcgaccgtctggctcgcgcagcaaacccctgccgtagccctgcctccggcgcggtacggccgccggtgagctgctcggacggaagggaggatgatccgattcggattatttgccgtcgccggccagatcatggcgtggaagccggagttggagctccgggcgaaggacgccgccggagccggccccacacggggccgcgcgggagcctcgcattgctcccggtcccggaggagcagcagctgtttgggaggcgcgcg

SEQ ID NO: 16949 - DNA, 555 bp, Setaria italica
  Peptide Sequence Number=SeqID_82923
tctagtcttctaaattctttgggtctacttagtctttctattctattgtaagtcttgttattgcactcctttagctatcttgggttcgggccatctagccccttctggtacacggatgcgtttgaagccttggttttcgtacaggcgtagggcggcggtgttgtttacatcgcaatgcagtgccatggaccggcatcccccaactcctcgctcgtgcctctgcttcttggaccaacattttagcgattcctttacgccgttcctcctatcgcacagcgacgtttgctatatatgcaatacctgttcttctctgcttcagggatccccttctcggaagatagtctgccactgtgtcaactgtaagaatgccagctatggagcctctactgagattgtatttctgaaattcggcttctctaagatctctgcactcgatgtcgaagccattggttacagaattagaattgaccgcaacaaggcaagtcctcgtactacccgggttggtaacttgtaaattcctagtattaggttagttagttctttaattttgtttta

SEQ ID NO: 16950 - DNA, 577 bp, Setaria italica
  misc_feature (1)..(39): n is a, c, g, or t
  Peptide Sequence Number=SeqID_82924
nnnnnnnnnnnnnnnnnnnnnnnnnnnnnnnnnnnnnnncacaatgcccaaattgatatggccatccaatccctcttactaatcatgagcagaagcagaacatgttttagttcatactccagccagtttgggccaaactggtttggacacccctactaacacacccaccactttcaaacaatacgtagatgatatataccatttacagagtagcctcaactatataccaactgctgtacatgtgaatggtgcatctgtcatctgtgcagaatctacaaacctaaacctttttcttttcttttcctggttggaatttatacagctcaaatcttgggcactagcttcatcatgaagctgtattgcactcctttagctatcttgggttcgggccatctagccccttctggtacacggatgcgtttgaagccttggttttcgtacaggcgtagggcggcggtgttgtttacatcgcaatgcagtgccatggaccggcatccccaactcctcgctcgtgcctctgcttcttggaccaacattttagcgattcctttacgccgttcctcctctcgcacagcga

SEQ ID NO: 16951 - DNA, 1335 bp, Setaria italica
  misc_feature (1)..(28): n is a, c, g, or t
  Peptide Sequence Number=SeqID_82925
nnnnnnnnnnnnnnnnnnnnnnnnnnnnttttttttttttttttttttttttggtcaatcaccattgaggatcacactcgcattctgaatctctttgtgaatacattgtccgtaagattcttagtaaaagaaaatccataaagcaaaactgagtgccgaaactgtaaaagtttttcttcacttcctccaggctatctgtaaagagctctgggtcagttcatgtgaagaagtgataacaccctcacaaaattctgggcaataattcgtggctgttatataccatttacaaagtagctcaactatgtaccaactgctgtacatgtgaaaggagaaactggtgaatctgtgcatacgtgcagtatccatgcattccaacttcattttctgtccagactgacttatacagttcaaatcttgggcactagcttcatcatgaagttgtattgtactcctttagcaatcttaggttctggccatttagctccttccggtacacggatgcatttgaaaccttgatttttgtacaggcgcagggcagctatgttgtttacatcacagtgcaatgccatggtccggcacccccaactccttgctcgcgcctctgcttcttggaccaacattttagcaattcctttccgacgttcctcctttcgcactgcgacatttgctatataagcaatacctgttcttctctgcttcaggggtccccttctcggaagatagtctgccactgtgtcaactgtaagaatgccagctatggagcctctactgagattgtatttctgaaattcggcttctctaagatctctgcactcgatgtcgaagccattggttacagaattagaattgaccgcaacaaggcaagtcctcgtacacccgggtggaactgaaaatccagataggagagcaatgtaacgatcaatccgtagaacaaggtccaacgggaacttgtaatctggaaagaaagagctgcaatgagtgtcagctacttcccaacattcttcgagccgtgcatctctgacaacaatttcagggtacaaagaaggcagcagttcaaccgcctggctagcatagcaaattcctgcggcaggtttgtaggcgaaggacgggccgtaacgccggaaggcgccggtagatcggtggcaacgatcaacaggtgacgcggagaaggaggacgacggggcgcgagacaggctcagcgccggcgtaatcatccttctccctggacctcgactcctccgctccgctgccttgctgtctctctccaccgattttttaatctgtcgttcagcggaagcccagccagccaagcaaaggccacaactttccgtcttc

SEQ ID NO: 16952 - DNA, 3184 bp, Setaria italica
  misc_feature (3168)..(3184): n is a, c, g, or t
  Peptide Sequence Number=SeqID_82926
aaagcgtccttctgtgcgataattgcgactctgaataccacacttattgcctgaacccaccactggcacgcataccacttggaaactggtactgtccatcatgtttgtcagggcaaaacagaacaaatattgatgacaatactcatgtcctaatgcaagaagaaaagaagtgtgttggggaggaagctcatgtttttcttgagaaactcaacaagttagctatggccatggacgagaaggagtactgggagcttagtgtaccagagaggatatatttgctgaaatttctatgtgacgaattgctcaacacagctctaatcagggaacatttagatcaatgttcagataagtcaaatgatctccagcagaagttacgttatctgaattatgaactgaaagagttgaagtatcaggtagaaataagaagtacatatgctacacaaagtagatggatgaaaaatgatcatgtaagcaatagttcaggacctgtggaaaatcagcagcgttctatgcccacagcattggagcatcttgaagaagctgaacgggttaatgttggagttaacctaaacacagctgctgaaggggctcctactggaccattgaatgtgggtaaaccttacagtacggacaatgacatatccagtacatctgttactgaaggaaatagatctttgggactttcaaaacaagcatcggatatagttactgaccggattgacgggagttccattggtgaagggtcccaaagttgtgagaaatcagtaggtggcagaagtggtacttgtgataatttgaatatgggagaggatcattctgctgcagttatcagtacaccaaatggagagttgcctgatgacaatgctaggacaccatcccaggataaccttgaagcatcgacaactaaattggccgaccatgatgctgataacaatgaaacaaataatttattggataggatttcacaggttcaggattcaattagcacatcagagttacagctcagtatggcatcctttagaacgagagtgccttggaagggattctgtgggtcgattgtactgggttacaggaagacctggtaaacgtcctcgactagtcgctgatggaagcatgctgatacccaaagacagagacattagcatggtcaccagctatcctcagtctacatttgattgtagaggttggaattcggcatcaattgttatatatgaatctgatgaagaaatcaagtgtcttgttgactggctaagggacactgatccaagggagaaggacctgaaagactctatcctgcactggcaaaagtctctttatcaccaggctagtttttctgtcagtgattctccagcatccaagttttcaaagagtgaaccacttacggaccttccagacaccaaggcttttatagttttggagcaaaaatatggcctgcaattggatcaagacactactgagctatccaaaaagagaggaaggaagacaaagtcaggttctgaagaaggaatatatcgctgcgactgtttagaacctgtatggccttctcgacaccattgtttaacttgtcatgagacttatcttacatcgacagaatatgaagggcatgatggtggaaaatgcaacagcagcgatgactctcctaatcaaagcaaagaaagtgatgaatcaaaactgaagggtaccaagtctgatataaaggaaaaggatcctgtagatcatagttgctctgttgagccatctaacagtggaaatttggatccatgccctgtagactttgaagaaatttgtaaaaagtttatcacaaatgattcaaacaaggagatagtgaaggagattgggctccttggatcaaatggagttccatcttttgttccttcacctgcatttttccttgatccaccagctctgttaagtgaaaataaaagaaatgatgatatcccaaatgattggtcttcctctttggaggaatgccaggcaatgtctgccaaaaagtctgggcaagagggagtccaagctgatcaagattgtcctggcaatacaggtgatgagcagatgccaaaatctaagaagcctgttagggatagtgcttcagccaaggaagcatcttctttgacagacaaaccgacaagattactaactgttaacgggggcttggttccggagggatcattaatgcctctgataggcaggaactttcatatcctaaagcagctaaagataaacttgcttgatgtcgaagcagctttgcctgaggaagcattgatagcctcaaaatctcagcaaataagaagacgttcatggcgtgcttttgtgaagggtgcagaatcaatatctcatgtggtactggcaaccaacttcttgcagagtatgataaaagccgagttcctgaagaaagattggtggtattggtcctccttcacagcagctatcaagacgacaaccgtatcagcgcttgcactcaggatctacacccttgacgactgcatcatgtacacaaaggatcctgctccaaaccctgatccagctgacaatgcaagatctggaaacaaggggaagaggaagagagatgccgattcatgagcatcatgatggagggtgggtgctcctggctccactgtagattctaaaattagaagtttctcagttctcggcagcataacaatgcggtcaggtagatcggaggtatagatgatagtgatacaagtcatcttggttaccgtagattgtggtgtcccatcaagggtgtgaccttgttctacccatttcggtctcgtcatacttaccagcccgccgacttctgttgttgttaaggttcagaataatctctgtaaattctgttcgagggatggcaccagcaattattccggcaggagcagcggcgataatttgcctaatgggttggcctgttctggggattagatcaggtattgctaggtcggtaggattgatcccatttctaccctgcttcgttttattttagtggcagcagtgggtagttctcatggtgtttttttagtgccgggcattgtgttcaggatgtccctgcagtatctgactgcgttagggcattgacacatgacgaatgtaatatttttttgacatagaagttgtaactaaaccgaaactaataatgaagaatgaaaaatgaaataccaaaaaaaaaaaaannnnnnnnnnnnnnnnn

SEQ ID NO: 16953 - DNA, 1081 bp, Setaria italica
  misc_feature (1077)..(1077): n is a, c, g, or t
  Peptide Sequence Number=SeqID_82927
tacttggcagaggcttgtcgtaaaaagtaccccagaatccagaaaaaccaagaaaagagagaaatattatctccatctcagaggctatcttgaaaaagtgccgtattgtcctacggcgtgctatttcttccgatgaatcaaagccttttggcaatttgcttggaacaactctaacaaattccaatgagaatgaggatgagggcattcttggatttcctggtatggtatctcgccctttggacttccgcacaattgatataaggctggctatgggagcttattgtggatcttgggaggcctttcttgatgatgtacaagaagtaatccataatctgcaaactgcatttgctgatcgacctgaagtgctggtaatggttgtagcgctgtctcaaagttttgagtcattgtataagtcagaggtacaagaccttgttaaaaaatttgacaaatatctaagcaacgagaatggtaattcggaaatccacaatcaattacaagatgctctcatggcagcaaacaacaagctgcccaaagccccatgggaggatggtgtctgcaaagtctgcggcatcgatcgggacgatgaaagcgtccttctgtgcgataattgcgactctgaataccacacttattgcctgaacccaccactggcacgcataccacttggaaactggtactgtccatcatgtttgtcagggcaaaacagaacaaatattgatgacaatactcatgtcctaatgcaagaagaaaagaagtgtgttggggaggaagctcatgtttttcttgagaaactcaacaagttagctatggccatggacgagaaggagtactgggagcttagtgtaccagagaggatatatttgctgaaatttctatgtgacgaattgctcaacacagctctaatcagggaacatttagatcaatgttcaagaataaagtacaaaatagaatactaccaagacaagaaagttaacgttaatactagaaattaatagaaactagaaaagaagttagaaagtaatacaaggtaagaaaataaagaaagtaacaataataagaactaaacaacaaagtaanaata

SEQ ID NO: 16954 - DNA, 328 bp, Setaria italica
  Peptide Sequence Number=SeqID_82928
caagcatcaatcgccgccgccgccgccgccacctctccccgtctccatctccatccccgagaaccattccaagaatagcagcagcagcagcctccggtgagcttgaccagcaacaggaacccatggccctccgcgcgctcgacaacacgatgcccgccgtcgtcgaggagcggcccaagaaggtcgctaaggtggccgtccccgcccccgccgccgccgtcaaggccgcctcccccgggagcggcaagaagaagaagaagaacgacgagaactcggcgcccagggccacggccgcggcgggggagcaggctgtggagtacatcccgtc

SEQ ID NO: 16955 - DNA, 346 bp, Setaria italica
  Peptide Sequence Number=SeqID_82929
ctcgccggcgaggagcaccagctcaggttcagccagatgtttcagctggtgcccaacgagcagggaagcttcttcgtgcagaacgacatattccggctcaactacgggtgaggcgcggtagcgtgcggttgccgaaaggaagtggatgctcgtcgggtgctttggtgccgcatggacacgccgggcgcgcgatcctttgttttcttttccctctttcgctttcagtcttcccagatgttcgtttaggatgtagcacccccaaacgtttgcgttcacaaaatgtagcgtcctaaataaagtctcgtcatgcatgatgcatgtatgcgctgtcaaattcgatcagtcg

SEQ ID NO: 16956 - DNA, 406 bp, Setaria italica
  Peptide Sequence Number=SeqID_82930
tattccgtcaactatccaggccagtttaaagcttcaccggcagccatgggtaaggagaagtcccacatcaacattgtggtcattggccacgtcgactctggcaagtcgaccaccaccggccacctgatctacaagcttggaggtatcgacaagcgtgtgatcgagaggttcgagaaggaggccgctgagatgaacaagcggtccttcaagtacgcgtgggtgcttgacaagctcaaggctgagcgtgagagaggtatcaccattgatatcgccctgtggaagtttgagaccaccaagtactactgcaccgtcattgacgcccctggacatcgtgacttcatcaagaacatgatcactggtacctcccaggctgactgtgctgtccttatcattgactccaccactt

SEQ ID NO: 16957 - DNA, 687 bp, Setaria italica
  Peptide Sequence Number=SeqID_82931
ttctttattttccgtttctttttcctttctagtcggttttaagtctttctaccggtctagtcctattgggttaaggtagtaagttcccactatcaacattgtggtcattggccacgtcgactctggcaagtcgaccaccaccggccacctgatctacaagcttggaggtatcgacaagcgtgtgatcgagaggttcgagaaggaggccgctgagatgaacaagcggtccttcaagtacgcgtgggtgcttgacaagctcaaggctgagcgtgagagaggtatcaccattgatatcgccctgtggaagtttgagaccaccaagtactactgcaccgtcattgacgcccctggacatcgtgacttcatcaagaacatgatcactggtacctcccaggctgactgtgctgtccttatcattgactccaccactggtggttttgaggctggtatctcaaaggatggccagacccgtgagcatgctctccttgctttcactctcggagtgaagcagatgatctgctgctgcaacaagatggacgccaccactcccaagtactccaaggcccgttatgatgagattgtgaaggaagtctcctcctacctgaagaaggtgggttacaaccctgacaagattgccttcgtcccatctccggtttgagggtgacaacatgattgagaggtccaaca

SEQ ID NO: 16958 - DNA, 435 bp, Setaria italica
  Peptide Sequence Number=SeqID_82932
ggctgcgccgggtgcggcgccggatccacgagcggcccgagctggcgtacgaggaggtggagaccagccgcctggtccgcgacgagctggctgccatgggcgtcggattccgccacccgctcgcgcgcaccggcgtcgtcgccacgctcggcacggggcggccacccgtcgtcgcgctccgggccgacatggacgcgctgcccatccaggaggccgtggagtgggagcacaagagcaggaaccccgggaagatgcacgcgtgcggccacgacgcgcatgtggccatgctcctcggcgccgccaggatcctcaaggcccgcgagcaccacctcaagggcacggtgaagcttctgttccagccggccgaggagtccgggtgcggcgcgaagcggatgatagaggacggcgcgctggagggcgtggaggccatcttcg

SEQ ID NO: 16959 - DNA, 511 bp, Setaria italica
  Peptide Sequence Number=SeqID_82933
gcagttttaggttttgacgaccgaaaacacctcaacagcgagcccttttctcacggtcgcgctcgcgccattggccgtttgtccgctcatgcgtgctcggcgatcggcacggcgatggttacgtgccaaatgccactttttctgaaaagatgacacggccagctgccgttctttcgttccaggttttggcacggcactcgtgactgacgaggtgcctgcgccctgtttcttcccctcccccgtgtgttgtttcaggaggccgtggagtgggagcacaagagcaggaaccccgggaagatgcacgcgtgcggccacgacgcgcatgtggccatgctcctcggcgccgccaggatcctcaaggcccgcgagcaccacctcaaggtacgcacgccgccactaccctatgtaactgaggaaaactgaaaatcctttcacttagctgctgtaagtgtaagtgtaacatctctttcagagtgaacctcgatctcttgccgtgcaagggatgggatat

SEQ ID NO: 16960 - DNA, 274 bp, Setaria italica
  Peptide Sequence Number=SeqID_82934
gggcgactcgccctggggggttttgcatcttctcacgagccgtcactttttttaccctctcgcggaagtatcttctccaacctccgagtgtcaaagcctctatcactctgcttcgctcttggtttcggggatcgaaggcaggagaggagccatgagccacgaatttgactacctgttcaagcttctcctgatcggcgactcctccgtcggcaagtcctgcttcctccttccggttcgctgacgactcctacgtcgacagctacatcagcaccat

SEQ ID NO: 16961 - DNA, 428 bp, Setaria italica
  Peptide Sequence Number=SeqID_82935
taaacgaacccagaatatatagatatatgccatgcatggatacaatatatgtgatgtacgtaactcccatggatcacctcatcaacgacttttagaacatcatttacgtagtactgatgctgaggaaatcactgttagtttgctcatcaaacgaccaagccatttgcaatgaccacctctagctgctagctagcagctggggcttagaactcttgggcgtcgaggtcgtcgtcgtagtcgcgaatctcgtcgacgtgctcgacgacgacgacgtggacgccggggtcgttgacggcgcagctaccggagacgagcaccgagttgttgacggcctgatagttgctgttggtgtaggcgctgatcaccacgtcctcctcctgctctccttcctggttgtcgttgtcctcatcggcgtccgcgttgccgac

SEQ ID NO: 16962 - DNA, 221 bp, Setaria italica
  Peptide Sequence Number=SeqID_82936
cattttatctctatattacacgatgcatttcagagttacctcttgttttccagcagagcctacggttcttgctatgttcaacaattgagtacacccgtatttacctcttgctgaacatagcaagaaccgtaggctctgctggcatggttccgtgcatttatctctatattacacgatgcatttcagagttacctcttgtttccagaagaggctccacaaga

SEQ ID NO: 16963 - DNA, 409 bp, Setaria italica
  Peptide Sequence Number=SeqID_82937
cttagagttggccaatatataagcctgatatctccttccgtgtagcagataccaagcttcttttactaaagcatcttgtgataagttgcccttctacgtataaaaatgtgaacacgcatagtttctgtcatggcaaatctgcatttaatttcttatacaattcaatacaggcaattcagtgcagattttgacatgatgcagggacctcattggagattcaatcacttcagtaaccatgcaatagaccataaatcaagtaaatttaaaaaacataaacaaaagagcatctaacaaaagagtatccaaagatgcatactgttataaaatatgcaatcaggtgatcttttactagacactacgaacataatgcattaaagtctacaataaatcagagtacagccactccgat

SEQ ID NO: 16964 - DNA, 618 bp, Setaria italica
  Peptide Sequence Number=SeqID_82938
tacttagttaggtaccccgtaagtctaaagtaaatgtattcctccaattgcttcccaatccaacttggaatccacgtctagtgagaaagttgattcaataggtgtcatagcttctgcagcagtcttttcagtcagatccaaggctccacttatgattgtagtctcatcatgagtaagctctccacccttgccagcctctttgctatggattgaaactagagctttcaactgagctcgcctaaaaagtgcagactcattgtgcccaagagcacagtccaagagcttcccaatggggtaagaaattggatagcacatgaccatgaggatgcgtacgagccatacaaagttagcgcccactgctagaccatatctggtacagattgcttgtggtataacctctccaaaggcaagaacaaatgtcactgacaatattacagcaacaacaggatgaaaaatcctatcaagaaatataggaagtgcctccatggcagcagcgttacacaacagcagggtgacaagaagctggtgctgcttttgaacaactggaaggatggcagcagcctgcgccttctcggcgtccgtgccgctgcgctggaggatctccagctcgacgaggcc

SEQ ID NO: 16965 - DNA, 1579 bp, Setaria italica
  misc_feature (1)..(2): n is a, c, g, or t
  Peptide Sequence Number=SeqID_82939
nngttttttatgtattttttttgttacgaatcagaagcatatattagttgctactgccagtaaataataaatagattcaaaagtggctatctactttcgacgtccataaccaaaaaggggaggaactccacactaggttcatgacagcggaagcacatcgctccagtcgaaatttacaacaattgagtacacccgtatttacctcttgctgaacatagcaagaaccgtaggctctgctggcatggttccgtgcattttatctctatattacacgatgcatttcagagttacctcttgttttccagaagaggctccacaaggttcacttgttttgatgggtttgattcaccttcagcaggtttcttcagaattccagtaggctgctgtccttggcgattctgcgctcctgcagccttttgacccgttaatctcctaacagatggagcccttgcaacagatgatgcagcagcagcagcagccactcggatccttttatgaacatcaacatattcatcagtctcatccactatctcctcctgcaggagttcttcaaatacatcttcaagtgtgatgataccaacgacctcaccatcctcaatatcctctgatgacctagccactgcgtttgatgcagggtttccattaacctgcctgttatgcggtctttcaatatcaacaaccacattgtctgccctttcttcagcattagataacaagggagcagtcaactgtgctggcccaactgcttccctgtttggttcagttttgtcagggggtggttcagttttaggtttagccttcacaacagcagccatatgactacttcctttctgaaactcattgagtatatcatacaaaggcatgtctgatggaacccttggaatccttctaattgaaacagcactaactggtgtctctgtttcagcacgaacagtcaaaagacttttcaccaacaggagaccaatgatatttttaggagttcctgagtatacaggaacacggctgtggccccgagcaagaatttttccaattgcttcccaatccaacttggaatccacgtctagtgagaaagttgattcaataggtgtcatagcttctgcagcagtcttttcagtcagatccaaggctccacttatgattgtagtctcatcatgagtaagctctccacccttgccagcctctttgctatggattgaaactagagctttcaactgagctcgcctaaaaagtgcagactcattgtgcccaagagcacagtccaagagctgaggggaaaaaacataattcaatcacttcagtaaccatgcaatagaccataaatcaagtaaatttaaaaaacataaacaaaagagcatctaacaaaagagtatccaaagatgcatactgttataaaatatgcaatcaggtgatcttttactagacactacgaacataatgcattaaagtctacaataaatcagagtacagccactccgatttattcactttgatattcaatctccaatgaggtccctgcatcatgtcaaaatctgcactgaattgcctgtattgaattgtataagaaattaatgcagatttg

SEQ ID NO: 16966 - DNA, 1891 bp, Setaria italica
  Peptide Sequence Number=SeqID_82940
ctggtgctcaaactccaggagttattctccggttgtggagagggtatattgtagtagtaaggttgggtcgttttatagttatacaaaatgtgataagtattttgtgttagtttgcaaccttctgttatctccctataatatacacatacgcagctctcctacgtgttcaagaaaaaaaagtacgtaggataatatcacctgctacaatcttcataaatggtagttcaaaagaaaggctaataagcttggctcatggtagccaaaagaaattcacatgcaactgaccactatgggaaaaagaaaaggtgaggactagggtgcacttttgtaggactttgatgacatgggtaagcaaaaagcattttgcttaagtgggaaggtgcagacttcctttgtacagctctgttaaagagcttggaaacctcagggggatacgattagtcatcccacaacccagccctattaggaagcaatagaagtgaaaagatagcagtttcagatcggcatcccatctctgaacttttgcttaccccttacttggaatggtaagtaggtccatccgtaaatccaggggcatcgcattctttatccatttggcaaaaaacgctagttttgaaccaaaagaacggaaccgaaaagcaagttaaaagaaaggctttaccgatcatttcagcattaaatctgcaaatatgaaacagcttgtagactgctcactgttctacaaaaaatatcatattttcaactgctcctataaaaagatcatgttcctttgcaggaaccaagatcaatatatcaatacttagctacttaccaacagaaacagacaagaaatcaagaatacatatagacataaggagaagcaacttttgcaggaaacaaatatacgtaatttgtaaatattcactaaatccaccactaagagaactatctgtgcatataaatataactaattagcatctttcatattttcaaagtttgtagtatctctttttaccttggaagcataacagcactgcttctagtgtagcaactactaatcaaattaaatttgttttcctcagagtactaaaaatatttagtaggcaatatatagaaactgacaagtgacaagaatgaaattttgctgacatagaagtgaaataacaaatattaaaacaagcataagctatgaggcctaataggttgtcaaataactcgcatgcaagctgctggggttttgaaggacagtggaaatcaaaatatcgctctgtaaccaagttcatcagctattccataaaactgaacgaaaacatgactctgaagtaaaagctttatcataatgtaattcatgggattcaaaatatatgccatgacaggagctcatagaattgcagtacagtaggaacacagaatttaatcatgtcatttcgttgatttaccttcccaatggggtaagaaattggatagcacatgaccatgaggatgcgtacgagccatacaaagttagcgcccactgctagaccatatctggtacagattgcttgtggtataacctctccaaaggcaagaacaaatgtcactgacaatattacagcaacaacaggatgaaaaatcctatcaagaaatataggaagtgcctccatggcagcagcgttacacaacagcagggtgacaagaagctggtgctgcttttgaacaactggaaggatggcagcagcctgcgccttctcggcgtccgtgccgctgcgctggaggatctccagctcgacgaggccgagcgacatgagccccagggtgagcccggacatgatcccggcgaagagcacgaggaagcaggaggtgcccgcgtacgcccaccactccagcgacccgaaggccgtgtcctccccctgcacgattctagtcgtaacta

SEQ ID NO: 16967 - DNA, 229 bp, Setaria italica
  Peptide Sequence Number=SeqID_82941
tagtctgattccactgaattgtttcttgacgaaacttctcaagaatcgatgcacgctctgcttcagcctgatcactatacagcggtgacattgacacaaaggggaggttggcgaccgcagcacagacagcatcgagctcatcccgggaggaaacacatatcgcaatcggcagcccgccacggcgatcagcaacaacccccaggagctccaagagtgtcctcatcttgaa

SEQ ID NO: 16968 - DNA, 583 bp, Setaria italica
  Peptide Sequence Number=SeqID_82942
ttctagctgctcttaaaatgttagcagcctccctatacccactaagcagggctccgtgcattgtagcgggataccgtctgtttgttgcctccccagcaaagaaaactctatcatgcacactctcagccaaaatgtcatagtcatcaccagaagcgccaatagccacatatgagtatgatccataagtaaagctgtcagtgccccatcgagtgcatattgcttgcaatgggtttggaacttcgatccccttgggtgaaagatttcctaagtgtttccagcaccttctcaacattttccattggtgaagcctgctcaaacttgactgcagattccccagcaacaagggcaatgagcaatggccctcctgagacagaagaatagctgtagaacaggaagaactcgccacgctgaccagagtcttctgtcaagtgaccaaatgtatcaatcctaccatcccagaaatcataagggaacaacatcacaaccttgttgagcagaccaaaacccaatctttggatggcctctttcttctgagctggcagctcaggcataaacttgatgttacccttcttgagcacgccaa

SEQ ID NO: 16969 - DNA, 423 bp, Setaria italica
  misc_feature (16)..(16): n is a, c, g, or t
  misc_feature (357)..(357): n is a, c, g, or t
  Peptide Sequence Number=SeqID_82943
cgcggccaccaccggnccgggtgcacgccgaggtgggtgccttcgaacacgatggtgcccgtggccggcctctgcttggtggacgacgcgatgtacttgcggagcttgtcgcccgcggccgcgccgacggcggtcgccggcaggacgtggcagtcggcgacgaggccctcgccgtcgaaagccccgttcgccagcaccatcccgacggcgcccgcgcggcggaccacgtcgcccttggcggcgcgcgagttcacgccgcggtcgcacaccacgatcttgccccgcaccgcagccgggtccagcgacccgtcgaggcacatcgacgccgagtagccgtcggccgcggacgaggccccnccgctggcccccgccgtacaccagctcgtacatcttgccgggctccagcgcgggggccccgtacca

SEQ ID NO: 16970 - DNA, 262 bp, Setaria italica
  Peptide Sequence Number=SeqID_82944
aacaagctccgggggagcatcccggagctcgtcggcgacctgcccagcctcgaggtgctgcagctctgggagaacaacttcaccggcggcatcccgcgccgccttggccgcaacggacgcctccagctggtcgacctctcctccaacaggctcaccggcaccctgccgccggacctctgcgccggcggcaagctcgagaccctcatcgcgctcggcaacttcctcttcggctccattccggagtcgctggggaaatgcgagg

SEQ ID NO: 16971 - DNA, 1148 bp, Setaria italica
  Peptide Sequence Number=SeqID_82945
gcttccccgcggtggccggcgccgccgcgtccaaccttgggtccatcactctctccaacaaccagctcaccggcgcgctgccggcgtccatcgggaatttctccggtctgcaaaagttgctccttgaccagaacgcgttcaacggcgcggtaccgccggagattgggcggctgcagcagctgtccaaggctgacctgagcggcaactcgctcgacggcggcgtgccgccggagattgggaaatgccggctgctcacataccttgacctcagccggaacaacctgtccggcgagataccgccggccatctccggcatgaggattctcaactacctgaacctgtcccggaaccacctcgatggagagattcccgcaaccattgctgcaatgcagagcctcacggccgtggacttctcgtacaacaacctgtccgggctcgtgccggcgactgggcagttcagctacttcaatgccacgtccttcgtcggcaacccgggcttgtgcgggccgtacctcggaccatgccattccggtggtgctggcacggaccatggcgcacgcagccatggtggcatatccaataccttcaagctgctcatagttcttggcttgctcgtgtgctcaattgcgtttgccgccatggcgatcttgaaggcccggtcgctgaagaaggccagcgaggcacgagcgtggaggctcaccgcgttccagcgcctcgacttcacctgcgacgatgtgctcgatagtctgaaggaggagaacatcataggaaaaggtggagctgggattgtgtataaggggacaatgccagatggtgagcatgttgcagtgaagcggctttcggcgatgagccgtggatcttcacatgaccatgggttctctgcggagatacagacgcttgggaggatccggcaccggtacattgtgagattgcttggcttctgctcgaacaatgagacgaacctcctggtgtatgagtacatgccgaatggaagcctgggggagctcctccatggcaagaaaggtggccacctccattgggacactcggtacaagattgctgttgaggctgccaagggtctcagttacctacaccatgattgctcgccaccgatcctacatcgcgatgtgaaatcgaacaacattctg

SEQ ID NO: 16972 - DNA, 624 bp, Setaria italica
  misc_feature (502)..(502): n is a, c, g, or t
  Peptide Sequence Number=SeqID_82946
ccgctcggggtcgccgcgctgccggcgctccgccacctccacctcggggggaacttcttctccggtgagatcccgcccgagtacggcacgtggggcaggctgcagtacctcgccgtctccgggaacgagctctccgggaggatcccgccggagctcggcaacctcaccagcctccgggagctctacattggatactacaacagctactccggggggataccgccggagctcgggaacatgacggagctcgtccggcttgacgccgccaactgcgggctctccggcgagattccgccggagctcgggaacctcgcgaacctcgacacgctgttcctgcaggtgaacgggctcgccggcggcatcccgccggagctgggccggctcaggagcctcagctcgctggacctctccaacaacgcgctcaccggcgagattccggcgacattcgcggcgctcaagaacctcaccctgctcaacctcttcaggaacaagctccggggancatcccggagctcgtcggcgacctgcccagcctcgaggtgctgcagctctgggagaacaacttcaccggcgcgctgccggcgtccatcgggaatttctccggtctgcaaaagttgctccttg

SEQ ID NO: 16973 - DNA, 447 bp, Setaria italica
  Peptide Sequence Number=SeqID_82947
gcttcctgcaaattttcacatgtccgtactcagtatcgctaaagggaaacacaaccaggaatcaatttgacaatttcccggtggtaaccagacgttactgccagaatcaaccataatgtctatgtacagtatcattgatattggatgggttctaagatacccttgaacattgtactaacaaaccgaaaaagtttaggacgcaagtttcataatagaccgaaatctaaactcagaaacaaagtaactggaaagacactagaagccagctggttaataggcaattagtggtacaatgttcacagttggatttccgagaaaaaaggaaatagagacatagtgtacaacactactagcattttgctagaaatatttagatgcatttccttaattgttgggtggcgaacatgccggtaaataactatcattaggacaggacaagatatattt

SEQ ID NO: 16974 - DNA, 255 bp, Setaria italica
  Peptide Sequence Number=SeqID_82948
ggggctcgcgccggggccgggcatctgggacaggtcggggaggctgctcgtcgagtgcatcgaccgcttgctcccgaacagccgcgccgacgcgccggcgcggtggccggccgcctcgccggacagcagccggtccaggcccaggtcgccgatccagggctccatgtccgcgcccagcaggatgttgctcggcttcaggttgccgtgcacgcccttcttctcgtggatgtacgccagcccgcgcgccacgccgcg

SEQ ID NO: 16975 - DNA, 297 bp, Setaria italica
  Peptide Sequence Number=SeqID_82949
taacccacccatcgccgccattccacacccacgcccacgccgccgttcccaccgcgcacctctgccacccgccgtccaggtcgcatcgcccccgcacttagggcggccgccgccacaggcgcacccacaggccttctctaccctgtcggttgccgcctgagccagttaccatggcgggtcccacggagagggaccagttcacggatgaggaggaagatgacttcctggatgaggagctggacgagcaaggccttggaagcgaagacgaggaaggagtagtgggagtagggggtaagg

SEQ ID NO: 16976 - DNA, 430 bp, Setaria italica
  misc_feature (12)..(12): n is a, c, g, or t
  Peptide Sequence Number=SeqID_82950
cgttcaccatcncctacacctaacgacgcatatcaccgatcccggtccttgtcaccttctcgaaaagcacgggctaaatctccatctcctcgaatcatgaactcaaatacaaaagatacaagagcaggctcgccaataccaaattctaatcctctagcacggtcctctacggtcgcaagaagaccacctgcgaactcaaagcatttgagacaaacttcaatgcagttacataccgactgggaccaccacaaggagcaggagaaaagctcaagcaaaggcaggggtttcctcaaatcgttgctcacaaggcgccggtggaggaacgacgagtcattgtatagttacttggatgagtattgattgttggaatgtggaaaacaagaagtttgctgttaattgaatcttcaaccgtctgaataaaaaaaaaact

SEQ ID NO: 16977 - DNA, 475 bp, Setaria italica
  Peptide Sequence Number=SeqID_82951
gctagtggagctccctctagtacagagcagctcacgtaccttcgggtggtgcacagctagcttacctaggacatcgcaatcgtcaccatcccgagctcgttcgcttggctgctgcgttcggcttctggctgctgcggcagagagctgctgcgtgctgcagctgctgcggcagagagccgagcagcagcagccagccgaacgaggttacgtcgtcggcgagcgatggagaggaagacggtggtgctgtacccgggcgtcggcttcggccacctcgcgccgatgctcgagctggccaaggccttcctcctccacggcgggggcgacggcgcgctcgacgtcgccgtcgcgctcgtcgacgccccccgtcatggggaacggcttcgccgccgcagtcgcgcgcgaagaggccgccaacacctccgtcgccttccacgtcctcgcccccgcccgcgccggcagccgacggcgaggccga

SEQ ID NO: 16978 - DNA, 1063 bp, Setaria italica
  Peptide Sequence Number=SeqID_82952
tggtaggtagcccggggagcgcgccctgagcgggttcgggttccacgacgtggtcatcgagacgccgcgccacgacgtgcggctctgggacctggacgccgagggggtccgcgacgtgctgctcgcctacgcggcgcgcgtgcggcagcttggggagcacctcgcggtgaagtatgttcaggtgttcaagaaccatggggcatctgctggggcatcaatggcacattcacacagccagatgctggggactccctttgtccctccctctgttaaatctcggcttaactgcatgaaggaggtttttgacaaatcagggaattgcagcctttgtgagattaggtccaaagatatcctgatcagtgagacgcccaatttttctgccattgttccttttgcagcatcatatccatttgagatatggattattcctcgacaacatctttcttattttcatgaaattgatcagaataaggcactggatcttgggtctctgttgaagacaatgctgcaaaagttgtctaagcagcttaatgacccaccattcaattttatggtccacagtgcaccattcgggctctcatcatcctgcctgccttacgcacactggttcctccagatcgtgccccagttaagtgtaataggtgggtttgagcttggaagtgggtgctacatcaatccagtttttcctgaagatgctgccaagattttgagggaactagactgttcaacctagctggtggttggtatctgattgttcactaaatatgaacgaaagctatgttccacaatacttttctcgaaagcaaagaatagcatgctaataatccaagtggacagctaacatgatatgtaacagaggaccttgttttggcaaggatgatctgctgggggtttcaagaaaaaatttatatgaatcccccggcaaatagctcttgtcaggcctacatgccaaggttggccttttctcttgggccgtcaggttgatgattgcatgttgattgtacaattgattaaaaacacagtttttttagactaataaattgctgatatctttctatctgac

SEQ ID NO: 16979 - DNA, 280 bp, Setaria italica
  Peptide Sequence Number=SeqID_82953
catacaaacaagcacattcattcacagaccaaaccaaccacagaggtgagtaagcatggcagggctgcagcgatcttcgcaaacattcaggaggtccggctcatcaggcttggtttgggatgagaggctcatgtcttcacaggacgacggcaaccaggtggagccagaggatggagccatggagttcaaggagctcaggcactcccgcagcgttggctcagctgggctgcagcgcaggcgcgacgatggcgaggagcgcaggcggcgcagcgacgacgga

SEQ ID NO: 16980 - DNA, 455 bp, Setaria italica
  Peptide Sequence Number=SeqID_82954
acctctccttccgcctccctccccgaaccccgtcctcctgctctacccctcacccggcgccgccgacctcgccacctggtgccgatccacgccgccgtccgcgcgcgccagccccaccctcctcctcctcgacggcacatggaggcaggccaaggagatgcacgcggcgagcctcccgttcctgtcatcgttggtcgtgatccccgtagcccttcccgtcgacagcggcgtggacggggacagcatgttcgagtcggagctcgtggtgaggaaggagccgcacaagggatgcatgagcactatggaggcagtggcgaggtcgctacggctgctggagccggaggggaagggcgaggagattgaagaggcaatgctgcggtgctccgagcgatggtagctttccagacagagcatttgcagaaccggacggtggagccgagagtgaagatgaggaa

SEQ ID NO: 16981 - DNA, 232 bp, Setaria italica
  Peptide Sequence Number=SeqID_82955
ggacttgtgttgcttctctcttctgtgatgtgttggctataaattagacaagtcaattgtcaatttttgatgttggtggtagattttgaaaactagatggttctggtatctgtctatctgatgatgcataatcttgtgtttctcaagggtgcccttggcctgttaactttaccatctgccttagtcattttatctggaatgctgctaaaggaggtccatatccccaactttc

SEQ ID NO: 16982 - DNA, 1115 bp, Setaria italica
  Peptide Sequence Number=SeqID_82956
cggaaaacagtatattgtaccctcatcttgctgctgacatgataagcttaaatggattctgttcatctgttggaggtcttattggattctcaataagtggttttcttgttcatgcgataggggctcaaggtgcccttggcctgttaactttaccatctgccttagtcattttatctggaatgctgctaaaggaggtccatatccccaactttccatacgggcaggctcacaagaagtttgtagaagcgagtggaaaaatgctaacaaccttaaaatgtcctgaagtatggcggccatgtgtttacatgtacatgtcacttgctttgagtgtcgacatccaagaaggaatgttctactggtacacagaccgaaagtcagggctatcttttcatgagggattcattggctttatgttcgcagttgggtcagttggttctcttgttggggttatactttatcaaaatattctcaaggaccgcccgtttcgcagcctgcttttttcaagccagttgttgttaagcttgtcaggaatgctagatctgatcttggtgcttcgtctaaatctgaaaatggggatacctgattactactttgctgtgatcgatgagggggtttccaaaatgataaaccgtgtcaaatggatgcctcttctggtgctttgctcaaagctctcgccccctggcattgagggcacattctacgcgttgctcatgtccattgacaatattggcggattaactggattcatgggttggtggactgctccttcatttgttgagaatcacaagaacagaattcaagaacctctgggctgctataatgattcgaaatgtgatgaggctgctacctctggcgctgttgttcttggtgccaagtagcgatccaaactccgctcttcttccatctgatttgttgaatgaggatgacgatggcgaaggtcaccaaatggagaatattgagttaacctcgcttgctgtagacaagggctcattccctgacaaatctccccaagaacgcgggaaccgggagggcattgatgtagagcaggatgacgacgaagtttcgctgcttgccaacaggggttgataatactggatgcataatacggagatttt

SEQ ID NO: 16983 - DNA, 228 bp, Setaria italica
  Peptide Sequence Number=SeqID_82957
gaaggaactaataaaaatacaagccataagattggaagcaacaaagcaaaccacatgtcaatctctagcttttaagatatgtgcaattctgcagcagacgcggaactaggtgtacagacaacagacataacagagtgttgcatgtgacaactgaagcaaacaatgtaaatctccttcttatgttaagaagccagaaactttgccacttaagctagttatgcttgcact

SEQ ID NO: 16984 - DNA, 377 bp, Setaria italica
  Peptide Sequence Number=SeqID_82958
accctcggtgcctccttgtgccctgccctcaatgcctcctcgcgccttgggcgccttgtgtggcttgccgcgcttgcagccgcctatcgaggaaaaaggctcccccttcttccgctacctctggcgggcgagccactgctcctcagtgaggtggagcttgccaccgatggtgataggcccaccagacgtcagctcctcgcggtcgtcgaccgcattgagtcaccccgtcaactcctcatcgacaacgttgagaggtcgagcagcgtctcgatagagatagtgagctgcgagtacttcttcagaacgacatgcagaaactttgcaacggctttctcctcgttgatctcgtcatcatcgtaccgctccgtccgctgcat

SEQ ID NO: 16985 - DNA, 293 bp, Setaria italica
  Peptide Sequence Number=SeqID_82959
gtcaaacaagagagaagaagggatagtcaaattagctctgacaatcaaaccttgggcgcagcatgattaatctgacaaaaatcctccatacctcctgtaacaaatgggtgctgtagtaagtctgatgcagcagatctcatttctggttccctttaatagcattttaacagaaaatccttggcttctgcagagagatgctctggtataggtgggtgtgatttcgtcgtcccaacataataaagaagagaaacctcttgatattcgtgactccagggaggtttgcctgtcgccta

SEQ ID NO: 16986 - DNA, 1503 bp, Setaria italica
  Peptide Sequence Number=SeqID_82960
caagtggactgctaggatattcatatgttgagaaaaaagttgcaccaacgaaaagtctagctatacacaaagcaagatatattacactcttcagaagctagatcggcccctcaaatccctccgttcaccgtttttaccccattggagtattacaagacgatgcataagagaggcaaggacaacagtaaccagcaattctcctacttgccagatttcaccgcaccctggcatcttgaagaccttctaacacggtcacaacttgatccatgccaggtctgcatcgcgcatccattgacaagcattgcagtgctagggccgcagtcttctgcgccgcaggaagggaatactgggaacccaaccgcgagtccaggacatggatcactctcctcttgttggtgatgtaaggcctagcccattctaccaggttgtgctggccaggcgggcggttcttgtccagagcacgctgcccagacagcaactctagaagaacaacaccgtagctgtacacatcgctcttcgcagtcaaatggcctgttgcaagatattcaggggcagcatatccttgtgtccccatgaccctagtagagacatgacttttatcaccacttggaccatcttttgctaaaccgaaatcagacaattttgcattgtattccgagtcgaggagaatattggaggtcttgaaatcacggtaaataactttagcctggtcaccatgcaggaaagcaagacctcttgccgcctcaagcgcgaccttcatccgcaagttccacgggagcggttggaagtgcgaacccctcctgaaaagatgatgctccaagctccctcttggcatgtactcgtacacaagaagccgttgttcgtcctccaagcagtacccaataagtttcacaagatttgggtgggacaactgccctaggtaattgacctcagccagccattctctgtgcccttggaaactgtcgagcttgagcttcttcacagcgacaatcatcccagtgcccggcttcacaggtgcaagcgtgcgctcatccatccatcccttgaacaccgagccaaagcctccctcccccagcaggctgtccggtctgaagttccttgtggagcctttcagctcactgaaggagaacttccggacatttgatgactccagaatctctgtctctgtacgaggagtaggtggcaccgacgacgaagagccagatgtcttggtaccaaaggtgctgctgttcttagaaccggtccctgacgaattgggggcactgaaggaagggttgatctcggcgttcccctccacgccggcgcagttccccatcaggaacaaggatagccaaccagaacccctgcccgaggcggcctgctggggattccgccgagctctcccggccgcgcgcagggagggagctagaagcagtaggacgcctgggttttatttggcttgtggtgtcatccttccgctgctgtgcgtgggtaggaaggagatgtaagaatcaatggcagctg

SEQ ID NO: 16987 - DNA, 267 bp, Setaria italica
  Peptide Sequence Number=SeqID_82961
ctcgctctctcgctcggggagtcaggctcagaggcctcaggcagagacgaggtctcgtgcgcgcccggctttcctctcctcgccgcacgacgccgcaaccaatctgacgccgacgcgtcgctagttgccgccgccgatggccaaggcgcgcaggcagccgttcgccgccgccgagcggttcctcgggttcccccgcggcgggtcgccgggggccgtggcgccggcgccggacggcgacgacgacctgccggacctcgccgagtacca

SEQ ID NO: 16988 - DNA, 313 bp, Setaria italica
  Peptide Sequence Number=SeqID_82962
tgcaagtattttattctgaattgtactttctacacaacttagagtagaaatttgcaagcttaagattagtgcaacggtcatagaaattagaaagcttttgtgcctattaaattattggggtggtagatgtagaactgtgactgcaaaaacaggagcaccagtgctaagttcttctgtagaaaagattcactgcagtgtatatatgatttctagaaaaaaaaacactcagaggactgcttgccttaattttgggatatagctaaatgtaaatatggggtgcaggaactttagtgtgctatatcattttgttcac

SEQ ID NO: 16989 - DNA, 285 bp, Setaria italica
  Peptide Sequence Number=SeqID_82963
ctcttcccccgaacattggcgcgccagctcgtggcacacgcggtccctgactcccatggcgccggcgctgagcgggaccctgggcgcgtcgtcggtggcggcgctgcggccctgcgcggagaggagggcgccgtccgccgcgagctcggtcgctccgcgggggagcggggcggtgaggtgccccagaggggtcagatgggaggccgagaggagcagggggagattggtcacggtgaggtgcgacgcggccgtcgtggagaagcccgccggggaggaggcggccgg

SEQ ID NO: 16990 - DNA, 468 bp, Setaria italica
  Peptide Sequence Number=SeqID_82964
ctggctggaggtccatggcacgcgtagaaagtttgtaagaactatacagctcatccacacgttcggagcgtgcagcaagctcccctggcagtgctccataatctcttgcgagaagtgggtccctaacagttgccttagcagcagttctttcatgcagaatatccatgtgaggttgatggtttaaagaactagtagacacttggtgatagtactttggaggaacatgttgaggctcttgcatatgataaggatctagcaccaaaatcacctaggctcatcaagaagtggaggatgtaatgaatgtgtgatcttgtaatgatcctcgagaggatatgaatatgaagaaatacgtatgccagaacatgttgaagaaagaggcatacctattcatgcccgttcatatcctctcgaggattcatttactaagattctacacattcattacatcctcatcaagaagtggaggat

SEQ ID NO: 16991 - DNA, 536 bp, Setaria italica
  Peptide Sequence Number=SeqID_82965
ttcgttatttaggttcttgtcagtagctactacccatcaagttccatcctggcttccaaaggtgtacaagaagccattggctggtaaaactgactggggctgtgcatttcatggtggaccaaaggagtaacggctggacacaggcacactagggcccctaacccttgcaacaacaggcctctgaagactttcgccgtagtaaagactagaggagttctgatagggtgacacgtaggacggtcctggctggaggtccatggcacgcgtagaaagtttgtaagaacggtacagctcatccacacgttcggagcgtgcagcaagctcccctggcagtgctccataatctcttgcgagaagtgggtccctaacagttgccttagcagcagttctggaagcaacagtgaagttcaggaattcaatgtttatcatgtacaaaacagtaaagaaaatacaggttctgacttgtgagtaaaaggaacttcccataaaacattgaattaaattcaaacaaaatgtcacctataggctaaccaaca

SEQ ID NO: 16992 - DNA, 842 bp, Setaria italica
  Peptide Sequence Number=SeqID_82966
cggatgctcttcgtggacaccagtgctacctcggcactgcacggcctgcagccagggatcacgcagtgcggcagttcttttcacttgggtcgaagggacaccagctgcactttcatgcagaatatccatgtgaggttgatggtttaaagaactagtagacacttggtgatagtactttggaggaacatgttgaggctcttgcatatgataaggatctagcaccaaaatacacctaggctcatcaagaagtggaggatgtaatgaatgtgtgatcttgtaatgatcctcgagaggatatgaacgggcatgaataggtatgcctctttcttcaacatgttctggtaatcgtatttcttcatagtcatatgattctcgcctatcttcaacaagaagtggccggcgtgtttcttcaatatgttgtggagctggttgagaacggccaatgggctgaaatatctccaatagcctatgaacttgtttagggctgagctcttgggtgaatctgccttttgaattgtagttttccttaatggcgtgcttaaaactactctccggaacaggaagacaatctatgtcaacgctaaacttaacctgcgcggggaatttcccctcgaatgcgtgtcgcacaagatccaaacctccacttgtatccgccttgtagaccccgtacatcagcttgaggtcaaaatcatacaagaacagcttcgcccctggccggatcctttccaccacatccatcttccccctgggcaggccaaacacgccgctccggtagcactccggtttcgtcctcgcgttgcacatgaatataaaccacctctcatcaccatcctcctcttcct

SEQ ID NO: 16993 - DNA, 932 bp, Setaria italica
  Peptide Sequence Number=SeqID_82967
cgaccgtcgccggcgcaagctcaagctcgttgtcaagctctcccagctgcccccggagcagcagcaccgccgggccccaccgcccccctcgtactcggacgactccgatggggctggggaggtgggcggggacggcagcgacgacgacgagcaggtcaagccgcccaagaagcgccggatcgagccgcgcgctgatagatctcgccatcgcgaggttggtggtggcgggaggagcgacccagcgagcgcgccgcggaccaagcggctcccggtgccagggacggcgaggacgacgcccctgccagaccggaaggcgctggagatgattctcgagaagctgcaaaagaaggatacgtacggagtgtttgctgagccagtggatctggaggagttgcctgattatcacgatgtgattgagcacccgatggacttcggtaccgtcaggaggaagcttgccaggaacgcataccgctcatttgagcaatttgaggatgatgtcttcttaatttgcagcaacgcaatgcagtacaatgcacccgatacaatttacttcagacaggcccattccatacaagagctggcaagaaagaagtttcaggaactgagggatgagggcatacctatagaaaatcaccacataaagattgaacagaaagctagaccaaactcctgcaatagagaaccaattaaaaagcccatcttgaggtatcaggatgatgatctagacttcctgtcccgcaaagagcaagttaagagacccaatccaaaaaattcggaagatgatataagcttcaaagatcaagttaagaaacctgtgcccaggaattcgcatgatgagagttctttattccacaaagagcgagttaagaaacccatctccagaaattcagagaatgatttaagttcctcattccacaaagaccgacctaaga

SEQ ID NO: 16994 - DNA, 1005 bp, Setaria italica
  Peptide Sequence Number=SeqID_82968
atttctttttcacctcacctgtttgatataggaacaggtacgtgtgctgatgtacatgtccctcttcaaataaaaacgaagcaacagagtaacatgatttgcagccaccatggttttggggtttgagaatgtgcatgtcctatcaccccaggaaaaaaaggaggaataaatatgatttcaattcgattaatcatacaagagactgtaacagactagcttgtgtgcatgcaccaacgcagtcggtcatagtcctgttttactctcaccaagttgacatataagtagttgagttctccgactcagtgtgagtagttcctggagccaataacaatgatatgcctacttaacctgaacagaaccgtacgtttccagtgcgcaatatatagtaatggcatactatgatatcattacgtatgaagcaataaagggaattataagaatgtctgtatatatagagtcatttagtaatacaatgattataagaatgggtacgttacttcctaatgaatcatccaaataaagaaataatgaagcaagcagatagatagagaagctagctagggtcgggatgtaccataattcaaataggattgggccaacatatggccaagctggacttgagcttgggtgctaagatgcaggtggccgtcttgcaatggcaaccccatcgcatccacaaatctgacgttccggagtttgatccctttttgtgcttcccttaccagctgagtgtagtgtccgaggcccgatgctaacccaacctggatgactaggaggtgcgggatgccgagatctgcgcggatgtctcggacgaacatccccatcctgcgcccgtactcgttggcgtcggaccacctcacggtgtcgctctccccctggtaccagagcagggccccgatccggccgccggtctcgagggcgacgcgcgcccggcgcagcatctgggcgtagagatcggtgcccctggcccagtcggccatccgcgtgcctccgacggcgcaggga

SEQ ID NO: 16995 - DNA, 1093 bp, Setaria italica
  Peptide Sequence Number=SeqID_82969
ggtggattgtggtacacatggttcgaccgcgatcttactgttgctggtagggtgattataagggagaagagggatggcggggactcttgtgcacataagcttgttcgggtgcaagagccgatcctgaggattcctactttggctattcaccttgacaggactatctcctcagaaggtctcaaaattaacaatcagaatcatcttgtcccagtgctggcgacgtctatcaagaatgaaatgcagaaattagtgggagaaaatggcccaaaggagtcatcggagaataagaacacaaagcaccatccattgctattgcagctgattgctaaagaggctaactgtgagcctgatgaaatatgcgactttgaactgcaactctgtgatactcaaccaagcgctgtagcaggtgccatgaaagagttcattttttcaggacggcttgacaacctttgcatgtcattttgttcattgaaggcgctaatcgactcaacttctgctgaacactcacttgatcatgaatctggtgtgcgaatggtagctctatttgaccatgaggaagtggggtctagttctgctcagggagctggttcccctgccatgttggatgctttatcaagaatcacagggtcttttaactcttcaaattccaagttgctagagaaagctattcagaggagctttctggtgtctgccgacatggcacatgctttacaccccaattatatggacaagcatgaggagaatcaccaaccaaaattgcatggaggacttgtgatcaagcataacgccaatcaacgttatgctacaaatgctgtgacagcatttattttccgagaaattgctgagaggcaccaactacctgtacaggattttgttgttcgaaatgacatgggttgtggttcaacaattggcccaatacttgccagtggtgttggtattcgtactgttgacatcggggcaccacagctatccatgcacagcatcagagaaatgtgtgccgttgatgatattagccactcatatgagcatttcaaggcatattttgaagaattcactgagttggatagaaaggtcaaggtggattactaaggtg

SEQ ID NO: 16996 - DNA, 363 bp, Setaria italica
  Peptide Sequence Number=SeqID_82970
actcgcgtcgcgtcgtctcggcaccctcctccgcttcgaaacccccgacgcgacggaagcgaggaaaccctcgcgagtctctcacccccgccccccacagccgcccgccgccgcctcgaatccgcccggattcgcgcggcgccggacccctgcggatcggatcccggaggttggtggattcggggctagggtttggggattggcggaaatcgtgggattgttcggcctaatttgaggagcaatgcgcttcatggtttggcagtgcacctgaggaggacagagggatggtggcgatggagggaaagggggatgcgtcagtgacgccggtgaggaccagtgaccggctccggcagcggccgaagt

SEQ ID NO: 16997 - DNA, 419 bp, Setaria italica
  Peptide Sequence Number=SeqID_82971
ggaggatgaagccgcacgccaggaagaacgaccgccatgcgctcgcccgcgtcaccgaggtgacggtagcgtcgtcgcacgccgccgaccaccccgctccccggtgcacgaccaaccacaccgccccggccgtcgtcttctcggccggcggctacgcggggaacatgttccacgacctgaccgacgtgctcgtcccgctgttcatcaccacgcggcggttcggcggcgacgtgcacctcctcgtcagcgacgcccagccgtggtggctcgacaggttccggccgctgctccgcaggctctccttccacgacgtcgtcgacatgggcagaggcgccggcgccggcggcagggggcgtgatctgctacccccacgtggtcctcggcctcgagttccacaaggagatgagcgtggacgccgc

SEQ ID NO: 16998 - DNA, 363 bp, Setaria italica
  Peptide Sequence Number=SeqID_82972
ctcgttgttagtccaggcggcgggaggaaacgacgacaccaaggttctctacttccccatctgcgtggaggcagggccactcacatggctcaagtcattagaaaagaactctatagacacgtggaagcacctcaaggcagcattcacaaacaacttcgcaggggcaatgcagtgtcctagcaacaggattaacttgtctcaagtcaagcagcaataaggcgagaccctgcacagttacctacgccggtttttcgacaagaaggccactatcatggacatcacggagtaggacaccattgattgcttccagaaaaatctctatgaccgttggatgttccaagtattttggcatgagaccgcccc

SEQ ID NO: 16999 - DNA, 300 bp, Setaria italica
  Peptide Sequence Number=SeqID_82973
ctgcggaaaaaggactcgatcgcttccgggaggaagtttaatgaggaagaaatacgggatccgcagagagatgattaggagcttgaatgattgagcaatcatggcgctggtgtttttgtttttgtttcctgtacgaaaatcggagagagaaatggtttcgcacaaagtttgcgtgtgacaggtacatacacccattccccatttgttcatagtttccagcctcaaccaccgccgtgcggcatcaccgccatcattacactattctttgtccaccctctttcttttcttctccattagaaa

SEQ ID NO: 17000 - DNA, 444 bp, Setaria italica
  Peptide Sequence Number=SeqID_82974
gcggcgggccagtcagcggccgcgccggccggggagaccagctccaccggcggcgcgcctgccagcgccggcctcggctgagcagccaccgcggccggcgcgggaactgaggaggaggaggaggtcggcgacgacatcgacgccgtggccgccgagaagcagctctggcagaggttctgcgtggccgggttccccgggaagccgcagttgttggcgcagagcgtgatctccggcgcccggagctccgtgggctcctccttcttgtcgcgctgcgccatgccttctttcgcggtggcgcggcgcggccggggagcttgcttttcggagggcggggactgggctaaggccgggagacgggaaggagcttgcgaatcggggggaaggatggatgggcgcggttgccgatgatcgtaaagggaaacgaaacggttaaaagaaacgaaa

SEQ ID NO: 17001 - DNA, 615 bp, Setaria italica
  misc_feature (1)..(11): n is a, c, g, or t
  misc_feature (18)..(18): n is a, c, g, or t
  Peptide Sequence Number=SeqID_82975
nnnnnnnnnnncgtgtcncttagttttttttttttttaattttcgcacaaagtttgcgtgtgacaggtacatacacccattccccatttgttcatagtttccagcctcaaccaccgccgtgcggcatcaccgccatcattacactattctttgtccaccctctttcttttcttctccattagaaaaaaattataaaaaaggagattggaaatcaaacactttgaagaacagcataataacaccaaagcctttccatttccatggatatgatgtgtgtgtttctccttccttccctttgaagaacagaacagctctgctggatggaatcttgattctgtcgtcgtcgatcagaacctaacgatcttggcggcgcgcaccaccgggttctcccgggcgatggcgtccctggcggcgcccttgtagtcgtagctgcagccgtggcggtccgagtaccggtgcgcgccgcagaagagctcgccgcaccggcaccagaaccccgtcagccccacccgcttcctgcagctcgagcaccggttcaccgacgccctcgccgcctccggagccggagccggggccgccgcggcgggccagtcagcggccgcgccggccggggag

SEQ ID NO: 17002 - DNA, 1141 bp, Setaria italica
  Peptide Sequence Number=SeqID_82976
gctgggcaatagggagattccaatttataatttaattttatacagagagagagagagagagaaaattaaatagaagattgtgatttgtagtaggacaacacaccaaaccaaccctatctcttcccctccacccccaaccaccgctacaacaacattatcatcgcactgttcttgcttttgatccctttcgtagctgcttccccgcctgccatgcctcccatgatctgctccatcttttttccttcatcttcttcttcttgtttatgggatcctcaagaacagcacgatgataacaccctcgctcgaccggtcacctttaaatttcttgtaaagaaggaaaagaaagaaaagagaaataaaaagggaacttgagagggagatccaacgatcgatcgatctctgcggatcggtgtaggcgtcctccgtccgatgctccctccctctcagaacctaacgatcttggccgcgcgcacgacggggttctcccgggcgatggcgtcccggccgacgcccttgtagtcgaaattgcagtcgtggcggtccgagtaccggtgcgcgccgcagaagagctcgccgcaccggcaccggaaccccgtcagccccacgcgcttccggcagttatggcaccggttgaccgacgacgtccggggcgccttgttggaagaggacgactccacgggcccccccgcctggccggtcaacggccggagagaacggcgccaccaccgccagcggcgttggcgcagagaaggcggaggccgcagctggccacggcttgtcgaacgccgcggtggtagtagaaggggacggcgacggcggcgagacggaggccgaggccgaggcggaggcggccaggaagcagttctggcacaggttcttggtggccgggttccccgggaagccgcagctgttggcgcagagcgtgagctccggcgcgtgcagctccgttggctcctccaccttcttgtcgcgctgcgccatgagaaaataggtgtgtgtgtagagcctcgcgacggctcggtgtgaatccggcagcgaggcggcggctctgggcgatccggcggggccgcggggaggggaggagagcagagcacaggaggaggcggaggcacaccggcggcctggcctgagctgagggaga

SEQ ID NO: 17003 - DNA, 997 bp, Setaria italica
  Peptide Sequence Number=SeqID_82977
cagccacagccaggagctccggctgtcgctgcagtctcaccccagacccccatgttccagcagcagcaggaccggtcgcacggccacggcggcaatggctccgcgcagcaggcgctcttccccggcgccgccagctactcgttcggcggcggcggcgccatgtgggccgagcaagctcagggccaacagcgcatggtgccgtggaacgtgcccgacccaggcggcgggagcactggcggctacctgttcaacgtgtcgcagcaggcggcgcacatgcaggcggcgcttgccggccagagccagttcttcttccagaggggaccccttcagtccagtaaccagccctccgaccgaggatggccggagaccgttgaagccgacaacccgatgcagcaccaccaaggccaaggggggctcagccccaccgtgttcgcccccggcgtcggcttccccgggttccgcatccccaccaggatacagggcgacgaggagcacaacggcggcggcggcaatggcgacaagacgccgccgtccgtgtcctcggcttctcaccactgacagcagcagtggagcacggattactccaccaccaaccaccatgagcactcagcgctacaccatgtaccagtagcatcatcctcagctcctccactctcacccttgtagttgaattgctgctgcttccgatgacaatggatgattgcaacatggagcgaggagcgaagttggggagctagcactcagtttggttggtcggtcggttttctagatctctatctgctgctcgtgtcattggtttttgcttcaagaactcactcggagcttcttaattagaaattaggcctgtgagaatgcagcacattggctagatcgatggcttgtttgttgcattgcagtagccagtaggttcagttgatgttctagttgctctagttcaagctttgtttgccttttttcacccgttcttgttggtgatgcatggatggttattgcgctt

SEQ ID NO: 17004 - DNA, 579 bp, Setaria italica
  Peptide Sequence Number=SeqID_82978
gcccttgccgctgctccttggcgcgggcacgccgggggcggagtcaacggcgagcccggcggcggtcttgatctccgcgagccgcacctgggcctcgtcctccgtctcgcactcccgccggagcacggcgagagcctcctcggcgcgtccctgcatgacgagccaccgaggcgactcgggcatcgcgaacacgccgacggcgagcgcggcgctcgggagcgcgccgagcccgagcatggcccgccagccgtagaccaggggcagcttggcgagcaggtagttggccacgtagccgaggaggatgccaaggctgatgcatatgtcggggagcgagctgagcgcgccgcgggactccgcggaggagatctcggcggcgtagacgggcgcgatcatgagcgcgtagccgacgccgacgcccgcgacgcagcggccgaccaggagcgtcgcgaagttgggcgccaggcccatgaggacggagcccacgaagaagatgcaggccgcaaacgagatggtgcggcggcggccggcccagtcggagacgcgcccggcggtgagggaaccgacgacggcgcagatgtt

SEQ ID NO: 17005 - DNA, 1694 bp, Setaria italica
  Peptide Sequence Number=SeqID_82979
ttattgaatgacaaaaggccttttagtagaaatgttgaggaaaagtaaaaaaataggctagcagaaaacaaactccaacatatacatagtataggttaatgtgtaggaagctaaacaaatagaatgaaaaatggataacaaatggtgaatcgaggcaaaatcctagcatcaaactcagggtctaaactcactactattgatcagtaaactaagccaaaactatatcatggaatacctttatagagaaaaaagaggaataagttactgccaagctgtttctgcctacgatgaagatgcaacctcaatggcgctaccaaggggccatgctgcttcaacataggaatcgccgtaagacactttctttaccaaggtaatgtcttgataaggatccacgccaaatccatcaacaagtaatgtatactggtagacaaggtctatgcaaagatagggaatgttctcctctgagacatcggggtaggttgcatgtgcatccttcacattcaatttacaaacacgtcgtgcagcttcttcaaagtctgagggtttaacctcagcagttgctgcttttgggtcaacaaaaccagcctcagcagccctatcgaagaaaaaagatgctacaaagagattcttttgtccatctccaccgccaccattccacacaccaccaaatgtgcatttcatgtgagtgcatgctggttcatcaactttaagagctctcactgcaagagccctgcacttggaataactagcaccggaaggtgagcctgatgcttcaaatgtattatcaccataactgtatttcccatgatgcccctccaacatacagtcgctgtgatcattgccttcgccggctttgaagatctccgctctagccgccagcaaaccatagtgcaaataactgtgaacataaagatagtatgtggttcctttaagtaggagctttttcacataggaatcttcatcatctgacacgtcaggtgcctttactgcatccttctccgagatagcataagccatttggactgaaccacctcctaaatcaacaactccaactgtgtctgagtatggctttcccaattttcccaaaagataattgatggtaacccactggaatgcgccttcctgagatccatcaagaacagtcacccaatctggctgggatttgaaagaactcttatcacgaagaagttccctaaccgcttgcaaaatttcttcagacctttcagtccctaaagctctgagacctgcagtggccccaaccctgacaggcgtttgcttacgcaactctactggaactaccttttcagcttcctctaaaagagaaataagtgattcagcagcctcctgcggatcattcgcatgagcactcaggcctggttttttctgcttgaagagctcgatctccttccctatgggcaccaaatccaggttttcgtcgaagcaatacacgtgcacgcggctcccggagctgccagcgtcaaatatcacagcgtacttgttgggtccgtcttcaacggcccgggggccccacctccgaccgccggcggcgaggagaccaccccctgaggcggaggtcggcgcgcgcggcatgagcagcagcacgaacgagatgaggagtaccggcgcgagcaccaccagcaacaccccgcggtaacggtgcacgcggtcggccacggcctccgtctgctgctaga

SEQ ID NO: 17006 - DNA, 2147 bp, Setaria italica
  misc_feature (2017)..(2147): n is a, c, g, or t
  Peptide Sequence Number=SeqID_82980
gcccccgccctcggcatcccacagaaccgagggaaaggagctcgggagctccggccgcctccgatccggagctcccaaatcgatcgatcaactgccacggcaatggaagcccaccacgcatcgcggggccggcgcacgctggaggagatccggcagaagagagccgccgagaggatgcaacatgcccccgccgactgcggcggtgtctctcgtcgagccctacgggaaccaaagagccggagctgagcttcttgctcgagttcaagaacttgaaaatgggaatgcagaattggagagggaaaacaaaatgcttttgtccaagattgctgagaaggaagttgagaaggatgcccttgtaaaccgtttgaatgatctcgagcggaatgtagtgccctctttgagaaaaactttgaatgacattactttagagaaagatgctgcagtagttgctaaggaggatgctctagctcaactcagaagcatgaagaaacggctgaaggaagcagaagaggagcagtatagggcagaagaagactcagcctccttgagagcacagctaaataccttgcagcagcaagttatggccaactcttacagtggatttccagtaggaacatcgagtgaggaatctcgtgccatggaaaaggagatacaagatttacaggcacagctaaagcaagagtcactgctaaggcaacaggagcaacaaaaattagctgaagagtcccagctgaggcaacaagagctagaaaaactggctgaagagcaatcccgcattgcttctcttgaggctgaaaagcaacagttggaagaccaaattgctgttttgacaaagaaagctacagaggacgcttctgagtttgctgcgcgcaaggcattttcaatgcaagatagggaaaaacttgaaaaccagttgcatgacatggctttgatggttgagaggctagagggaagtcgtcaaaaactgctaatggagattgattctcaatcaacagaaatagaaaatctgtttgaggagaactcagccttgtctacttcttatcaagaagccatagctgttacagtacagtgggaaaaccaggttagagattgtttgaagcaaaatgaagagcttcgttctcacttggataaactaagacttgagcaagctagcctgttgaaagtaagcaatatcaatacccaatcagactggcaaaatgacaacagcatctctaacccaccagaattggtcactgagaatctttctctaaaggatcagcttataaaagaacagagtagatctgaggggttgtcggcagagataatgaaactttcagctgagcttcgaaaagcagtccaagcacagaataacctcacacgcctatacagacctgtattaagagacatagagagcaatctaatgaaaatgaaacaagaaacatatgcaacgatccagtgatacatattgtgaaacccaatctggttgtactactgaggcacgggcacaagcttcactgatgactcgctgataggcattctggatgtgttgatctcgtgcccttatcaagaagctggcgaaaggcagttcttttggtagctgctgttcgttcattcatttgtagagttaagtcgggattgttgtacctgcaccatactgttgtataatcggttcccacactgatttatcttgtaaattgggagcaactatacaatagaaagaatcagatcagacagattatcatgttcgcacgtgtatgtcttattatggtagccttttatggttatctttcatttttgagtgtcagatgagtccgcatagtgcgggagtgtaatcagcgcacccttccatgatagggagtgtaaccagacaagggagtggaagattggtggtgccgggcggcggtgatgaactgatgatgtacggcatggaacctgtggaaggaacgtaaagagtttctctagttttatttgtaatcgaacttatgtaaaactgcatttgcttctccatgatgggcagtgctcctgccaattgttaccnnnnnnnnnnnnnnnnnnnnnnnnnnnnnnnnnnnnnnnnnnnnnnnnnnnnnnnnnnnnnnnnnnnnnnnnnnnnnnnnnnnnnnnnnnnnnnnnnnnnnnnnnnnnnnnnnnnnnnnnnnnnnnnnnnn

SEQ ID NO: 17007 - DNA, 1454 bp, Setaria italica
  Peptide Sequence Number=SeqID_82981
tttttaagttttagttttatttttccgtttttacttttactttttcccttttgggttttaacttatttcttggtacttcttgatccttgagatggttactatattttaagctttgtatttttggtctccatcagtagcatttattatgtggacgaaggtcttaccttgactcatttatcaggttgagtttcactttcacacctaccagtttacccaaaatcctaagctgctgagagaagatagacaatacacatgaacttttagcaacagaaccttaaatgtttaaactcatatttctgtaatcctattaggatgcataattatccatgttttacttctagtttatttttcctttgatctttgcctctctgtgtttttgtttaaaagatctgctctgcacaagtgcaacatggctggaaagcctgctgttgtcactcacggaatcatggcgtggacagtatgactgacgatgccagacctgctcaggaggaggcaactgatgtggcaaatgcagtacttgacagcaagttgttgacagttttagttgctttttgaaaatcttgggtagacttgggaccagtgcactcggaaaggacagttcaatcatgaattgcaattgtttttactgcagggagtgatgccattctccttggtgctgagactcgtgacttacatacagttgagactatctcaacagtgggcaaaattgtgttgaggctgagaaggtattccaccatgatttgtcagcaagtgaactgtgaaacatgtgggagaacccatgacccacttggagtctattgcttatcaaattcagcctttgtttaatctacatgggaaactctttctgtctattaatgttttatcaccgtcacaaatttgtcatgaaacacggattttttagtctatggattaagtgctttctaggtgtgactgtgcgggctgctatcaaagttaacacatctgtgatcatttgcttcaccacttctgggcgggctgcaaggctcaccgctaagtataggcccagcatgcttgttctttctgttgccattcctcatctaaagacaaaccaactgaagtggagtttcactggtgcttttgaggctgagtctaccagcgctgcaaatgagtcagttctgaaggtttatcttgaccacggcaaagcctctggtgtgatgaatttccatgattgtgtcgttgttcggcagatagcaggagagtcattggttgtgaagatcttgagctggatgactggacacgtctactagggcattgttttgccgatttttgtctagggtgaaacttagtggcctttgcaaaataaggagtttttcctatgatgccatcccaggattttgcttagcaatgtaaaactcctatgatgtatgttgaagttgtcaaattatacaacattacaacctaaatgtgctccatcaaactgtactctatcccttgct

SEQ ID NO: 17008 - DNA, 292 bp, Setaria italica
  Peptide Sequence Number=SeqID_82982
ttcgcgccgccgtcgagggaggaggccgaggaggccaccaccgagctcagggacgccatagagaggtgaaagatcgcgtctttggcggtgaattttgtcgaactgattgggaagctcaggattttttggggaaattaattggttaatgctttgatttatttaactcttcgtgatccgttcgtcacgatgtgtttgctgaaatgatttcttcttatgtgatttaggaagtgtctgattcatcttttagagtttgggtgttgggattcgaatttgattccccaatagtgataag

SEQ ID NO: 17009 - DNA, 884 bp, Setaria italica
  Peptide Sequence Number=SeqID_82983
ttaagaaataagaactaactttgatgctcttgctaaagccgagcgctatgatcttgcttgtgagctttttcaggaactaaaagaaaattgtggctcctccagtgctcgggtatatgcagtgatgataaaacatttaggaaaggcgggacggcttaatgatgctataaatatgtttgaggaaatgaataaacttggttgtactcctgatgtttatgcttacaatgctctcatgtctggattagcaagaaagggcatgcttgatgaagctcttactacaatgagaagaatgcaggagcacgggtgtattcctgatatcaactcatacaatattatcttgaatgggctggcaaaagtaggtggacctcatcgtgcaatggagatgctttctaacatgaaacagtctgcaataagacctgatgctgtctcttataatactgtccttggtgccttgagtcatgctggcatgtttgaggcagcagcaaagttgatgaaagagatgaatacattggggttcgagtatgatcttattacatattcatctatacttgaggctatcggaaatgttgatcatgaataaactagcaaagtttgctgatgcacactagatgagtgttcaggcctctttgttcttgaaaaacaattctttgatgaagccttacctgtttgacatatgtcaaaggatgtgcctcttgcgctcaagtgaattgttgtagaaggaaaatattgaagacagcaactgatcaaactgtgaagcaataacttcctgaaaggtttgagatctgtgaagcacaagcctaactactgtatattaagatgttctgcaatccacacccacatgtgacacattcctgaagtcaggttttacttactgtaatagaatgatt

SEQ ID NO: 17010 - DNA, 979 bp, Setaria italica
  Peptide Sequence Number=SeqID_82984
taatagcttagcagttggctgcattccgttctccttcatctcattcaacaactgaattgctgaatgagatgaaggagaacggaatgcagccaactgctaagatatataccatgttaatagctttgttcttcaaattggatgatgttcatggagcattgagtttgttgaagagatgaggtatcagtactgccgaccagatgtgtttactacactgagttgatcagaggccttggtaagccgggagaatagatgaagcgtatcacttcttccatgaaatgcaacgggaaggctgcaggccggacacaattgttatgaataatatgataaatttcttaggcaaagctggtcgtttggatgatgctattaagctgtttcaggagatgggaacgttgcggtgcattcctagtgttgtgacatacaacactataataaaagcactttttgaatcaaaacctcatgcttctgaggttccatcgtggttagagagaatgaaggaaagtggaatatcccctagttcattcacctattctatcctgattgatggattctgcaaaaccaacaggacagagaaggccatgatgctactggagtaggtagtattaaagggcttccctccatgtccagcggcatattgcagcctgattgatgctcttggaaaagctaagcgctatgatcttgcttgtgagctttttcaggaactaaaagaaaattgtggctcctccagtgctcgggtatatgcagtgatgataaaacatttaggaaaggcgggacggcttaatgatgctataaatatgtttgaggaaatgaataaacttggttgtactcctgatgtttatgcttacaaggcaccaaggacagtattataagagacagcatcaggtcttattgcagactgtttcatgttagaaagcatctccattgcacgatgaggtccacctacttttgccagcccattcaagataaattatttgttattgta

SEQ ID NO: 17011 - DNA, 619 bp, Setaria italica
  Peptide Sequence Number=SeqID_82985
agggctagacaaagaggaggaattatgagcatgatacatccacttacatggccttgatacgttgtttggaggtaatagagcagtatggtgagatgtggaagatgatccaagaaatggtacggaatcccatttgtgttgtcaccccgacagagctgtcagaggtaatccggatgctggggaatgctaaaatgatcagcaaggctattgcaatcttctaccaaatcaaaacacggaagtgtcagccaactgcgcaggcatataacagcatgataataatgttgatgcatgaggggcaatatgagaaagtccatgaactatacaatgagatgagcaacgagggtcattgctttccggacactgtgacatacagtgcactaattttcactttctgcaaactcggtcgccgtgattcagcaattcagttgttgaatgagatgaaggagaacggaatgcagccaactgctaagatatataccatgttaatagctttgttcttcaaattggatgatgttcatggagcattgagtttgtttgaagagatgaggtatcagtactgccgaccagatgtgtttacttacactgagttgatcaggaaggaccttaggtaaaagaccgggaa

SEQ ID NO: 17012 - DNA, 751 bp, Setaria italica
  misc_feature (424)..(424): n is a, c, g, or t
  Peptide Sequence Number=SeqID_82986
aaaactactacaagaagaatttttaataggaacaagaagaagaagaaagggttaaggaatagaatttctctgacaatttaattttttcttcaaatcattcctttaccactttgcagtaaggagactacacccttccatgatacattcagcaaagtcacctggcttccaccactggatgctgcataggttcccaatttacacaaagtctgaatagtggataatgtaatcctggtcacatcactagcaagaccttgttcgatgtgtttcacagtagtatcttcatcaggtatgctcgttttgcagttatctgcttttgcagcctcagagtatgcccagcacagcttggttgtttcatctagaaaacaggtgcagccctagcgatatctggcgcagctccatgaattttcttaatttgtagctcttnttgggtttcaactctagctaccccaacttgcttggactgaaaggctattgttgttgttgttgtatatatccgtcagagagattatacaatgacatcatttcttgttgtcaactattgagctttccgtcagacttagcaactctgaaataaattcaccggtagtgtgcaccatatctacagtaatgcattttgccgcggaaggaaggagcttgatcgagatatttaaggtcattgaaattatctctgggagaattctggagtgttcttcctcttggacctcttcagattcctcaatagattcaacagaccacaggagatgctttccgc

SEQ ID NO: 17013 - DNA, 1852 bp, Setaria italica
  Peptide Sequence Number=SeqID_82987
cctcctgttacaaactgtggcatcaactaactatattaatgtaagtctcagtttcagcgtaacgcatgaagaaacaccatagttctgtaataatttccaagcaaaggaaatggggatggaaaaggttttcaagtaagaaagcttccagctcattccaagcagcactcgaggcaacagcagaaatcataaaagtcttcaaggcttgtatgagagaagtatacacaggttgccaaactactgcaggagaatggtctgcaccatataaggcagggatttcgaagccaaggacatatgagtagatgtcttctgaagttaagatattaagaagagtttgtagcttgttagataactcaattaccacctcttctgtcaaccacgaggaagcattgagaaggtgcaaaaacacaactaactcagcaggtaaaagtgctctatttctatgatcaacatctgaatccgtagagaaaatgcaatccaatgaagccaaatttatctctatctgattagcttgtctcatgtgatctgaactattagcttcttcgttttcaaaaaaataacgtgcaagctgacatttggaatctggtgttacttcagatgacttcataagtgtatctagtaaaacaaataaagttggctccaacaactcaacaagtgcctcatttgctgctttcaattgtggcttcttgctgagtaaaatgcttgcggatgtgatcactagtgcacacctgattatattcttgtgtataatcatcgattcagatggatatgctgaacaaatccttacagcatttatcaagaaaacttgattggtaggaatgcccttctggcttcagaggtaccaatggcttctggtaacggcatgcaccatgtttcggcagcaactctcagagattttatggacagagagagaagggttaggatgatttctctgacatttattttttcttcaatcattcctttaccactttgcagtaaggagactacacccttccatgatacattcagcaaagtcacctggcttccaccactggatgctgcataggttcccaatttacacaaagtctgaatagtggataatgtaatcctggtcacatcactagcaagaccttgttcaatgtgtttcacagtagtatcttcatcaggtatgctcattttgcagttatctgcttttgcagcctcagagtatgcccggcacagcttggttgtttcatctagaaaaacaggtgcagccctagcgatatccggtgcagctccatgaattttctgtgaccatatatccatcagagagatatacaatgacatcatttcttgttgtcaactattgagctttccgtcagacttagcaactctgaaataaaatcaccggtagtgtgcaccatatctacagtaatgcatttcgccgcggaaggaaggagcttgatcgagatatttaaggtcattgaaattatctctgggagaattctggagtgttcttcctcttggacctcttcagattcctcaatagattcaacagaccacaggagatgctttccgcaccatgagctggcctagtatagatatacgagcaattaaatttggtttcagtggttgggcaagcttgcagatagccactacagttggcaaacacctcccatggtccctaacaaactccacttaaaaaatgtaagaattacctttgcaataagagcaagaaattgccccagacaatcagtcatatctatacatgagcatttcagagcaacctgcaaaattgacttgtgtagcacgcagtgcgatacacctgaacatccagaatcatcccaagatacctaaaatgctgtgaaggtaatacaccgaaacacagttaagtagt

SEQ ID NO: 17014 - DNA, 1378 bp, Setaria italica
  Peptide Sequence Number=SeqID_82988
tggacatgggtactgatcgtttcgcaatctcacccgatcccattcccagcggtagccgtccgtccccctctggctcctccctgtattctctcgggggttcagacttcagagcattggttcagtgcattctatcgggccttcacctctctctcccctagcggcgaccacagggggcgagcggcgccggcccttgttccaggtcttcgccggcgacgagcatcagccagttacatggcagcgatgaatagtgatttgggaggcctaggtggcaggcctacaaatccacaagcaaacccttttggaggtgccttgaatggtactggatcaggactgatccgtactggactagaagcatatggtgggaggattttagattcaagttctgaatttatgcagagcaatattacacaatatttgtccgaccctcagtactactttcaagtcaacagccagtatgtgaggaacaaactgaaggtcatcttgttcccttttttgcacaggggtcactggacaagaataactgaaccagtaggaggaaggctatcctacaaacccccagtccaggatatcaatgcaccagacttgtacatccctttgatggcatttggcacctacattgtagttgctgggtatgccttgggagttcttggaaggtttacccctgaggcgctgaccctacagttctctaaagggatacttggctggtttctgcaagttatcctcatcaaagggctgctgtactccctgggcagtggtgaggctccgttgctggacatcgtagcgtacgctggatatggctttgctggtacttccctcgcgatgctggcccgcatcttctggaattacctctactacttcatcatgccatggttctgcatctgcacgggagtcttccttgtgaagaccatgaagagggttcttctgggtgggccaaggagctatgagaggcaccccagccggaaccactacttcctgctcttccttgcagttgtgcagttccctatgctgttctggctcggcaacatcagcggctgatctttgatcctacggtcaggccgcacaaatcatttttgagaggctgtttagcagaatagaactgtggtgcttcttgcctgctgatgaatcttgggttatcctggagatggtacagaactgttagctatagatatctgggtaagcaaatgaaaggacgtgtgagtacctcattttgtttctgtatcctgtgggaggtgattgtaaccatgatcacttgggataggatgaagatgaactgctttgtgtatgctctttggatcctacttaccatgttacgtcacgacgctcaaatcctgacttaattttgatgatcatactgcaagatctgcagtttcgaattaaa

SEQ ID NO: 17015 - DNA, 311 bp, Setaria italica
  Peptide Sequence Number=SeqID_82989
cgcaggagtcctcctcgatgtgggaattcgacgaggacccgcccccgtccccgccgcagccccggccggaggcgaggcggcgcggggggccaagaagaggtcgaggaggagggtgggagctcgcggagccccccgcggcggcgccgaccgcgacgctgatggaggcggaggagtacggggagatgatggagagcgtggacgaggtcatgttcgcgctcgacggcatccgccccgccgcgcagaagcggacgcgccgggctagcctgctcgcgctgcttgggatctgcgcctccgccgagcgccgccgcgtg

SEQ ID NO: 17016 - DNA, 662 bp, Setaria italica
  Peptide Sequence Number=SeqID_82990
cttgaaaaagagaacttccagatattcaatgaactgcagaaggcaaatgagcaaagggcagatctggagaataagcttctccagaccaactctctgttggaacagctccaacagctgcaaggagagctgcagcgtgagaaagaagatgctctaagagaagctgaagagatgcgcaaactatatggaaacagcgattttatctctgctggtgaagtttccttgacagagtttagttacagtgagattcaagaagcaaccaaaactttgatgaatctatggagattggacatggtggatgtgcaagcgtctacaagggttttctccgtcataccactgtagccataaagaagttcaaccgagaaggcatagtaggagagagagagttcaacgatgaggtggaaattttaggtaggatgagacatccgaaccttgtcactctcataggagtgtgcagagatccgaaagtgttggtttatgaattcttgccaaacggaagcctagaggaccgtctccaatgcaagcaccacactgagccactcccatggagaatgcgcatcagaattgctgctgacatctgcacagcacttatcttcctccactccaacaaaccaaaaagcatcgcgcatggtgatctgaagcctgtcaaggaggacattgtcagg

SEQ ID NO: 17017 - DNA, 232 bp, Setaria italica
  Peptide Sequence Number=SeqID_82991
tttttgaataggattctagctgatcacttggtcatgtacatcatggtatagtatgtctcaacgtgtaaagtgtcacgatgctatgctgacattattttctgtccgttcaggttgcagtcatgagttctgcatcaaatgtgctctctacctttgctcaaccagcaacatccgtgtcgagttcacaggcccacctggatcgatcccatgccccctctgtcggaatggaataaaa

SEQ ID NO: 17018 - DNA, 374 bp, Setaria italica
  Peptide Sequence Number=SeqID_82992
cttcgttggggcagaagtttaatgaacctgctcgtgtgagatacatcaacaagcctgctgatggcggtgtaacagcacttcatatggcggcattgaatggtcaattagattgcatgcacttgttgattgacttgggtgctaatgtctcagccgtcacattcccctatggcactactacaaatttgataggcaagtattggttcttagctcaaatggcatacaacaaacaatggctatttttcttaactcaaatgaggttttaacaatgcactgggggagcaggagctggcagcacgccgttgcattatgcagccggtggggggaagcaggaatgctgtgagctactaatatcaaagggtgctagcaggttgaca

SEQ ID NO: 17019 - DNA, 1815 bp, Setaria italica
  misc_feature (1782)..(1815): n is a, c, g, or t
  Peptide Sequence Number=SeqID_82993
gctccacttcgccgccgccaagggccacctcgacattgtcacgatgcttctggagaaaggtgctgacgttaacgcgcgcaactactgcggccagactgcattgatgcacgcgtgtcggcatgggcactgggaggtggttcagatgcttcttctcttcagatgcaatgttaccagagcggattacttgagtggccgaacagcattgcattttgccgcacatgatggatttgttcggtgtgtaaggcttttgcttgctgactttgtccccagtgtggccttggaggatattgcctcttcagtggtagatggtggtgattgccagacgaatagtgggagcagtcccaattcttcgttggggcagaagtttaatgaacctgctcgtgtgagatacatcaacaagcctgctgatggcggtgtaacagcacttcatatggcggcattgaatggtcaattagattgcatgcacttgttgattgacttgggtgctaatgtctcagccgtcacattcccctatggcactactacaaatttgataggagctggcagcacgccgttgcattatgcagccggtggggggaaggcaggaatgctgtgagctactaatatcaaagggtgctagcaggttgacactcaactgcaatgggtggcttcccatcgatgttgcaaggatatttggacggcgctctttggagccattactttctccaaattcacactcgagtgtccctgtatttcaaccatccagttatcttgccttgccacttatgagcatacttcatatagcaagagaatttgggttgcagtataccttaccctcagtggatgatagtgatctctgttcagtttgtctggaaaggtcttgttctgttgctgctgaaggttgcagtcatgagttctgcatcaaatgtgctctctacctttgctcaaccagcaacatccgtgtcgagttcacaggcccacctggatcgatcccatgccccctctgtcggaatggaataacgtcattcaataagttgccaagcacaccaatggaaggccttaaatcaagttcagccctaacattctgtaacccatgcatactaaacacccggtctatgaactctccagccagtgtctccaaagccgaaatcaggcgcaaccgtgtggcagctgtctcttcagagctagtctgcccaatcacctgcagcccattcccgtcgtccgccctcccaacctgcaggtgcagtgatgatgatccatgtggtgctacagaggcacaggatggttccgaagtccaatctccacggccctcgcacagcgcaagcatggagctggacaagaggggagaggatctggaccggaccagctgctcaggcatgttctggagtcgaagaagctgccacagggagcagcagtgtgatgcagagatcaacgcgtgattttatttctggttgtgaatatatctggattcatagcagcttaatgcgggagacgagcagcggctatttttcctccccagctgtgttccttcctctcctatttgcagccaacattttcttgattggtgaagcccagcagccttttgctgccgtagtgtgtgtactgtattgtaacagttttgttacaggtggtcatgtgccagtgagtctagatagcttcaaagttgctagccagttactgttctttgtagctgtatgtaaattacaggacttggattgaattattctctgattcatatgataactatttacatacaccgaggtaaacaaaaaaaactaaaaaaaaaacgtaagaaacgtaacnnnnnnnnnnnnnnnnnnnnnnnnnnnnnnnnnn

SEQ ID NO: 17020 - DNA, 390 bp, Setaria italica
  Peptide Sequence Number=SeqID_82994
gcaacaccgaaggtagtaagccaaaggtgaagctcagctggatcgatctgatgctgaagtatccaagatcagcaaaaagagcctctgtgcctgtgaagcaaagaagaatttcacccaacgagacccatcctttctttttgttcctccggaaatagtcgatgatatattttgcgttgaaagccttcaaggtgccaatatcatacttgaccatgttatagatcccaatacctgccatgaggagcagccacacaaaaaccaccggcgcaaatgtgtagccaattttgtctgtcccaaagcgctggaccgcaaagagaaccaccagaatccccactgtgatccataccgtttgatctgttgtcagatgaggtgctctcaacttcaggccgttga

SEQ ID NO: 17021 - DNA, 472 bp, Setaria italica
  Peptide Sequence Number=SeqID_82995
actacgaaggaactaataagcagccagaggtgggttcaccggcaacgggtcgcctcgccatggaaatatggtagtggaggaaggccacgtaatgattggggtatgcagtctgtggccgtagcgggcgacgacgaaggcaacatcatcctcggcaacaatgatgggttagttgtgtacgatgtgaggaagggtgagacggtgaggacggtcaactcggtgatgcagcggaaaaacagggtgttcgtgtcaaagcatgtgttcaaggggagcacggtgcaacacacgtgcttcttcacaccgtcttctgccgactccccattgatccactcttggagctaagtcatggcttggggtggttatttgtgttacacttctactagtccagtggtatggtggataggaagaacgtagtagagttaattgacatgattcacttcgctttagcatgaggcaacttttgttcctgcaaaag

SEQ ID NO: 17022 - DNA, 643 bp, Setaria italica
  Peptide Sequence Number=SeqID_82996
caatgttatatccagctttcctgtaaatgttgaacggcacttgatcgataactctacaatgaagatatacacatcgtcttgcatccattttgatgaccaaatcctcacatgccttgagaagttgcttcccgagtcctctcctcctcaatgccgtcttcacagtcatgttacagatgtacgggaagtcgagcggcggggtgggcgtgggcggggccccgggcgcgcccaccgcgttgaacgacacctccgcggtgcacgccatctccccttcatctttaccctccccatcctcgccgccctcatctccgtcatcccccgtggagtcggccgcggcgtcggcggggcggtagaaccccacgagcaccgcggcgtgcggcgcgagcccgcggcgctcgtggaggtacctgcggatgacgaacgtgaggagctgcgcgtaccgctgggccggggcccaccgcacggtctcggagaacgaggaggccaggaggcggacgagcgcctcggccacggcgtcgtcttcaggcccgcgggtgagggcgcgcacggtgaggaggccgtgcgggaaggcgtgctcgtagcggaaggccgcgagctcgtcgagctgcgagagcgcgcgcggggataggaagacgccggggccggg

SEQ ID NO: 17023 - DNA, 899 bp, Setaria italica
  misc_feature (1)..(53): n is a, c, g, or t
  Peptide Sequence Number=SeqID_82997
nnnnnnnnnnnnnnnnnnnnnnnnnnnnnnnnnnnnnnnnnnnnnnnnnnnnnagttttctagccgcagcccacagggcgccataacctttcattcaccaattaagttaacacctaagacacatttatacagaactgcagcacggagatccagacccgcaatatcaacaaacaggagatccagaaccgagagaaacgatggggggaaggaaatctctcctcaaatacatccgacaatctaacacgtcatgaagacacgccatcatgctacctcaggaagatttcttgttttccttctccagcttcaaccaaacatattgtgcggagcaggttcagccatcagcgagctgtgatggtgaaccatataccacctgccgttgcggaactcaaacacattcgtcacatggcacagcacagggtcgaggtcgatgttcgccttcaagttgacccacgccacctcaccaaggacacgaacccggacatcccgtatctggaaaccaacgccctgccctccatcttggccccagttgaacagcaagctccagccccccatcaccgcattgtatccagtaaagaactccccattcgcatgaatacacttaacataatctgcattaagccaaaatcggctcattgctggcaaagaaccttccctgatgatattatagaactctgcattaagattcatgatggcttttgtagcagcatagtatgccttccatccattaggtggatttatagtaccctgctccaccgtaaaatccttgtggtagagcgccttccaggcgccgtcgtcgttggcggcgcggcgcatggcggagttggtcatggagaggcggcagaggctggtgtagtcgagatagctgagcgcgtgggtggtgatctcggggacgagctgct

SEQ ID NO: 17024 - DNA, 532 bp, Setaria italica
  Peptide Sequence Number=SeqID_82998
aaaactatgttgcatggcgaaaggatccttcccacgtgagacttcagttgaccgttgagagcggtgaacaaaccaagcagcttgccaatcccaccaccaccatgcaactacttggcatccaattttgattgccttgtaccaactaggggcatgcaagatgcttgtctcaacgaatcttcccttctcgtaacggggctttaacgaagccagatgtgatcatgtatcacatgattacttaattatgctaacaaaataaaggagccatccaacgatatgttcctgtttccggtgtcatcccctcagtcttcacttcaatcctagccactccaaagtcagcaatcttaatggacttatcaccagaaatcaggaggttatctgacttaagatctctgtgaataaaaccaaggccgtggacataggccatgccacgagcaacatctagcgcctgctttaccgctaacttcagcagaacaggtctgttccgctgaagttagcggtacagacctgttctgccttcttgagcagaaggcag

SEQ ID NO: 17025 - DNA, 1626 bp, Setaria italica
  Peptide Sequence Number=SeqID_82999
acaataagacccgacaagctcacatctatttttttcaaaaatcacagctcaaccaaacacaccctaattatacatattaatatcatatataccatgaagcatcagagcttccacatgtagccgcatgatgataaacacacaaacagcgcgcgcagcaggaacatgcacttgttacaacaggaagggtatgatgtcaaggataaagctacctctattacaaccactctgatgacagaaactaggtgtaatctacgataaccatgtcaaggacagaaggcacactcaagagggtcaagagtcggctttctgcttccgaagcaccagtctattaatacgataaatacacaggactaaacctctccccaggttctttttccctggattctggatgactcagtccagagtcattggttgggcgatgcagcagcggaagcgggccctacggacagtggtcaggacctccgactccacctgctccagcatcatgacaatctcagtgaatggggggcgaacatcagggtttgcatcccagcacctggtcatgatctcccctagggcggggaggcagtcatggggtatggttggacggacacccttgttcaccacagcaaatgcagcttgcactgcagtcatgtttgcaaagggaacgctcccagttacaagctcccacaggacaatgccaaagctgtagacatcaactttctggttgtatggtctatgctggatcatctccggagccatccaacgatatgttcctgtttccggtgtcatcccctcagtcttcacttcaatcctagccactccaaagtcagcaatcttaatggacttatcaccagaaatcaggaggttatctgacttaagatctctgtgaataaaaccaaggccgtggacataggccatgccacgtgcaacatctagcgcctgctttaccgctaacttcagcggaacagacctgttctgccttctgctcaagaaattcttgagcgatccacccttcgcatattcagtgactatgcaccacaccatcggcttcctacaagcaccaatgaacttcacaatattggggtgcctcaatgtagaaagcatcatgacctcctggacaaattgttgctcaagcaattgagctttctcagggtctgcctctggtcgctccaaaagctttatggcaacatccataccgttgtaagttcccctgtaaagcttaccaaaggcaccctgggcaaagggcatccccaggtgcagcttccccagatcaatagtccactcctcataattctggagtgtctcagtggggaatcgattgtccatgagagcctgcgccagcgcatcctcactcaaggcatgcgacaccctccctggacggaagatgctgttcccgaccgaatagcttcccacaacaacaggccccttgagaccaggatggcctagcatcccagtacgggagtcactgttagatcccacgctgctgttgtccacggacatggcgatggagccgccatgcatactggtctgcaagctgttgaggctgtcgacagacatgttggagccctcccccagcttctggtagaaggccatgtcgcagaagcccccgccaagttcacaccaccatcatggccacccacggcg

SEQ ID NO: 17026 - DNA, 843 bp, Setaria italica
  Peptide Sequence Number=SeqID_83000
gaagctgaacaggaacggcgagctatacgtgatcaggaacctaacctgaagaccaagatcgtcgacgggaccagcttggccgtcgccgccgttctccacattgatccctcaaggcaccaaggacgtgctcctcctgggagacgcgaccaaggtctccaccgtgcttgcttcggctctctgcgaacgggaaatccaggttcagattgtggacaaggatctctatgactgcctgaagcaggagctgcgcccagaactgcacaagcacctgcttctttcttgcagttacagcagcaaggtctggctcgtcggcgacgggctgacggatgaagagcagaggaaggcccaggcgggcgtccatttcgtgccctactcgcagttccctcccgccgcggcccgcgtcgatgactgcgtctaccacagcaccccggcgctggtggtgccgggctcgttcgagaacctccacgcctgcgagaactggctgccgcggagggtgatgagcgcgtggcgcgcggcgggcatcgtgcacgcgctcgagaagtgggacgcgcacgagtgcggcggcagggtcaccggcgtcgacaaggcctggcgcgccgccctggcacacggcttccgcccctacgaccgccaccacgctgccgttgccaagtagtagcagtaataaaaaatgatggagctccgggcagtgcagatgcgaacggatgcgtatcgatcgattctctgtgtgtgctgctgatgaagtagtagcgtattgctgccctaagaaaaaaactccagtagcgtaatgcgtggattgagacgtgttggtttgtactaatggaatgtgttatttcgataaaaaat

SEQ ID NO: 17027 - DNA, 377 bp, Setaria italica
  Peptide Sequence Number=SeqID_83001
taatttgcatatgcacttaagcatcgcaatttttgagatccttgtcataagttcatcatgagcactcggctgggcgccggcctgattaacctgtgattggtgctgtcgtagctttctgcaccggaaccgtcttcttccacatgtggtgtacaagattccgtgacaggtcacttggccttggcggcttggcaccatgattggccatgcagcctttttggctgtagcaaagactgcacctcgtgatggctgatgaatgaagtttatgacgcagttggaggcttgtgagtaccatgttggcccttctctgttgttgcatttacgtacccgagtggtcctccatggaccccggtcctcttcttggccactttgctcaaggt

SEQ ID NO: 17028 - DNA, 355 bp, Setaria italica
  Peptide Sequence Number=SeqID_83002
caagctctgggtcaccagaaccaagcatggcaaattgaatgtcttcccgcatgagatctggcatgataagtttaatgagatcaattcctttctgataatccaatcttccaatgaagccaatcagaggaacatcaggccttataggtaaacccagctccttctgcaattcagctttacatttggcctttccagagaggtcatcagcagaataatgacaagggatatgtttgtcgtttaatacacttttcctggaacttaacagctcatcgaggccttgtccaccttcagcagtagtgacctcccacgaataacccttactgacagtcacgattcgatctgctgtcacaactgcacc

SEQ ID NO: 17029 - DNA, 743 bp, Setaria italica
  Peptide Sequence Number=SeqID_83003
tgatttgcgttgccagcagcatacaagcacgcatgaacaagagacagagaacacaaaacagttcggcaaaaaccaggatctctctcctttgcttttctttggggaaaaaagataaaaacaatccaaggaaggttcacaatgtgatgttgcataatgcaacctgaggctaaattatgaaggtgatatcaccattacaccctctatgccatttcccaggaatgccctggcaagtacactgtcattttgcattaataagggggcaaagaagaaccatccagcatccagggacatagttaatgagcagttgagcacccagaaatgagcccaaaattaatccgctatgcaggaatgaacatggagatcttaatctttatgcgagtgtgccaggtattggcttgtgtacttgtccaccttaggcccagaagaaccatatttgttatcatagtactccacacatgcagaaccaaccaatgcagcaagggttagagcctgcgcatgcaaccttgcgtggatgatcttgacgctaggcttcatattgggccgcgaccagttgtaggcgatcgaactgctgatcccagtgagccagaggcaacctacggcacggagcttgtgctcgacgacccacttcctcatggattccatcttgctcgggccctccgccatttgcttcgcgttctcctcttcttctttccttcgaattttcgccttctgtctttttcgagttctttttcgttagttttctt

SEQ ID NO: 17030 - DNA, 579 bp, Setaria italica
  Peptide Sequence Number=SeqID_83004
ccgctagcaataatccatctgacgtgcctcatcgatgtgtacgtcgttcatcagaaattccttaggccttggtgttgacgttggtgcagagccaatccagtccctcgtacaggccttctccggacgttgcacgagcactctggatgtgccatctacgacgggtaccaagggaccgatgaagaccaagctcctctgccatctcggctgcagtcatggcgttgggaaggtcctgcttgtttgcaaacacgagcagcgcggcgtctctaagctcctcctcgttgagcaaggcgttgagctcatccctggccagacgaacgcggtccctgtcgctgctgtcgacgacgaagacgatgccctgggtgtcctggaagtagtacttccacaagggccggttcggggcactgccaccgacatcccagaaagtgaagctgatgctcttgtactcaatcgtctcaatgttgaatgcggtggacaaaaattaagctcgacggttgcgacggtggtggaggtggcgagctccgccggtcttgagcctgtagaggatggtggtctgccggcggcgtcggacggcccagcagt

SEQ ID NO: 17031 - DNA, 309 bp, Setaria italica
  Peptide Sequence Number=SeqID_83005
gcgggagccgcctcccaggagctcttccgggaggccaggatggcggccacgtcggcgccgcccgcgagcgcccacgccaacgggaacggcacccacgcggggatggcggcgcaggtgggggcgcccaccaaccccatggccacggcgctgctcaccgatcagtaccagttctccatggcctacgcgtactggaaggccgggaagcacgccgaccgagccgtctttgacctgtactttaggaaaaatccatttggtggggagttcacagtatttgctggcctagaggagtgcattaagtttattgctaaa

SEQ ID NO: 17032 - DNA, 1414 bp, Setaria italica
  Peptide Sequence Number=SeqID_83006
ttcccgtcgcccctcggtgccctgcgtcgctgcggcgcccgtctctaaaagctaggccttgtgggcgccgacgcggccgcagcagcacccacgggagagtagaggagatcggtcgatcgctagctacctgcggtgggacggccgggatgaagaagtgcgcgtcggagttggagctggaggccttcatccgcagccgggaggacgcggccgcggcggcggtggcggcggccgagcacaagcccgggcacgacatcgccgcgcaggcggcgttcggtgcgggcgtgttctcccccggcgacctctccggcttcagcttcgccgactcgaacaccctcaacggaagcattcctaatcacgtatggtcccataaccacaacgtgaggcatcctgcagtctccacgacaatcgagtcgcagtcatcaatctgtgcagcagcaagtccaacatcagcgactaacctatatctgaaagagagccaaactttggggggcacaagtggttcagattccgatagcgaatcgctgttggatatcgagggtggtccatgcgagcaaagcacaaacccacaggacgtgaagagaatgcgacggatggtgtcgaaccgtgagtccgctcgacggtcgaggaagagaaagcaagcccacttagctgaccttgagacacaggttgaccagctgcgaggcgaaaatgcatcactcttcaagcagctgacagacgccaaccagcaattcacaactgcagtcaccgacaaccggatcctgaaatcagatgtcgaggccctcagagtcaaggtgaagctggcggaggacatggtggcacgcggcgcgctgacatgcgggctgggcagcctcgggctgtcgccggtgctcaacccgcggcaggcgtgccggggccccgacgtgctgtccggcctggacttcgccggcgacgacccgtgcttcgcggggctgtccccgacggagcaggtgcagaactcgccgctgcagagcatcgccagcctcgagagcctcgagaaccggatcgccagcgaggtgacgagctgcggcggccccggcgtcgacgtctggccgtgggacggcggcctgtccaagtgaagaggagccgaagccggagcctggagttcgcacgccgatggcagctactgccctgtatgcgtatctatatatatgcacggtactacgacctgcaagtgtatgtcagctgccattgctgtgttggctggagttgtgaactgaacggacttgagtttttcagagtccccgtctcggtcgctatattgcctagttctgtaatactagaactgagtggctaactagctactcatatatgattatagtatgtgctaagggtctaagagactaagctccgaagcataattagtactgtgatgagatatcttgtcaattaaaaaaaa

SEQ ID NO: 17033 - DNA, 390 bp, Setaria italica
  Peptide Sequence Number=SeqID_83007
gataatccatgctggaatctctagtgctactagtagctgaacctctagtgctatgatccccatctgtcatggtcttttggactagccgtgtgcatggtggaataccaggataggtcacattttgtgcaatctgtttgccatggccttcatgttaggattgccaaggaagtccaggagaagaagatgtgggtgcttatcctctgcctggttggactgcttgtttgtcaatgcttttgtaatggctagtggaacagatgcttttgtaatggctagtggaacagatgcttttgtaatgcaagaagtgctagatcaactgttgctcatgatgtactgttcttgtaagatgatctattggtctagctgacttaaatcatttagaatgataaatta

SEQ ID NO: 17034 - DNA, 783 bp, Setaria italica
  Peptide Sequence Number=SeqID_83008
ttaacgaccaaggaccgacgaaaagcaaggggaaggtggttccaagagccagttgcataaatcgttctacacgaatgtgcccaatgagtgtctggatgatatggaggtgagtagtgtgaagaggatggcgctggagtttgattcgtccaaggagcactaccatgtgaaggtgtttgacaagcaccacagcgattctacaatatcttgcaaatgcactgtggaagaagatgggagccttgctatccataaagttgaatggaataaggtacggcacttggtggaagacatatcctgccttttcaaagatcttgatctaaggctgatgttatgtacaaaaaggatcctgaaaacccttgatcctgaagtggaaaatgctttaaagagcttggtgtcttctgctgttattgatcctgatgtgaaagggggacttagatggccacttggaaaagagtccattggtgagaggttcagcatagttggggtgtggcacacaaactacaaggctttcagaaatgaaaccctaaggctcaagttgaggcatggtgaccgattcgatcaccaaaacctcagctggggaagtttccaatgaagttaccttcaaactaattggcatgtctcgaagactggaggatgttgatccagaagaaacctctctgaaggagatgctggagcctgtggttcaaatggtatgggacaatgctctgaactacaagatcgtgccttgagcgcagcagctatactgacgagcaaatggttcgatggagaagcttgacggtgccttcc

SEQ ID NO: 17035 - DNA, 535 bp, Setaria italica
  misc_feature (13)..(13): n is a, c, g, or t
  Peptide Sequence Number=SeqID_83009
ttgatcgttgtcncttttttttattgcacgtgagtcgtgacaagattggcagtttcaactaaatgtttacctttgcaactttgagtgactagtgtcagataatacagaggtactgtttaaatgctttccatctaaaaacacatttcaatctagattctaatttctgtcatctgctgataaatctcatcaatacaattgtgaacctgcttgctgtagccacagcaaatacatagttatgatcattaagctatactgatgttcccaacagtgtggctgtactactggattttgcttagtttagggtctcaggtcaacttactaaattccaagaattctttatcatgctgtaaactaccacacactgccaaacctttgcaagtcatccctctcgaaacagttatatctgaaatgaatttgtgaatgtaatgtaaatcttgcacccaagttaaatcagattttctaacaactgttgccaacctttttgtagggcattcaggcgacagtgcaatctcgagtatccacttcaaagagaaca

SEQ ID NO: 17036 - DNA, 597 bp, Setaria italica
  Peptide Sequence Number=SeqID_83010
tcccggctcccagctggaggaagggtgtgcagctatggccgtcctaaatgtagctcacaggctcacagccttgagtccttgattgcttggtacagcagctgaacaaggaccagagagccaacgcgggtcataagcctttggcccgacatgttgctgtcttgttgataaccagtagccgccaccttgtgcatgttatgttcaaatgcaatgatattcacagccctggttcaattaacaaatgaatgagttcatgcagtgcttcttccactccaaattgttccaacaatgtgtgctggcatacatcaaccaccctttgaatgagcttctgattatccatagtaacaagaaaccacatcatcaatagtaacagcactcatctccttctcagacctatgctcttcttcttctgagtgatcgcaaatcgtcttgacatcgcaacattgtaaaatctcctcatatgctcggacaatcgatgtatcgcgctaaggtcgcctacagctgataaccgcagcattatagcatcaaacttcttatatgaaagtttcatgtcacggtttataacctcatctagaagagcacttgcatcttctgttctta

SEQ ID NO: 17037 - DNA, 455 bp, Setaria italica
  Peptide Sequence Number=SeqID_83011
ccctttggcccgacatgttgctgtcttggggataaccagtatttgccattgtggtcatgttatgttcaaatgcaatgatattcacagccctggttcaattaacaaatgaatgagttcatgcagtgcttcttccactccaaattgttccaacaatgtgtgctggcatacatcaaccaccctgcacaaagtcatgttcagaataaagaaaactcctgcttagcaaaaccaaactgaaaaataatggccaaaggactgcaagttacgtccttcactagtctactaataaaattgtcaagaaaactataataactttcacagtatccttttgccataatctcattgatgaatacctgacaaaagctcatatatccccaacgaatgaaactgaaactgaaccagcttaccagcatatatgctacctagcaccttcagaccttatctatgctactccaaaa

SEQ ID NO: 17038 - DNA, 514 bp, Setaria italica
  Peptide Sequence Number=SeqID_83012
cactcgacgtggagctccggcgagcgcgagaaaaatcacatggccttgcaccactcgggtcccgctacctctgcactgaccaccggccaccgcggcagtagcgccgccgccaccgccgtcctcctccggccaacgacagagtctcgcagccgtctccggttgcacgcgcggaagccagcagctgagtcccgtgccgcgggagccgataccgacacgtcctcccgctcggagaacgccgtgctcaaggccgcctggtacggctctgagctcctcggcatcgccgcgtcgctgctccggccggcgccgtcttctacggagggggacgctggcggtgatgcgaagggaggcgcggcggtgtccctggaccacgcgggagtggtcgaggcaatcaaggatgactttgagcggtcgtacttcgtcacagggaatctcacgctgagggcttacgaggaggactgcgagttcgccgatccagcgggttcgttcagaggcctgcggcgcttcaaacggactg

SEQ ID NO: 17039 - DNA, 579 bp, Setaria italica
  Peptide Sequence Number=SeqID_83013
ctgttgtggcggcagcccagcaactactggagcaactgaaactgctggttgttgtgggtatgctacttgttgtggataccaagcttgtgctggtggagtaggccaaattggaggtcgggccatcaaaggattcagtgcaggattatagctgccagcaatgtgaaaggtttagaaaatttccgaagcgagtgcttataatgattacatatggaatgaggaacacaaatattaaattgttacaagtagacaggaggaagtagagaacgtacattggaggtgctacaccataagttggccgtggaggaaatgccatgcctagccggaatttggcataataacaggccttacctgcggcacttctactttggccttaccttcgctgaaggatcttcctcttctccgtagtgagcagccaatacatgtgcagggattccttgcattccaaagatctcaatgtctgtggactccctatcaggcttcgcattaggaaccttggtgacggactccttgtggacctggaggacgtgtatggcaacaccacccatggcgctcctcctctccccgaccgtctccttcctc

SEQ ID NO: 17040 - DNA, 753 bp, Setaria italica
  Peptide Sequence Number=SeqID_83014
aatacaatacaaacaataattgccggtgaggtaaaataaaaaacagaccaaataacttctaaagactaacacttcatttcctcggcacagctggaaagatacaagagcaaaagctcgacactccccgacatgtcagaagcagcgcattctttatagctgcaagtaactccattgactaactaaatgaacaggaggaccgctgctgtaagtaccatcgctcaactgcaagtaccatctaccaagcaaggcccagcttcttcatagggccatgcgtcctgctagccgactttctgatattcttcggtcaattgctgcatcgactgagttcatctgttcatacaaatcgtgaaacaaaaaacttggtgttagatatggtagatgcctcagaaacaaagattcaagcatcatctcaggctcactggccaaatgaaagctgacctggagcaaaactcttgtcacattctcgaccaaaattaagctacaataaatgctaccgtattggcagaacctcaggcacctagtttttgctacaactccatatttgcatgcagtgaattggcaatgaataaaaataatgcttcaattgaaattaaatacatacatatttgccaaccgtccagggcttggtcgggttttttttttaccggtaaccccttttaaaaacccccgtaaaaaaacccccccgttaaacgtttttaaacgggtttttttaccgggaacccgttaaacggttttaccggggtaaacccggtt

SEQ ID NO: 17041 - DNA, 921 bp, Setaria italica
  Peptide Sequence Number=SeqID_83015
ctgctgtaagtaccatcgctcaactgcaagtaccatctaccaagcaaggcccagcttcttcatagggccatgcgtcctgctagccgactttctgatattcttcggtcaattgctgcatcgactgagttcatctggctgacctggagcaaaactcttgtcacattctcgaccaaaattaagctacaataaatgctaccgtattggcagaacctcaggcacctagtttttgctacaaacccatatttgcatgcagtgaattggcaatgaataaaaataatgcttcaattgaaattaaatacatacatatttgccaaccgtccagggcttggtcgataaccctcaggtcattagcatagcaccacgagatttgtcagattatagaaaacttactatttaaagaacgatgtatatacctacttggaactcctcatgtgcgcgaaatcagcagcatataggtgatcaatgaaatgaacacagcgggtgctttgtaaaaaatgtaaaaaggtagcacagaacacgaatcatctcagattcacatatgctatgaccggatgagactttcatatcccccacagaacattcacgaataagatgcccttgtgagtaaagtttaatactatttaagttttcatgtgcaagaaaaaaataagtgaaaatgaaagttgcaattgtatccatgaaagaaatgtttgtattgccaaataaggaaaacataaggacaagtttgtatccgtgtataaccaacaagtcaagagtagaggaagtcaggaaaccttccaagatgttcactcactccttacatacaagcatatgacgcaacatgtatggcttataatgtcactaaatgcaacaaattgaggtaagccagtaagccaccaccagcttaacacaaaatctattgttccattgcccaagcgagtg

SEQ ID NO: 17042 - DNA, 1826 bp, Setaria italica
  Peptide Sequence Number=SeqID_83016
ggtgaggtaaaataaaaaacagaccaaataacttctaaagactaacacttcatttcctcggcacagctggaaagatacaagagcaaaagctcgacactccccgacatgtcagaagcagcgcattctttatagctgcaagtaactccattgactaactaaatgaacaggaggaccgctgctgtaagtaccatcgctcaactgcaagtaccatctaccaagcaaggcccagcttcttcatagggccatgcgtcctgctagccgactttctgatattcttcggtcaattgctgcatcgactgagttcatctggagcaaaactcttgtcacattctcgaccaaaattaagctacaataaatgctaccgtattggcagaacctcaggcacctagtttttgctacaaacccatatttgcatgcagtgaattggcaatgaataaaaataatgcttcaattgaaattaaatacatacatatttgccaaccgtccagggcttggtcgataaccctcaggtcattagcatagcaccacgagatttgtcagattatagaaaacttactatttaaaatgccagtcttaagtccatgcccaacattgcgttgtgcgcgaaatcagcagcatataggtgatcaatgaaatgaacacagcgggtgctttgtaaaaaatgtaaaaaggtagcacagaacacgaatcatctcagattcacatatgctatgaccggatgagactttcatatcccccacagaacattcacgaataagatgcccttgtgagtaaagtttaatactatttaagttttcatgtgcaagaaaaaaataagtgaaaatgaaagttgcaattgtatccatgaaagttgcaattgtatccatgaaagaaatgtttgtattgccaaataaggaaaacataaggacaagtttgtatccgtgtataaccaacaagtcaagagtagaggaagtcaggaaaccttccaagatgttcactcactccttacatacaagcatatgacgcaacatgtatggcttataatgtcactaaatgcaacaaattgaggtaagccagtaagccaccaccagcttaacacaaaatctattgttccattgcccaagcgagtgcttataaagtccaagtttaatactattgttccaggcaaattgggaccacccccaaagcccaagttcatgacagctgaaaaaccttgaaagcatgtagcctaatattaaactttatcctactactaccctacaataaactgcctatatgagaacagcaccaaaaatgatacaattaccatgcatacactagaattggttggaggcgtcaaaatataatatacctatgactcagtgcagagaggtcacccctttttctttgagaaactaaaataatagtttacacataaaaaacacaacttacctggctagtttcatcatgcacctgatacttgggcaatgacaaccttctttcctccattgacattgcttcatcatcccacaccagatagacctcatttgtagctggctggttaccggatgctttgttattggatactgcgggtgaagatccaacagctagacctccagtgcaatgaacacatggagtcacctgtaagttcattgagagcatatcttgcaccatgagtaaaaaacacgtaccagaaatacgggcatcattcacctgaagacccacactactgaagttataaaataaccaagggcaataaacagaacatttcctgtcgaactagtttttctttcaggataacaaaaatcaaggcatttaagatgtgacaataacagttaactgtctatgtgagtctttgattccttctt

SEQ ID NO: 17043 - DNA, 1652 bp, Setaria italica
  Peptide Sequence Number=SeqID_83017
tttttttttgaaagaaattccaagattgcatcatccatgatattctaggaacaaattattcaaataggcaacaattgtctgtttgctttccaaacaacgaaaaccatcaggagcatatcatttacgctacaatcaggcagaacttgccgcaagtcatcatcaacatatttccggtgaggtaaaataaaaaacagaccaaataacttctaaagactaacacttcatttcctcggcacagctggaaagatacaagagcaaaagctcgacactccccgacatgtcagaagcagcgcattctttatagctgcaagtaactccattgactaactaaatgaacaggaggaccgctgctgtaagtaccatcgctcaactgcaagtaccatctaccaagcaaggcccagcttcttcatagggccatgcgtcctgctagccgactttctgatattcttcggtcaattgctgcatcgactgagttcatctggctagtttcatcatgcacctgatacttgggcaatgacaaccttctttcctccattgacattgcttcatcatcccacaccagatagacctcatttgtagctggctggttaccggatgctttgttattggatactgcgggtgaagatccaacagctagacctccagtgccttggctattgacaccatatccaactgctgcaggagagcttgctgggatggttccaggtgcaacagatgctacaaatggggaacttgcagctccattgacagtggaagtgttaacaggaaacaaaggctgggaaacctgaggtgcaacaggtgaaggtactcctggaggagccataggaaacgatgactgaagtacattagcaggtgctgatgtcataggagtaggcacattctgaataggaaatagtggctgttgtggcggcagcccagcaactactggagcaactgaaactgctggttgttgtgggtatgctacttgttgtggataccaagcttgtgctggtggagtaggccaaattggaggtcgggccatcaaaggattcagtgcaggattatagattggaggtgctacaccataagttggccgtggaggaaatgccatgcctagcgaatttggcataataacaggccttacctgcggcacttctactttggctaccttcgctgaaggatcttcctcttctccgtagtgagcagccaatacatgtgcagggattccttgcattccaaagatctcaatgtctgtggactccctatcaggcttcgcattaggaaccttggtgacggactccttgtggacctggaggacgtgtatggccatgccggaggcggtggagagcttcttgtggcagacgtggcacttgaagtgcttggccttctggtgctggacgaggatcttctcgtcgtcgaactcgcggtcgcagtagtagcagaagaccttctccacgcgcttcttcttcttccccatcggcgcaccccttcctgacgccccccgcctccttcctctctctctccggcggcggggagttgggctagggtttcggcgaggtcggggaggcgggggagggagcggggaagaggaggaaggaagaaggcgagggcgaagacgtcacgcgacgcggacgcgcacgccgctctcgtctcgtgcgggttgggggcttggt

SEQ ID NO: 17044 - DNA, 428 bp, Setaria italica
  Peptide Sequence Number=SeqID_83018
cgggcggcggcggcggtggcggcgtgggtgtgggtggcggagacggtggcggtggttccggcggtggcagtggtgttggacgttccggcaacgcggtagggggcggtggagggtatggagatgcgaggggtagtagcggaggtggagcgggcagtggagttgggtcagctggcggagctgttgggggcggctccggatcaggcggtggtggccaaggttgaaggagttcttttgtctatcttattgactcaacgggtatgcgtcatggggtgaaactggttatgttactgattgcaattgataatgaactaaaaactccaaaggggtagatatactgaatctaagatggacatgcatgtatattgagatatgaaagttacgatgtttgtgcatctagtagcatgccatttcttatggcagcatcatgt

SEQ ID NO: 17045 - DNA, 725 bp, Setaria italica
  Peptide Sequence Number=SeqID_83019
cggacctcatcactgatcaacgggaaccacgacgcaaagttaagaaccatagaaaccgtcctgtcaagaaagaggcaatgcaatttatttgcaccatatagttggagcgccccgatcatgtgagttcagagcgtgacggggctgagcagcggcctcccggcgaagaaggcctccaggtttacggagacgatgtccagcgccgcggccatggactccggcgtgagcacggccctgtggtcggacagcacgacgttttccatggcgaagagctccggcggcacgtccggctccttgtcgtagacgtcgagcccggccccggcgatgatgccctcccgcaggcaccgcacgagctccggctcgtccaccagcccgccgcggccgacgttgacgagcacgccgcccccgcccagcgcctccatcacctcccggttcaccatgtgccgcgtctcctccgtcagcgcgcacgacagcaccagcacgtcgctctccgccgccagcgcgaccaccgtcgggaagaaggcgtacggagacgacggcctcggcaaccgggagtggtaggcgacggggcacccgaaggcggcgaggcgccgcgccaccagcgagccgatccggcccagccccacgatccccacgcgcttgccgctcaccttggtggcgagcgggtacttgccgtccgtggcccaccttccgcgccggaggtacgcctcggcggcggcgaccctgcg

SEQ ID NO: 17046 - DNA, 256 bp, Setaria italica
  Peptide Sequence Number=SeqID_83020
gggggggcggcagcgcgttgcgcgcggagagcgagagggagagcgggctctggcgcggcagccgcggcgtgaagtccgggtcgagcaggatcttgcgctgcgccacgctgtggttggccttggcgtgggaggagccgagccggcgcgtggacgccgggaggccgccgcggctgcttgtgcggaggagctcggtgacggcgaagacggcgaccaagatgacgagcaggaggggcgcggtgcgggagcggaggcgggg

SEQ ID NO: 17047 - DNA, 1099 bp, Setaria italica
  Peptide Sequence Number=SeqID_83021
cgaatgttgcggctgttgccgaggcatcttcttcctcctcgtgcgcatcgcgcgatctcaccaaccgcatccacgctctcgcgccgtcgcgccctcctcctcgtcggcttcgggtgctgtcgcggccctccccctgcgcactcgtacgcctcgatggcgccgccgccggtggccaagaaggtgccgcgtcagctcgtagaccacggcgacgtacgcgtcgacaactactactggctccgcgacgactcccgatccgatcccgacgtcctcgcgcacctccgcgccgagaacgactacaccgccgccgtcatgtccgatgccaagcaactcgaggatgaaatatatgctgaaatcagaggaaggattaaggaagatgatatcgatgcacctcttcgcaaagggcagtactactactatgaaaggacattgactggcaaggagtatgtgcagcactgtaggcgtcccgtaccaactgatgctccaattactgtccacgatgtgatgcccacaggacctgatgctcctgatgagcacattattctggatgagaatgtgaaagctgagggccacgattactacagcattggggctttcaaggtcagtcccaacaataagctagtggcttacgcagaagacactaaaggcgatgaaatttacactgtctatatcattgacgccgagagtggagaatatgttgggcaaccacttaaaggaattacttctgacattgagtgggctggtgatgaccaccttgtttacattacaatggatagcattcttcggccagataaagtatggctacataaattagagtctgatcaatcaagcgatgcatgtctctatcatgagaaagatgacacattttctcttggccttcaagcctctgaaagcaagaaatatttatttgttgagtctggaagcaaaaatactagctttatcttttacctcgacacatccaaacagaacaaggaacttgtggttttgacgcctcgtgtgtctggcattgatacaacagctagccatcgtgggaatcatttctttattacgaggcgaagcgtattgtaatttcttaactaaatttacttagtaaatttaggta

SEQ ID NO: 17048 - DNA, 393 bp, Setaria italica
  Peptide Sequence Number=SeqID_83022
ttagttacttaaagttaaggcacattacgacaaactagaataaaaatgggccaacttggcattgagactatgatgattctaggtttcagcagtaagtagcagaatggcattgagttaaccatgcccttatttccccattttgctatggttgcagatttgcatcgacccgacattcagaggatccagattatctctggtagataggggttttatatatgtgatagctcatattcgtggtggtggtgaaatgggccggaagtggtatgaggatgggaagcttttgaagaagaagaatacttttactgatttcattgattgtgccgagcacttgataaaaaacaatactgttccaaggaaaagctttgcatcaatggaagaagtgcaggtggccta

SEQ ID NO: 17049 - DNA, 1604 bp, Setaria italica
  Peptide Sequence Number=SeqID_83023
tttggtactaactttctagggtaggttcgtaactaatttgtatttttatttgtattcctaactattattgtcttgttggtattccttgtaggtagttcttgtagttttctatttcattcttgatgagaaagatgacacattttctcttggccttcaagcctctgaaagcaagaaatatttatttgttgagtctggaagcaaaaatactagctttatcttttacctcgacacatccaaacagaacaaggaacttgtggttttgacgcctcgtgtgtctggcattgatacaacagctagccatcgtgggaatcatttctttattacgaggcgaagcgatgaattctacaattctgaattggttgcttgcccattggataatgtagctgagaccactgtactgctaccacatagagaaagtgtgaaaatacaggaagtccagctctttgacaaccatattgctgtatatgagcgtgagaatggcctacccaaagtaaccttatatcggctacctgctattggagagtcaattggacaacttcagggaggtcgaacaattgattttattgatccaacatatgctgtggatcctgaggagtctgagtttcattcatctgttcttcgatttaattatagctcaatgaggaccccgccctctgtctacgactatgatatggattcaggggtgtcagtgctgaagaagattaaacccgttttaggtggatttgacgcatcaaattatgtaacagaaaggaaatgggctgctgctgccgatggcactcagatcccgatgtccgttctgtacagaaaagatcttgtgaagcttgatggctcagacccaatgctgctatatggctatggctcctacgagatttgcatcgacccgacattcagaggatccagattatctctggtagataggggttttatatatgtgatagctcatattcgtggtggtggtgaaatgggccggaagtggtatgaggatgggaagcttttgaagaagaagaatacttttactgatttcattgattgtgccgagcacttgataaaaaacaaatactgttccaaggaaaagctttgcatcaatggaagaagtgcaggtggcctactgatgggtgctgtcctaaatatgaggcctgacttattcaaggctgctgttgccggagtcccttttgttgatgttgtcacaactatgcttgatccaactatcccactgacaacagctgaatgggaggagtggggtgatccgagaaaagaagaatactactactacatgaaatcatattctcctgttgacaatgtggcagcacaagagtatcccaacattcttgtcacggctggcttaaatgatcctcgcgtgatgtactctgaacctgcgaagtacgtggccaagctgcgggatctcaagacagacggcaatcttttgttgttcaagtgcgaactgggtgctgggcacttctccaagtcgggaaggtttgagaaattgcaggaagatgcgtttacttatgcgtttatcctcaaggcactgggcatgactccaaagatggcttcagtgtgaatgtgactccaaagatgaatgggatgggaacttggattcattcagg

SEQ ID NO: 17050 - DNA, 631 bp, Setaria italica
  Peptide Sequence Number=SeqID_83024
gttcgtccgtcgacgtcagggcggcgggcgggatcgtgacggcgggggacctgagcgggtacagggtggaggtgagcgatgccatgcgcgccgacgccatggggtacaccttcctcggcatgccgccgccgtcgagcggcactgtcgggatggcgatgatactgaacgtgttgggtgggtacaagtcgctcgagttcttgaaagggttcctcggcgtccaccggctcatcgaagcgatcaagcacatgctggcgacccggatggacctcggcgaccccgacttcgtgaacgtgaccggcgacgtcgcggagatgctgtccctgcctttcgccgacaggatccggcagaggatcgccgacaacacgacgttccctcccggctactacctcccaaagtggaggcagctggatgaccacggcacgagccacctgtgcgtggtggacagcgaccggaacgcggtggcgatgacgacgacggtgaactactacttcggcggcaaggtcctgtcgccgtcgacgggcatcgtgctcaacaacgagatggacgacttctccgtccccgccgtgaagctcgcccctgaccatctcccaccggcgccggccaacttcatcgcgccgggcaaaacggcccc

SEQ ID NO: 17051 - DNA, 420 bp, Setaria italica
  misc_feature (1)..(1): n is a, c, g, or t
  Peptide Sequence Number=SeqID_83025
ngaaaatctagttttatctaacatggagatatacatatacatcatctagattacaaactatagtactatacacaccttcaatcgtattgacagtttcatagaacacctctgtgctgtgcaatagggagtgtgtgtacatgttcagattcacgaagtgaagtgaaaacaatacagtatgccctatgtgtacgtagcagcaataacatggtttgctcatttcatccttactaggaaaatgctcagctccggcgcgccgccacctccagcaccacagtcgccggcgttgccaccctcctcggggttgatcatgtagaaggcctccgagtccttggacccgactacgcgctcgacgcgggcgacgacaacgtaacgtagaagactacgaccgtacgggaccccgacgggactaacgaccgtaca

SEQ ID NO: 17052 - DNA, 403 bp, Setaria italica
  Peptide Sequence Number=SeqID_83026
cttgagattcataaaatgagcatggccgcctcgctatccacgggaacatcaactatcaactgaactacaagaataattaaccataaatatgagtacataactgaactaaaagaatatcgacattatcgcagaaatcaattgatcataagcgcaggcatcgccattcgcctcctcctctgcacgcagcaatggagcctcctctcgcttcacggcggccatgctagcaagaacaagctccctcttcgcgcccgccggtgctgctcttccggcggccatcttcgacctcgccccgctcctccaagacatgcacgcgcgctacggccccgtctattcttcctttccgtcctttcgttcccgttcttacgtttcttttcgttttctttttcgttttcgtttccgttta

SEQ ID NO: 17053 - DNA, 293 bp, Setaria italica
  Peptide Sequence Number=SeqID_83027
tggggttctcgacggcggggaggggagcgccgctgtcacttgggccggcgacgctggtgaattccgcagaggtgcctcatttcgagctccgggaagacccctcgttctggatggacaacaatgtgcaggttgttatccgtgtccgccctctaaataataatgagaagaacctgcatagttacaatcgatgcttgaaacaagaaagtgcacagagcatcacatggattgggcagcccgaaactcgttttacttttgaccatgttgcttgtgaaacagtggaccaggaagtgctt

SEQ ID NO: 17054 - DNA, 879 bp, Setaria italica
  Peptide Sequence Number=SeqID_83028
gagtactcgcaagaacaggcactgaggctgctgaacatagctcttctttgtacaaacacgtcaccaacccagcggccaagaatgtcttcagtggtgaagatgctttgcggtcagatccccatcgaggttgtacctgatgacgatgatctaagtgaagacttgcgactcaacatcgcccggtcccacagctccatgaataacagcaaaacagattggtccgagatgccatcaagcgatccgtcgatcttgctccacaacagcaaggacagtggctacctcccatcttcgagctcctcttctctgaagctatgagctgcattgccagggcccaggggtagctaggcagcaaggttgatggtatccgcaattttttttggcctgatgcagccgttgtacagagcaagcatttggttcgatgcttccagttcgattgtgttgatgttgctcgtcaattgtcattcaggattgccatccacagccagttgcaattgatcatagcattacatcgacatatttgtaatctggcgccgcgttttttggcttcaaagtcaagatttgtacaagttgtccggaggatctgattgagttctgccaaaacagagtggaactcagcgcccggcggtacagagatgtgcagatgtgttacgcatattgcccttcttaaggaagtgcattgaccatgctgatgggtatcgtgtgatcataccgtcaggcatcgaggcaggagctcgaatggagtatgcatctgtctgccctgagtgaccttcatatccagaaaaatggattgtacaaattaatgaatccgaaagcgttaatctggtagcaagagtatgttattttctaggatatgggctaacaatttaccataaatttggttct

SEQ ID NO: 17055 - DNA, 888 bp, Setaria italica
  Peptide Sequence Number=SeqID_83029
gaggctggcggtgctcatcgtgcgatcaccaaaacttttgcagccaacatcacagacaatacactggaaattcacctctactggggaggcaaaggcaccacagcgataccctaccgcggcgtgtacggtccattgatctcagccatatcagtgacacacacacgcaggaaccaccatggagtctctattggggtggtgattgccatcgtgattgctgtgacatgcttggttatcatacttatgttcatagctttctatttcaaagtcttccagaggatgaacgcgaaaggaaaaggtagacattccttctacaaaggaaggaaaactaatacttcagagcttcaaaacacgggcacagtattttttagcatgaaagagatcgaatctgcaacaagacattttgaccctgctaataaaataggcgagggtggctttggacctgtttacaagggtacactgtcagatggtactacagttgcagtaaaaaagctgtcttcaaagtcaagccaaggaaatcgtgagtttttaaacgagataggaataatatctgctctaaggcatccaaatcttgtgaggctctttggttgttgtattgatggggatcagcttctgctcatatatgaattcttggaaaataatagtcttggtcgtgcactttttggtcgctcagaacatcagttgaaattagactggccaacaaggtacagcatctgccttggaactgcgaaaggcctattctatctccatgaagagtctacattaaaaaatcgtccacagagatattaaaccatcaaatattcttcttgatgaaaagctgcagccaaaaatatcagatttcggcttggctaaaactgaatgatgactgtggccgagtgagcactcggattg

SEQ ID NO: 17056 - DNA, 2993 bp, Setaria italica
  Peptide Sequence Number=SeqID_83030
agaactttaagatcctctcccttctggtggcaaagagaaaataatgtacttcatcacctcatttattaatacattttcacataaattgcttcctcatctaattgtttgagttgccaaataccacaacatagtaatctagaaagatagcactcagaaagtaataatcttttcttaatgattgaggtggttgttagctctgctgaaattagaaaaccatcagttggtaacctttttatttccaaagaaaatgatggataatttgtttacagtcttcaaggtaagcaactcatcacgacttactcagagggtcaagatacgggtaaacagatttacaaagcaattatcaagggaaatcaaaccattagtagctgtgcaactagcatttagttcaccatctttttgtttcctctcctttgataaatatctatgcgattatttcacagagttataaaacactctgtaaacctctcgtcttcactgagagtgactgatttgagtccaagcaaatacccttcaaaatgcattgcacctcacggaagtggtcctcgaaattgcatatatggtatattaccttggacgaatgcagtatctgaaaagtcttggatataagcttcaacaagttgacaggccaagttccagcaaattttggaggaatgatggcactgcaatatttgtacctgactgacaatatgctgactggagatttgcctgcttggatgttgaaaaacaaggcaagcaataaagtaaacatggatatatcatataataacttcacgggtaaccctccttctgagtgtcagcaagcaaatgtaaatatggtgtcaagtttttcatcttcaaatgacaattcattgcagtcatgtttaagaaagaatcttccttgcatgggcaaatcacactattccaacttattcatcaactgtggtggcaaaactgttgttgtcaatggggtaacctataaggatgactcatatcaaataggaacatcaacctttgtgttatccaatgatagaaatgggcatacagtagcacaggtgattttgtgggtaacgagaatgctgactatattgctagaaacacatcggaattaaccctggctcatcctgagctatacactgaagctcgtctcgcatctctctctctgaaatactatggcctttgcatggataatggtgaatatatggtaaagcttcattttgctgagattgtgttcacagaagatcatacttattccagtaacggcaagcgtgttttcgatgtcttcatccagggtgctaaagtattgggggactttaacattcaagatgaggctggtggtgtccgtcgtgcaattaccaaatattttgcaaccaacattacagagaatacactggaaattcacttatattggggaggcaaaggtagcacagcgataccttatcggggcatgtatggtccactgatctcagccatatcggtaactcagactcgcaggaaccatcgtggagtctcaactggagtggtgatcgccataatagctgtgccatgtttggctgtcatactcctgcttatagcctgctatttcaaaatctggaaaaggaagaatgttataggtagacaattctgcaaccaaggaaggaaaactactatttcagagcttcaaacacgggcacagtatttctttaccttgaaagagattgagcatgcaacaaaacattttgatcctgcaaataaaatagggtacactagcagatggtactgctattgcagtaaaaaagctgtcctcgaaatcaagccaaggaaatcgtgagtttttaaatgagacaggaataatatctactctaaggcatccaaaccttgtgaggctctttggttgttgtattgatggggatcagcttcttctgatatatgaattcttggaaaataatagtcttggtcgtgcactttttggtcgtgcagaacacaagctgaaattagactggccaacaaggtacaacatctgccttggaactgcgaaaggtctggtctatctccacgaagagtctacactaaaaataatccacagagatattaaaccatcaaatattcttcttgatgaaaagctgcagcctaaaatatcagattttggcttggctaaactgaatgatgactctggtcctgtgagcactcggatcgctggaacagttggttatatggctcctgaatatgccacaagaggttgcttgacacgtaaagcggacatctacagttatggagtggtgacactagaaattgttagtggaatgagcaatacgaatagcgtgtcaaatgaagaatatctgcaccttcttgattgggctgaaggattgaagcagcaagggaggctgcttgaagttgttgatcggcgtcttggttctgactactcgcaagaacaggcactgaggctgctgaacgtagctctcctatgtacaagcacgttaccaacccagcggccaagaatgtcttcagttgtgaagatgctttgcggtcagatcccaattgaggtctcacctgacgatgccgatctgattgaagacttacatatcgcccaaccccaccactccttgaataacagccaaatagattggtcccagataccatcaagtgattgttcaatcttgctccacgacagcaaggacagtggctgcttaccatcttcgagttcctcttctctgaagctgtgagctgcaatgccaagaatagccactaaagttcatggcgtcggcagtttttttgtccgatgcagcagttgtacataggcgaagatttggtggtttggatgcttcaaattcaatcgtagcatattgcccgtcgaaacgaaatgttttcgagtctgtgtactgattggtgatggggatgcttcaaattcaatcgtagcataggcaggcaggctggagcttggacggaatttgtatctgtcatctgtgtaccctggttaacctttcgtatccagataatgtaaagtactagggaagaattccaatgtgtatatctag

SEQ ID NO: 17057 - DNA, 678 bp, Setaria italica
  Peptide Sequence Number=SeqID_83031
cgatgggcaggaaccggagctgctgcgggtggacgcggagcgggtgcggcggcagatgcaggaggtggcagtggagaactacgccgccttcatcgcggcgtccgaggcgctctccttcgtccgcgcgcagctcgagggattcgacagccacctcgaggccctgatagaggagataccaaatttaacgtctggctgcactgagtttgttgagtcagcacagcaaattttggaagagaggaagctcaatcaaacattactagccaatcatagtaccttgcttgacttgcttgaaatcccacaactgatggacacgtgcatacggaatgggaactatgatgaggcacttgatctagaagcttttgtaagcaaaatttcaaagttgcaccctgatttacctgttatccaaggattagctgctgaagtcaagaagacagtacaatcactaatttctcagcttctccagaaacttcgatcaaatattcagttacctgagtgcctccgtattgtagcacatttgcgtcgaattggagttttcagtgaatcagaattgcggttacagttcttgaggtgcagggaagcttggctttctgggattcttgaagatctggaccaaaggaatgtttatgattacctgaaaggcatggtgacttgccacagggtgcatctatttgatgttgt

SEQ ID NO: 17058 - DNA, 1980 bp, Setaria italica
  misc_feature (1975)..(1975): n is a, c, g, or t
  Peptide Sequence Number=SeqID_83032
gttgtttacttcatgtttgagttgtcggtgttactaatatatcatttgattttttagttaatgcgtagtttaagctgttattattgctgaatcatgacagtcagtaaggtaatgcttgtaggtgcatacggaatgggaactatgatgaggcacttgatctagaagcttttgtaagcaaaatttcaaagttgcaccctgagtaagttttgaacataaatgctgtcgcagcacctgacatttgctgttatattaaccatttcactgttccaattgaagtttacctgttatccaaggattagctgctgaagtcaagaagacagtacaatcactaatttctcagcttctccagaaacttcgatcaaatattcagttacctgagtgcctccgtattgtagcacatttgcgtcgaattggagttttcagtgaatcagaattgcggttacagttcttgaggtgcagggaagcttggctttctgggattcttgaagatctggaccaaaggaatgtttatgattacctgaaaggcatggtgacttgccacagggtgcatctatttgatgttgttaatcaataccgggcaatattcaacaatgacaaatctgggaatgaggagaactatgatggcgggctgcttttcagctgggcaatgcaacaagttagtaatcacctcacaactcttcaagttatgttaccaaacataactgaaggtgggtctctgtccaacattcttgatcaatgcatgtattgtgcaatgggtcttggcctagttgggttggatttccgtggcctacttccaccaatctttgaaaatgcggttctaaatttattctcaaagaatatgagtacggcagttgaaaatttccaggttgttttggattcacaccggtgggttccgatgccatctgttggcttcgtagcaaatggagttgtggatgagacttctgatgatgtgactccaccttccgttttaatggagcatccacctcttgcagtgtttgttaatggtgtttcagcagcaatgaatgagctgagaccatgtgcgccattgagcttgaaacatgttcttgctcaggaggtggtgaagggattacaagcagtttctgactccctagttagatacaatgccatgcggatgctgcgtgggaatgagtccgctcttttcctttcactctgccaggcatttatcgaggtcgtacacccttattgtgccgcatgttttggccgatgctacccgaacggagcaacactgatcacagagtgccagagcacattcaacggtgtcagccagctactgactgtacccgcaagatcaaacagttctagcattgaaagaaggcaatcaggaggcatcgacagaaagcagtcagggaacatcgaaaggaagcagtcggggagcatcgaacgaaggcagtcgggaggcattgaacgaaagcagtccattgagagcgctgggtcaaccgtcaccgataatgggctaccaactgatggatcagtgtcagaggtcaacagtgatgctgcaaccccagcctcagcagttcaggatggtgcgcaaaccagtcctccatcaagcaagtagcttggatctctgttcttggaatctactgaggtccttcatcaaggcctggttttcttcaaccagagaggatactgctgcaaagcgcagagttgcattggtcgagtttggatcagtgttgctgtcgctcctacagtgtatacaagcttctcatcaccagatatttgtatcttgatttgtacaacagtcaaatctttagccgttcattgttacttgtgatcccatacctagatcttgtagagtgttccacaacctgaacaataatctgatagtacgaactgtgctggctgcattgttgactgcacattttcttcaaattgaagagctgatatggattccatccttgtaaaagcatcatgggtatatagagctattttttttgtccaaaaaaaactaaaaagngaact

SEQ ID NO: 17059 - DNA, 352 bp, Setaria italica
  Peptide Sequence Number=SeqID_83033
cgctacacgtccccgcttttatctagctccttccttccctccgtccctcgtagcaaatcgccggccagcctctcgagtctcgactcctcccctctccctccgtcccgttcctgctcgcccgttccaactcctcgtccgctctcctgttctcagctcgcttcgcttatccttggcctgagggtttcggatttagcagctagctaggggtcgccatcgccgccgttgcgacggcggcggcggagtttggcgtcgagttcttcggggctagtactacgcttcgcctatttaggtgggacgcaggccctcgcggctccctgtgcccaactcgggtttctttctttccatgtccggc

SEQ ID NO: 17060 - DNA, 1100 bp, Setaria italica
  Peptide Sequence Number=SeqID_83034
tccctgacagcaaacatgcagttagtagcacccaaaatgttacatcagctgatttctggaatctcccccctcccaacgtgtttaacacagctttcgtagcggaacaagatgcacccctagtgttacaatggcctccaatgcctgtccagaatgatagctattatgttgccctctactttgctgacacattacctgagaattcaaggacctttaacgtatatataaatgattacctgtttatcggagatctaactgtcacatcagctggtctttctgtctttgcaacacaatggattctctcaggcttgaccagagttatattgcaacctgcatctccttctgctcttcccccacttatcaatgctggcgaggtcttcggactttttcccctaggaagattgacatatgcacgggatgtacgtgctctggagagtataaagaaaaaccttcaaaatgtacctgaagattggaatggagatccatgtatgccctcaggatattcttggacgggagttacatgtgatgaaggatcaagaatacgtgtcatctcattgaacttatctggtatgggtctctctggatctatttcacctgaaattgcgagcctgaccgctttgactaatatatctttcggacacaacagcctgcttggaccgattccagatcttagcaacctaagcaagcttgaacggctgcacctgcaagaaaataatctatctggatcagtacctaggacattggggacaatcaacacattgcgtgaactgtttttgtacagcaattctttatctggaccagttccagataatttactgaacaagcaaggattgacttacagatttcttcctgggaatctcttcgccccaccaccaccgcactaacagctagacattttgtgcaaacaaccactgtatatgtacacaacatgattcagagctagcaggacagtcgttgattcttttagggtggctatagcaagattttgtaaccattctgtacatataaaagcaagttagcatccattgttgtattccgtacctaacctaattgtcttaaagttaggtttcggttccttacttagttcttggttctaagtatta

SEQ ID NO: 17061 - DNA, 1177 bp, Setaria italica
  misc_feature (1169)..(1177): n is a, c, g, or t
  Peptide Sequence Number=SeqID_83035
caccccgtccgcactacaaatcccgccagcatgcgctccatttgcgccatgagatccctcctcgccgctgccgctgccgcctccgcccccaaagtcctccgcgccggcgctttcccactgctgccgccgctcctctctctacctttacgccggggtcgtgccgccagaaatatgctgggcgcggcgaggacggtctctgcggcggcccagtcacgactcggcggtggtgcggcgatggatgttcgggcggcccaatccggcgagatccacgttatcgtcggccccatgttcgccggcaagaccaccgcgctcctccgccgggttcaggccgaggccggcggtggaaggagtgtggtgcttataaagtctgacaaagataaccgctatggattggattctgttgtcactcatgacggtacaaagatggcgtgctgggccttatcagagctgtcaagtttccatgacaaattgggaatggaggcctatgataaggtagatgttataggtattgatgaagcccagttctttgacgatctttatgatttctgctgcaaagctgcagaccgtgatggaaaaattgtagttgttgcagggctagatggtgactacaaaaggaaaaagttcggctcagttctggatgttgttcccctggctgactcggtcaccaagctaacagcacggtgtgagctgtgtggtcgccgggcgttcttcacattgaggaagacacaggaaactaagaccgaactgattggaggagctgatgtttatatgcccgtgtgtagacatcactacttggatgggcaggttgttattgaggccacaagggttgtactgggccttgaccgatccaccgtgacggctcaagctctgaaatagggtcaatacatgatactcggcatctgcgtggaagtatgcgttgtgtaacaattaatcattatatcggttcactcccatctgtactctatttggcatctgtccaaagtgtcatagttggtgaaaagctaatggcatcgagatgcaaacagttgcgagggatgctcgaggactgtgtcccacaaaacacagttgagcagattgtaaatattaagcagtttggataaacatttctctcttctacttcaatagactgcaattggaattgtagaaaaaccaaaaaaactaaaaaaacnnnnnnnnn

SEQ ID NO: 17062 - DNA, 437 bp, Setaria italica
  Peptide Sequence Number=SeqID_83036
attgtcgttgatctcttttgatgggagaacatggttgattaacatggcctagttgtaaggagcgcaacgatagaatttcagcagattcacttccttgaatgaagtgccagaaattttcatcatcatcatactatattacaatcagagaggccaactgaaccggcatgcacggcctcaagccaaagctcggttgcagaaggctgaaacagacagacggcgaagactagttaggtccccagcagctgaggtacatgaccgtcctcatcccctcctcggccttgtccgctcgcctcctctccgccaccgccgccggagccagcttcttcgcctgtgcgaagctgggagcgttggccttggccgtacgggggatggatcgcagcgcgtagttccagcggcagaggcccgcctggtccttcagggcctccaccgcgcccacg

SEQ ID NO: 17063 - DNA, 237 bp, Setaria italica
  Peptide Sequence Number=SeqID_83037
ccgcgcctgctcgacttgccccgacacgatccccaaccctctcgcggctccagttcagagagaagctcccaccggagagcggcgagggagtttaaggtttcaagcgcccccgatcgcatctagccggcatcgaggagaatgcctcgcaaggttgtatccggacctgactacgatgatgagtacgatgactatgatgagtatgatgatgactatgatgagtatgatgacaccggatag

SEQ ID NO: 17064 - DNA, 539 bp, Setaria italica
  Peptide Sequence Number=SeqID_83038
tactaggtacacgaacgccatggccgcgacctctacggtgaggagcactgtccacagccgcgcgctccggccggtccgctcctggtaggtgtgcaggccgatgtagacgttggcgacgccgacgacgcagatgccgatgcccaggagccagtgcgtcaggtaccacgcgctcctgaacctcatgcctctgtctggcctcaggaagccgatgagcggctggagccagatgaagccgtacagcgccagcccgatcctctggtgagtgttgttgaaggcgttctcgaagttgcttatcgacagcaccgccccggcggtggcgagaacgacggcgacaatctgtgaaccaacatggaagtagaagagaagcttgacgctcttggcggttttgacattgctggaggctctgatcagcagcactccaatcggcatcaggaagccaactgaagaccagagaaggaaggcatggagcttgagttgcaacgagagttttggtgtgagctccaaaggctgagcgatcttgtagctttgctctgaatttg

SEQ ID NO: 17065 - DNA, 388 bp, Setaria italica
  Peptide Sequence Number=SeqID_83039
ttttttttttgccgattaaaaatggcgtttgtatttgcaaatcgtgatgttttcttcacaacacagagcatctcccactgcctacaatggagtaagcagtgaaagcacccaaagcacggcaaggaagaacagcgagaagaaaaaacgaagggaaatagcaaatccaagctaacctgctcggctactcacggatcgggaggagcgccacccctgttgtccggccgctcggctcggatcagtccgagggtgtcgtcaggagcgcgttgcgtaagtactcgtcgagcaggctctcgcccccgcggcggcggcggcggacggtggcgcgcaggcgggcggcgtgcgagaagagcgcgccgtagaaggcggcgcaggcctcggacaggtggcg

SEQ ID NO: 17066 - DNA, 450 bp, Setaria italica
  Peptide Sequence Number=SeqID_83040
gtatacattctggaagactctgaacaaggaagagagggctgccaaacagcgctatctgcagatgttctacaatcttcagttcaggaatctggcaaagaccgtaccaagagtattcgaacatcctccgcaaaccccagcaggcgcagggcctagtacagtggcagtagtaagaccgaaagaaagaaagccacagactaggattcagaggatcatgaccagcctgatggggaacaagtcttcaacttctgactagaacgtattgaaccagagagatgtggtgatatgataccctgaagccaaggtcctcgtggctgcacatattccattgataccggaccggagtgtattgtaaagtgtatgcatgtgtgtggatgccattgtgttgattgtaattgtagagatggatgatgtaaagcgattgaaagtgtacatggttacaattgataataa

SEQ ID NO: 17067 - DNA, 243 bp, Setaria italica
  Peptide Sequence Number=SeqID_83041
ccgccacggcgcgcgccatcatctcgcactccacctcgtggccgtccttgccgatgtccatcaggtcgcgcactcggtacggcggcagctccaccaccggcgtgtcgagctgtgaatcttgcacggggaggtagcctttctcgcatagcatcgggtaggcggtgaagcacgcgaaggagaccgcgctgccggtgcgcagcgccagcgtgggtacgccgaggcaattggccgcctggaaaatcg

SEQ ID NO: 17068 - DNA, 1377 bp, Setaria italica
  Peptide Sequence Number=SeqID_83042
gctgcctccacgcttcccctctcgagctcgccggacacctcgaagcccacctcccacacgtgctccacgtacctcgcgttccccatctggtcggcgaagtaggggcggcacagcatcggcaccccctcgcagatgctctccgtcgtcgagttccagccgttgtgcgtccagaacccgcccacggcgcggtggcgcagcacctcctcctgcggcgcccaccccaccaccatgccgcgcccgcgcgtggcggcctcaaacctctccggcaaatggttctccgcgcagccgccgacaaggcccggccggaccacccagaggaacggcacgccgctgccggcgatgccccatgctgtctcctccaggtcccgcaaactcatgcaggccaggctgccaaagctcacgtacagcacccactccggcggccacgcgtctagccactccaggcagctccggtcctggcacagcaggctgctgtcgccggcggggtagaacttgtgcagcgggccgatgtcgaacaccggcacggcgaggtcctgccggaggccctccagctcgcggcgctcgagcgcgtcgaacgtgttgagtatgaggcccgacgaggccttcaccgccgccacggcgcgcgccatcatctcgcacagcacctcgtggccgtccttgccgatgcccatcaggtcgcgcactcggcatggcggcagctccaccaccggcgtgtcgagctgtgaatctgcagggacgaaacacgaacacgttgatccatggatcacgtgggcatgaacttggtaggctacaaacaagtacttgaagaggagggcgtgccttgcacggggaggtagcctttctcgcatagcatcgggtaggcggtgaagcacgcgaatgagaccgcgctgccggtgcgcagcgccagcgtgggtacgccgaggcaattggccgcctggaaaatcggcagcaggtgcgcgtcggcgacgaggcacgcgacggcgtccctggagtactcctccaggacggcggcgaggcggtcccggaaggcggcctcgcacgcgccgccgatcgagacgatatgcgctacgacgtcctcgatggcgaccgggtcggggccggacatgccgtcggggacggggacgaagcggtagtgcgggtggctcgccgggtccggggcgttgaagtgggtgtggaagacggttacggcgaagccgcgggcgtggaggacgccggcgagccggaacatggggttgatgtggccctggtacgggagcgggaacaggagcacgtgccggtggcgcccgccgtggttggcgttgctctctgcggccatggttggcgccggtggtggtgtcatcgctttgctgagcgtgagctgtgccgtgtgaactgtga

SEQ ID NO: 17069 - DNA, 1228 bp, Setaria italica
  Peptide Sequence Number=SeqID_83043
ttttttttttttgaaataattacttattattaagacatgtacgtgaaccccgttctgtgtgataacttattacacagtttcggctcagcaagcatcacgctaaggctatattttacatcattggtcctaatagatactgggaacccatttgcaatttccagctttgctaaatgacacagtaacatctgctaccaatctaccatggatgacaaccacctgaactgctgctgccggtacaaagacagcaaagcaggtggtaactggtaaacagcaagtatagttaagagtttcatcttcgaagatggccaattccatctgtgtatagctacaaccagtggcaagctcgactgtactgccgtcaagccatctagaaaatccctttagcaccaacagctacaccacttgtagttacagtatgggaggtgcctgcctatgagcatggagcagttcagaggagatctttggctagctttggtggcacatctacagaatgcatgtcattggctggagttggcagcaggtgcttcgcctcatcctcatcattgtcactgtcctcaatgataggtgaatgtattgaatgcaattcatcatcagaattttgacgaagagttgggacacgacccacaggagaaacttgaacactttctggtagaagacaatcaaaaactgaacctactcttgcaagcctattcacccaggaagggatgggttttccagttaagttttgacagacatcatccgtgaaatgattgcagttcttacttatcaaatgatatgtgttcccatgatacttccccgcaagtttttcaataaacgtgcggaattcttcctgggacatgtctgttgtgcctagccacaccgttcttctatagacaaaaccagggcaagtctttgattccacctcaaacacgccactggatgggaagtcatgggctccaaatccatactccgtgccatgaacttcgattccggagtggaagacgccgaagccgagccagtagaggtaatcgttcgcggccgtgaggtcgtacacgttgagcagcaccggcgtcgcggcggcgctgttccgaccgcccatctcctccccctcccctcccgccccgacgaagcccaccacgagcctccctagagatctcactcacggcccgcccaccatgaatgggcggggggtggctagggctcggccggagcgcggattcgtgcgtgaggacgcggcgcggagggagac

SEQ ID NO: 17070 - DNA, 470 bp, Setaria italica
  Peptide Sequence Number=SeqID_83044
ccgcgccgcgaaacggcgagccaaccactcaaaccaaccaatctggcagccccgcagtgaggaacaataccgccgcccgcggtcccgcctagaaaatggggcccgccctcgcagctgccttcgccgcagagcggcggcagcgcgggcggcggcggcgaggcgagtgagtgaggggtacgagcggatctgggccggcggcgcggggtcggaggacggagtggcggaggctggggcttcgggtggcggctgcagcctggcttcttctggcgacttggcgaggcgaggcgaggcgagtccgggcgggcgggcgggggaaaggaggcgacgcggcggttgattggttggtgggggcgggtagcggaacggaccagacagtgtgggcgcactggtcgcgcacacgcgtcgaagcagagacgagacgcgggcggggagctgagccctggcccccgggtcggccaggggcaggggct

SEQ ID NO: 17071 - DNA, 516 bp, Setaria italica
  Peptide Sequence Number=SeqID_83045
acctgcacaggaggattacaatacaagttttagatagccaataaagggcaggaggctttcctcagttcagctgtacataagcgtctatgccactggcttatcagttgcgctaacaaatatcttgtttatgtctattttactaatttttaactagaagttaaattaagaaacatgcgcagaagcatagatccagaaatagtccagcaattacctccttccgttcaataaaccctgtgccatccatatcatatagcttgaacgagactgtcaggtagttcaagcttagaaagatagcacatgagaacagataaagttgaaacaaaaagataagaacctacaatcaattttttcttccattggtatgtttggatgaaacacattcagagctcggacaaagtcaccaaaatcaatgactccccttttcttgacatcgaaaaggtcaaatatccgattagcaaatagattttcctttctctgatttttaaataatgctagctggaattcttccttgttgat

SEQ ID NO: 17072 - DNA, 1494 bp, Setaria italica
  Peptide Sequence Number=SeqID_83046
cactcctgcacagacatcaaagataccccctagtatcctacaccgatatgtaaacagaaacactcgacatttctaatcagattccaaccacagcgatcattcagaaatgaaatcaaaggttgaacaagaacacgcgagtagctcgcacgcatagggaccgggatggggaacggcgtactcacaggtttttggtaaaaccgacaggacttcccacttttttaaaaaaatgaggaaaagttccacttctgcatactgctactaactcgcaatcaccaacacaaaagcaccagcctcgtgcgttaaaaatacaatacgtcaataccacatttgttgcattgtctgtggcttccgatttgacacacctttcttggcagccgcataaataaatcctccctccatttcataaggccagtcccgtaccaagcttctgctttttgcgcttcaaggaaagcaaaaactcttttcgttaactatacatctatgggagaatctggtcacgtgacaagatcatcgacttcagagttaaacacaaagcttgggaatgttgttgttatgtccttgaggtatggcagagtcattatcttcatcaaggaaggatttcttgtgacaaaattctcccactctgctctatctatttttccatcctgattcgcatcagcatccgaaaatgtcttgtccaggattgtctcaatgatctcatcagataacctcatctctgattcccctagaagagcaattaacatctgcttaacctccttccgttcaataaaccctgtgccatccatatcatatagcttgaacgagaaatcaattttttcttccattggtatgtttggatgaaacacattcagagctcggacaaagtcaccaaaatcaatgactccccttttcttgacatcgaaaaggtcaaatatccgattagcaaatagattttcctttctctgatttttaaataatgctagctggaattcttccttgttgatcaggccatcatcgatgaccgaaccacttatgctcttgaacagctcaaacagggcctcaacttcactaacgctgaaggcggtctgggaggcgaggtgcacggggtcctcgtagccagggtgctgccgcttcgccgtggaatggaagcaccccatcgccgcgccgcgaaacggcgagccaaccactcaaaccaaccaatctggcagccccgcagtgaggaacaataccgccgcccgcggtcccgccctagaaaatggggcccgccctcgcagctgccttcgccgcagagcggcggtgattggttggtgggggcgggtagcggaacggaccagacagtgtgggcgcactggtcgcgcacacgcgtcgaagcagagacgagacgcgggcggggagctgagccctggcccccgggtcggccaggggcaggggctcctctccctccctcccccgcgttggcttcggcctcggggtcagtctccgccacgccggcgctattgttgtccttcggggtct

SEQ ID NO: 17073 - DNA, 322 bp, Setaria italica
  Peptide Sequence Number=SeqID_83047
gacgcccaccgctgccgtcaaggacctggagaagagctgccgcaacgcctcctactccggctgctgctgcctccattgctggataatgcagctgaaggggaacgtgagccgcgaggtcaccggcggcgaccgcgcgcggcggatgctggggcgggactgccagctgatgggcctgacgtggctgctggccaagaacaagacggcctacatccccaccgtctccgccgtgctccgcgccatgctctacacggcgcacccgacggagtccggcagcggcggcgcggcgccgcggtgcagcccggaccaggagaacatgccgctg

SEQ ID NO: 17074 - DNA, 346 bp, Setaria italica
  Peptide Sequence Number=SeqID_83048
gttgtccttcttgtaagtattctagagcagtgtttctatgtcatctagctagatatcacagagcaagctgcctgcccaggcagctagaaaattagctaaaaggttgggagcagtgggattcggtagctaggtgttgcttttagctccgtttgcgggggcatatctcgctttattgcgacctcatggggagggctccgtgctgcgataagaacaatgtgaagaaagggccatggtctcctgaggaggatgccaagctcaaggagttcatcgagaagcacgggaccggtgggaattggattgctctccctcaaaaagcagggttaaggagatgtggcaagagctgtag

SEQ ID NO: 17075 - DNA, 391 bp, Setaria italica
  Peptide Sequence Number=SeqID_83049
tctaaagactgcttatgacgagtaattcattttcaccagtttgtatagctgtgttgttcttaaaacagcacttgtgacacttcgatctgcatgcagtgatgtccgtatattgacaaaaggaaaatgttttttttgtgcaatatctcgtgttgtatatttctgctaccgtttcaggcctttctatggtctgttttgtcaattactaaaagctatatcttggctactcaagacttgcagtggcctgtggtagtcgtgacaatacatagcggggccattagcctcagaaataaagtatatgagatattaatacgttccacatgcgttatacatgcagggctcgcgtgtcctactggaagaagctcatccaacaagactagtttcttagttttat

SEQ ID NO: 17076 - DNA, 552 bp, Setaria italica
  Peptide Sequence Number=SeqID_83050
cggtatgaagccatacgtaaaattcataaaggcaggcgcgttgatggagatggaagcaggttgggcaccccgcagaagtgtttgtccataattggaaaggctgatggtcatgcctttttggagtgtcatcccgaatattcaccagactggagtgatcttatggattttgttgaatgtgaagaaggtagggattattcaaataccttgaagcaacaacgaaagtttaggaagtttaagtatgagaagaaatggagcaggaagagacagtccaacatggaatggtttttaacttaacagaactgatgtgttgtttagctttttttccggcttagtttagtggtagatgagcagcaaagtgacaaccaatgttgcatagctgcacagatgaatcatattagcaggacctccgatcgttagattgctttgttgatctttttgaatcgttccaagaagtaaatgtctgaacgtgtattgagttgtgtcattagcttttgtatatatggatttcagcatggtttactccatttttggaaatacatgataaggattggt

SEQ ID NO: 17077 - DNA, 804 bp, Setaria italica
  Peptide Sequence Number=SeqID_83051
accggccgtgcagctccgcgcaccggcagccacggcgtgccgctgccaacatgtagtcgtcgagcgacaacccgtcggaggacgcggcagtggaccggcagttcttgcaggagggagtcctcggcgtcggcgcgtccgggtcatccgcggcgtcaccatcgctgtcgccgttgtcatcgtccatgccgagacccggcctccagtgcggcagcagcgcgccgacctcgccgtcgatcatctcggcgatgtgggtcacctcgtggtccgtgatgtccagctccgccaccatctccgtcgccacgctcagcgccgtgtccgcatcgacgtcgaaggggaagtagatgttccggacaatccctgtgccgtctttgtcggcgatgcgcagccggaggaagatgctgccgtcctccatcctcttgcccttaatggtgatgtcgacgcccgcgacgtgctcgtcgtcctcgtgctcgttgaacagctggtcgatgccatggaacatgctcccgtcatcatcgtcgtcgtcctcggagtcccacctgccgccgccgttgctcgccgtggagccgctgctgccgccgcggcggtggtggtccagacagacaggctggtggaggtagttgtacatcgcgctgtagtcttcgtcgtgaacgaagaagtcgtcttcgaccagcaggaaagggtcgttgagcagctccgccgccgtcggccgccgcgacgccggcgccaagcacttgtcgatgagccgccgcaccgccgggtctttcaccttgtacaaagccgccggctttatccccggatcacaag

SEQ ID NO: 17078 - DNA, 463 bp, Setaria italica
  Peptide Sequence Number=SeqID_83052
ctgaaatttttggtatccaggagcctgtaagaaaagtgaagacagatcaccacaaacgtccagtgaataaagagcttcagatctcaaatgttgctgacagtgttgaagaagatgaggaaataattctgcgaagcaccactattcaaaatttctcaactttgaagcatatccaaatgaatgaagattttgttgagactgacagtgacgagtcagttgctgatgtcactttaaggctgaaggactcatgtctttctgaacaaccaatgaaagttgcacataccgtccagcgatctccagtttgtcctgatttttatccacttgagcatgatgattgggaaaatgatatcatttggaataattcaccatcaaatgattgtcagccttatgccaaaatctgtgaatctgaagagagtgtggacacacatggtgaagaccaggctaaaggattatggtcaggcctcca

SEQ ID NO: 17079 - DNA, 510 bp, Setaria italica
  Peptide Sequence Number=SeqID_83053
tccttcccctaaaatcctagttacccctactagttccttctaaccttattaagtatttaaatttccttaacattccagctgcttctcacgtctgtccctgcaccaaattagccatgggcttccttgaacaagcgacaaaagctacacagattttgttcgagaagcatgcacagagcaacaatttgatgcgtacagcatttactgcaacccagcaagcaaagaggaattcatcatttcgaccatgggtctcatttgtgagcagttttgcagcaagtcgaaacgcctaacaaggccagcaagcactaaacgagctattagcatgctcgatatggggacagcaagagaaccgtcatcgttcgacttaagcagccgtgaggtgatgaagagggcagattggtcatggccattaccttggggccgtttggaaccattgccggttactatttagccttgctaagcaaggatagggacaagggatatgcgattggaaggacagctaggttgtcgtcg

SEQ ID NO: 17080 - DNA, 417 bp, Setaria italica
  Peptide Sequence Number=SeqID_83054
aggcgtgcttgcttggaagcaatctctgtacccgtctctacgcagctagctgctgctgagaactaccgctggcgctgctgctggtggcgccgtcgtcttcagacaggcagcagctgtgcagccttgggccggcggcagcaggagtcgtcatcgtcgtcggcggcggcgtcttgcccagctccagggacagcatctcggcctggaggacggtgcagtagtgcccaaacgtctccggcgacacgttgaggtcgaacccgacggcgaacaggaagtccacctccaggtagttcatctccggcaggctgatgccgccgaccctggcgaagtaggcgttgttgtagcgcacgtcatccatgaacttgacgggtcaggtcgaagcttgtcttcagaaaattcagaaccaggcttattagtagt

SEQ ID NO: 17081 - DNA, 166 bp, Setaria italica
  Peptide Sequence Number=SeqID_83055
ttgaaacgaaagatcttgttacttctcttttcaaggacatgcaggtttatcagagaaaactcatggtctaacaaacatttcacagggaagttactagtacacgagttttctctgataaacctgcatgtcctgaaacgaaaagatcttgttaacttctcttttggtt

SEQ ID NO: 17082 - DNA, 826 bp, Setaria italica
  Peptide Sequence Number=SeqID_83056
atcatcgatatgcacttcgcatgctgaagagaactatatttgtattgaggggcataaggtggtggatacctttcgaatggagagtatcagtccatgaataaatcttggaggtgtgcaatttatcccaaccgcaccaacctttgcacacttgtcagcaatagtagcacattcgatcaatgagtctccgctcacgatatgaactccatcttttgagttgaaggaaaaccatgcagggatatgtatgttacattcctcaagaagttcaacatatgcctaaatgaccaacaagccaacaatcagagactatttcacaaggatgagtataaaatgcaaggaaaaagattcagatcacaaaatagtagacctgagcttccagtttgttggggatcgtttcaaaagcaatcaaatcaggggctgcttcagcaagaacctgaagcctacgccgatgaaaatctttcaggaactgtactgtaccagcttcaccataatccccactgtactcagagccatcagcaagataagccccataacttcctatagaagccgcaaccagaataggttttttgtgtaggagtggattgctccaaatgttccttcaggaacatctcacgcgcttccagtgcaatctcgacactctttgttaataagttttcactctgttcttttgagaaaccctttgactcaaacccttgaatcgtggcctgatatgatgctgtgattataatgtttgcaccagcttctaggtagtccatatggacctatcaggataagaaattgctgtcaagctctgtttttttaattattttgatagaaccaaatagtaacc

SEQ ID NO: 17083 - DNA, 930 bp, Setaria italica
  Peptide Sequence Number=SeqID_83057
gccctgatggtgtttggagttgtcctgcagcaacccccaataagggcggccccatctttgcaccattcacttacataagaaacaaaatcaccatctgatactccagtgcattccacccactcctttttctcaccatcatatctttctccactgttgggatatatcagaataggcttgtctgtgacctttcgaatggagagtatcagtccatgaataaatcttggaggtgtgcaatttatcccaaccgcaccaacctttgcacacttgtcagcaatagtagcacattcgatcaatgagtctccgctcacgatatgaactccatcttttgagttgaaggaaaaccatgcagggatatgtatgttacattcctcaagaagttcaacatatgcctgagcttccagtttgttggggatcgtttcaaaagcaatcaaatcaggggctgcttcagcaagaacctgaagcctacgccgatgaaaatctttcaggaactgtactgtaccagcttcaccataatccccactgtactcagagccatcagcaagataagccccataacttcctatagaagccgcaaccagaataggtttttgtgtaggagtggattgctccaaatgttccttcaggaacatctcacgcgcttccagtgcaatctcgacactctttgttaataagttttcactctgttcttttgagaaaccctttgactcaaacccttgaatcgtggcctgatatgatgctgtgattataatgtttgcaccagcttctaggtagtccatatggaccttgcggatgaggtgcggggaggcgaggaggcacttggcgctccagagcgggtcgttgaggtcggcgccgttggcctcgagttccgtggccagcccgccgtccagcacgaggcgcccgccgccggcctccacccaccgccgcaccgcc

SEQ ID NO: 17084 - DNA, 928 bp, Setaria italica
  misc_feature (1)..(62): n is a, c, g, or t
  Peptide Sequence Number=SeqID_83058
nnnnnnnnnnnnnnnnnnnnnnnnnnnnnnnnnnnnnnnnnnnnnnnnnnnnnnnnnnnnnnattttttattaaaagagaagtaacaagatcttttcgtttcaggacatgcaggtttatcagagaaaactcatggtctaacaaacatttcacagggaagttactagtacacgacataagctctcttattgcaagatagcatctccagagcaactctcagttatacaaactcttaataacgatagctactaaaagcttcaactcagccgcaacttgcttcactcaatcctcagtagaactccgttcatcggtgctgcttccttatccctcttcactggttgcacctccaagtgcaatagcataagaacttggaaatacatcggtatttacagacataggtgcagaaccatctcatttgcaggacacacagcagcatatcgggccactagttaaagaatctccacttctccaggaggtgcacatctggaagtagagcacagctctatgccatagtaaagcgcgcgttggagccttggtttagagttctttgtatggccctgatggtgtttggagttgtcctgcagcaacccccaataagggcggccccatctttgcaccattcacttacataagaaacaaaatcaccatctgatactccagtgcattccacccactcctttttctcaccatcatatctttctccactgttgggatatatcagaataggcttgtctgtgacctttcgaatggagagtatcagtccatgaataaatcttggaggtgtgcaatttatcccaaccgcaccaacctttgcacacttgtcagcaatagtacaaatttgtaagacaacaattacgaatacaaagaactatctagtaattaggtctttgttcttgtttgttaacctttttacgttaaatttaggttaa

SEQ ID NO: 17085 - DNA, 214 bp, Setaria italica
  Peptide Sequence Number=SeqID_83059
actgcatggagatggttctatgatgtaattggtgactcacgatgccccatatcagatacttggtggcaaactgaaactggtggattcatgatcactcctttacctggcgcttggcctcaaaaaccaggatcagcaacatttcctttcttcggtgtgcagggcgggaaatggaggagaatgcagtggatatcttttccatagagagtccggaaag

SEQ ID NO: 17086 - DNA, 118 bp, Setaria italica
  Peptide Sequence Number=SeqID_83060
gccggtcattgttgatgagaaagggcaagagattgaaggggaatgcagtggatatctttgcataaagaaatcatggcctggggctttccggactctcatgatctccatagagagtccg

SEQ ID NO: 17087 - DNA, 233 bp, Setaria italica
  Peptide Sequence Number=SeqID_83061
cccagtgatgacgggaagctcacatactctgagctcttggaccaggtttgccagctggcgaattacttgaaaagcgtcggtgttggaaagggtgatgccgtggtgatctacctgccaatgttgatggagcttcccattgcaatgcttgcatgtgctcgcatcaactccattctttgcactttcaaccagagcagtgtcaactatatctttgagagggatggctttcagccctc

SEQ ID NO: 17088 - DNA, 420 bp, Setaria italica
  Peptide Sequence Number=SeqID_83062
taaataatttttaacaacttacttttacgggagcagatcgaacattgtcgattcgaaattttctccgcagcataatctttgcaccttttcatgtgtagattggcgcatttgctgctcctgataagatccactgggcaccggggctccctaagacacgaagtgggaagatcatgcgaagaatcctgcggaaaattgcatccaggcaactagacgagctcggtgatacgagcacgcttgctgaccctggtgttgttgaccagctgattgcgctcagcgatagctgaccttatcggccatgggggacggaaacaatcactgcctgcactacatgtgtaaatttcaacttgtgtgcggtcagtcgctctatccatgattctcttgtttcttcggttgttttggaattggcaaaccaaaagatgg

SEQ ID NO: 17089 - DNA, 1284 bp, Setaria italica
  misc_feature (45)..(45): n is a, c, g, or t
  misc_feature (837)..(837): n is a, c, g, or t
  Peptide Sequence Number=SeqID_83063
tcctggtcggtgttgggacattgttgacaaatatggagtgacaanattttataccgcaccaacacttatacgctcactcatgcgtgatggtactgaggtaacacagctagctgcttactacttgtattctcaattaaatgttgtagctctttttagtcatcctagaatgccaggtgtgttattcaaccctactgtttatgctccagttcctagatataagatcaaaaggaaacttcttaatttgtgctgctggtaaagtatcaatttgattgctatttccattgaatgttagcattttttctgtggagcttgcatgcataatagtacaaaacatatcttcagagtgatatagtccaaataattttaatttcgctggtcaacgttttcatcctgtttaaccttctgattttccattctatctatagtatgtttctcggtactctcgcaaatccctccgagtgcttggaagtgtgggtgagccaattaatccaactgcatggagatggttctatgatgtaattggtgactcacgatgccccatatcagatacttggtggcaaactgaaactggtggattcatgatcactcctttacctggcgcttggcctcaaaaaaccaggatcagcaacatttcctttcttcggtgtgcagccagtcattgttgatgagaaagggcgggaaatggaaggagaatgcagtggatatctttgcataaagaagtcatggcctgggggctttccggactctctatggagatcaagacagatatgagacgacatacttcaaaccgtttgctggatattatttctcgggtgatggctgcagaagggataaagntggctaccactggctgactggaagagttgatgacgttatcaatgtgagtggacaccggattgggacagccgaagttgagtctgctctggtttcacatccaaaatgtgccctttaacctcatggtcaataccaacaacagcggcctcggcacattttggatgtgaaaccagagcagactcaacttcggctgtcccaatccggtgtccactcacattgataacgtcatcaactcttccagtcagccagtggtagccatctttatccctgacatgcatatttaattagttatggttttacacatttactgcatcaatagatataatgatgagttaccttctgcagccatcacccgagaaataatatccagcaaaacggtttgaagtatgtcgtctcatatctgtcttgatctccatagagagtccggaaagccccaggccatgactctta

SEQ ID NO: 17090 - DNA, 2433 bp, Setaria italica
  Peptide Sequence Number=SeqID_83064
cgcccggatctcgctcgcccccgctcgccgtcgccgtcgccgtcgccgtcgccagccgccaccgctaccgccatgggcacggccaacggcgagcagccggcggcgggcgcttcctccgacaagctccgccacgtcgagtccatgtcgcatctgccctccggcgccggcaagatctcagggatcaacgccgtcgtgctcggcgagtcgctcgccgccgaggagaacgacctcatcttccccagccccgagttctccgccgacgcgctcgtctcctccccgaaacagtaccgggagatgtatgagaggtccatcaaggacccggccgggttctggtcggagatcgccgataccttttactggaaggagaagtggaaccccagtgaggtgtgctcagagaacctcgatgtcaccaaggggcctgtccacatcagctggtttaagggagggaaaaccaatatatgttacaatgctgttgaccgcaacatcgagtctggtaatggggacaatattgcgatgtactgggagggtaatgagcctggtcaggatgggaagctcacctattctgagctcctagagaaggtttgccagcttgcaaattacttgaagagcgtcggtgttggcaagggtgatgctgtgattatctacttaccaatgttgctggagctgcccattgccatgcttgcttgtgcccgcattggtgctgttcactcggttgtgtttgctggcttctcagcggattcactagcccaaaggatcgttgattgcaagcctaagcttgtcatcacgtgcaatgctgtgaaacggggcgtcaagcccatccttctcaaagatatagtggatgcggctttggttgaaagtgagaagaatggagtttctgtaggtctctgtttgacgtatgaaaatcagtcagccatgaagagggaagacacaaaatggcaagcagaaagggatatttggtggcaggatgttgtgaccaaattcccaacaaagtgtgatgtggaatgggtggatgcagaggatccgctgttccttttgtacacaagtggcagcacagggaagccaaagggtgtgttgcatacttctgggggctacatgctgtacactgcaacaaccttcaagtatgcatttgattacaggccaacagacatatactggtgcactgctgattgtggctggattactggacatagttatgtaacatatggtcctctgctgaatggtgctacagttctcgtttttgaagggactccaaactaccctgattccggccgatgctgggacatcgtggacaagtacaatgtgacaatattttatactgccccaactcttgttcgttcactcatgcgtgatggcagtgagtatgttacacggtactctcgaaagtctcttcgagtcctgggaagtgttggtgagccaatcaatccaagtgcatggagatggttctacaacattgttggggactcccggtgccccatatcagacacttggtggcaaactgaaactggtggtttcatgatcacccattgcctggcgcctggcctcagaagccaggttctgcaacctttcctttctttggtgttcagccggtcattgttgatgagaaagggcaagagattgaaggggaatgcagtggatatctttgcataaagaaatcatggcctggggctttccggactctctatggagatcatgagagatatgagaccacatacttcaaaccattcgctgggtactatttcactggtgatggttgcagcagagataaagacggttaccactggctgactggaagagtagatgatgttatcaacgtcagtggacaccgaatcggcacagctgaggttgagtcagctttggtgtcacatccacaatgtgcagaggctgctgttgtaggagttgagcatgaggtcaaaggtcaaggaatttatgcatttgtaactttggtggatggtgttccgtatagtgaggaactacggaaaagcctcatagtgacagtgcgcaaccagattggggcatttgcagctcctgacaagatccactgggcaccgggactccctaaaactcggagtggcaagatcatgcgaaggattttgcgtaaaattgctgcacggcagctggatgaacttggggacacaagcaccctcgctgatcctggtgtcgttgaccagctgattgcgctcagtgattgctaggctgtaatgaattgggtggtggatgcatcctttgcgtgcatgttccatttctcttcctgtatgatgagtagaatgtgcatttcagtgtcagagaactaaactggggtgtgatatgttgttttgacgtttcttttttagaacttttgcattgcatatcgaggtaggtgcatcgaaatgtattattgattgacacaataagatatcaataaatcgttaaaatttaaaaaaaaaaaaaaaaaaa

SEQ ID NO: 17091 - DNA, 2952 bp, Setaria italica
  Peptide Sequence Number=SeqID_83065
cggccgtgctgggcgacccgctgccggcgctcgacgacgacccgggcctcctcgtccaccccagcgccgacttcgccgcccaggctctcgtctcctccacgcagcagtaccgggagatgtaccagaggtcgatcgacgacccggctgggttctggtcggagattgcggaggagttctactggaagcagaagtggaaccctgatgcagtttgctctgagaacctcgatgtcaccaaggggccgatcaagattgaatggttcaaaggggggaagaccaacatatgctacaatgcggtggaccgcaatgtagagtctgggaacggggacaaaattgccatgtactgggaggggaacgagcccagtgatgacgggaagctcacatactctgagctcttggaccaggtttgccagctggcgaattacttgaaaagcgtcggtgttggaaagggtgatgccgtggtgatctacctgccaatgttgatggagcttcccattgcaatgcttgcatgtgctcgcatcggtgctgttcattcggttgtgtttgctggcttctctgctgatgcaatagcacaaagaatcattgactgcaagcctaaggttgtgattacctgcaatgctgtgaaaagagggctgaaagccatccctctcaaagatatagttgacactgctctggttgaaagtgcaaagaatggagttgatgtaggcatttgcttgacatatgaaaatcagtcagcactgaataaagtagacacacgttggaaaccagggagagatgtttggtggcaggatgttgttcccaatttcccaactaaatgtgatgtggaatgggttgatgcagaggatccattgtttcttctgtacacaagtggcagtacaggaaagccaaagggtgtgttgcatacaactgggggctatatggtctactctgcaacaacatttaagcatgcatttgactacaagccagcggacgtatactggtgcactgcggactgtggttggattactggacatagttatgtgacatatggtcctctgctgaatggagccacagttctcgttttcgaaggggctccaaattaccctgatcctggtcggtgttgggacattgttgacaaatatggagtgacaatattttataccgcaccaacacttatacgctcactcatgcgtgatggtactgagtatgtttctcggtactctcgcaaatccctccgagtgcttggaagtgtgggtgagccaattaatccaactgcatggagatggttctatgatgtaattggtgactcacgatgccccatatcagatacttggtggcaaactgaaactggtggattcatgatcactcctttacctggcgcttggcctcaaaaaccaggatcagcaacatttcctttcttcggtgtgcagccagtcattgttgatgagaaagggcgggaaatggaaggagaatgcagtggatatctttgcataaagaagtcatggcctgggggctttccggactctctatggagatcaagacagatatgagacgacatacttcaaaccgtttgctggatattatttctcgggtgatggctgcagaagggataaagatggctaccactggctgactggaagagttgatgacgttatcaatgtgagtggacaccggattgggacagccgaagttgagtctgctctggtttcacatccaaaatgtgccgaggccgctgttgttggtattgaccatgaggttaaagggcaggggatatatgcttttgtgactttggtggatggcgttgcctacagtgatgatctaagaaaaagcctcattatgacagtccgcggccagattggcgcatttgctgctcctgataagatccactgggcaccggggctccctaagacacgaagtgggaagatcatgcgaagaatcctgcggaaaattgcatccaggcaactagacgagctcggtgatacgagcacgcttgctgaccctggtgttgttgaccagctgattgcgctcagcgatagctgaccttatcggccatgggggacggaacaatcactgcctgcactacatgtgtaaatttcaacttgtgtgcggtcagtcgctctatccatgattctcttgtttcttcggtgttttggaattggcaaccaaagatggatactgaaacgacgggtttgatgcggtgagtctgcaaattgctggatcagtcacaaatagatgcagtttggtaaataaggaaattaatgtaagtggaagttttggttacatccgaaagtaatgtaatgggacaaccacaagtcccattttatgggtgcgcggcatacaggaatctgtcattgaacactaaagcaggacatgtttactgcctctgtatgctgttcaaagcatgcaggcgccccattttttggaacttcactaaaccctgtgagaattgaactgttccgttcgaatttctgaaagtccgttgggggtaatgggggatgtgttccaaacaggagtactctttgaacatggagtgtacgagctggacgaatcaattaaattggcctcttcttgtattgatctgcggactgctggggggatttgccacatcagaccggagtagagcatttctggcgcatggacgagcatcgccgtcctgtggaccgtggtgtccgtttacgacgccggcgcaattagcccgggagcattgggcttataataccagcagtccagcaagaaggaattgttgtttggtcatcaaactaaaaatccactattatatttagtttgacaaggttattagattgaacatagtagtaggctatttagtttatctgttgtcgagggaaaaaaaacattttcaatcaacttaccaaaatcatttagcggcaataagagaaccggcccattctacattcagtcaggggaaaattgggcctaatgggcaaacccaattcaaccgggcctaatactaaccga

SEQ ID NO: 17092 - DNA, 494 bp, Setaria italica
  Peptide Sequence Number=SeqID_83066
cgggattaaaatctttcaacaattaaactgtcatttgtttctcagagatgaaattatccatctgttgtcgtactaagcaccgctagagagcatcttacatttgcaatgacattttcaagatcttcaaagctactttctgtagaatctggaagcatgtcactatcttcttcagcgccataaaagtttgatttcttcaactgatattcctctgttcagaagaatctgtagaagcccaggagcatcctcatcaagtgccgtttcgattgaatccatggccgttttctttctccttcgacgagaacagtaagaaccaccctcatcattagtgtaagcatcttcttcaagcattttttcagttgaataacttgcttcctttttctgcattgtcggaaactgaaagaaattttctcgcatatgccaggtaactcagactcatttaattcatctttactcctaaagatggtactcttgtagtcccatgagtctattgtagt

SEQ ID NO: 17093 - DNA, 1998 bp, Setaria italica
  misc_feature (1942)..(1942): n is a, c, g, or t
  Peptide Sequence Number=SeqID_83067
aacaaaataattacagggacctccgtactccataccactataacccacccaagtatattcaaccagcctaaaccggcctggcaacaactgttataaatatcactatgcaccaaactacagaggtgcacatgaataggctaccccccatcactagtcaaggtcagataaaaataacttggtgaaagttacaagtctacttttttacagcccaaagtttatttggatgcattcagcactacgtacaacaaactaccaagtacatgttgtacctatatacaacagatctctcaaaaaggatcctccaactttatatcaacctcagcatccccagtagcttccaacagatccgctacgttctttggaccatgaattgtgattgattggccctcagcataaccactcatcagaagcttccctatcttcgccttccaatcaacgacgcttctctccgtccacctgtcatggaccacacgatcgcggtagttgaccatcgtgcctagcccagtgtttcttatccagccatattgttgcaaaacatcagcctcaccttctgataaatcctcaccaaccattaatggcctgttttcaataagagctgtccttccacagccacttagcttcattgcaataaccagcctacggatctgccattctattggcagtgattggacaacctcaaagaagtatgtcgcataaccatattcaggacgttcaagaacaatcctattatggcttctaaatacaaaaatgaaggactgcaggtccctgcaccatccccattccacagggcagtcacggaattgaaggtatcgtgactgctcaataagagaaattaaacaggataagcagtaaatagccttttcccccttttcatgcctagctactgacagtttcaacagagatgctctctttgggaatatatttgcaatgacattttcaagatcttcaaagctactttctgtagaatctggaagcatgtcactatcttcttcagcgccataaagtttgatttcttcaactgatattcctctgttcagaagaatctgtagaagcccaggagcatcctcatcaagtgccgtttcgattgaatccatggccgttttctttctccttcgacgagaacagtaagaaccaccctcatcattagtgtaagcatcttcttcaagcattttttcagttgaataacttgctttcctttttctgcattgtcggaaactgaaagaaattttctcgcatatgccaggtaactcagactcatttaattcatcttttactcctaaagatggtactgagcctttagcatgagtagaattttcttgaggtgattcagacgggccaatctcataatcttctaatgcaggctccaatttaacatcagccacaaggaggcactgttttcttacaaccagctcactgtgttcactcccacaagttgcactgccgcctacctgattttcagaaccctccagtggatcacgagggcatccggcttcacatagggatgggtcggtacgagatgatgtgacagaaatactcgagaaacctggatcattttcaccaagcaacctgctgttgttatcatccatgggattactctctataataggaggtgcagaagaaatttcctgcaacatgctacatatatcttctttgcatgctgttccctcattatttcttttggaagatgttctactagcttccacacccataacagacttcctagctgatgctgtatcagggcaagaacttttatctgctagaaggatcctgtagcgctctttcagagatatatgatcaagctcatcagtctcagtacagattccagggttaaaacatgcggtgcactcctctcttgaatcatcaggtgtggaaacatcctgtttggcctcaataggagttatcccagccaattcagatggattgttcctcgattcaaaaaatntttttgacaccaccacctctccctcatccttcactgtattcctgatatgaaattga

SEQ ID NO: 17094 - DNA, 369 bp, Setaria italica
  Peptide Sequence Number=SeqID_83068
ttgaggccaaatgtggttccccgatcataaacgaggttgaattccacatagcgacctctccgtagctgctgccatgccttgtgctcctcagtaaatggaatgtctttgcggcgttctataatgggtatgtatgcaggaagaactgaatctgcgcactctgtagcaaactgaaggagagtttcctgatcatagtcattaagatcgtcaaaaaatatgccacccaccccacgccgttcaccacgatgcttgatataaaagtattcatcacaccattttttgaatctaggataaaagctagaatcaaatttatcacatgtctgtttctgaacataatggaagtgtcggacatcctcttcaatgatatatgaa

SEQ ID NO: 17095 - DNA, 599 bp, Setaria italica
  Peptide Sequence Number=SeqID_83069
tgaacagaaagtacctattttttctggttcttacttttctcccttttgacaactgagactgcttattcataaacactgatgacatatatattacatgcatcgtgtatgctcattcaaggaaataacactaactgtaatagaaaaaaagcacatactgaaggaacactaagactaaagtgacatcttaaaaacaaggtactgaaagagcatgcacttttcaaccagtcagatccattcctttggatttatgcacgtgtcaagaagtttccattcttcactccctacttctggtttatgatcatactcccaccgtgcggtaagaggaagagaaacaaggatactctcaatccgtcctccagtcttgaggccaaatgtggttccccgatcataaacgaggttgaattccacatagcgacctctccgtagctgctgccatgccttgtgctcctcagtaaatggaatgtctttgcggcgttctataatgggtatgtatgcaggaagaactgaatctgcgcactctgcagagatgaaaggaaagcacctcaacaggcacaactttggtcagcagttacaagatggttgccatacacatatatgtg

SEQ ID NO: 17096 - DNA, 757 bp, Setaria italica
  Peptide Sequence Number=SeqID_83070
tcttagtcaaaggttgtcgaagctctcgtccgggagggaccctgtcagggcgtggatgtcgccggtgtgccctaggtcgaccagcaagcctagacgccctaggagataaaagtaaatagtaggttgattcgattgggttgccctcaatcggccgtggccctttatatttatagggtggggaggtcttgtcccagtaggactcgaaggttatacaaaccccatgtcaaaatacaactcctaactcgcattaggctggtcgaatcggtcagaccgcccatcccaaccggtctgacctgttagcacagggctgaatcttgccagagccataactctctcatccggactccaaattggatgttctacatatgcatttcgatcgcctcgatgagatctacacaatggtgaagtccaatcagagatttgacaatgtttgtaaaaccggtctgaccggtttgtagaccagtttgcccagatttagacagcaaactcctatgatgccagtttcggtcttgaacagtgtccctaccgaatgaatgtttttctttctgacactattgaataactgtttttttctcgaacactattgaatgaatgtttaatcatgaagaagtatgactgcacgaacctatgtagatttgagtttgtaagtttgtagagtttacctctacgatgttcattgataccatatttagactaatgtgggactgcagatggaatgcagtaaatccactaaacaaaacaaaagttgaggcaaacg

SEQ ID NO: 17097 - DNA, 471 bp, Setaria italica
  Peptide Sequence Number=SeqID_83071
acaagacttcagctttcacatcctgccatcagttgagccatagtgaatatcaaatcatttatagacatataatataaggagtgaaaatggattctatgggtaaatatcagatttgaaatatgaggtgcagttcactcagtttacattacttttgaaattatgatttcccaagtaagcgatgggcttcattgtttacatttctgtgccttcattctatcgtgatggacttcattgttcacatttctgtgccttcattctaactgcatttcgttttcctggtttatatgatgtctatattctggaagatttatctgcaatgcaggtattattgaggtttacacatctctaattattgcttcttccctatacatcaggtttcagaatggctgctgagtgtgctagaaatgctttgctgcaaaggcaattgacaacaaagaaaatacagataagttcagagctgatctcatgaat

SEQ ID NO: 17098 - DNA, 2077 bp, Setaria italica
  misc_feature (2055)..(2077): n is a, c, g, or t
  Peptide Sequence Number=SeqID_83072
tctaccgaaggctcgaagctgcgacggagcgagggaaagagaaacccttgccctctcccccgactcccagcgtcgccgccggcttcagccgccgccgctccggatctgcgcccactcacgctccatctgatggagagggtgctgaaggatgacgccgtcgaggagaagggcgagcgcgcccggatggcttcttttattggagccatggcgattgcggatttggtgaagaccacactgggaccaaagggaatggataagatcctgcaatcaactggcagaggcaggagtgttactgttactaatgatggggctaccatattgaagtcgcttcacattgacaatcctgctgcaaaggtccttgttgacatatcaaaagttcaagacgatgaagttggtgatggaactacttctgtcgttgttttggctggagagctgttgagggagtctgagaagttggttaacatgaaaattcatcccatgactattatcgcaggtttcagaatggctgctgagtgtgctagaaatgctttgctgcaaaggacaattgacaacaaagaaaatacagataagttcagagctgatctcatgaatattgctatgactacccttagttcaaaaatcctttcccaggacaaggagtattttgctgaacttgcagttgatgctgtcctaaggcttaagggtagcaccaacttggaagccattcaaattctgaagaaacctggaggatctcttaaggactcctttttggatgaagggttcattcttgacaagaaaattggcattgggcagccgaagcgaattgagaatgccaaaattttggttgcaaacactgcaatggacacagacaaagttaagatctatggggcacgtgtccgggtggattcgatgtctaaggttgcagatattgaagctgctgaaaagcagaaaatgagagagaaggtgcagaagatcattggtcatgggatcaactgttttgtcaacaggcaattaatctataacttccctgaagaactctttgctgatgctggcatactcgcaattgagcatgctgactttgagggcattgaacggctagctctcgtcactggtggtgagattgcatcaacttttgataatccggagtctgttaagcttgggcactgcaaggttattgaagagattatgattggtgaggataggctaattcatttctctggggttgagatggggcaggcctgcaccatcgtcctgaggggagcaagtgagcatgtgcttgatgaggctgagaggtccttgcatgatgccctatgcgtgctgtcacagacagtaaacgacacccgcgtcttgtttgggggtggatggcctgaaatggtgatggccaaagaagtcgatgagcttgcaaggaagacccctgggaagaaatctcatgctatcgatgctttctctcgtgccctgcaagccatcccaacaaccatagctgacaatgctggtttggatagtgccgagatgatctctcagctccgagctgagcaccacaaggagaactgcactgctggaattgatgtcatcacgggcaccgttggggacatgcagaaactgggaattcaagagtcgttcaaggtgaagcaggccatccttctgtccgcgacagaggcggcggagatgatcctcagggtcgacgagatcataacctgtgccccgcgcagaagagaggacaggatgtgattcgcccgcacgcgtatctttgaattagggtgtgcgtgttttccccagttgcagggggttactatgatggttcacgggtgtctgattttattacgtttggggtggcaactgggaactgttttttgtgcgacaatgcgaatgttacaacctacaacagtcttctatctagtatctaggccttttgttttcaaatcccctagtgatgtattcccttggtagctaatgtcgcattgtgcttgtattggtgactggagacgtggctgctgctcctggtgttaatgtggaatggcaagtgcctgtcgaccttctatggttatttttgttaccagaaaagaaaaaaaaaaaaannnnnnnnnnnnnnnnnnnnnnn

SEQ ID NO: 17099 - DNA, 450 bp, Setaria italica
  misc_feature (84)..(84): n is a, c, g, or t
  Peptide Sequence Number=SeqID_83073
atgctttctccctacttgatccatacggtggcgatgacttgccttcattgtatcagatgattcggcacaccttgatcggactancctttcacatccgtctccacccgtcgctcgtgccatgccgccgcgggcctggcggcggtcttgctcccggtctatggcatcgatcgtggcctccagtttcctgccgccgtcagggaggcgtatgccgctggtgaccataccctgcaagcgctgcttcttctcctgcagctcccggtccggcaagtgcctcaactcggcatcggccctctccctctcctccttctccgcgttactactaacccccgcctcgccgcaggggacctcctcccgcgagaccgcggccatcggcattcacgggggccgccgcttcgcgtctcccgaggagacagaggtggaggcggagaaagggggaagagacggaagggg

SEQ ID NO: 17100 - DNA, 293 bp, Setaria italica
  Peptide Sequence Number=SeqID_83074
ccgcgaggctgcgatcccaccacccccgcgcatccagcgagcggcggtcggagaacatggtcggcgaggacgacgcggccgcggtgcgcgcagaggagtccgtctcggggggcggtcgacgtctggagcgacgccgtctcctcccacgacccggaccacctgctcgtcatggtccacggcatcctcggcagtactgctgattggcagtatgctgctaatgagtttgtaaagcaactccctgacgatgtaatcgtgcactgtagtgagaaaaattcatcaatgttaactctaga

SEQ ID NO: 17101 - DNA, 848 bp, Setaria italica
  misc_feature (808)..(808): n is a, c, g, or t
  misc_feature (824)..(848): n is a, c, g, or t
  Peptide Sequence Number=SeqID_83075
tgagaaaaagagggaaaggaagggagcgccgccgcccacctccagcttaactgcccagcctcgatttggaagggactgccccgtgcacgtgcgccgccgcgatcccatctcccacctcgcctcgggcatcccgccgccgctccatctgcttccagcggagagagcgatggccaaggccaggtcgtcggcgaagcagtcgcgcgcgcaggcgcaggcgcagcagcagaacggcggccacgcgctctcctctaagctcgccaggtacctcgacccggaggcctcctgggacaaggaccaactgctggacgcggtgcactggatccgccaggcggtggggctcatctgcggcctgctctggggagccgtccccctcgtcggcgccgtctggatcgcgctatttatggctatttctacgggcattatttattggtactatgcatacgtgttgaagattgatgaggaagaatatggaggccatggggcactacttcaggagggactttttgcttctttcacccttttcctgctttcatggactctagtatacagtttggctcacttttgagaagctcctttgctgcacatagcattcgacctttgctcaccgtgccagccagaagagactcaccagaacagtgtagattaaggagcattttagaacaagcattgtatcagttcagagttgtaatgttatttcccaaaccctaattttggtactatgggtttagctcagtgcgaggtagaacactgcctatggaatctttgatcggaggggaaaatgaattgatctgagtttgcagtaaaaatnttcaattgcatcaagnnnnnnnnnnnnnnnnnnnnnnnnn

SEQ ID NO: 17102 - DNA, 320 bp, Setaria italica
  Peptide Sequence Number=SeqID_83076
agcgccagggcgccctcgccctcgcccacgccgcggtggtgctcgaccacgcgcgtcacccggtggcagaatgtgcaccggacgctggacccgggcctggacggcgcggcgaggctcatgccgcagtggccgcaccacgacttcgccgccgccgccgccctcgcgctcgccatgccgaccggcctcgtgttgaacttgaacatgaggtggaagatgtcagaagtgatgtgcgttttgcgcggcatcattcgtcgtggcccggtggcgcactcgcttgtggcttgagaagggcatatgccagcatggtaagcaaagcaacg

SEQ ID NO: 17103 - DNA, 803 bp, Setaria italica
  Peptide Sequence Number=SeqID_83077
ggcagatcctccgcctcccgcgcagcctcgccgacgtccgcctcctcaaagacaacctcgccgtttatgcgagagattatcaagcgaactttatattgggctattgctcgatatacatattcatgcagacattcatgatccccggaacaatattcatgtctttacttgccggggctctttttggagtgattaaaggtggcattttggttgtcttcactgccacagctggtgcatcgtcttgctattttgtctccaagttgattggcagacccttggttagttggttgtggcccgaaaaattgagatatttccagtcagagattgctaagaggaaagaaaagctgttgaactatatgctttttctgagaataacaccaactttacccaacacattcataagtatggcgtcacccattgttgacatacctttccatattttctttgctgcaacacttgttggcctcatcccagcatcttatattactgtaaaggctggtagagccctaggcgatctgaaatcagttagagagttgtatgacttcaagacattagtggttctattccttattggatctgttgctgtcgctccagcaatcctgaaaaggaagagaacatacgagtgatgccttagtgcatctaaatactttcctcagatgctctaaaatgtattagcactaatttttttttaccttttttgttttcttgatattgtatacctattcgattctagctgtagagatgtaacatcgaatgctttctaatacgagatgaccccatcctatttataaaaaaaaaaaaaaaaa

SEQ ID NO: 17104 - DNA, 2224 bp, Setaria italica
  Peptide Sequence Number=SeqID_83078
gaacaaatttcgaccgcagagtggagattgtgagtctcacagacacttcatcgtcagtgaagaagcatcaccccctctcgattcctcagcttgggctacctgaccttgcaggaatcgtcgcacgctggtctcggcaatatccattaggcccagggacggatgagtgtgcatccatctggagatgacaaacgcagccaacaggtactggcctttgaggaccaattcagatatgaaatacggaaacaaaatactaccgaagagcaaagatctgttggtctttgacgtggcttcatcgttccattgcataaggagatcagtctggaatgaccttgcaagatgcccaacaagatggcataagtaagagaaaaatttagagtatgcttcttccattgcgatcttctgcatagttccagatgtcagaaccaaggcaaggagctcatgatcatcagcatttgatgaggtggacacggttccttccctcattttcaactcaaccatctgcaggcactgcagtcttagagtttcatatgggagtaataggacaattttgagagccatgaagcagtccagagcagacataagttcaaccaagctacaagcttcttcttcctctaggaacacgctatgcttcgaagatgctcggtccagaagttcaatgaccttgtgcagctcaccaagctcaacacgttttcttataatctccatccaacaactgtggaggggatggacagataacggtgcactctcttgtttgttctttggactctccaactcttctggtagggcctcccatccatcatcccatccatcactccagtcacttgtttcttttggtgattcatgaggcggaacatgctcttctttgggggagaacaattgctcccactcttctaaaactgcttccaaaactgcaacgtttgcagcagaagcatgttctgacaattgtaagaaacaagatactgcagagtcaagagttgctaggctttctggagtgatattagcatcaggaagaaaagcagcgaccatctgagtagatctaagtgccacaagagtcccagtgatggtgctagaggagttgatactctcatcagctatggcagcgcctgttccatgctcataccatgactcccacggctcaacctgggaaactatctcatttggaagagttttaaggtttcttcctgtgatacattgcatcagctgtagcgcatagactcgcaattggctctccagctgcatatcttcagaaaagcggattaacttcccccaaacacccgaccggaccatttctagaatgccagcatgtttccccgttgaccggctcaaagatgacagtaactgatgaaacaatatttgatattcacaagagccctcaatcaaatctgacaaacactcttctgtagcagcattataaagttctaatagatccaaagaattgcttggatctgcactctcaccccccaattgtccctgtcctccatagtatacttcaactacagattcaaagctacagcctgatagaatcatagctcgacaaaaacgcgaggtttccaccatcattccacttttaaggcaatcttttacatacatggagatggcaccccaaccttggtgcactgttatctcatcatgtatcaagagctgcctgaaagcccccatgcacaaagataacctatttgaatttaagtattctgtcatttcatatgaggaagcatcaattgactcccccggtatgtcatcaacaagtttagaccaaaatgttagcagcgtagcaaggggtttcttccacgaaggttcctgtggatggcttcgtgctaagttagatggaaaacacagggtgcagtaccttccaataatatatgaaatatctgtggctggaagagcttggatgtactccctgcaactatcatagttcaactcaatttcacataggaaagcttgcaacttttcataatctgtgcagttcgatcctgcttcactgcggccttctaatgatgccagcaagccaagaacatagtgtttgtaaacaccttgttgtgatacgagtcccttggccagaacatcaacatacatactcacaagagcttgtaccatatcggctagagcagtgacagtagaggcatggatattcttgcatacttcttcattgaaatgctcaaagttcagattatccaatccagcaatgttttcattgatggcttgtaacttattaaaaactatttgt

SEQ ID NO: 17105 - DNA, 1448 bp, Setaria italica
  misc_feature (1388)..(1448): n is a, c, g, or t
  Peptide Sequence Number=SeqID_83079
cccgtgctccactaggggtcctatccggattcgtagggacaccggacaccccgcttcccgcatcgaaatctgggtggggtgggatccatggcggcggcggaggggacgaggaagaaggtcatcatcgacaccgaccccggaatcgatgacgcgatggccatcttcgtggcgctgcggtcgccggagctggaggtgctgggcctcaccaccaccttcggcaacgtccacaccgccctcgccacgcgcaacgcgctccacctgctggaggctgttggccggaccgacatccccgtcgcggagggatcccatgtaacaatcaagaaagcctccaagctgaggattgctagcttcgttcatggctcagacggtctgggaaaccaggacttccctgcaccggctacaaagccggtggatcagacggctgctgccttcatggttgagcaggcaaacctgtaccccggacaagttaccatcgtcgccctcggtccactgaccaaccttgctctggcgatcgagcttgaccctttgttccccaagaagatagggcagataattattctcggtggtgcgtattcggtcaatggaaatgtcaaccctgcagctgaggcaaatatatttggggatcctgacgcggcagatatcgtgttcacctgtggtgctgatattttggccgtgggactaaatgtaacccaccaagtagttcttacagatgctgaccgggagaagcttgaacagtgtgatagcaaatacgctcgctacttatgcaagataatgggcatttattttgattaccacaaggatgcttacttcataaaaggagtgtatctccatgatccgacaacgcttattgctgcagtaaatccgtcactgttgacttacacagaaggtgtcgtgagggtgcagacggttggaatcacaaagggtcttacagttttcgacaataccaagaaaaggtacggggagatcacagcctggaccggcatgccgaccgtgaaggttgcggtcaccgttgatgcccccgctgtggtggagctgatgatgcagaggctgatgacggatgattaatcgacgactgctgatttgcacgacctgagaccgattgctggataatccctctgtttgcagtgcatcctagggcggcggctcaagatgagtcctgattgaagctgatgctggattatgcagtgctgctcgaaagaaagcactttgtacttataacattgagggatgatgtgcctttgtttctttcagactttgaagtctataagaaagaaagaagcgttggaagcatacatgtgtaacaccagacatgcattgtgtttgtggcttgatgcatatatgttggtccctgaaaccttcctgacgactcaccgttcaagaaaaacccnnnnnnnnnnnnnnnnnnnnnnnnnnnnnnnnnnnnnnnnnnnnnnnnnnnnnnnnnnnnn

SEQ ID NO: 17106 - DNA, 386 bp, Setaria italica
  Peptide Sequence Number=SeqID_83080
acctagtagttcacctccaaaggtgtgcagtaatcatcatcatctaaatagatgccataaacatgatagggtagaaaattacaccaattggccatcccatccttggtccagaaaggccaattgttttgaaactaaatgctcatatgtggaactcaactttaattgtataagtttgttttgtgtcattgatagtgcatggaatttctaacagcatggattacacaggttggcatcggtcacaattttcacatgaatgcaactggatggaaatggaagctttctacctgccttgggggagatggtgtatcacaaataagaaacaagtctaaaatcagcatgttcccagggtttgattgaggattggatggagagctgaatatgtgctt

SEQ ID NO: 17107 - DNA, 867 bp, Setaria italica
  Peptide Sequence Number=SeqID_83081
cgagaggtcggaccgccgccgcgccgcccaaatccaccgccgaaaaaaaaaggggaagaccctctctctgttcggctcgatggcctcgagctccggcagcggcggtggggcggaaggcggggtcggggaggggccgacgacgctggacgagctgtaccagatcaacgtggtgccggccgagctgcacttcaagttccgcaaggagctccagggcctccgcgtcggcctcaacctcgagttctacaatcttgaggtgaatggttttgaggcgaagatagtactcaagcctctagactacgaacggaagtggaaattccagtacaagcccatcagtggtgacgtacagctgctttccaagaagataccagttacaaagtttctaaatctacaggttggcatcggtcacaattttcacatgaatgcaactggatggaaatggaagctttctacctgccttgggggagatggtgtctcacaaataagaaacaagtctaaaatcagcatgttcccagggtttgatttgaggattggatggagagctgaatatgtgcttcctgagatacatggggctgttggcacaggagaacctgccttcagtttgaattatgggcggctgcatgcatcaatagatcgggtcgaggctatcgttactcaatcagatcagtactgatcgtccatggtggaagtcaaaggagagttcttcatcgccagcaatcatctcaaccaaatcccagggtttactagaagcatttttaagctctatgtacagttgttagcgaactttgagtttctccaaaccctgtgcggcttttcctatgtctgaaaacgtaatgaaataatattatgcaacttgtgtttggcaataaa

SEQ ID NO: 17108 - DNA, 570 bp, Setaria italica
  Peptide Sequence Number=SeqID_83082
atttaacaaaacaaacataaaaattgaagttggttattaagtaagctgaaagctaagggaccaccacacattaactcacaagagattagtgagaacttagtagaacctagcaggaaacatttcttcattcttaattaccagtttgaacagtttatttcactctaagtttacaggtaacctcatgctgctggtatgattatataacaagcatgctctgcggagtaaaattataacttacatatggtattgttacacttccagctcctaaattacaatgtcctaattcttggtaggccgcatgagttgcgtcctgctgtaaatatggacaaacagtaaagttgatgaaatttaagtgagcactatgtcagtcattgatgctcataaaaggccatcacacatagatttcaggtactagaaggatatgctagaatatgcgggcatccgtagaggctagtttggtagctaatgtgcatagacagtattgcatgtaattgcaagctaatcttctactcatctactgtttttacccgcaaattttgcaataattcttggcattgcatgttgctataa

SEQ ID NO: 17109 - DNA, 1419 bp, Setaria italica
  Peptide Sequence Number=SeqID_83083
caaaatcaacctttatatcacaacatcctccgcctttcatgtcaaatttgaatcaatgtcatcaagagttctcacagattgcggtgatcctcaaacgggctggctgctctggttcagcattccttttccagaaagcacgccgccaccacacctcaaaccctctctgaatgtttgggcagtcctccccagagttaaggaagcgattgaaccatgcgagaaggatctcctgctgagttgccagaggcagtgtcaggattgtgtttgccaggccgtcctctatcagatgccggtcaagccccttgcatgctcgccgcatccatccaaagtcctcatagaagggctctagccaggtgctcaagagctggcaacgggcctccttcgacaccaagatctgtcccttgccaaccccgacaaagagccttgccgtcactcggctcacttcatagcggtgtattgctggcactttgcgatgcatctctgctagctcagtctgcattgcccatgtcctcaagaactcctcagcaatctggcgctcaacaaggatgtcgagcatccaatgcaggttgtcagcttgcctggcgatctgcgacacctctgaatgatcaccccctgcagctctaacaaactgctcgagcagcaaggacaagcatccattgcacgccgaatagagtgactccttgcggaggtcgccaccaattgctccgccacgggaattgctgttctctctgagcattttggacaccagccccttcatctccctccttgccttttcgtccttcccttccaggacaacctgcagcagcctcagcaacacctcctcgccacctccagcagtgccaccgccactgcaactccctcctacctctgcctcctcaaccactgctgaaggggccaattccagtgacaccctcttgagcacctctccagcccccgagttctcgaggtgcagctgcgtcaacaatgccgccaccttctcatcatcatcctcagcccacggcgcagcctccaaatattccaagcaagatagcaccccagcatcgaacacaatggctgcggacacctttagaatgccaaggaccttgttgacatcctcccgcatgagcctgcggcggagatccttgcagtacatgaggcgcagcgtctcggcgtagacctcgatgtcgtcgcagtcggagatctcgacgatgtgcgggagtgtgcgctgctgcttggaccagcggtcggagagcttggcggcgaagaacctgctgtgcgcgacgagtatgtggcggtggacgcagagcgtgacggagaggccgtccttggaggtgagggtgaggcggacgtcggaggagtcggcgtcgttgaactggttccctgggctgcagctgccgatgaggtcggcgatgcggtcctggagcatgaccttggcggtccatt

SEQ ID NO: 17110 - DNA, 253 bp, Setaria italica
  Peptide Sequence Number=SeqID_83084
cgaacagagagctccactccactggacactactgacctaaactggccccgctcccgctgccccaccactccttccaccgagcatgcggcgcctgctggcctccgccgagcacctggccgcggtggccgccgcgacgccgccgccgccgggggcgtcggcaggcgtccacacggacacgttcctcatcctcgccgccgtgctctgcttcctgctctgcgtcgtcgggctcgccttcgtcgcgcggtgctcgcgg

SEQ ID NO: 17111 - DNA, 349 bp, Setaria italica
  Peptide Sequence Number=SeqID_83085
cacaaatgattgtaactgtgcaattcatgagtatcattagctgttcattagataaacagaactggtgcactggaagaccctgcttccttctctataactgagacaaatgggtcgtgcactgacagaaaatcttgctaattactccaagactgatatttctgcagattcatgggttcgatgtagtagttgtagtacgatgcagccatcggatgttaacgaacaccattcaccggtctccatgttttcgcctttattcaacgccatacctctttatcctgcaagagacaatagcgggaccagaacacaggacaagacaaaaacatcagttgggaataaactctatgctaat

SEQ ID NO: 17112 - DNA, 612 bp, Setaria italica
  Peptide Sequence Number=SeqID_83086
atttgttgatctgttccaggttaggaattgattgtaactgtgcaattcatgagtatcattagctgttcattagataaacagaactggtgcactggaagaccctgcttccttctctataactgagacaaatgggtcgtgcactgacagaaaatcttgctaattactccaagactgatatttctgcagattcatgggttcgatgtagtagttgtagtacgatgcagccatcggatgttaacgaacaccattcaccggtctccatgttttcgcctttattcaacgccatacctctttatcagccttgaggttcctgcaggctggtgccctttctccaacaaagctaaggatgaagattatgggagcccacaatcgagtgagagttatcaccagcaactcatcatcgctctcatcacctgcaaaaaacattgaggcgtcacaagcgcagaacaggctgctagtctgtgatgttcttgaagaaggtacagacaaattgcttatttatttgtttatttaccctttttcctggctaaagtcaataacacatccttacatccttcttgttttgcaaacagtttcagacaactcagatggcaccaaacgtgcttctagcta

SEQ ID NO: 17113 - DNA, 693 bp, Setaria italica
  Peptide Sequence Number=SeqID_83087
ttttttttttttccaaacaaaactctcatacatgtattgatattcataagcccgtcgaaaaagggacgattgatcagtacacgcatgtactattacaaagttagaaaaacatcaaaaagaagaggaaggccatctctctcgctcactagcttctgcaaggcatgaagctagcgagcaggtagtttgcctttgttattcctgtcagaactcagaagaacaggacgggaaaaacctgctctcgacacacacacgcacgcacacactaccaaaccttgtactcttcgatcatggtctctttattttccgggacgcgaaaaacctgccctgctctctaaacccagagcgcgccggcgttcatgagcatgggcacgagctcaccgccgaggtggagggacatgatcctgttggtgccgccgacgagcttgcctccgatgaagacggcagggacggcggggcccctgccgccgagcatcttgagcagggcgcgctccatctccttgcccctggggtcgctgtccagctcgtgcacaagagcgttcacgctcaggtcctgcattagcttcgtcaccgtgtggcacatgcagcaggagctcagcgtgaacacaaccactgccctctctgatgccagcttcatcacgcggtccatttgctatgctttggtttcttggctgcaagaagtgatctctctaggtc

SEQ ID NO: 17114 - DNA, 435 bp, Setaria italica
  misc_feature (405)..(405): n is a, c, g, or t
  Peptide Sequence Number=SeqID_83088
tataaacctaagaacattcttattacgggagctgctggctttatcgcctcccatgtcgcaatccgtattaccaagaagtaccccgattacaagatcgtcgtccttgacaagcttgactactgttctaatctgaagaacctgctccctgtgagctcttcaccaaacttcaagtttgtcaagggcgacattgcaagcgctgatcttgtcaacttccttcttgtcacggagaacattgataccataatgcactttgcagcccagactcatgtcgacaattcatttgggaattccttcgaatttaccaagaacaacatttatggtacccatgttcttcttgaggcctgcaagatcactggacagatcaagaggttcatccatgtcagcactgatgaggtctacgggganacagatgaggatgcagttgtggcaacaagg

SEQ ID NO: 17115 - DNA, 1917 bp, Setaria italica
  misc_feature (46)..(46): n is a, c, g, or t
  Peptide Sequence Number=SeqID_83089
tccctgtgtgtccttggtctagttctcttttagttttttttttttntttttttttttttttgttcaatgctgcgaaaccagtgtctcattgttgagtatcccaatacgagtacacgcagctcggcagttcgcatgtccacaatccacattccaacattgtcttcacatatactgcgatcggcagcgcatgctgccgcaggtgaaattttcttatgtacacaatcagagtagagccactccggttcacgtttcacacattctttcttcttccaacggagcacgagcagcgaacgatgagagcttactatagagcgaccgtgtgttcgaggcgatgcttactgatcgtgaggaaccaagggcgaagacgcagctgcaggcctgcagccttcgcctcctcactcactgggaggcgtcggcggagtcgtccgtcggctgccagtaccggttggtgaaccacatggcgtcggcggccaccgcgctgccgtcctggttgcggtgccaggtgtagtacgcgtgcgtccggttcttgatgtccaggatggcgtgcccgaagctcgcctccctgaaggccgagtacctcggctgcggctccgacatgttggtggcgagtccttcctggttccctccatcgccaatagtgatgtagactggcgccgattgatcaggaactggagtgcacaggccattcacaacgttgtatgccacatttgatactctgtgtgtccgctcataggcgtgcacatgtcctgcaaacacaagatcaactttgtacttgacgaaccacggctcatacatcaccctcatgctttcaccttccatgtagtgatagttgtagctattgtaccatggagcgtgcatgagaacgatcaaccagggtgtttcactcctgttgaccttgggaaactcagcttcaagccacttgtactgtggagtgtattttccatatgatgaatatgatgccaagacaataatgtaagcagaggccctcttgatggaataccagtaaggtgccgtgctaccagaagctttgtaaggtgtggggtacctgttgctgtatggcttgaatggctttgtttcaccaagttcaggagcaaaatctatctcatgatttccagctgtccagatccatggctggtaagcgacgttcctctctacaaatcttgcccacgtatcccacctcacattatcatgatatgggtagttatctgcatatgacaggtctccgacaaatagcactgcctgcgcttttgaattggactcgtaatgagcaagcgtaacatttgagtcaaagctctggcccagatcacctacgagaccaaatgtatatggaacatctgggccgctttttggaggggtaatgaaccaaaacttcctcactgtttgcccaattccaacagcatagtaatactttgtgtcaaactccaactttttgattgtgcaatgatgaatgtatcctgaggtatagttgtagaacgtatactgagtattctttccatttgcagtatagttgaggttgtcctctgaagtcccgtagaccacagtactcgagccaggctcacttgttgttacccatgagattatcatggctgtgccatcgtggttgccttgtgtgatgtgaaccttccagagcacaaaatcaatcagcgtcagagtggagataccccactgactgtatgtgagcacaacagcatagcacaaaaggaatgaacatcaatctcatggaaaaaggcatcataatatttaaattctatggagtgtgaaataagattaagaacaaaaaaaagtgagaacaaagatagcccatgaaaaggcaccctacagtccataagaaacaagtacaaacacagatatatgatggacgaccattacaagagttgctgataactttaagaacgactaaaaacaaaacaaattagc

SEQ ID NO: 17116 - DNA, 291 bp, Setaria italica
  Peptide Sequence Number=SeqID_83090
cgagtacgtccgcctgtggtgggaccccaccgcgatgcgcggccacgtctggctcgacgcgggcgcgcccgccgctccgggtcccagctccgcctgggagggatccctcccgccgatccgggtgtccgaggacacctccaggttcaggtacaccaaccccacgggccacccgtcgggactccggatcgcccgcatcgccgctgaggccgtgcggctcgtcggcggaggggcgggcgtgcggtgggtcgtgcttgtcgacgacgacaccgtgctgtgcgcggacaacctggg

SEQ ID NO: 17117 - DNA, 220 bp, Setaria italica
  Peptide Sequence Number=SeqID_83091
gaaaaacttttgtgctaacattgcaaaagggatatcccaatatcatggtcgcctcatcgtgaatcttgcgagcgaaacggacatcggaacagactgcttttcgtttgttgtgtttaacattgtttagatggaaggtttcagattcactgattgtatcttgcacacgttgaccagattcaatcaatacagctgattcggtgattcctgaaaaaaaaaaaaa

SEQ ID NO: 17118 - DNA, 429 bp, Setaria italica
  Peptide Sequence Number=SeqID_83092
catgaacatcggcatcgtcatacataagggacaatatcgatgtgtctgtgaaatgaaatatgttgtgacctgggacatgcagtcctgtggtggagaccagcttcgtagaagctgttatgcgctgggtggggagcagggtgtctgttggtgaatcgaagctctgccacacaacaatgccgctggagttcttcatgacaaggttcccagtatccaggagctgagcatactgcacgccagctgagtcgccgccttcggcctgccacaccaccgcaccgtcgtagtccgtgagaaccaaggcgccgcccttctgcagcgtgaccgccgccgccctggcgtgcacggggcgaccacggtccgcagtccagaagacagtgaaagttcggccgtaacaaaaaaaagtaaaaaaaacttaaaaaaaagtaaaaaaaa

SEQ ID NO: 17119 - DNA, 843 bp, Setaria italica
  Peptide Sequence Number=SeqID_83093
ccacgcgcgcgccgcgcacactggctgcacacatggacgcgagccagggcgtcctcctgtccagcgccctggtcggcgcggcaaagggctcggcgtcgtggccggagctgctcggttccaagcactgggacggcctcctcgacccgctggacctcacgctccggcgcctcatcctgctctgtggcgacctctgccaggtgacctacgactccttcaactccgactcccactccaagtactgcggcagctgccgctactcccggtccacgctcttcgcccgcacgctgttcccggccgccgccgacgtgacccccgcggcctacctctacgggacctcccaggcgtcgttcccgggcggcgtcatggtgttctcgctctcccgcgaggcctggagcaaggagtccaactggatcggctacgtctccgtgtccaccgacgccgccgccgccgccacgggccagcgcgtcatctacgtcgcgttgcgcggcaccatccggaccctcgagtgggtggacgtcctcaaacccgacctcgtcttccccgatgccatcctgccggagggccacccgggcgcccacgcgcgcgtcatgaaggggtggtacctcatctacacctccagcgacgagcggtcacccttcaacaagcacagcgcgcgggaccagctggtcgccgcggtgcgcgggctggcggccaggtacaagggcgagagcctcagcgtcgtgtgcacgggccacagcctcggcgcgtcgctcgccacgctcgccgcgttcgacatcgcggcgaacggcgtgtgcggcgccgacgtccccgtcacggccatcgtgttcgggacgcccccagagt

SEQ ID NO: 17120 - DNA, 397 bp, Setaria italica
  Peptide Sequence Number=SeqID_83094
tacaatcgtgttcgggagcccccagatcgggaacccggagttcaaggagcggttcgacgagctgcccaacctccgcgcgctgcacgtcaggaacaagcccgacctgatcccgctgtacccgagcggcctgctgggctacgccaacgtcggcgacgtcctgcccgtggactcgaagaagtcgccgtacctgaaggagaacactaccaacgtcggggattaccacaacctgcaggccatcctgcacacggtggcggggtggaacgggaaggacggcgagttcaagctgcaggtgcaccgcagcgtggcgctggtcaacaagtcgtgcgcgttcctcaaggacgacaacctcgtgccggagtcgtggtgggtggagcggaacaagggatggtcatcgggg

SEQ ID NO: 17121 - DNA, 536 bp, Setaria italica
  misc_feature (17)..(17): n is a, c, g, or t
  Peptide Sequence Number=SeqID_83095
ctgcatcagtttctganaaaccatcctcccagtcctttagctgttcacggatagatggcacatacttcagtacatcatcatatggtggggatgactcaactagtccagtatgataagaaacatctactttgcgcagaaggtccaatagctcgggagaggaactcaagacttccaataccttgtacaccattagaagcactgaggcaacatcagaatggataaacttgtgagcaaaccccaggagatgcacaaccatggagctgtagaacaagtaatttgaaagaacatatgtcttccacgatgaactgtataccatgttggacttttgcagctcctgctccttccctgcttgctgcttgccataaccatccagctcctcctgggtaaccttccatggctccatatatgccaaccacacggagaagacttgcattgctattttttatcgcagcaccaacgggcagaataaaaatgttcttagcacaaagcgatacagaggcctctgtatcaacggattccaaaaggcagcctgtgta

SEQ ID NO: 17122 - DNA, 274 bp, Setaria italica
  Peptide Sequence Number=SeqID_83096
cgtccatgcgcgaggaaggccagccaagcttcagggagctaggagacacccctctcgacatccacggcgtggtgcccttaccggcttcccacctctgcgctgaactgctcgaggacccggagagtgagatctacaaggtgatgatgaacttcatgtgcaggaacacggaggccgacggcatcttggtgaacacgttcgcttcgctggaggaacgggcggtgggagctctcagggatctgcagtatcttcttcccggcgcagcgagcgcaggatc

SEQ ID NO: 17123 - DNA, 625 bp, Setaria italica
  misc_feature (1)..(22): n is a, c, g, or t
  Peptide Sequence Number=SeqID_83097
nnnnnnnnnnnnnnnnnnnnnntttaacaaagcataatactttcattccacaaggccaatgagttacaattgacataagttgtccaggttgcgactaacagcctgttcaagtaaaaaaaaaaagaaaagaaagcaaagagtaagctagactactcaaaatttccatggagtctttccagctgaacctcctccatagcaggcagtaggcaagataccttgattagatactgctggggtacatgaagacacggaccttcttacccatggagctgggcgggaggtttgaccggaacttggcgcgcactacgccggagttgccgtgcgggcgcgtgaccttaccccagatgcaccggatgcttgtgccgtcgctcttggtcttggccttgtagacgtaggcgatccgcttgccgccgtaccacgccacatcctgcttggtgctgacgccctcgatctgcagcagcgacgtgttctcgtactggttcgacttggaccgcttgtagcccaggatcgtgccccgcacgtacatcctgacgcgctggccttggcgccccttcaccatagtcgccgccgccggaggcctcgccgacgagggtttgagaagttagagacgggggaaggaagtgac

SEQ ID NO: 17124 - DNA, 531 bp, Setaria italica
  Peptide Sequence Number=SeqID_83098
ttttgccattcacgtaacttacattgagtaacaaatgaaacagcatgactcacatcatcaagcgagtaacaaacgctcggcagtcaggaaagaaagaacgaacgaacaaggctgcaaatcctagcaagccatactatctttcaacaattcttggttcgcctcaccatggccgatcgactcgaccggcaatggtggcgcagcagatgttccgacggctggatcaagaagaagctctgtcggcctcgctcgacgcggccgccttggggtgcaccttcttcttcatcagcccgaacagccctccttccctgctgccgcctctgcttcccgaggccttcctctccgcagacccggagccctgctgcctggtcttcttctcctcggcagcctccatgcgccggagcttctccttgtaggcgttcttgagcacgtacgcctccacgaagtctcctcccatcatggacgccatctctgatcctctgttgggtcttactcaggaagcttggtcgtaggcgtagcttggctgcgcgctct

SEQ ID NO: 17125 - DNA, 591 bp, Setaria italica
  Peptide Sequence Number=SeqID_83099
aagaagtggttaccaaggtgtgaatcatctgaattgttgtttccagcatggtagtattcatcaagcttcacttgagcgattgatgccttgaacctaacattttctggataggtctgtagatcaagatgaattttctgacacttggcttcgagatgatgcatatttaagctggacgcagtagcaggagatacaattgatttctcaaaatgctgagaggaaaggcagctcgaaaacatttcagaatttctcatatcatccaatgcactgacaggaacactggaagcgtcgatatccatgtcatcactgaacaaaagaagaacagatacctcagcaacggaggctcgtagggtcttctcaatcactggttctttaggaacttgatctgatccagaagctaaggttgatgcaaaacttatggcattgaatactgaacaagtccagtcccatataccactgtttcccaaactagattgggagttcctcaattcctcaaaacattcaaagaattgatcaatgctttcatcacaatctgaatcagggtcgccttgatcctcagaggcaacaggctccatccagtctgttatttacatt

SEQ ID NO: 17126 - DNA, 263 bp, Setaria italica
  Peptide Sequence Number=SeqID_83100
ttttttgtatgtcgaagccggtgattatacttgtgatgtgaaaactgggtttgatggcataaatctgtttcgtctttgcattgcaaattcgaaacaaaaacagctgatccatgaaagatggatcagatacgtacaaactttatacggtaacatgcctaaaccatcaagggtgtaacaatatatgtaatttgttgatgtgaagttcttaaaaaaaaattgaaagaactccctacgtctgcactgagaacgccatcacgagcagg

SEQ ID NO: 17127 - DNA, 388 bp, Setaria italica
  Peptide Sequence Number=SeqID_83101
ggcagtcagttctttatatgaaaagggactttttgggttcgtttattgatttattgggctctggaagatttgatagccaagtgtagtgttatcgctgcattaatctcttctggagatcagttagcttcgtaattttgcatgggctgacgatcttgaacggaaaaggatatttgttgatatactgactgattttggtttcttttaatggagaaggagttttagctgttacaatttgttcttgaaatttaaagctttctaaatgacgatgctctcttctatccaacgtagattactctattgactgaaggctttttacagcctgattatttctgttgtttcgttaggatggaggagtttttttttgtgacgtagtaaaaattagactaga

SEQ ID NO: 17128 - DNA, 1055 bp, Setaria italica
  Peptide Sequence Number=SeqID_83102
ctattctaaacctgtggcatgattgcaccatggaagataagcaagaagatttccgtaaaaaggaggaagaagtcttaagaggccaggaattggaaaatgcagtgtcagatgctgactatacaaaagcaatacaacttgcatttgagcttaggagaccacacaggcttctagagttattctcacagcttgccaggagggctgattcggaggatccaatagaaaaggctcttcttggacttccaaaggatggcctccgtgtgcttcttgagtacatccgtgaatggaatacaaagcccaagttctgtcatgttgcacagtttgtgctttttcgggtattgaggactttgcctcccaccgatatcttggagataaagggtatcagtgagctccttgagggcctaattccgtattcgcagaggcatttcaacagagtcgatagactagtgcgaagtacatttctgttggactatacattgatgcgaatggccgtggtagatccagatgttgatgcgggcacaaccaaagatgacatgaacggttcatcagtggagaacaatgaaaccgcagaggctcagcctgcttcgcccataacagagaagtcgagcaagaagagaaaacagggcaaatcaagcaaaaagggcaaagagaagaaagtgaagcttgcttcgaaggatgtttcagttgaggcctgaatacctagctaagaaaattgcttacgctcaccaccaattttgtagctgctgttgtgagttataactgacattgcccaacgacacaaatcctttctgatgtactccctccgttccaaattataggtcgttatagtttttctagatgcataaatattattatgcatctgtctaagtgcataacaaaatctatgaatctaaaaaagtcaaaacaatctataatttgggaccgagggagtaaatgcattctttgctgagttcagaagatccccggtgcttaaggcacgcgcgggtatctgatccaaatttcctgatgaacctattacagtgaaaccccagatgagttctcaaaagtttcagtcctta

SEQ ID NO: 17129 - DNA, 1103 bp, Setaria italica
  misc_feature (1080)..(1103): n is a, c, g, or t
  Peptide Sequence Number=SeqID_83103
cgactacatcgagggggggccaaagttaagaagatggtatggagcacccgatttgcttcccaaggatgggggtgctgaggatgaggaggaggactctccagatattgtggagcctcgagacgctgttctagtcactgatggcgacagtgagattggacagatggtgatattggcactaattctgaagagggctagaataaaagcacttgttaaggacaaacgatcgactgaagaagcttttggaacttatgtggagtgcatggttggtgatgtggaagataaatccttcacaaagaaagcactaaaaggcgttcgtgctgtaatttctccagccaatgacggtttcttctctgcaccgattgacctcaagggtgttgaacacattgttctgctatcacagctgcctgtctacagaaatagtggtggcttgcaagctattatgaacagcaaactgaagaagctagcagagagggatgaagaagtggttctctcatctggcatcccatctacgataatcaggactggttctctgcaaagcacccctggtggtgagagaggtttcgattttacaaagggcgtagcagccaagggaagaataagcaaagaggatgcggctaccatctgcgtggaagctctggatggcattccccgaaagacactcatttttgaggttgcaaatggtgatgagaaggtagcagactggaaagcatggcttgtagagcagattaaaagagatgaagaggtacagtaaaaactggaaagtgtttctcctctgtcgaactgtgagaaaggaaaatagaaacgagcccaaaataagggatttgaagactcaaaagagaaagagctaaagttttaccttagatcttctagcctgtgtggctattttattttaatcatatacctgaagaaacaaaagtgcgtggagacgtggaggcacatctacctcagcctccaaggaggctatgcacgtctctgcagcagttggtctaattcaatatcttgtactgtgaaactgcagctcaaatggtgttacaattctaatttttttgtttaatcatccatgagtgtttctgtgaaacnnnnnnnnnnnnnnnnnnnnnnnn

SEQ ID NO: 17130 - DNA, 421 bp, Setaria italica
  Peptide Sequence Number=SeqID_83104
tccaaatcttgatggttcgatcactgctgccactaacaagatttggacctgggatgatacgcttgatgatgctgatgatgaagttcctctcagagctaaggctgttgtagctgcacatgataaagatattaattctctgtctgtttcacctaatgatggccttgtttgcagtggttctgaggaccgaactgcttgcatatggaaactccctaacctggtgtcctctgttgtccttaaggggcacaagagaggaatctggtcggttgagttttctcttgttgagcaatgtgtcatgacatcctctggtgatagaacaatcaaaatatggtccgttgcagatggcacgtgcttgaagacatttgagggtcatacatcaagtgtcctgcgagcttctttcctttcacgtggaactcaagttatt

SEQ ID NO: 17131 - DNA, 810 bp, Setaria italica
  misc_feature (534)..(534): n is a, c, g, or t
  Peptide Sequence Number=SeqID_83105
tcgtactaggtaaatttggttggtgaaggggatgagccggaatagcggcgcccaacttcctccggcgacggcgagcggcgaccgcctggcggtcatcgcgtctcacttatcccactctcggctcggcagtccggcccacatggccggcgagaaggaagccgccctcgccgccgagcccgtcgacggtcccaccattttcgacaaaattatcaggaaggagattccatctcaggtggtttatgaggaccaaaaggtccttgcattcagagacatatcgccgcaagctcccatacatattataatcatacccaaggttaaagatgggttatctaggctgtcgaaggcggaagaaaggcacatcgagattcttggcagtcttctatatgctgcaaaggttgtagcaaagcaggaagggcttggcgatggcttcagaattgtcatcaacgatgggctcaaaggatgtcaatctgtatatcacctacacgttcatcttctcggggacggcagatgaactggccacctggatgagtttgngtcgccgtttcgacaggagggtttacacgttaggaatcctctctaacttgcggtaagatgcatactgtaatactgttcctgtaaactggactctgtaaatgtaattgagccaatgctgacagcgtacagacgcagaggactccatgggacatgtataatcgttagcaaagcataacggaccgttcatttgcagtttttaaagtgttgtaaagcatgaagatggagaacaatcatccctatgattctgtatgcggatatcatccgtttcccttcaaa

SEQ ID NO: 17132 - DNA, 244 bp, Setaria italica
  Peptide Sequence Number=SeqID_83106
agtatctccgccggttcctcctcgtgcctgctttgcaccatacacctacacgccgccgctgatactacgctctatagctcttcggtgcagacctcgatcgattggccggccatcgctaccacctccgagcacgcgcggcccccgcgccggtgtcgtcccgctttccgtcacgaccatcgtgtcgtgctgcaaggcctgcagtgcgcgaccgtgaggatatatcagccacgcgatcgcgggggag

SEQ ID NO: 17133 - DNA, 286 bp, Setaria italica
  Peptide Sequence Number=SeqID_83107
gccgcggcaactcccaccgcgtctgccgccgctgcagccgcctcacttcaccaacctcacgcgcccgccggctttgctgccgtccactacgcctctcccgctgctttcctccgggcgccacggccgcgccgcggcgccttaaaccctagatctgcgccccccgctccacactggccgcggacgcatcccgacgccggcgcgccgccgatcgccgcccgtcgcccgatcccagtttgtaggtttagttgcccctagtttggatagcttccttcaatgcatcgtgtta

SEQ ID NO: 17134 - DNA, 959 bp, Setaria italica
  misc_feature (1)..(71): n is a, c, g, or t
  Peptide Sequence Number=SeqID_83108
nnnnnnnnnnnnnnnnnnnnnnnnnnnnnnnnnnnnnnnnnnnnnnnnnnnnnnnnnnnnnnnnnnnnnnnctttagttttttttttttttttttttcttgaaaaactcgattttctataatttgcttcaagtttgaacacattgcaaccgtgattctttcaatttgtatacatggaaaaattcacgtggttctctcctgaaacttgtgccaaaccgtatgtttttttagataatggaaataggttctggcctgtgcgaccgcgcagagccaaaacgtatatacatcctcaattctctctccttcagtacgaagctgcaagtatgcaagcccggagagatgatcgagaagcaatttgagtgtagctgtggttgccttgaaaatgtcagcttggtcatttttctgcgtccgggtcaggctcaaggcctgcgatttgcttcagtggcttccaaataaatttcctccaattgccgcattccgcaatcaccctgactttggggcggaggtccgggagcatggccaggaactgaagctcagccttggatagaaccttggcttcgatgacccagacgacgaggcccttggcgtccgggtgcagcaggctgagcctgtagtccacctccggcgggaagtaccacctcgccaccggctgcctcccgaggctcggcgggcagacggggtggatcttggtgagcgtggtctccgggtcgccgaggccgcgcgcggtgaggtcgaggaagtagtagccctggtaacggaggttgttgaggtagcggccctcgtagccgccctcgtggggcgggtagattgccagcgccttgtgcttctccacgtcgtccagccaccgcgccatgtcgggcttcaccaggtccccgcccacgaagtcccacagcgtgctccgcaccgacaccgtcgccgcccggccgccgcccccgcgcgccgacccgccgcgccgcccgc

SEQ ID NO: 17135 - DNA, 467 bp, Setaria italica
  Peptide Sequence Number=SeqID_83109
gaagtatacctatatcggcatgcctgcacaacagagaatacatggcaaatgtaccaccttcaccatgatcgttggcattgagtgctatgcctacatacttgacaacaccaatcaaagtaagagtccaaaacattatgctgtataatcccatgtagtcatcttttgtgggagatgccaagttcatcgagggataaacatagaggggagatgttacgaggccaccaaagacaacaccgagagtcttataagcaaggaataggtctttgcggaaatttccaccctccgtctccgcccggtcccggtcagccgcggccgcggccgaggcagctgacgcgccgccgcggcgggagctgaggtggcccgcctcgagatccacgtgtgccccggtcctcatgtccagcagctggggagagcgccgggggcggagccgaaacaaaaggcgccgtccggcctagtgctacggacga

SEQ ID NO: 17136 - DNA, 533 bp, Setaria italica
  Peptide Sequence Number=SeqID_83110
gccggtatgacgagcaccggcggctcggggcgcggcgacacgggcgccgaccacgcgtgcccgccgctcccggagaaggactccgacgaggacgacgccgaggatgaggaggaggacgcggagccgacgttgttgttggcgttgaagctgttgtgctcgagcaccgagatggggctggagctgcggaagatcgcgtcctccatcttttccggcggcagcagcgcgacgccggcgttgttggccgccagcgcggagctcttgatgggggccgggcagttgatccccgggaacgccggctcgtgcgggatggaggcgtcgtcgaagagcagccactccagctgcgccatgtccatgtccagctcctcgcacgagccaatgtggccgccaacgtccttggcgtcgaacaccggcgccccagcggcggcgaagaaggcggtggcgtcgtcctgcgccgcgggcgggggcagcgccatcagaggctccatcgcgggggcgcgggcgcggactgcgcattgttgccacgggcgccgacg

SEQ ID NO: 17137 - DNA, 260 bp, Setaria italica
  Peptide Sequence Number=SeqID_83111
gcggggaggcggcggacgggcggccgcagagggaggcgcgggtggttgcttctgcaggagggaggcgcggggtcggaggggtatctgggggaaaattggcccgcttgcgcagagaccttgggaatcaaatccaattgtatctactgagattgaacttgccgttgagaagaacctaacagaatcatggatgaattgattacatcattagggcagtcgcgcagcaaacaatcggcaagtcgatggtggagagatttacgaag

SEQ ID NO: 17138 - DNA, 434 bp, Setaria italica
  Peptide Sequence Number=SeqID_83112
ccggccagctgcttcccgacctgcccgatcccgccgccgtagaacgcaccgcggaggcccggcacgggggactcgatctccaggagcctcggcgtggccaggagccccgtcaggatgccgcccaggaaccccgccacggcgtgggtgtggaacaccgccagcgtgtcgtccacccgcatcagcagcgccgacttcttgtgcaggatcatcatggtgaaccaggggacgctgcccgcgaacacgcccatgatcaccgccgcccacgtctgcaccagccctgctccgggggtgatgcagacgaggccggtcatcatgccctgcacggcgccgatgacggacggcttgccgaagaagatgacgtcgaggcaggtccaggtgaggaggctgggtggcggcggagacgttggtgttgagcacggccacgggacgccgcg

SEQ ID NO: 17139 - DNA, 820 bp, Setaria italica
  Peptide Sequence Number=SeqID_83113
atgagggtgagactgctgatgtggtccagatgctgccgggaactgtgattgctgaagaggccattgaagatgcttctactgaagatgatgatttcagcagtgaactaccaccagagtttgacaatgtagtgttcagcgattctgatactgagagtgacattgctgctccggtgctcgaagaaaaccaggttgttgcatctgcaaccaagactgctgtgaagtccctggatgattctgccatcactgaagagcaggaggaagaggtttctgaagaggctgatgctactggaaaagcaatgaaagaggttgacaacattgtgaagtccctggttgaaatcaccatcaaggagggagaagcaatggaggaaatgcagaagctgccacaagttgagaattatgaaagcatgagcttgaggaagcttagaaccacgtacaaggagcgtgttattgcttcaaaggaagggaaggtggtcgctgaagggaagaggctgccgcttgaggaggtggatgagaacgccagcgccgactgctgaacggcaccaggtggatgaactggatttgaatgccatgggatttgaataaaggaatgctctggttgtgaagtgataactaggctaccgttcatatccaaaagttttcgtgtgtgggggaggtggtgatcagatgctgaaactgtggtttcagccaaccaacttgtagttcgtgttggttctaaccttttttttcttctttgttttgtggtcgtttcatttcggttacatggtttacccggtggatatgggattatgttcagttgaagtatagtttgaaggtcttgagt

SEQ ID NO: 17140 - DNA, 265 bp, Setaria italica
  Peptide Sequence Number=SeqID_83114
aatatgaagaagggtgatggcctgaaactgaaaattgccacaaaactttatgacacctgatgtgcagccagaggtaaccacatacagcacagcatccagagtagattttctttatatctatatataacagtgccgtgctttcccacaccaaacattaaggaaaggccagtaaatactgattctcatatattgcactaatttattggccttggcactccaagaggttctcaagaagcacaggacatgggaaacagtaagtaaacta

SEQ ID NO: 17141 - DNA, 435 bp, Setaria italica
  Peptide Sequence Number=SeqID_83115
aaaagagctaagcacgcagccgggaagcaggttgacagctcggacagtggtgacgcaaaagataagaagaagcagaagcatgccgatcatacagctcaggacgatcctcatggaggagccctccagcaggcgcttgccaccgagcgccttaagagcctcaagaaagctaaagctcagattcagaaagagatatcgcagtcggatccctgcctgtcgggctcggacaagcggaaagataagatgctggccatgctggttgaagaggagccgaagcgtaagaagaagacactattgccgtctcgagggcctaagaagatgtcggcacctagactgaaaaccatgagttacaacgatgacgacgactttgacgcagtgcttgatggggcatctgcaggatttatggaaactgaaagggaagaagttgatcagaaaggc

SEQ ID NO: 17142 - DNA, 273 bp, Setaria italica
  misc_feature (225)..(225): n is a, c, g, or t
  Peptide Sequence Number=SeqID_83116
acccgccgcgccgacgccagcctcatcgccgcctcgcgccgcctcctggccgcggcgctgctcgacgaccccgccaacgcctacttcgcgctgctctcccagcactgcgtcccactccactccttcaaccgcctctacgccgcgctcttcccgccctcccctcctccctccgccgccgcgcgccaccggcggctccccagctacatcgaggtgctgacggggganccgcagatgccgtcgcgctacgcggcgcgcggcgagggcgccatgccg

SEQ ID NO: 17143 - DNA, 210 bp, Setaria italica
  Peptide Sequence Number=SeqID_83117
aggttcaaatacactctccagttcaagaaattctaatatacaacaacaaaaatgtgggatgagggcaaaggaatcctatctaaaactacaagtgcattgctcgttcatgttctgccgagggactgctcaggagttaagagaccatgagaagctgcatccgtactgaaggataaacaggccttttgctactgactcatctctgatcagagt

SEQ ID NO: 17144 - DNA, 382 bp, Setaria italica
  Peptide Sequence Number=SeqID_83118
aatgtatgaggtcatatgtccttgggtaagtagaaaatccttcacaccagtcatgatacattcctattaatccacgttcgtagattacacctaaagtggaagtatttgcaattgttggaatgacattcatgacccacaactttggggattccagtgcagcagcgaagctaccaagacctgcattcatgtccattaaattgcggtatcttccagtatcaagcaagttattggttttcttgtaagccttaacatgtttctgccaaagtttgtataacccctcttcctgaggttaatagtgcatcagaggttgctggtggtcaattagagccttttcccaagaggctcaattcagtatatcctaccttaactttcgtttatttaa

SEQ ID NO: 17145 - DNA, 614 bp, Setaria italica
  misc_feature (29)..(29): n is a, c, g, or t
  Peptide Sequence Number=SeqID_83119
ttttttttttttttttttttttttttttnttttttttttttttttttttttttgggctcgaaatggttgtcattcaaatcaaataggaaacaaccttataggttcaaatacactctccagttcaagaaattctaatatacaacaacaaaaatgtgggatgagggcaaaggaatcctatctaaaactacaagtgcattgctcgttcatgttctgccgagggactgctcaggagttaagagaccatgagaagctgcatccgtctgatcagagatgagtcagtagcaaaaggcctgtttatccttcagtacgtccatcagcagattggcaccagcagaataaccaaatcacaactaggtccacataatttactctcctccagtgtgacttttttttatatttttccaattaaacacagccaggcaccaagttatctgtgtgactggagaaaaataatctgaacatcgttagctgctcttgcttgtggtagcccagtactgcttgactggaacttccaatccccaaagttgtgggtcatgaatgtcattccaacaattgcaaatacttccactttaggtgtaatctacgaacgtggattaataggaatgtatcatgac

SEQ ID NO: 17146 - DNA, 857 bp, Setaria italica
  misc_feature (2)..(2): n is a, c, g, or t
  misc_feature (4)..(4): n is a, c, g, or t
  misc_feature (7)..(7): n is a, c, g, or t
  misc_feature (11)..(11): n is a, c, g, or t
  misc_feature (18)..(18): n is a, c, g, or t
  misc_feature (31)..(31): n is a, c, g, or t
  Peptide Sequence Number=SeqID_83120
tntnttntttnttttttnttttttttttttnttttttttttttttttttttttacaacagctcgaaatggttgtcattcaaatcaaataggaaacaaccttataggttcaaatacactctccagttcaagaaattctaatatacaacaacaaaaatgtgggatgagggcaaaggaatcctatctaaaactcaagaaattctaatatacaaccaaaaaattatgagggcggaatcctatcactacaagtgcattgctcgttcatgttctgcccgagggactgctcaggagttaagagaccatgagaagctgcatccgtctgatcagagatgagtcagtagcaaaaggcctgtttatccttcagtacgtccatcagcagattggcaccagcagaataaccaaatcacaactaggtccacataatttactctcctccagtgtgacttttttttatatttttccaataaacacagccaggcaccaagttatctgtgtgactggagaaaaataatctgaacatcgttagctgctcttgcttgtggttgcccagtactgcttgactgcaaagagtatcttctcaggcacatgagggccatcctcatggtcagccaatcttgttttccacctcatggcattggctattttctctacctttacaagagcatcaaccttatcacgtactataaccgcaccctcagggcgtaagattcggtccatttccaggagtatatcttcaaatttacacttgtttggtacaaactgaagatggcattagaaatgtatgaggtcatatgtccttgggtaagtagaaaatccttcacacctggaccaagaataatcatagtatagcgaacagata

SEQ ID NO: 17147 - DNA, 1656 bp, Setaria italica
  Peptide Sequence Number=SeqID_83121
atactaatacgggaagaaggacaattagtaccgaccggaataaaggaagaagctttactgtcttattccagcaccaaatggttatgttgctcctttccgatggccaaagagccgtgattttgttccttatgccaatgtacctcacaagagccttacggttgaaaaggctatccaaaactgggtgcactatgagggaaatgtgttcaggtttcctggtggtggaacacagtttcctcagggcgcagatacatatatagatcagcttgcttctgtcatcccgatagctgaaggcaaagtgagaactgctctggacactggttgtggggttgccagtctgggtgcatacctgttgaagaaaaatgttttgaccatgtcatttgcgccaagggataatcatgaggcacaagtacagtttgcattggagagaggtgtccctgcatatataggtgtccttggatcaataaagctgccattcccatctcgtgtctttgacatggctcattgctcaagatgtttaattccatggagtggaaatgatggtatgtacatgatggaagttgacagagtactaaggcctggtggctattgggtgctgtcaggtccacccattggctggaagattcactataaggggtggaaacggacaaaggaagatcttcggaatgagcagagaaaaatagaacaattcgcagaacttctttgttggaagaagatatctgaaaaggatggtattgccatatggagaaagagattaaatgataagtcttgctccatgaagcaagataatccgaaaattggcaaatgtgagttggtgaacgacaatgatgtatggtataagaaaatggaagtttgtataacccctcttcctgaggttaatagtgcatcagaggttgctggtggtcaattagagccttttcccaagaggctcaatgcagtacctcctcgtataacccttggttccatgcctggtttctcagttcagtcatatgaagaggacaataaactttggcagaaacatgttaaggcttacaagaaaaccaataacttgcttgatactggaagataccgcaatttaatggacatgaatgcaggtcttggtagcttcgctgctgcactggaatccccaaagttgtgggtcatgaatgtcattccaacaattgcaaatacttccactttaggtgtaatctacgaacgtggattaataggaatgtatcatgactggtgtgaaggattttctacttacccaaggacatatgacctcatacattctaatgccatcttcagtttgtaccaaaacaagtgtaaatttgaagatatactcctggaaatggaccgaatcttacgccctgagggtgcggttatagtacgtgataaggttgatgctcttgtaaaggtagagaaaatagccaatgccatgaggtggaaaacaagattggctgaccatgaggatggccctcatgtgcctgagaagatactctttgcagtcaagcagtactgggcaaccacaagcaagagcagctaacgatgttcagattatttttctccagtcacacagataacttactgtctgtgcatggaggagagtaattttgtccactagatctgtatttggtatcttcacttcagcctatatttgctcttaagtctgaccttatt

SEQ ID NO: 17148 - DNA, 268 bp, Setaria italica
  Peptide Sequence Number=SeqID_83122
cttgtacacttgagcacagctataggttacacaagctgcaactgtacaattcccatgaccatatagtcatggacgtccaaagctgcatgaaggccactcttcttgccataatcatcatatccgtggtaacttggctgtcccacatgtactcttgcataaagaattccatggagtccctcccttctgttgtctcggttgtcatcgcaccgaagtgcctcttcatcttctctaacatcatcgttatgtatcttgtaagtgagtcaaagct

SEQ ID NO: 17149 - DNA, 381 bp, Setaria italica
  Peptide Sequence Number=SeqID_83123
tcccccactttatatccaccactcctcaccgatcggatcacgagcgaccctcgatcgggggaggatagatgaacgccgcaaaccaaaaacaactcgatccgtagctgcgcacactagtgatcgtcgttcccttcatcccttgtgtgtttgatcagggagcaataatgccttgcttggcgcaagagttccagcccaagccgcccgccgccagccactactgcaagtccctgtcgtcgctcatccgggagacttacccgcactgccatgtcccctgcgtcagggtccccgccggcgccgccgggtggagctccggcgaggacagcgacgacgacagcgccctcgacgaagcgctcgacaccaagcaggtggtcctcaccgaga

SEQ ID NO: 17150 - DNA, 506 bp, Setaria italica
  Peptide Sequence Number=SeqID_83124
gtcccaatcattgattcagctaactcctcaattgacatgtgcttgcagaatggatcagactgcttcagttttgcaatctcatacacatggcgaagagtcagggatgacactgcgttgtggcctggccggctgctggcagtctcaatgcctgcagctttcttcagaaaccatgaaactgaaggagacttgactacaaactcgaaagtactatccttgtaggcagtcaaagtaacttgcattggagtatctgccttgtacttctgtgtcctggcattgaaatctttgcagaatgccatcaaattaagcctatagaaacccagagctggtccaactggtggtgctggacgtgcagcgccagcaggaactataagacggattgttgctagaattggtttctgccaccgcatctttgagagttgccatattactgcttttcagatcaacgaatgaagaaatcagtaagtctggatggatctccactccacgccagactgccagaggccgcc

SEQ ID NO: 17151 - DNA, 498 bp, Setaria italica
  Peptide Sequence Number=SeqID_83125
ccggagctcacggcgccggttggcctcttcgtcggctcggcatcctcgtcgggagcagcgacgacgccagcgctggtggtgtcatcgatggtggcggccgtggagatgttgaggtcgaggttcacgctctgctcccgcggcctgacccagctcttcttcagcgtcttcctgttgaggtaatacatccgcccggattggaggtcgaggcactgctcccagtcgagtggcagcgggtcattgagctgcagctccaggctcgcgggcggctgctgaggctcctcccagccggcgccggcggcgtagtgcttcctcttcttcctggaggtgccatcggactcggacgatgagctcttggcggctggagcgggggaggcggcgaagccctgccacgccgccggggcgagcgacagctccggctgcagctccatcctcttcctcaggctcaggtcgtcggcctcctgctgatggtggaacttcttgacccggaggaactcggtg

SEQ ID NO: 17152 - DNA, 481 bp, Setaria italica
  Peptide Sequence Number=SeqID_83126
agaccggaagactacaacggcgccggttggcctcttcgtcggctcggcatcctcgtcgggagcagcgacgacgccagcgctggtggtgtcatcgatggtggcggccgtggagatgttgaggtcgaggttcacgctctgctcccgcggcctgacccagctcttcttcagcgtcttcctgttgagggtataaattgtggatgaacacataacttgtctgctctcctggtcaagggcgtacccataaattctgtctgggcagctggcttgctctgcatcagttattagcatcttaaccatgcctctgaagtggccatgagacatgagctctgcaacacataaacctctgaaggggttacatcctaacctcagaccatcttgctacagcctgcccccagctgccagtgacactactacacaacccatcatacgccggaacacagaggccaggtgatcctgatcccgatcacatcgacctaaagag

SEQ ID NO: 17153 - DNA, 261 bp, Setaria italica
  Peptide Sequence Number=SeqID_83127
taccttacatatatttcatttcaatagcaagcaccaagagtcatgagatgagcgtctactggtcccatcacagtttctactacaaggtaatgcacagcggaactaaagtctgctctgctaggtggaaggaccaccacaatctcaacatggaagcaatttatgtgcttcaagccttgaacactagtaccacacctgcatgcccatcaaatttcaacagaaaaaataaattgcgcttcatctatacttagccacccatgtctt

SEQ ID NO: 17154 - DNA, 500 bp, Setaria italica
  Peptide Sequence Number=SeqID_83128
ttttgtagctattgataagtgagtgctttgctgaaagaactaaaatttttggccttcgatatcgagaactaagagttggttgaactcgtgcccaggtttcagcaaattcttcaactgagcagcttgaccatgatggtctgccaaatgttcatttagtattgtccccttggagaagccatttacactgacaacaacagcagcaggagtaagccgctccacaacacccgagacaatactacccaactttgcaatatctgctggaataatcctattatgagatatgacaaaactaacgtttattctccttgaagcagggagcacactgataattctacatttgatgacttgcccaacatgataaacattttccgcttcagttcctgcctctaatccaagctcagatctgctaacaaaaccctgaactccgttatagaattttacaaagcaaccatgcttttcgattttagcaatccatccatgagtcactaaaccgactttag

SEQ ID NO: 17155 - DNA, 716 bp, Setaria italica
  Peptide Sequence Number=SeqID_83129
gctccacccccgccgtcgccatgggcaacttccgcaagctcggccgccccgcctcccaccgcgtctccatgctcaggacgatggtgtcgcagctggtgaagcacgagcgcatcgagaccaccgtcgccaaggcgaaggaggtgcggcggaaggcggatcagatggtacagctcgggaaggagggtactttggatgcggcaagacgtgcttctgcctttgttcggggtgatgatgctgttcataagctattcacagagctggcctaccgctacaagaatcgagctggtggatacacaagacttttacgcaccaggatacgtgttggtgatgctgcagaaatggcttacatcgagttcgtggacagggagaatgagcttcgagaggccaaacctgcaaccccacagccgccccaacgagcccctatggatccgtgggccaagtctcgtgctagccaacaatgggcaggaccaaagctcaccaagagctccggatcagacggcttatgaggacaatagcaggcgtatccatgttctgaatgaggcttcatttatttgcttgatatgcagatgggatttctttttttggtttagagatacctggcaatagaataattcaaatttgtattgctataccgtactagctcatgaggtgaatgcttctaattcatcaacagaaaattgcaaggcagtacacgctagaattttgcctgacaaaaa

SEQ ID NO: 17156 - DNA, 306 bp, Setaria italica
  Peptide Sequence Number=SeqID_83130
gttcttacgtattatataggcgatcgagcagagtggtttccggccatgccggccaggtcatggctcgccgaactgcggtcgcggttcggcgccggcggcgccagggccgacgggctcggcatcctggccttcgaggcggctgccaccatgtcgcggctcgtgtccctccaccggacgctgtccgacgtggagttccggaggctccgcgccgacgtcctgcgcgccgagggcgtcgcgcggctgacgtccccggacagagcttcctgctccgcctcgcttgctgcgagctcgtggcgacctcgaccg

SEQ ID NO: 17157 - DNA, 1303 bp, Setaria italica
  Peptide Sequence Number=SeqID_83131
agtaatcaattgatgaagcacttgctcaaaaccttcttcaccaaataaaatgtccacttcatccaacacaacacatctaaggctagacaactgcacaaagccttcctgaagcagatacaagaaacggccaggtgttgctataagtacatcaagctcttgctcaaggctttctaactgtgtcttctgtcgaaatcctccggttgccaccatagacctaaatggaaccccagattttgatatcaaccggcaattgttgaggacctgagaagcaagttcagcagtaggtgtcaacactatcaccctgggattcctaggagatgatttatggagcccctgaacctcttcgttccttaaattttgtactatagggcaaagatatgccagtgtcttgccagacccactttgatcagcaataacgcaactcctcccctccaagataggaccatacgccagagcctggatatgtgatggacgagggaaatcaaaatttctcaatgcacctagaatttcatcgctgcagccaatctccttaaaggatctgcgactgaaaaatccactgtccaaaggaccttttcttttagggaagtctagaggctccctttgctttcgagtctgtcgtccataagtaacatcagtaatgctaccccatcctttgggaccagaagtagcttctgaacctggggagtccaaatcatcacctttgtattggctcaaaacagaattcaaagaatgtccacctcgagtcctttcatttctggagttactgttctgttttgcatggcgtgctgagtctgagacaggctttcttctttcaaagtagctttcctcttcatcggaatcatcgaaagaagattcatcaaatcggttggtgcttgagcgattagaaccctctctcttgagctgagctgatcttgtaaccaaggattttattttctgcgccttcaacctgccaaaattccctatacctgtacctcccccactacctctgctggggcggtcggtggtcctggagagcaccgctggggacggcatggcgacctcgtcgccgtcgtcggtgccgccccacacgatgacgctgcggccggtggcccggtccaccaggcggtacgctcctggggtgtccattggcaccttgtcgtagccgcgggtctcgtccccctccgccgtggccgccgccgcccagctccggcgggagccggcgcaggaaacggagacggaagtccgcagggaggcagggtggcggagcatcaggggaaccgcgcgggcctgagcccccgccactccatctctctctctctctctc

SEQ ID NO: 17158 - DNA, 409 bp, Setaria italica
  Peptide Sequence Number=SeqID_83132
ttaaacaaaactaaacttaaataactaagtaagtaacctagactagctctggtagcactctggagctgcatagaggccactgcataattctggatcacctgaacctgctgcaatcagccttgcaacaccacaatctgccaatattggttcaaagccttcatccagcataacgtttgaaggtttgaggttgcaatggagtatccttggactgcaatcaaaatgcaagtgcctcaaccccttggcgatcccaacagcaatcctgctcctggcatcccaattaaggctgacctgctgcgatctcaccctcttcatcacatcctcgaggctgcccccaggaatgaagtcatacacgagcgaaaggcggtcagcctcacgaacatacgccttcaaggtcattacattctggtgc

SEQ ID NO: 17159 - DNA, 786 bp, Setaria italica
  Peptide Sequence Number=SeqID_83133
taacttagttattcctattcaactaatccatgccacagagctttctacaaagacatattcacaactccatgggcagaacaacccaggaagctcagccaccagcatgtggctacattttgaatcaaatcacagggagcagctgctgcatgtttgtaattctgaaactgttgcttcccttgtggaccatttggcttggacactccagcccaagacactgaaagctactaccacacactcacttgtgcagcagtaagcaataagcattgatccaacatgatttagcgctgtgccagtgccatgatggaagaacatatgcagctctcaagaaatgattgatgatgattataagctgtggagctgcgttagcatcgcgacgagctcatcgctggatggccgatccactggcgaatccgacaggcagacaatggcaaccctaatagccataagcatctcctcttcttccccttcatctcctacgacgctactatccagtgcttcttttggatccgaagattgctgaatatgccggagccatctggcgaggccaccctgcccagtttcgccggagaagaaaggatctgttgggtctctcccggtgagcagcacacccaggatcatgccaagggcgtagacatcactcttatctgtgtacctgctgctctggtagcactctggagctgcatagaggccactgcataattctggatcacctgaacctgctgcaatcagccttgcaacaccacaatctgccaatattggttcaaagccttcatccagcataacgtt

SEQ ID NO: 17160 - DNA, 250 bp, Setaria italica
  Peptide Sequence Number=SeqID_83134
aaacacatggaagaagcactgagccccaacgactccagtgcaagtgctctactttttcaagcaagagaggtgtagttaagagaggccatccaaacaaagaaatcacttaaagtggcctgctaattagggcctacatcctcttatagcgcaccctggttggcactcactgccttctatcttcccactactgtggtagccgtcccctcaatcactccactatttcaccttgtttcatggcttcagatctgat

SEQ ID NO: 17161 - DNA, 698 bp, Setaria italica
  Peptide Sequence Number=SeqID_83135
atcgacgaggcgcgggaggggcccacgcgggagaagcgcgccgcggcgaccaacggcggcggcgaggaccccgacggcggctccggcggcgccggcgccgggtgcgtgctctccagcccctacgtgaagaagctcttcaccttccacgacatgaagggcggacactacaacaagtccttcccggtcacccgccccgaccgagtacaccctcttcttcgccaactgcgcgccggaggcgctcgtctccatgcgcgtccgcaccgagatgtacaacgtcaacgccgacggcttcaaggactacctccccgtcggccaggcgcccgtgccggccatctacggcttcttcgccttctgctacgtcgcgttcctcgccgcttgggggtacctcaccctctcccgcgaccgcgtctccgcgcaccagatccaccacctcatgtccggcctcctcgtcgcgcgcctactctactgcctctcagccgccgaggaccagcactacatccgcgtcacggggacgccgcacgggtgggacgttgccttctacctcttccagctggtgaagggtgtcattctgttcgccgtgatcgcgctggtcggcaccgggtggtccttcttgaagccggtcctgcaggaccgggagaagaaggtgctcatggccgtgatccctctccaggtcaccgcgaacatcgcggccgcggtca

SEQ ID NO: 17162 - DNA, 1010 bp, Setaria italica
  Peptide Sequence Number=SeqID_83136
ttttaagttttaacgtttttaactttttaactttaaaagttaaaacctaaaatttaagaaccaacgggtgggacgttgccttctacctcttccagctggtgaagggtgtcattctgttcgccgtgatcgcgctggtcggcaccgggtggtccttcttgaagccggtcctgcaggaccgggagaagaaggtgctcatggccgtgatccctctccaggtcaccgcgaacatcgcggccgcggtcattggggagaccgggcccttctttcagggctgggtaacatggaaccagatcttgctgttcgtggacgttgcgtgctgctgcgccgtgctcttcccggttgtgtggtcgatccggtctctcagggagacatccaagaccgatggcaaggcggcgcgcaacctctccaagctcactttgttccggcagttctatgtcgtggtgattgggtacctgtacttcactaggatcgtcgtgtatgcgctcaagaccattgccacctacaagtaccggtgggtgagcatcttggcagaggaggtggccaccctggcattctacctgttcatgttctacacattcaggccggccgagaagagccactacttctcactcgatgatgatgaagaggaggctgcagaaatggtactccgggaagaggcgctccgggaagaggattttgagctatgaagagatgcagcgattcacaagaatgggttgaactcagcagcgggatcggtcgccgcgccacgttcgtttgatcttttctccctgtgatcttgatcatactttgcaaatgccaggacatagctcatagtggtgtatgtactgcagggatatgagattattttgttcctcttgtagatttcagattttagtattttactgatgaaatgcagattacttaacttataccctattccaaggagtcttcttacttgcaatgcaaatatatcaatgagcaaacaaaaaaaaacaaaactaaaaagagaactagccaaggacacacaggga

SEQ ID NO: 17163 - DNA, 496 bp, Setaria italica
  Peptide Sequence Number=SeqID_83137
gggttctaatacaggttttattgccaatatatccatatcaactccaccaaggcgccaaatgtgcttccacatgatggacaccacatatgtacgagtgagatgcaacaaaaaaaggagaaaaaaacaaatcacccaaaattacatgtattaatggctaccgttcccctgcaaccgacgagccaaaaactacgcgaacactgaacgcatcacctgcttccagcaaggtacgtagtacgtgtgggatcaggtattgacggccctgcagttccggcggatctccccttgctcgccggtgagcacgccgacgcggcccatcttgcggacggcgttcctgaattcctggaggaagtacccctgcttcgtgaggcggtggatcatcccggcggcgcggcggtcggtgagcagcgcggcgtcggaggtgaacaggccccgccccagcttgaggttgacgaagtagtgcgcgtcgaaccgggcggggctgccggggtccatggcc

SEQ ID NO: 17164 - DNA, 257 bp, Setaria italica
  Peptide Sequence Number=SeqID_83138
aaccgatctagacaaattctcgtcgtctaatcctagctactcatcactcaacacaagacacaattcatcgccgacccctagctagctagtagccagtataataatgggtcaccaccaccacgacaagaacaagaacaaggcggaggcgggcgccggcggcgacgactggcgcaagaaggagaagcaccacaagcacatggagcagctcgcccaggtcggtgccgtcgcagcgggagcgtacgccatgcacgagaagc

SEQ ID NO: 17165 - DNA, 341 bp, Setaria italica
  misc_feature (275)..(341): n is a, c, g, or t
  Peptide Sequence Number=SeqID_83139
cgtgattaacccgtgctgtaatgggggtagaagaagccgtaggtcacagtggttttgtttgtctcccctcctccccttcttccacctcaggattcttttgtaggttggtttgttggtctcttctccgatgaatgcatcttgaaatgttcattcagatcacattgtgtgcggtgtaatggtgcattcttgcatgtgccttcggcaacatcctgtagcgtaatcctctgctgtgctagtaaattccgcagttcttaacaaaaaaaaaaaaaaaaaannnnnnnnnnnnnnnnnnnnnnnnnnnnnnnnnnnnnnnnnnnnnnnnnnnnnnnnnnnnnnnnnnn

SEQ ID NO: 17166 - DNA, 662 bp, Setaria italica
  Peptide Sequence Number=SeqID_83140
gtttatagcaggcagaagccaagccgcccgcacagccaccccgagcgagaggaaggcggcggaggaagggtatcagcatgtcgtcggcggcggcaggagagggcgagacggtgcgggcgtcgcacatcctcatcaagcacgagggatcccgccgcaaggcctcctggaaggaccccgacggccgcgtcatctccgccaccacccgcgccgacgccgccgcgcgcctcctcgacctccgcaaccagatcctcgccggccaggccaacttcgccgacctcgccgcgcgccactccgactgctcctccgcgcgccgcggcggagacctaggtacttttgggaggaggcagatgcagaaaccctttgaggacgccacctttgccctcaaggttggtgagctcagcgacctcgtggacactgacagtggggttcacatcatcctgcggacagcctgaggaggcgcacagtcagctgaatctcggctttcagttagtgcaaatggctttcaattagggctttgtatttttttctggcaacctgagtgcttagcattctcgacgaagataaatcatgtatcttaacacgtttgccacagcatttgagcttaaccgacatggtccataaacctgtgcttctgaatgcctagttgctctgtacctttatga

SEQ ID NO: 17167 - DNA, 851 bp, Setaria italica
  misc_feature (780)..(851): n is a, c, g, or t
  Peptide Sequence Number=SeqID_83141
tcatatgcaagttcatgcttgcagacttttcagctgctataatataactgtatataggtcatgtcattggtaatctctttttcttcatgaaactagatggctacacgctatgagcggtagcatatggcattcacctcactctttgcagtgtctttcgaagattttgttgcttaagatcaaataactctttagagtaataaatagtcaattaattatgtaatggctaatgagaatcagagattagtgatttgtaacaactctgaagatctgatgtttccaactgtgatgtttcaatcacattcacaggtacttttgggaggaggcagatgcagaaaccctttgaggacgccacctttgccctcaaggttggtgagctcagcgacctcgtggacactgacagtggggttcacatcatcctgcggacagcctgaggaggcgcacagtcagctgaatctcggctttcagttagtgcaaatggctttcaattagggctttgtatttttttctggcaacctgagtgcttagcattctcgacgaagataaatcatgtatcttaacacgtttgccacagcatttgagcttaaccgacatggtccataaacctgtgcttctgaatgcctagttgctctgtacctttatgatcctggggctcggtgattgtccccttttgtgtcgttgaatcttgacaaataaatactaatgacattaggaagtaagtagatgactaaattgtaagcagaatgtgaagattcgatgaaatgtatgcgtgaagttagcttnnnnnnnnnnnnnnnnnnnnnnnnnnnnnnnnnnnnnnnnnnnnnnnnnnnnnnnnnnnnnnnnnnnnnnnn

SEQ ID NO: 17168 - DNA, 465 bp, Setaria italica
  Peptide Sequence Number=SeqID_83142
tttgggaacatggatggtattcaaacaagagatcctgcatttgagaacaaagctgctgatgcagctgttgcaacaactgtccttgtacaaaaggggcattctgggtcacaatcttctgatggtcctggggatttggactgtgacagctatgatcttgaaggggaactgataacaagcagatcacctcctcaaactgcactgaaaagagaggcaaatgtaatggatgatcataccagagaattgaagaagcaaaaaccaaatgatcaggttcaaagacaaacaaccggtgattggaaatgtgaattttgtcattcttcccaagtcactgagtgtactggacctttgtcacattatctacatggggagccattagaggctgaccaagcttggaaatcaaatgttcagcatgtccatgagaaatgcattgaatgggctccccaagcattctttactggtgagatcgcg

SEQ ID NO: 17169 - DNA, 1102 bp, Setaria italica
  Peptide Sequence Number=SeqID_83143
gggacaacggagcaagaccgtggaatctatcttaacatgcttcaagattatcttgaatagcataaactcaaaggatgcaagcaaaaatttgtgttcctttgctgtgggtatgccagaagagaggtctatttggctttatcaggcaaaaaagctgatttcactgtgctctttcatacttgccaggtgcgaccattcctgtttcaaggatggaagcatggttgacatgactgctattgctatgagattggctgtgtctttaactgactgcaaaacatggaaaagcttaaaaagtgaaaacactagagctgcagatgagtctgtagagagtttgattgaatttataggtacatgccagagtggcacatataattgtgttaggcaatatataaaatgtcttggtcctcatgttacttcagggaagaaaagttctgcaactgcaactgcaactgcaactgcaactgcaacagatgatcattttgtgattactgctagtgcagtcactttagccttgcgcccattccactctaagaaagcagagaggggcactgatctgaatggtgcttcaaaggaatacatcacactgatactcacaataccatatctatgcaaacgcatgccacctttgctgttacctgctcttaagcacatttctgtgctgcaaccgtgtctcaatattttactggtggtggcagatctccaaggataaaatttttgaagatataataaaattggagcagtcagaggtttcagctgttggcgctactgttattccttgctctggttgggctcttggaaatatcgtaaatttagctaccaatcatgatgatttatccaattcaagggtgcttcatataaggactagatttttgcttatatgttgatgttattaactgtatttccaaacttactggaaagttttgagaaaagcaagggaatgtctgttggtaataccgctttccatgctgagacatctattgcagaggaaggggatacaaatggcagcagcatgagaacattatttatggaccttctgaagccaatttaccagcagtggcacctgaggaagcttctgacattggcaaaggaggatgtttcgtgcagc

SEQ ID NO: 17170 - DNA, 2261 bp, Setaria italica
  Peptide Sequence Number=SeqID_83144
taccgttccgtattgtcttggttggcggccccacccgacgtgcacctagtctggctctgccactgcttccaccatgagagctactctgtatactgcttatcaaggttcggacgcctcattgaccgtccatccatccttgacgcagagaatgaagagtatgccaaagagcgttgccgggatgtctgggctgcgcattacccttctgagccgtttgacctccaccgtaatgagattgatgggaacagtgatgatgacattgcctatgccaatgccaacagtgaaattgtggaaatggtgagacggtacgctggcctagcagcccacttcgcctcaccctttgtgcgggaaggtgtctaccatgttgctgcgaggcggcgatatgtgtgtttcctggacctcatgaagaaggttgtgggtacaacccaagatcagacacggcttgtgcctagcctggacatattactgatgtggcttgctcacctgagttttcctgcaagttatgccacagacatggtagcaatggccatcagtgacaatattgcaaaaatgggggtgggttatggggaggtggtgactgatgaggtgctcaaaagaacacgggcattatgggaggaagcatatgatgtgccatatgatatggctggatcagaggttgagatggcggcagttagggcagcacgggaggcattttactgggcaccagcagcatcagatgaggatgcgaaccggttgtacaaaagtttgcaaccaaggtttcttatggaggtgtatgtgttcttgaaaggagaaagtgataaggagcacatcaacaaggagttcctacggttgcgaacacagaggtgtcacagatcactaaaactgaacaaatcaatggccaacttatcctgcaaaaactggcagaaaacatggcacttgtactgtgaatttgcaacccggggtctcctcattgaggtcaggcgcaccacaactggatgtttcaggaacagcaagtttctcaagaacatctcattttcatggagtgatatgttgcatgagaaagcacttgctctcacggaggaacttgaagtcaggatgagagcaatggcatcaattacccctccagttcaagcaccgtacttattgaagtgtgttcctgatcgagtcactgatgatggtgggcccatgatttctgatgtgatattgcgcatgagaaattaccgtccacaagaaggacggtggctgacccgcactgtgcttgatcatggtgggagagaatgttttgtcatccgaatgagaataggcagagggatttggcggagaggtgctgaaactcctgtggcagtgaaatgggaggacaggagcattgaggttcgagaaggatcctggtcatacgttgcaagtacaagctctattggttatgctcctgagaaggtagtgggcacagcaacagcgacgaaggatcaacaagaaaataaggtggtttggagcttatcaactggatatatactcacggtaaatttgggtgatgagctcagctttcagcttaaaagtgagagcttagaagaagaggcaaggttgcttgtggggaggagattgagctacagagtaaacacagatggagcatcaagcaaccacaatgaggaggagcaatacctcactcttgttcgtaattcaccagatcatcatggtgacagagcaactgtgcttctaaactggaaattacttgctgtggagttccaacctgaagaggatgcagtttttgttcttctactatgcatggtgattgcacggactatgacagagatcaggagagaagatgtggctgggcttttagtgcggcgaagaataggagaagcaagggtggggcaaagagactggggttcggtgatgcttcctgacttgctttctccagatcctaatttgcagccttggtatcggaatgcggctcaggttttgagctctgcagagacaggagcaatgctcgctaagtattcacctgctgatggaaaggacgtgttgtaccggcaatctcttataccctgaagataagatggttgcccagaggatttgcttgaccaaatcttcctcagaatatcaggggaactatttcatttcctcgctcaatccttagcattgcatttatgaacataacaaatcctgtctttgacttattgattcactaattatgatgatctttgatatgaatctggtttgtcatacatggtttgtaattagaaatttcacatttgagtttaaaatggtttgatttctctggtttgtcg

SEQ ID NO: 17171 - DNA, 502 bp, Setaria italica
  misc_feature (1)..(29): n is a, c, g, or t
  Peptide Sequence Number=SeqID_83145
nnnnnnnnnnnnnnnnnnnnnnnnnnnnngtttctatcaaatcttctgtgctggtatagtactgtccaatgtctaagctatcggttagcgcatcagtttcagacctccgccaggaagtcaaaatgctagcagtttcgagctcgttcgatcgtccagtgtttaggtagatgcaccagccaacacacgcacacaaacacaaatatcaaatccccattactctcactgtcgccatggattgacgatagatgctcgatgcaacgtcaacctcaaacaccaccctcctcactattactcactgtcttctctgttgctatcttgattggttgaagcaccaccatggcaaaatgaagctacacacatcaggacatcaggtcagtgttctgctgtcctggacgcagcagctgcattctgttggctcagcagctagctagatagctgcagcctgcaggatgcaggcaggaacaatcatgggctgatgggcgtggtgaccatgtgctaccga

SEQ ID NO: 17172 - DNA, 397 bp, Setaria italica
  Peptide Sequence Number=SeqID_83146
tggagtggtgcgtgctcgattggaacaagaacgccatcgacttgtacgtggggatgggcgccgatatgttcccggactggcgcatctgccggctcaccggcgcggcgctagacaagtacaagggcaaccaggaggaggccgccgatgagaaggctgccgagtagaaccagaaaaattggttcttgactcttgagtgtcaataaaggtagtggatttgcttccgatgcttagcacctgtgtacagtttagtgattggtgcatttgatctgcttattagtgcgatgaattcaggttgtatgctgagcaattgggacttgtccttgtggtaaaccttcgtactgtacattatgcaaaaattacctccggattatatgcaagtatgtctttattattagcc

SEQ ID NO: 17173 - DNA, 256 bp, Setaria italica
  Peptide Sequence Number=SeqID_83147
cgttacttgggaaattggtttattcatttaattgagataaaactaaacagaaacaaatcgatccagtattgggttctatccatcaaccaattagtatctgggtaccaaatcttactgaaaagtgagaagtatctggtcagaaattggggagaataccccagataataaaaggtagggaaatatccatagcttacttcttttatgtgctatttttttctctcaggctactccaagattaagtgaagacaaggtcaag

SEQ ID NO: 17174 - DNA, 904 bp, Setaria italica
  Peptide Sequence Number=SeqID_83148
ggcgtgcggtctcacgctccaccggcgcgcccgtggccgtgaagcaggtgcgccctcgccggcctccccagccctcctccgcgacagcctcgactgcgaggtccgctttctcgccgccgtcagccaccccaacatcatccgcctcatcgacgtcatccagacacagagctgcctgtacctcgtcctggagctgtgcgagggaggggacctcgcggccttcatctgccgcaacgggagggtcgacgagcgtgtggccagaaatttcatgaagcaaattggagctggcttacaggtgctgcgccggcaccatgtcgtccaccgggacttgaaacctcagaatatcctactgtcttctccaagcagcgatgcggtcctcaagatatctgattttggccttgcaagggttcttcgtcctggggagtatgcagacactgcttgtggttcttgtttgtacatggccccagaagtgatgctatttcaaaagtacgatgacaaggtagacatgtggagtattggcgctatcctgttcgaactcttgaatggctacccgccattccgtggcagaagcaatgtacagctcctccaatgtataaacaggagcacatctctcccgttctcgaaacctctggcgtccagcttgcatcctgattgtgttgatatatgcaccagactactctgcaccaatccagtgaagaggctgtccttccaagaattcttcaaccacagtttcttcggagtatgaatgcaaggcagcatagcatctgaatcaaagaccaagatggctgaatgttgtttttttgatacttgacgtgggcatttagtctggctgtactgtaaacagggcattcagaacttgtttactaggaatacatgtgcattttcctttgtagaaaaaaaaaaaaaa

SEQ ID NO: 17175 - DNA, 263 bp, Setaria italica
  misc_feature (234)..(234): n is a, c, g, or t
  Peptide Sequence Number=SeqID_83149
gggatgctgcaggcgctcctcgcctgcctccgcgcgcccgccgccgccgcgctcggggaccagcacgtctgcaccgccgtcaacacctgcttccgcgtcgtccaccaggccgccgccaagggcgagctcctgcagcggttctcgcgccacgcgatgcacgagctcatccgctgcgtcttcgcgcgcctcccgcagataggcagttctgatggagttgacgctgctgtaaaaccngagatgggtggcatggatgtgaatcatcc

SEQ ID NO: 17176 - DNA, 346 bp, Setaria italica
  Peptide Sequence Number=SeqID_83150
ggttccaagagatgagcatttgtcagaactaaaccccttgtttagtacaatacctcccatagttatctggatgctttaattcgttccgtgtactcgcttcatttttgtcattaggtagcttacttggttctcgctcaatttccaccagtttcatgttgttccatccagtgcatattgcatcccaggtaataacgagctgaacttctacgctgctgcctttctgccttaatgggttcatcagcaaccccacaaggcaagaatttcggtcaaacactggagcaccttccataccagggagacattggatgtcagccatcagcaacgagcaccttctactagtcgtcta

SEQ ID NO: 17177 - DNA, 440 bp, Setaria italica
  Peptide Sequence Number=SeqID_83151
atgagccattggagatatttcaagtagtaattggcacttatcccccgagcgccattggaggtacgctgagtgtcctggagagtcatcgctgaagcttgacctgaacttctacgctgctgcctttctgccttaatgggttcatcagcaaccccacaaggcaagaatttcggtcaaacactggagcaccttccataccagggagacattggatgtcagccatcagcaacgagcacctcacagcgcatggaggaaggaaatttgcaacagcaccaactgatatgctgttgaagaaatggaagggtgataggaggccgaatggagatcctgctatcagcaaagggtcccctcggtgttgcatcactgaaacatcgatttgtctttcattctgatcaccaatgacatttgaattgacggttgaaattcctagaatttagtcttaa

SEQ ID NO: 17178 - DNA, 803 bp, Setaria italica
  Peptide Sequence Number=SeqID_83152
aaaacctcatgtttgacagcatcgtcgttagagaatttgcattgttgtggctgcaatgatctgttttctctggcactgagatattctccagcagatgaggtttgtgcacctaaaggtgaagttcttccaaatctccaaggttccaagagatgagcatttgtcagaactaaaccccctttgtttagtacaatacctgaagcccaagatgaatcaccaaccgtgacaagaacaactgcggatatagcctctctgattgaaggggatgaaatgcaatactggttaattttgttgactgtagaagagacaaacctcccatagttatctggatgctttaattccatcattttactctcttcatttttgtcattaggtagcttacttggttctcgctcaatttccaccagtttcatgttgttccatccagtgcatattgcatcccaggtaataacgagctggtatgtagattttaagtagctaagttttcatttattcgatgtgcaaaggtatctttttgaaaccagtggactcacctgaacttctacgctgctgcctttctgccttaatgggttcatcagcaaccccacaaggcaagaatttcggtcaaacactggagcaccttccataccagggagacattggatgtcagccatcagcaacgagcacctcacagcgcatggaggaaggaaatttgcaacagcaccaactgatatgctgcttaaagaacacatatgtttacagatgaatattacactcttactccgttttctaataatggcggcacaagaaattgtgaacaatagcat

SEQ ID NO: 17179 - DNA, 559 bp, Setaria italica
  Peptide Sequence Number=SeqID_83153
tttgcagtaggctttagctatctctgtagactgtaggggcagttgttgtatgagctggtagcctgcttgggttgtaggaggtgggcatgagctgcaacgggtgccgggtgctgcgcaagggctgcagcgagggctgcgtgctgcgcccctgcctccagtggatcgacgccgccgacgcgcagggccacgccaccgtcttcgtcgccaagttcttcggccgcgcggggctcctctccttcatctccgccgtccccgacgcgcagcggcctgcgctgttccagtcgctgctgtacgaggcggcggggcgtaccatcaacccggtccacggcgcggtggggctgctggggacggggaactggcacctctgccaggccgccgtcgacaccgtgctgcgtggcggcgccatcggcccgctgccggagctcggcaggggcaccgccgggagcggcgacctctacggcccggcctgcgcagccaagcgcgccggcggatggtccaccttctccacggcgaagcgggtgcggaaggccgccaacgacgcgccgcccgccgcggaggc

SEQ ID NO: 17180 - DNA, 357 bp, Setaria italica
  Peptide Sequence Number=SeqID_83154
aaaaacttcaggacatccttaataacactaggggccttagaagtttgcaactaagtacatttggctgtcttgtaatactgacatggaatcttcataaatctaggtacgaaggttaaggaaagcttatcagaaagtatttatgccaactattgctagtgagattagctttgaagatagactggctgatttggaacgggaaattgagttgtcagaatctccagctgtatcctgcatggtggaatcaattcgcatgtcgtttgatcaaggacgtcgtgggatttgcaaattcagaagttggaacagttcataagtgagcggtgcatattcagttttgctgtccatcataccaatacaata

SEQ ID NO: 17181 - DNA, 383 bp, Setaria italica
  Peptide Sequence Number=SeqID_83155
gccagaaggagtggtggcgccgccagcggtgagcttgctgaaggccatgccggagccggagccggcgaatacgaagatgagcatggagatgaactcggcgacggcggccttggcggtgtcggggtgggacagctcgcccggagcgcccacggagatcctcttctgagaaaatgtgacaaaacccagtccctcatatacctccccaacaatgatggtactgccaggaaagggcgctttccccgtatacgaatatctcattttctaaatccctcacccattggcatactctattgcacatcttgatcgcttgggtcttatcagccagtggattaaaagctgcatacagctcaaagtcctgggttatccagacaaaaaagacataa

SEQ ID NO: 17182 - DNA, 450 bp, Setaria italica
  Peptide Sequence Number=SeqID_83156
cgtagttactcctacatttttcctaagactacgttccctaaataagggaagaaagtaagaaacatctcaatgtgctcctatccatcatcagctacttgttcaaatcctcaaggtttggtttagttatctcccttaaaccctgtattcttatctttttcaaactctcatctcctcactggcagtatcacagtccaccacacttgccctcaaactctgtttcttaacagatacgtaactgagagagagctttgattaagcatcatactgatcaacaactatagaaactaatacatagtcatcagtcatcattgacaatttctaagctagaatttcagcaaaaatgataaatcaatgcagttattaagatgtataaatttcactcacatcaaaaaagtgaacataagcatacaagaaggccataggattgtatcttggcaaacatatgggtga

SEQ ID NO: 17183 - DNA, 632 bp, Setaria italica
  Peptide Sequence Number=SeqID_83157
ccgagactaataaccttagtggtcacacatcaacagtgcaaatagaacccctcgaatcagcaacatcctgcaaaacaagcactagctgcctgccttgttgattgcgcgagtgggaggcatgtgtatgcatgaagaaatgtcgccggattccagctgaacgcatgtataagagataggaaaactagcatctgtgccaccgagcaacggtgccatatcgaatttgggagttcttctcaaagcacctggccatacatgagctctagttgccccctccaatcccctcatatgactcttccgtgcagcttatacagactaaatagattggacccttcacaaggaaaacaatctgatgtttgccagccctcacaaatttgatatggtccccgctgttctcaacaaaggaaatgattgcttgcaacgtagcagaaaagccggctagtttgtgctcatccccatacctggaatatatcggcttcccagaattgctcaagatgaagaaatgcttcttcctcttcctccacgaagatgatgcatcatcctcgtcgagatgctttttgtcgcgcggccaatcctgggcgggctcggggtcgggttcgggttcgggatcgtcgtcgaggctgcttccccgctcg

SEQ ID NO: 17184 - DNA, 2052 bp, Setaria italica
  Peptide Sequence Number=SeqID_83158
ttaaagaaaacgaatacctcttctgagaaaatgtgacaaaacccagtccctcatatacctccccaacaatgatggtactgcctgtgccggtacaagtacatcaatcgtcaaaatcttccaacaaaaaacataacatagacatatcaatttacacacaagacaatacatcaccaggaaagggcgctttccccgtatacgaatatctcattttctaaatccctcacccattggcatactctattgcacatcttgatcgcttgggtcttatcagccagtggattaaaagctgcatacagctcaaagtcctgggttatccagcaaaaaagaacataatcctcgcctcttctgaattgagttttctgtggaccagttgctttatcgtgcatggaggcatacagtttttggtaagctttgtacagcctcttctgctgcttttgattgctaatgcatgaggggaattcagatgacacatactggtcaaggtaaatgcttttgtatataaaatgccagagtccagccggtcctccaatcatttcagacgataaagattgagaactcatgtctcgagaggactgtggaggctgtgatgcagattgagaagacggatcggttgggagatcctcaacatgcagtgcactctcacgtaaagatctttggacttcaatgaggacatttgacttcatgagaacattttgaatgcgggccctggaatctttgagatcataaaaggcatctgatcgcgtagtaagcaaagtcaagtatgtatgttcatcaaaaaagtgaacataagcatacaagaaggccataggattgtatcttggcaaacatatgggtgaaaaagactctgaagttctaaaagattcagaggacagtatgaaatttgcgagtaataaaatatcatcaggatgcaaagttgccttttgtgctcccacgagactaataaccttgtggtcacacatcaacagtgcaaatagaacccctgaatcagcaacatcctgcaaaacagcactagctgcctgccttgttgattgcgcgagtgggaggcatgtgtatgcatgaagaaatgtcgccggattccagctgaacgcatgtataagagataggaaaactgcatctgtgccaccgagcaacggtgccatatcgaatttgggattcttctcaaagcacctattgaccgactttgtcaaaataagcaataactggccatacatgagctctagttgccccctcaatccctcatatgactcttccgtgcagcttatacagactaaatagattggacccttcacaaggaaaacaatctgatgtttgccagccctcacaaatttgatatggtccccgctgttctcaacaaaggaaatgattgcttgcaacgtagcagaaaagccggctagtttgtgctcatccccatacctgacagttgcaaaatgttatggtcttggttgagaaaaaaattgctgaacgaattggtgttgcacaagtggtctcgcctggaatatatcggcttcccagaattgctcaagatgaagaaatgcttcttcctcttcctccacgaagatgatgcatcatcctcgtcgagatgctttttgtcgcgcggccaatcctgggcgggctcggggtcgggttcgggttcgggatcgtcgtcgaggctgcttccccgctcgccagcgtaaccgctgctgctggggctgggcggggagacgtcgtccccgtccttgtcgtcgtcgcggaggccctcgggcgcctccttccacgcgcaggtgctgctcccgcctctggacgcggcggtgaggtagccctcgtcgtcgtcgtcgtcgtcgtcgtcgtcggtgcggtgctcgtggatctcggcggtgtggaagtccggggggaggtccctgccgccgcgaagggagagggcggcgagcctggctccggctgcggcttggggctgggcgtcggtggggttggggttagggttagggtttggtggatccatagctgcaaaagacccctccgctcctccgcttgctgtgcctgtgcctgtcttctcttccttccccaccagttccc

SEQ ID NO: 17185 - DNA, 567 bp, Setaria italica
  misc_feature (3)..(3): n is a, c, g, or t
  Peptide Sequence Number=SeqID_83159
atntccctgaccttgaaagttaaggggcaagtgacttggctgctccagtgaaggaagtagatctgctgtaacaggttacccttgacgtgacagataggctctccattaacgtagttgctgttacctgcaaagcatctgcgatggcaccagacttttggcatgatccttgcttcgcatgtcttttatctcccgggtatctttcctgacaagtgaacttgtgctctgaatgtagctatgagctgtctagtttccgactaactcctaacgccagtgaattgacctaattcaactacgacaatgcgaccagatcttatggaatcatgacatcttggtatggattaccattggcaggcagggtggtttgatgtacttgtcactctgtttatatgccattggattgcagtgagagcatgagttgtttgctttccactgctctcggtcagaggttcagaattcctgcctgagagcctgactcgctaggtgtttcgagcactatatatgcagtgctccatgtgagcttctaacttacgtactaattgtcgtacctagtattctttattggttaaa

SEQ ID NO: 17186 - DNA, 574 bp, Setaria italica
  Peptide Sequence Number=SeqID_83160
aactgaacctaagggcctctttaccttctcagctgttgcccatggggaaccttttagcttcactttggagctctttgattccgtgctgccagagggaagtaaaacgaagacaaagatgggcttgcgaaacataatctgttcaatccagaaggaaaagaaaggttggtggaagcagttgctgaagtcagaggaaaagcatccatacatcaaagttgactggaacaaatggtgtgatgaggatgaagagtctgaagcctcgggggattcagatgatgactttgatggggcaaatgaaggagatgaaagcggtgatgatgatgggatgctttatctccctgaccttgaaaagttaaggggcaagtgacttggctgctccagtgaaggaagtagatctgctgtaacaggttacccttgacgtgacagataggctctccattaacgtagttgctgttacctgcaaagcatctgcgatggcaccagacttttggcatgatccttgcttcgcatgtcttttatctcatagctacattcagagcacaagttcacttgtcaggaaagatacccgggagataaa

SEQ ID NO: 17187 - DNA, 246 bp, Setaria italica
  Peptide Sequence Number=SeqID_83161
gtcttcttcaggtctcctctgtcctctgcttcctcttccttcctcctcccgcggccacaccagttgagctgcggcggcggctgcaggattccgggcttctcggagccgccgggaaccgcgtacgaggatccagttgcctgcgcgagctgctgcatgagcaccatggcgtggtatccgctgccgcagagtggagccgcgctgtcggctggcgacgagttcctcgagaaccagagcgccggctggtcg

SEQ ID NO: 17188 - DNA, 327 bp, Setaria italica
  Peptide Sequence Number=SeqID_83162
cctccctctctcctcgccccaggcgcatcaaatagctctccttctgtccctatctcctctcgcattcccaaagaagccccacaaggaaggcagcaaacgcgccgcgcaccggaagatcccagagagcggcacgagggggcccccattgcggcatggctgctgcggccgccggcgccggcgccgggctccagctcattggagctgccgcggccacgctcctagcggcggtccttgttgccgccgtgctgggccgccgccgcgggtccgggccccggtcgccgctggtggaagagaaagccgcggcggaggctgcctgtgcgaccggtg

SEQ ID NO: 17189 - DNA, 1360 bp, Setaria italica
  Peptide Sequence Number=SeqID_83163
cgcctacagagagagagaccgagaccaggggggacctgggagagtggcggccggcggggacatggcgacgaaggcgagcagcgccgcctccggcgcggcctacgaggagcagcgcaggaagcgggtcctcgagaacctcaagcacctcgaggatttgggcatatcggagatgtcgaagagcctgctccaggcggcgaggctgcagaaacagagcaagggcggcgtgcgcgtgagccccaaggcgaggaagaagttcgacgccaccgaggtgcggcgttcctcgagggcgaaggccacggtttcctacaaagatgattatggcgaactagatacttttcttcgtcgcaaaaggcgcagtggtggtaagaactctgagcagggaagagaatacactggaagagtttcttcttatgaacagcaacagcgtgctttcagaagagctgagaaacttcaagatggtctggaccctaataacccatcatttgttaagaccatggttcgatcacatgtgtccagctgcttttggcttggtcttcctacaagcttctgcaaacagaatctgcctcccacagagttttaggatggtgttggaggatgaagatggtgttgaatttgatgctgtctatattgggaaacgaacaggtctaagtggtggatggaggggctttgcaatgcaccacaacttggaggatggagattccttggtcttcgaattggctgagcatgacagatttaagatttatataataaaagctatagatgatgatgatgtagaagaggatgagtctgatgacaagaatgccagtgggggtactaaggaagagcctgctgaggaagattcacctgctgccgagcctccaaaaggtgccaaaagaagaaaactccgtggacggcggtagtttgcctgttagtttgcatcagcttgaaatattaggcactcctggtgaacgaatgttgtcatgctagcaaagcgtctcctgtcaggtcatctattttgcccagtttttgttgacctgttctttcagaaattgtgggcaaccgattacccatatatcgctgcaacaagtacacctatcaacgtaggtagcccttgattccatgtaaataggtagtttggcactcagagcacttgtattctcagaatccccctatgtgcgctactaagctagtgtcacgtagtgtgatgttggtttaaacaatgcttctgtgcatatgaataagagtcattagcaaagggaataatcgctaatgacatcgtatatgcagcgaaacattgttacttctgaacgcccaagacaacatgtcaatattctcagctctattcatttacagaacctaaaaaaaaactaaaaaaaaaaaa

SEQ ID NO: 17190 - DNA, 380 bp, Setaria italica
  Peptide Sequence Number=SeqID_83164
gatgattattcccattacctgtggacgtttccccaacagctcaagtctgacacttactctacgctcactaacttctttgcctatgtccgcacacagtttggcgccaccgtccagggcattcagtgcgacaatggttgcgagttcgataatctccgcgcctgcatgttcttcctgtcccatggcatccacctgcgcatgtcctgcccctacacctctgctcagaacggtaaagctgaacgcatccttcgctccatcaacaacgtcattcgcaccttgctgattcaggcgagcatccctcccatctattgggccgcggcactaggtactgccacatacctccttaacatccttccaaccaaaaccctctccttctcgacgcc

SEQ ID NO: 17191 - DNA, 559 bp, Setaria italica
  Peptide Sequence Number=SeqID_83165
agtcacaatcttcatttggtttagtgctgacaatttcagaccagtcatatcaagaacctttatacaggtggtaatatgcctcccatacttctttgtcaccataggcaaaataaaacgatcacggtactcattgatctgaatatgagattgcacatagtagttaaccgaagctttgtcatatgtgcttagtccaacaccaactgcaaatacaggaatgccctctttggagtatcctgataatccaacaagctgggtatcacgtattgatctatacaaatctactgggacaataggtttctccagtatactatcaatctcattttgtatcctccaattcaaagaatcatcttttgagccttattcacatgccactctctagctttaaggaagcgcactagtgtctctgttgggtagccctggtgcacattctcaaatgtcttcttcagcggcgcgtccacttggtccaggaggccggcgagctgctccacggcgtcgtcgcaggcggcgtctgccattgccgccgcgcggtgggggatccggagcttggcctgcgagcggg

SEQ ID NO: 17192 - DNA, 261 bp, Setaria italica
  Peptide Sequence Number=SeqID_83166
tcagcaacagaaagccctacgatacctatgaatgttgctactccattcaaccgtacctgcaaaggagtttcttcattgttatcttctgaaatgctggccattaataaaagatatggcagaacaaagtcttcgatgtattgcttttgcttatcgaaatcttgatctggaggatgttccaagtgaggaacaacgaatcagctggcaactgccagatgatgacctgactcttattggaatcgcagggatgaaggatccttgccg

SEQ ID NO: 17193 - DNA, 276 bp, Setaria italica
  Peptide Sequence Number=SeqID_83167
agccatctgaatttgtggtatgtcctgaaaaatatcttgcaaagaggactatgaggaccatagcagcaacagaaagccctacgatacctataaatgttgctactccattcaaccgtacctgcaaaggagtttcttcattgttatcttctgaaatgctggccattaataaaccccattcagtgttaaggccaactgcggttaccaacatggtaccataaccatcagcaactttgcatccagccattaaaaaaggagtcttctgatccttcataacaa

SEQ ID NO: 17194 - DNA, 2812 bp, Setaria italica
  Peptide Sequence Number=SeqID_83168
tctgttgctgctatggtcctcatagtcctcttctgaaattgctggccataccacaaattcagatggctctgttcagtttgcacaagtgcgaaatctgcaatatttgggttaaagatactaactgttgcggtgaccattgttgttgtcgctgtacctgagggcttaccactggctgtcacactaactctggcttattccatgcggaaaatgatggctgacaaagcactggtgcggaggctttctgcctgtgaaacaatgggttcggctactactatttgcagtgacaagactggtacattaacgttaaaccagatgaccgttgtgcaatcgattgttggcggagtgaagctgcaagctcctgctaatgttgataacctgtcacctactgtagtctcacttttacttgaaggaattgcacagaatacttcaggcagtgtgtttgaggctcaggatggtagcgtcgagataactggctcaccaacggaaaaggccatccttgcttggggtcttgaacttcggatgaaatttgcggaggagagatcacgatctgctataattcatgtctctccattcaactctgaaaaaaagcgtgctggggttgcagtggctgtgagagattcagatattcatgtacactggaaaggagctgctgaaattgttcttgacttatgcaaaagttggattgatgtggatggctcaaatcatgaaatgacacctgataaggctaatcaactcaagaaatttatagaagatatggcagaacaaagtcttcgatgtattgcttttgcttatcgaaatcttgatctggaggatgttccaagtgaggaacaacgaatcagctggcaactgccagatgatgacctgactcttattggaatcgcagggatgaaggatccttgccgccctgaagtaagagaagctgttgaattgtgcaaaaaggctggtgtaaaggtacggatggtaactggagataatctaaagacagctagagcgatagcacttgagtgtggaatactcgaggactctgatgcatctgcgcaagctataatagagggaagagttttccgtgcttacaatgatactgaaagggaggatgttgccgataagatttctgtgatggcgcgatcttctcctaatgacaaacttctcctagttaaggctcttaagaaaagaggccatgtcgttgctgttactggtgatggaacaaatgatgctcctgcattgcatgaggcagatattggtcttgctatgggcatccaaggaacagaagtagctaaagagagctcagacataattattctggatgataatttttctactgttgtgaaggtagttcgctggggtcgctctgtttatgcaaatatccaaaagtttattcagttccagctcactgtaaatgttgcggctcttgtcataaatgttgttgctgctgtttcctcaggaaatgttcctctaaatgctgttcagcttctctgggttaatctcatcatggacacacttggtgctcttgcattggctactgaaccaccaacagatcaacttatgaggcggtcacctgttggacggagagaacctcttgtgactaatatcatgtggaggaacttgtttattcaggctgtctttcaagttgctgttcttcttactctcaactttaggggccggaatcttttgcatttgactcaggacacactagattactccagtaaagtgaaaaatacagttatattcaatacatttgtcttgtgtcaggtgtttaatgagttcaattctcgtaaaccagaagaactgaacatctttagtggagtttcaagaaatcatctttttttgggagtagtgactataaccgttgtattgcaggtgataattattgagttccttgggaaatttacatcaactgtgagactgaattggaagctttggcttgtttctgtagttattgcttttgtaagttggcccttggcttttgttggaaaattcatcccagttccaaagactgaattgaaggatatcattctaaggtgttggccccaacgtaatgagagagcagaacaacagggacaggatgagagacgggcagaatcacaggtgtgaagctgcttgggcaagtgttcaaaattatcggatgctgaaatatagtgttggtgcacatagatggtgttggttaattttgggtgctgatttcttctaaccatgctaccttgatccctggctataaattctgaggctggtcagcgatgcaagagataatacatcctcgctggctcatgatctagagttgaagtcattgtaaacaaaatatttcatccttagcctaacgaagttcaggacctccagtagttaattgcacacaagttgtgccggcggtcttagattggtttgatctggggaagtcgcaaaaaacaatgaagtgtagctcgttttccctatattcttttggttttagttgctctctagaacattttgtctaaccggacactggtgctcggtgtaaagtctgatatgtgaatgctacttgggtgcgattgaaggatttgactttcgcaatgtacaaatgctgacttgctattggttgcgcacacttcttaagtcgtgaataaaccccattcagtgttaaggccaactgcggttaccaacatggtaccataaccatcagcaactttgcatccagccattaaaaaaggagtcttctgatccttcataacaatcttgctttcccctgtcatactggactcatcaatggcaagagaatgactactgattacaacaccatcagctgggacctgatcaccaatttttaaagccactacatcac

SEQ ID NO: 17195 - DNA, 1527 bp, Setaria italica
  misc_feature (1522)..(1522): n is a, c, g, or t
  Peptide Sequence Number=SeqID_83169
ctttcaccgcctcgcggcaaagaagagagagctggcttctgggttacgaatgcgccgctcggccgcgaacaccacgacgcgcatttgttgagaggcggcctgtacggaccaccatcgatggcgttcctcgcgccgccgcggttcaagtgtccaccttccacccgcgcggcggtgttcagggagcccgccggcggcgcaggctcccgccccggtcgggtaaactgctccgtgtcctccaccgcagtcgtcgatgcagagcgcctcgagtgcttatccgtcgggccgccgccttctcctcatccaacccttccggggggtttcggtgaggcgattctcaacaaggaggccatggtggcggccgcggccgcggaggccgtcactctggctcgagcggcggccgaggtcgccggagaagttgcccggatggcgcatcaggaccaccggacagacttctctccacgagatgacacggaggacagcttcttggcaatagagttgcgccgcaccgaggtggggtggcagtcatccaggcgcgccggcctcgagttgctggaggacgaagagttcagcagcattctcagcgacgaggccgaggatggtgacgatgacggcgagagcactgagggcgtcgtagcggtgaagtcggcgcgtcggtccgagagaagggctcggagggtgagggcggcgatgaaggcggctaagtttttgagcattgggaaacccgtcagagcgtcctcctcgagcaagaagcggttgaagggttgccggaatcctctgggttgcttctataagatgaccggcccgaggcttctgacggcaaagcaagaggtcgagttctcagaaggcattcaggacctcctgaaactggaagctatccagaaggagctcgcacactataacggtgacgaaccgacattctcccagtgggcagcagcagctggaaccgatgagaacactctgcggaaacgcctgaattacggagtttactgcaaaaacaggatggtgaaatctaatgtcaggcttgtaatctcaattgcaagagagcatgaaggccctggaatggatttttccgatcttattcaggaagggatgcaaggattgataagaggcgccgaaaagtttgatgcttcgaagggtttcagattctccacgtattctcactggtggatcaagcaagcaatacgcaagtctgttttagaacaaacccatataattcgcctgccgtcgcacatggctgaagcgagttcccgagtgaaggaatgccggcgccggctccaccgtcagctgaaacggctacccagcaacgaagagatcgcgctggacaccggcatgccaatccggcgagtggaggccgcgatgagcctcccaaggtacagcgtgtccctcagcagcaaggtcgggtgcacggacgtgacataccaggagatcatgccggacaccagcgcggagacggcggaggaggtgctgcaccggtggctgatgaagaaggacgtggacaaggcgctggacagcctgagcccgngggag

SEQ ID NO: 17196 - DNA, 164 bp, Setaria italica
  Peptide Sequence Number=SeqID_83170
attttccgggatgagcaataaaacatcaaatgaaacttacaatgaacattatttttatttcgtatgtcgtgatatgcaaaataaaaataatgttcattgtaagtttcattttgcatatcacgacatacgaatttattaatacataatatgtgagcattagatgt

SEQ ID NO: 17197 - DNA, 398 bp, Setaria italica
  Peptide Sequence Number=SeqID_83171
cgcgcactttctcaagattctcaaagcttccctgtacagcagaagaaaattgaaagaatcctgtagacacagcttctatgatccccataaacacaaaatcaattgaaatatacctgaaagtacttctcatccgtcaagatgctcaaacatgcagctccattcttctcataagctttagcaatttcaacaggattaaaattctccctgagcacacccctactcggggatgctttcttgacctcagcaatcagtgcgggcaccccattacgcttataggcggcttctaaagcgccatagaattctcttgaaggaggggccttcgctgggctgtttgggaaagaactgctgcattgaaaggacactgattgtagtggtacttactttggtagtgctagagg

SEQ ID NO: 17198 - DNA, 350 bp, Setaria italica
  Peptide Sequence Number=SeqID_83172
tcttcctcctcaatcaccttcaaggaggcagtggggcggcagtgcctgcggatgcggatcccctggctagctgcaatgtcgtttaccgacttgccattctcccattggaccagctccgttgcgttcaacatatcgtcctgtgccagcacctcaagaattgagtccttggggccgacgcggagcgggcgggcgcgggcgtggacgccggcgagggtggcgacgcgcgaggaccgggggaaacagcctctggtgccagcggcggcggcggcgaaggaagacctaacggatggcgaggcgaggagggactccatcacgtgcagcacgaggagggtggggtaggtggtgggatg

SEQ ID NO: 17199 - DNA, 1161 bp, Setaria italica
  Peptide Sequence Number=SeqID_83173
taacacagcagaaacgccagcattctgcacataagcaacatcatccggggtaaacagaccagattcaccaacaaccaaaattcccttctccctgatgctatccccatgcttctcgagcaacatcttggtgtttgaagtatcaacaacaaatgtctcaaggctgcgattattgatgccaataagcttaactccatttatcttcagtacacgctccatctctatttcatcatgaacctcaataagagctgtcattcccaactctttgcaaatccgaagaaagtactttatgtcaagatcaggtagcacagccgcaattagcagaattgcatcggcaccctttgatcgagcgttatagatttgccacttatcaatgacaaactctttgcagagaagagggcacttcactcctgaggcgcgcactttctcaagattctcaaagcttccctgaaagtacttctcatccgtcaagatgctcaaacatgcagctccattcttctcataagctttagcaatttcaacaggattaaaattctccctgagcacacccctactcggggatgctttcttgacctcagcaatcagtgcgggcaccccattacgcttataggcggcttctaaagcgccatagaattctcttgaaggaggggccttcgctgcagcctcgatcagctccttcagaggcttcttagcatgaccctcagctacttcaatctccttgtcccaaatgatcttctctaggatgttgcgaggtgcccccagctcctcctcaatcaccttcaaggaggcagtggggcggcagtgcctgcggatgcggatcccctggctagctgcaatgtcgttgaccgacttgccattctcccattggaccagctccgttgcgttcaacatatcgtccttggggccgacgcggagcgggcgggcgcgggcgtggacgccggcgagggtggcgacgcgcgaggaccgggggaaacagcctctggtgccagcggcggcggcggcgaaggaagacctaacggatggcgaggcgaggagggactccatcacgtgcagcacgaggagggtggggtaggtggtgggatgagggggcccgacggtgcggctctagtcgcaggggctttccgccttataggatggtggaggcggccggagcggcaacaacgg

SEQ ID NO: 17200 - DNA, 761 bp, Setaria italica
  Peptide Sequence Number=SeqID_83174
ctctgcaaagagtttgtcattgataagtggcaaatctataacgctcgatcaaagggtgccgatgcaattctgctaattgcggctgtgctacctgatcttgacataaagtactttcttcggatttgcaaagagttgggaatgacagctcttattgaggttcatgatgaaatagagatggagcgtgtactgaagataaatggagttaagcttattggcatcaataatcgcagccttgagacatttgttgttgatacttcaaacaccaagatgttgctcgagaagcatggggatagcatcagggagaagggaattttggttgttggtgaatctggtctgtttaccccggatgatgttgcttatgtgcagaatgctggcgtttctgctgtgttggtgggagaatccctggtgaagcaagaggaccctggacgagccatcgctgggctgtttgggaaagaactgctgcattgaaaggacactgattgtagtggtacttactttggtagtgctagaggtcttagtagctgttagccgtagcctgctttgaaataataatatgtgagcattagatgtattaataaattcgtatgtcgtgatatgcaaaataaaaataatgttcattgtaagtttcatttgatgttatattttccgggatgagcaataaaagtcggtgatttgctcgtatggataaaaaaaaaagaaaattaaaattgaggttgttgcgaacgtccatatcacacaggaaataggtaagtggcactgta

SEQ ID NO: 17201 - DNA, 1277 bp, Setaria italica
  Peptide Sequence Number=SeqID_83175
accaaataacctgatgaattacggattggcagtggcacacaaatcattcatggattgaggtagctaaacgctaacgacagtacagtgaacagtttgttactgtcagaatcagccccagatgtacagaattttacaagccataggaaaaccataccaacacaaattgacagtacgcagataagcatatctgtgaactggcaaggaagcacccaaattaacctcctagtaataaagatgcactcatataaaaaacatttctcccaggcagggagctcaggacgcctgctgacaataccactctatgcatctactaccttgccgagggaactgtctcacttgaatcaactgctgcctctatggcatctgctttggagctcttctcctcggtgatgcaatccgagctatcaggcccggatgagccctggaacgagctggtctgttcaggcttgaacagctcatcattctccaggttggacaacttctcggcagattctcctttgagcaactcaacaacttcagacattatcggtctctgctctggcttgttctgagaacatgcgagtcccacaagcaccattcgcttcagctcatcctcgatgaagttaccattgagctttggatcggcgatttccttgaactttttgtcgcgagctagaggaagagcccactcggctatggttctttttgtggtggggtttagcttttcgactggcttcttcccgctggcgagctctaggagcatgattccaaagctgaagacgtcgcagctttcggaggccttcccaagcatcgcatactctggtgcaaggtaacccagtgtgccttttacctttgtggtgacatgtgttgcaccatctggaatgagcttagcgaacccgaaatcagcgacccgagcttggaaatttgagtctaggaggacattgcttgccttgacatctctgtgaatgatgtgcggtgttgcatagtgatgaagataagcgatcccttctgcagaatctatggcaatcttcattcttctttcccaacccagattgcattcggctgcatgctgtccatgaagttgagaatgtatgctcaggtttggcatataatcatagactatcaaccgttcttggccttcagaacaatatccacgcaagctcaaaaggcttttgtgcctcacttgtgccaaaatcttcacctcgacagcaaattcagtttcagccttgttgctccaactcttgagcctttttactgcaatctgtgatccgtcccagagctggccccagtagacgctt

SEQ ID NO: 17202 - DNA, 1291 bp, Setaria italica
  Peptide Sequence Number=SeqID_83176
caccgccaccgccatgctggtgtcggagctggaggggcacgaaggggacgtcaccgccgtggtggtggtgccgccgcccgccgctgcgacggcgaccccggcggtcaagctcgcgagctactgctggaccgcggggctcgacggggtgctcatctactgggacttcgtggcggcggaggcagtgcggaaggtccaggtcgggctccccgtccactccatggtggttcctaacatttgtaggacctcgaaaggagctgaagtgtctactcccgttgcattcatctctgtggaagatatgagtaagccggctaatgaagcaaaagcactgcgtgggcagatgagagtttatgacctgatgaaggggcgtaaagtgggtctcctggctgagacacgcaaaccagaaaagattgttgcgagtagttctggggaattcttgggcattacaaataaaagaaagctccatatatggaacataccaacaaaagatttcaagcctgataagataaggaagacaaagctccggcacaccaaaaacttgaccactctggctttccatccaagcgagagaactgtggctgctggtgatgtaacagggcggatcttgatttggagagattttggaaatgcaaagttctctgaaagttcaaagtcaaaagtggatgaaggaagggatggtgttaggggcgatgatgatgcagatatgtgcacgacatggcattggcattcaagcagagtgaggtttctcaaattttcctctgacggagcgtacttgttctcaggtggtttggagggagttattgttgtatggcaattagatactggcaagagaagatataaaccacgtctggggtctcctcttttgttctttgtagattctccagattcttccatttcctgtgtgtcatgcacaaataaccaagtctatctcctaaaaatgcctaatatggaggtcatgcgatctatcgctggaattaagctgccaattgcttccacgagcttgggtggatctgatcggtctgtgtatggatttgattatacaaatagacttgttgctataccaacggaagattactgcatacagttctacgatttgtttgagaacactgagatttcagagttgcaagtatgtcagaggaattttcagcctgttgatgatatcacaatgtacatttccttagtttcattgtcaattgatggcagtttgatgtgcactgtggatgtcaagcttcctgaagatgaattgggtggtcttgttacactaaagttctggaatcacgggtctagtgcgggc

SEQ ID NO: 17203 - DNA, 299 bp, Setaria italica
  Peptide Sequence Number=SeqID_83177
tccattcccacttccactgcccacccaaacgcgttcgccatggccgtgcaggcgcggcacttctcccacgacttcccggcggcggtgggcggctccctgttcctggacgagtacgccgggtgcgcgccgacgacggcgccggcgtggcctcgggacacgacggtgctcagggacttcccgcgcagcgacctcgcctgcaactacggcttcgtgccgcggaagaggccgcgcctggcggcggcggaggcgccagcggcgggatgtttcttggacgatcagcgcgcggttatgatcccggg

SEQ ID NO: 17204 - DNA, 856 bp, Setaria italica
  misc_feature (69)..(69): n is a, c, g, or t
  Peptide Sequence Number=SeqID_83178
ccctccgccgttccgcccttcccctcctcccccgcccgacctcctccctccgcaacgaggacggccgcnccctcgtccacgtcgccgccgccgccgggcatccaggtagtagtgctcgcgctcctggaagcaggtggtgaggctgcggcgagcgtcctgaacgcgaaggacgaggaagggtgggcgccgatccactccgtggcgagcgccggaaacgcacagatcatggatatccttcttgagcgaggtgctgatgttgacctgactactgatggtggtcgaactgctcttcattatgctgcaagtaaagggaggcttaacatagctgaaaaactaatagcacatcgtgcaaatgtcaacaagaaagacaagtttggctgcacgcccttgcatagagctgcaagcactggaaatgctgagctgtgcgaattcctcattgaggaaggtgccgaagttgatgctgttgacaggactggacaaacacctctgatgcatgcagttatatgcgacaatcaaggggttgctcttctgctaattaggcatggtgctgatgttgatgttgaggacaaggaaggatacactgtcctgggtcgagcatctaacagcttgagacctgcactcattgatgcagccaaggcaatgctcgaaggttgatgcggtgctgctcaaatgtaatggaaagtgtgtgggataggaaaactgtactaaacaggagtttaagtgtgttcatggtctaaggtaggagctctatccagaatcagatgatgagctagaattttgttgcgtatttttttcttaaccttgtgaagtgtgaacatgttgctattggccatcaacaaagtttagcctccctctg

SEQ ID NO: 17205 - DNA, 265 bp, Setaria italica
  Peptide Sequence Number=SeqID_83179
gaaacttgacgtacgtacagaacgtcttcatcagcagaacacccaaaagtacccgtgctggtttctagactgtcaagtgtcaagcaagcaaatgccaatcttcacatctattgttttcacagccttatatatgtgccataatatgaatatgctgattgacatgaataacttcagtgttgagaaaattgggatccttttacgtaaccttactccctccgtcccagaataatatcctaaaatattattcgttttagttttctacgta

SEQ ID NO: 17206 - DNA, 577 bp, Setaria italica
  Peptide Sequence Number=SeqID_83180
tgctggctgagttgctagacttgagtggcattctcactgtgtttttctgtggtattgtgatgtcacactacacttggcataatgtgacagagagctcaagagtgacaaccaagtaattatattcactccataatttattccaccagtaatgtccatagcaagttaaataaaaagataccaattgattttctttggacttttttttatctactcaggcatgcctttgcaactttgtccttcattgctgagatgttccttttcatgtatgttggtatggatgcgtttgatatcgaaaagagggagtttgccagtaacaggtcagtttaatgcactttctaaaactttctggtccgcaacttgttcaggtacttttatgttaagagatgttgacagcaattccaggattatcttgcattttaaatttgaatgcactcaaatatcatatcgattctctactcaaatcattttaacacttcatttttgcgtgatggaagggttacagttggtcctgataaagtaataaacaacttatttacttaattctgctgtgttgaaaacttttgtatttcctacttgc

SEQ ID NO: 17207 - DNA, 756 bp, Setaria italica
  Peptide Sequence Number=SeqID_83181
tcgtcccttcgttctagtcttggttccttgggggtattaccagtgggttgtactgggtcggccctctcatcggcggcggcctcgccggcgtcatctacgaggtgctcttcatctcccacacccacgagcagctacccaccaccgactactaagctgaggcttcggtagccgccgtcgacgacgtcgcgcgcagcggcggagttcggttcatgactacacggtgatgatgatgggcggcgatgcaaagcacgcgatgcgagaaactaatcaaacggcggcgagcactgatcaaacggacggaaccggccgctgcgcgcgacgtcgtcgacggcggctaccgaagcctcagcttagtagtcggtggtgggtagctgctcgtggggtgtggggagatgaagagcacctcgtagatgacgccggcgaggccgccgccgatgagaggggccgacccagtacacccactgggtatcccccaggaccagctgacgagggcgggccgaaggacacggcggggttcatggacgcgccgtcgaaggcgccgccgaccaggatgttggcgcccacgatgaagccgatggcgatgggggcgatggtgcccaggctgcccttcttcgggtccacggcggtcgcgtacacggtgtacacgaggccgaaggtcatcacgatctcgaggaccagggcctcccacacggagatgccggtcaggccgaaggtgccggttggggagttccgtccggttggtagtaagtcggtagt

SEQ ID NO: 17208 - DNA, 604 bp, Setaria italica
  Peptide Sequence Number=SeqID_83182
ccgcgcaccggattgtggtggcgccgcggcgggtggagggtggctggcggcggctactgaggaggaaggagtggagcggcacgggcgccgccagaagcttcttctgcgccgccgccccggtggcggtggcgaacactagggacgacgacatggctggccgattaatttacaggaatcaaaacgatggaggatgtcagtcagtaaaaaaactagactagaatatacaatgcaaaatcgtgggtgttcttggctgctggcgtttgttccccttccctccctccgagaaataaaaacagggggaggaattgtttagatcctttttttgctgaaatgacgtcattttgtaacagttttttttcaacagattgtaatatggtgggctgggctgatgagaggcgccgtgtccattgctcttgcttacaacaaggttttttttttttgcctaattcaacttcacttttttttttcctaattcaacttcacgccagttccctgtagaagtatcttaagttctttttctccaagtttaattcttcctcttggaattgcagttcacaagatctggacacactcagctgcacggcaatgcgataatgatcaccag

SEQ ID NO: 17209 - DNA, 465 bp, Setaria italica
  Peptide Sequence Number=SeqID_83183
tccctggccggcgcaagcagaagactccggcggcgcgactggtggccgccagttcctcacccgggctttgtcgctccggacgttttggtccgcacccccgcaccaatctagatcaccaaccatggtattcggagctctcatcgcgtcaaggatggccaggtccagccgcaccctcgcctctgccgttgcctagaggcagattgttctggaacagagagtaatagatgctgctagcttaaagatacagaaagtggcagagcattcaggtagagctgtacatctggagccatctacctcggccactgtaagcttttgctcacaggccatctctttgcgcgtgtccgacagtaactgctgcaaggccaatcaacccaccctgctaacatcaaagcgacagagaactcaacaaatctgaccccttcaacaccggaagcatgaaccacagtggtctatgcaaaccttccg

SEQ ID NO: 17210 - DNA, 367 bp, Setaria italica
  Peptide Sequence Number=SeqID_83184
tttttttttttttttttttttactcgcggccaaatgcacaaattttagagaagcaaactgggtccggaattcacggcggtgattacagttccaacttgatgcgactgatcgtgctgatattcttgatcctgctctgatgcgatctggtcgtctggaccggaagattgagttccctcatccatcagaagaagcacgagctagaattttgcaggtatggcctgctggccactgaagtatctacatatagcaaaaatagtttaccagtttctttttccctccctaaagaatcaatctgttttgtgaataccaaaatgactttgttctggtttatgttttgtagattcactccaggaagatgaatgtaaat

SEQ ID NO: 17211 - DNA, 540 bp, Setaria italica
  Peptide Sequence Number=SeqID_83185
gtgggaagagctgcttttgtttttcccctatctttcttgtccaacttaacgaaaaagacacctttggagaaaataacctggagacaacagattgtaatatggtgggctgggctgatgagaggcgccgtgtccattgctcttgcttacaacaagttcacaagatctggacacactcagctgcacggcaatgcgataatgatcaccagcacaatcactgtcgtcctatttagcaccatggtgagtcatcttgttccaatattcgtataatgcaatgtgtcagcttatcatgtagtatgccctgacatggatatattcaccattgagttaacccaaaaaagctccaggtcgattgtcacatcaaaccagtcagtgtcatgggaattaaatctggaagcttgtggtagtgaacaagatcttatcctttctaaatagataactgacaggaatgcaaggttatgttataagaactcataatatggtcccctattattcttaccccttctcgtaagagatcacctgcttcttgattactcctgttca

SEQ ID NO: 17212 - DNA, 476 bp, Setaria italica
  misc_feature (221)..(221): n is a, c, g, or t
  Peptide Sequence Number=SeqID_83186
tttctgtcaccttgcaggaggcagattgttctggaacagagagtaatagatgctgctagcttaaagatacagtggcagagcattcaggtagagctgtacatctggagccatctacctcggccactgtaagtcttttgctcacaggtatttgctatcagctgtagactttattttcaaacttaattacgatccttagtttaagcatccattctactatcatntaaataaaaatagtaaacaaatatatcttacccccttaccttagaatcaggtttgcatctcaaccatagataacaaaaataataaacaaatataacttgccccctctaccttggaatcaggtttgcatctcaactgcagatctatcattcgctaatgagggagttaaaacagaggaaagttcccctccttagtttttaaactcatggtcactgggcagcttaaacttagaaaatcacacaagcattccggttttc

SEQ ID NO: 17213 - DNA, 885 bp, Setaria italica
  misc_feature (221)..(221): n is a, c, g, or t
  Peptide Sequence Number=SeqID_83187
tgtgtgcagcacaaagctgctggcggcggcagcacaaagcagttagtttccacttgtacttagtagagataattgatattcaattaggtattggagcctcaagtatgcttgctgtgccaggaaaaattgcaaaagttgtcaattttacctaaaactttctgtcaccttgcagaggcagattgttctggaacagagagtaatagatgctgctagcttaaagntacaggtaattttagttaattggtcgttgattaactgtcatgtggtatagctcaaagattctctttgttcctctgtgaagaaagtggcagagcattcaggtagagctgtacatctggagccatctacctcggccactgtaagcttttgctcacagttgctagacttgagtggcattttcactgtatttttttgtggtattgtgatgtcacactacacttggcataatgtgacaaagagctcaagagtgacaaccaagcatgcctttgcaactttgtccttcattgctgagatgttccttttcatgtatgttggtatggatgcgtttgatatcgaaaagagggagtttgccagtaacagatgttcatcggtgatggagccaagcttgttcgagatgcttttcagctggccaaggagaaaaccctctgcatcatattttattgatgaaattgatgctattggaataaagcgtttttcatctatcttctggcgcaagaagcgaatgcttgtaggacaagactaccaggcattgtaaaacattttctttggtgcatcacatgcaaaaaaaaatggatagatgtggtggcatttggatgacctgttttatatttatttcacgaattcaatcttagatgatatacttatttcatatttatactatgtttt

SEQ ID NO: 17214 - DNA, 291 bp, Setaria italica
  Peptide Sequence Number=SeqID_83188
tagctactacgtgggtacttggatgataaatactcgcggccaaatgcacaaattttagagaagcaaactgggtccggaattcacggcggtgattacagttccaacttgatgcgactgatcgaagcaaaccatgcgagcgggcgcagcggcggagttcggttcatgactacacggtgatgatgatgggcgcgatgcaaagcacgcgatgcgagaaactatcaaacggcggcgagcactgatcaaacggcggaaccggccgctgcgcgcgacgtcgtcgacggcgctaccgag

SEQ ID NO: 17215 - DNA, 1542 bp, Setaria italica
  Peptide Sequence Number=SeqID_83189
acagaaggacatcatcaatctctatgcaccagaggtcaccgctccaaaaaatgaacttgaaaaggaaatttcatatttgagggagagaaatgattccctggagaataaggttttgcaccatgataaattgtttgaggagatgaccaagaggcagattgttctggaacagggaataatagatgctgttagcttaaagagacagaaagtggcagagcattcagatagagctgtacatctggagccatctacctcggccactgtaagcttttgctcacagtatgaattatttttggatggagctcgagtcatcggcatagatgcatctaaccaaataatacttgcttctgggagggcagctgctgtaggtgctgaacatgttattaccaagattagcatgggttctgctcatgaaccgttcaaagtccaccttcctcccgataccaaagctattagggatatgtgtatccttcctggtggctctgctattttttacatcagtaggaaggaagttatcacttttcagcatgacaacagacagtgtcgtccttcagtgtgatttgccggtccctggttggtcgtgttcagcagatgtatctagttcacgtcatatttatgctggtttgcagaacggcatgcttatggtctttgatgtccgtcaaactacaagacccttgcattctatggtggggctttctacgaatccgattcatacgctccactctgtcattgataataatggttgcaggaagattctttcagcttccgctgtaggtccctgcatgtgggatgctgacaacaatcaaagcaggccgcatttgctaactgagatggacagtcagcgtgtatgcatttcccttgcatgtgcccctccatcaagcgatgttttggtggcttccttccggcccaaagttgaggcatcagaagatgctactgcatctcaggtgtatctatcacagacgccaacacgccctgttggttcaggaaaattggggcatcatgcccttgtcaggaggacaggtaatgcatccttcaccgaaggcccaacatgctatgccaacgtaagtgaagtacgcatgtcaaaatcagcaatcataccttatggagacaatcaacatctcttcgcctacggggatgagtcgctgcatggggtccggacgtggcaactaccttcgtttgtgattcatgccgatctttgcgcccaccggcagccgatccttgatttaaggtatgcggaaagctcaggtggagggaggtaccttggatgcttaagcgaggaaaagttggaggtcttcaaaattagttagcatgtcagggagcatagctttagtgtacttgattagccttttggtagctcggctcggcagtgatagctaacatagtactagtttgtacagaagaaagtcttttgctgtgtacaggtggtgtttctgaaaggaggaacggcatcttgttttacacttgtatatgctgagctgtttcagcagcgcagttataattatttttttctggtatggtcaatccacagctcaaaaaaaaaaaaaa

SEQ ID NO: 17216 - DNA, 1119 bp, Setaria italica
  Peptide Sequence Number=SeqID_83190
gggctgtgcaccggcgtggtgatcctgctgacgaccaaggggaagagctcgcacatcctcgtcttcagcgaggacctcttcttcatctatctcctccctccaatcatcttcaatgccggcttccaggtaaagaagaagcaattcttccggaatttcatgacaatcacattatttggtgctgttgggacaatgatatccttcttcacgatctctctcggtgccatagcaatattcagcagaatgaacattgggacgctagatgttggggatttccttgcaattggagcgatcttttctgcaacagattctgtctgcacattgcaggtcctcaatcaggatgagacaccccttttgtacagtcttgtatttggtgaaggagttgtgaatgacgccacatcagttgtgctcttcaatgcgctccagaactttgatcttaaccacattgacgtagccgttgtgctgaagttcttggggaatttttgttatctatttctgtcaagcaccttccttggagtgtttgttggattgctcagtgcttacatgatcaagaaattatacattggaaggcattccactgaccgtgaggttgcgcttatgatgctcatggcttacctctcatatatgctggctgagttgctagacttgagtggcattctcactgtgtttttctgtggtattgtgatgtcacactacacttggcataatgtgacagagagctcaagagtgacaaccaagcatgcctttgcaactttgtccttcattgccgagtaccttttcctttttcctgtatgttggtatggatgcgcttgatatcgaaaagtgggagtttgccagtgacagccccggaaaatccattggcataagctcaattttactaggattagttctggtgggaagagctgcttttgtttttcccctatctttcttgtccaacttaacgaaaaagacacctttggagaaaataacctggagacaacaggtgagcaattgtttagatcttttttttgctgaaatgacgtcattttgtaacagttttttttcaacagattgtaatatggtgggctgggctgatgagaggcgccgtgtccattgctcttgcttacaacaagttcacaagat

SEQ ID NO: 17217 - DNA, 755 bp, Setaria italica
  Peptide Sequence Number=SeqID_83191
tttttttttttttttagtttagatcatagagatagctactacgtgggtacttggatgataaatactcgcggccaaatgcacaaattttagagaagcaaactgggtccggaattcacggcggtgattacagtttccaacttgatgcgactgatcgaagcaaaccatgcgagcgggcgcagcggcggagttcggttcatgactacacggtgatgatgatgggcggcgatgcaaagcacgcgatgcggagaaaactaatcaaacggcggcgagcactgatcaaacggacggaaccggccgctgcgcgcgacgtcgtcgacggcggctaccgaagcctcagcttagtagtcggtggtgggtagctgctcgtgggtgtgggagatgaagagcacctcgtagatgacgccggcgaggccgccgccgatgagagggccgacccagtacacccactggtatccccaggaccagctgacgagggcggggccgaaggacacggcggggttcatggacgcgccgtcgaaggcgccgccgaccaggatgttggcgcccacgatgaagccgatggcgatgggggcgatggtgcccaggctgcccttcttcgggtccacggcggtcgcgtacacggtgtacacgaggccgaaggtcatcacgatctcgaggaccagggcctcccacacggagatgccggtcaggccgaaggtgccggtggggagtccgccggtggaagaaagcggaaggaaggaaagcaacgaccaaca

SEQ ID NO: 17218 - DNA, 387 bp, Setaria italica
  Peptide Sequence Number=SeqID_83192
cgtctgatagcgagacaagctgatccagatttggttgtggatcatccttagcagcagcgctggtagcatggtgatatatgctgggtcgaggtctccccaccccttggtggccaccctgtgggcagtgtgcagcaccgcaggcgccaggaccagatcttttggtccttctgaagttattgctccgtgtcagttcaacgtggctgtattcaatttttcatgcagtcattgatatgtttcgactactctcccgtgattcagacttgatacagtaaaaagctcgggcttcatcgactgatgtgagctgactaatttttggattttagcggcaggtcagtactcagtacacaagcagctaaaagctctaggatatgaactcctgcttagcat

SEQ ID NO: 17219 - DNA, 564 bp, Setaria italica
  Peptide Sequence Number=SeqID_83193
accgcgcccacgtccactccctcaccttcacctggcacgacgccttcagggggaacaagaagtgcgccctcgcctccatccacctcgagaaggccgccgtgctcttcaacctcggcgccgtctactcccagatcgcgcttgccgcggaccgctccaccgatgtcgggatcaggaccgcgtgcggcgcgttccagagcgccgcgggcgcgttcgcgtggctcagggagagcgggatcgcggccaaggccgtcgccgcgggggctaccaccgtggacgtcacgcccgagtgtgccggcatgctcgagaagctcatgctcgcgcaggcgcaggagtgcttcttcgagaaggtcattggtggagggaagccgcccgcgctgtgctccaaggtggcgcggcaggtgggcatattctacgaagaagcatatgcatctctcagtgcacctcctctaagtcagcacttcgataagtcatgggtgtctcatgtccagctgaaggcagcccaattctatgctgatgcttgttatagatattcactggatcttcatgagaaagaagaaattgctg

SEQ ID NO: 17220 - DNA, 365 bp, Setaria italica
  Peptide Sequence Number=SeqID_83194
caggactcttactgatagtgaacctgtgacgtgatgcaaagaactatcaccacttgcttgattctccgattagagcaggacgaaacgttgtagcttactgcttggggtgttgacctgatttatgagctcatgagcttcgatatttgggctagtaaccttgtcagaggatcttattagtattcgggggcatggaaattcctgagtaattgtagttttgatgacctcctgctctcttgggtatccttgtgctgtctatttggtagatgtgataataggagaaccaaggttcagccaattacagaactgaagcttacaggttcattcatagcttcctgcaaagaacacagctgactggaaattgtggc

SEQ ID NO: 17221 - DNA, 481 bp, Setaria italica
  Peptide Sequence Number=SeqID_83195
cgacaagaaagtcacggattttgcgatggcttcggggatcgaggtgttcacgccagtcagccacaccctcttcgacccagcagaaatcataaacaagaacggtggtcggccgcctttgacgtaccaatcgttcatcgccattgctggggaaccacctgagcctcttatggaggagtactctgaactcccaccggttggagacacgggagagtatgagttgttgcccgtgcccacagtggaggagcttgggtatggggatatcagccaggaggagattccgccattccgaggaggtgagacagaagctctgaggagaatgaaagaatcacttgaaaataaggaatgggttgccaagtttgagaaacctaagggtgacccatctgccttcctcaaacctgcaacaactgttttgtcaccatatctcaagtttggctgcctgttcgttccaagtaattaatttttttaacctaacttagtacta

SEQ ID NO: 17222 - DNA, 314 bp, Setaria italica
  misc_feature (20)..(20): n is a, c, g, or t
  Peptide Sequence Number=SeqID_83196
ggtaaggaagatttgtgtanctaagactcaatatttgtctcatgccttccaagcttgggtcaaagttggagcctagagagttccgtacataatcccaattttcctttaatttgtttgattgattggctaaaaggcttgatatcgtgatgattgcaagaggtaaaccaccacattttttcaaaatttcacctgacacttctttcaaatatgaagggcaagcatcctccaaaccaaatattcttttgaagaacaacctttttgagtcttggtcactaagtgccttcatcttgtaaacacactcaatgtgattagtg

SEQ ID NO: 17223 - DNA, 105 bp, Setaria italica
  Peptide Sequence Number=SeqID_83197
tttggggatcaattggaagcatcttcgataattactctgtaaagcgtcaaatcatgatctcagctaggcggtgacagtatctaagtcggtttcctcatgttgcgg

SEQ ID NO: 17224 - DNA, 491 bp, Setaria italica
  Peptide Sequence Number=SeqID_83198
cttcgccacttccccctccggcgccatctccattcctcgccggtgtttccgcaactgacttcctggcctaccagcgtctggccctgagcaagatcgccgcgaacccagccctgatgggccaacacgccctgaagcaggccacgctggggatggacaccggagccagccaggctatctacgatggtgcctcatggggtagtcgtcgtcactctagaagtacatgagctgttgctgctgctgctgctgctgggcggcggcagtggcagcattgatgccctggaagccaccatcgtagatagcctggctggctccggtgtccatccccagcgtggcctgcttcaggcgtgttggcccatcagggctgggttcgcggcgatcttgctcagggccagacgctggtaggccaggaagtcagttgcgggaaacaccggcgaggaatggagatggcgccggagggggaagtggcgagatgctgtccctggcggagttgg

SEQ ID NO: 17225 - DNA, 853 bp, Setaria italica
  Peptide Sequence Number=SeqID_83199
aaccaagtctctaggaatacatatgttctacgcggggtgtcgtatatatatagctggcatacaggacaagttacttagattaaggtaaataaaaaagaggtcctggtaaggattcatcatctactatataatactactagtatatgtataggggggtgtactggggcatcatcctcctcgcagagacaggtagctggtgcctcatggggtagtcgtcgtcactctagaagtacatgagctgttgctgctgctgctgctgctgggcggcggcagtggcagcattgatgccctggaagccaccatcgtagatagcctggctggctccggtgtccatccccagcgtggcctgcttcagggcgtgttggcccatcagggctgggttcgcggcgatcttgctcagggccagacgctggtaggccaggaagtcagttgcggaaacaccggcgaggaatggagatggcgccggagggggaagtggcgaagatgctgtccctggcggagttggcttgtttccccaggagcaccttatcggcctcccgccaatcagttgaccattgcccatctgaattgccagtgccgcttcctcatgggtgctgtacctcacaaagccaaagcccttgtcacgcgttacacggacctcctcaattaagccagccccaagtgaatgaaaaaacaggtgaacatcattgttgctggcctcatgaggaagaccaccaacataaacagtggtaaagagtgggttgttttcaggaccaacttcatttggattctcctgtccagcttctgatgaagcggcactggcaattcagatgggcaatggtcaactgattggcggagttggcttgtttcccca

SEQ ID NO: 17226 - DNA, 3275 bp, Setaria italica
  Peptide Sequence Number=SeqID_83200
ttttatgaaggataacccaaacacagaaaattatactagaatgccagggtaacacccagacttggtttccatgtctctaggaatacatatgttctacgcggggtgtcgtatatatatagctggcatacaggacaagttacttagattaaggtaaataaaaaaagaggtcctggtaaggattcatcatctactatataatactactagtatatgtataggggggtgtactggggcatcatcctcctcgcagagacaggtagctggtgcctcatggggtagtcgtcgtcactctagaagtacatgagctgttgctgctgctgctgctgctgggcggcggcagtggcagcattgatgccctggaagccaccatcgtagatagcctggctggctccggtgtccatccccagcgtggcctgcttcagggcgtgttggcccatcagggctgggttcgcggcgatcttgctcagggccagacgctggtaggccaggaagtcagttgcggaaacaccggcgaggaatggagatggcgccggaggggggaagtggcgaagatgctgtccctggcggagttggcttgtttccccaggagcaccttatcggcctcccgccaatcagttgaccattgcccatctgaattgccagtgccgcttcctcatgggtgctgtacctcacaaagccaaagcccttgtcacgcgttacacggacctcctcaattaagccagccccaagtgaatgaaaaaacaggtgaacatcattgttgctggcctcatgaggaagaccaccaacataaacagtggtaaagagtgggttgttttcaggaccaacttcatttggattctcctgtccagcttctgatgaaccatttgtctggtccactttagtgtccacactttgtttctcttcaccagcattagcgcctttcgttgcccaattgcaacgaatttggcggttgccaagccacttaccgttcaaatcatttatcgctattttgagcatcctgctggttcctgaaagaaacaaaaccaaaccctctggatcgtcctgttttctggtcccacataaccctagcatctgagcaggtagagtatccagagaaaaacgcaaacaaggcggcatcagtgatttcagggcaaaggtccccaacaaaaatattaaaatggcctgatgtatcctccctctgagtacttgtatatgcccaattgacttttattggctgaccatacagctgtctgccattgagagacataattgctagtgcagcagatcggcggtcatagtagtcaatgaaaccaaaagatgacttttcttttctgataacggaagaaaacagaaaaaacaacacttgtcacagagaatacaagtgcaacctgctacgtgaaaaggggcgattaactggagccccaaatgtatctatcactcaggtcacgactaagcacaaaaacaaaaaaaacggggggagtacaatagccaaacaaaacccatgacatctcatgatctcagctaggcggtgacagtatctaagtcggtttcctcatgttgcggcctgccctgataacttcatccaccagcagcaactgagacgcaatgatgggtccggagtttatgatttgacgctttacagagtaattatcgaagatgccttccatttggggatcaattggttcccctgagtgatggttcagtcccacgaccaatccacggtcgtgctcgttctggagggaaacaatgacatcttgggtatctagaccagagttttctgctaaggtcttgggtataacaagaagagcttccgcaaacgcttccaccccaagttgtgctcgtcctttgacggtcttcttcacattgtcaagaagatgtttctttgcagcaacctcaaaagcaccagcacccagcacaactgcttcatcctcaactgtattcttaacagatcttagaccatcacggacagcatccttgatttgtgcgatggtatggtcattaggtcctttaatcagtatagtacaagagagagggttttttacattctccacaaatgtgtacttttcttctccaagaacatgctcatagacaagaccagcccagccaagacaatcttcagtcaagtcatcaactgaattgacagcttcacctccacatgctagcacaagcctctccatattcctcctctttgctcttcgaagagcgataatccctgctcgagccaggagatccagggatggagggtcaatgcccttctgattgatgaccacgaagtttttgtcgcctccagcacaaaccttgtttttcaactcaatgatccgcttgacacgttcatcaacttggcgtctctctgcagcaaccatcttctctctttggtctgcgtttgagtagaaaaatcccgcgttgatttcgcttttctcatattctaatgaaacattgcaggtcaagatgtaacagttctctgccctgcgcttcatgtccgggtgccggggaaccatggtccagaaccagaccctcaaccaggcgggtgtcaacatcaaatttgtgacgcatgtgcattatttcgaccataaaaagatcgatgggctcctctggtttgcgaatgcatagaactgcattcacaacaatatccgtcaactgatcagccaatccttcgtacaactttgtcctaagagttgttcttgcgatcattttcaaggtatctctgtcaggttcatcaccaataacaactagtgtcttgaatttctcgagaaactcaagtgttgctcgcttagcaacatcaaagccatcaaccaaaaatcttggatgagtaccttcatcgatgcaccgctcagactgcttcattagctccccaatgaaaagcacggtagaggtcgtgccgtcaccactggtatcatcctgtgccgtggccgtcctcgcaatcatgatggcagtagggttctgaatttgcatttccctcaagagggtattcccgtccttggtcagcttgaggtcaccagatccaccaacaagcatcttgatggtgccgttggggccgaggttggtcttgagcacatccatgaggcccttggcggcgttgatgttcatgtgtagcgccgccgacttgttgagcacctcggcgttggggttcagcacgcggagcgacatgactgatgccttgcctcgctcgctcgctccccccggagatctcgccggcggcggcggcggcggggaggtgtggggaaggaagcgcgagggcgcgaggcggtggggggaggggagggaagcggagcgggtagtctagttagggtttttgt

SEQ ID NO: 17227 - DNA, 419 bp, Setaria italica
  Peptide Sequence Number=SeqID_83201
cgggaagccttgcttgcctcccccgcgcccggccggctactaccgtcgagcgtcgacccatctcactcttctcagatcccgaactaccaaaccccacttcttaggcggaggaaggcggggggagatcgcgatcgcgagccggtgacggcggctgggcgcgatggcggcggcgctggctccgggggtgtcccggaagctgaagaaggtgctggagacgcggacggacagcccggatctgctggcctcgctgggcgcgctctccaccttctacgtgcagaacaccccgcaggcgcgccgcaacctcaagtcctccattgagcagcgcgcgctcgccatcaaccgccacttcctcgacgcctcgcctccccgctcacaaggcgctcgatcgcgtcgaggggaggtgcacgcgctgaatgact

SEQ ID NO: 17228 - DNA, 384 bp, Setaria italica
  Peptide Sequence Number=SeqID_83202
tccgtccacccgccgctgcccgtggtgcgcgcggaccgaggggcgcgcttcgacccgcggttcatggaggacgccgccgccgggcgggcggggaggctggagccggccagcgtgaagatgatggtggcgccggggttccacgtgtacctggccggcgcgggcgtggtgaagtgcagggtcgtgtgcttctacagcagcggcagcaacggccgcaccggcggccacagagatggcgggagcagcaccaacggcagcgtggggttggggagtagctgtagtgacatgaatgggagtgctacagatgtggtggatagctgtaagagcagtagggtagggtagttgcataggtaaagagaacacggggattttactttgtttggtaaa

SEQ ID NO: 17229 - DNA, 308 bp, Setaria italica
  Peptide Sequence Number=SeqID_83203
ggcgccggcgccgggagccctgaacgcccagaggaacggcaggccggaggcctccaagcccatcgcgatcgcctccagctgcgcgcttgccagcttcgcctcgctgccgaacgccgcgtacacgacggagcccggcgcctgcccatccagccaccgcatcgttgcctcgtggccggcgacgtcttgtgttggcggcggagggaagagccccaccgggatcaccggcttctggtacagctcgccgagcagccgcagccactccggctcgaactccatgctggtcctgatgcccacgacctggctgccgg

SEQ ID NO: 17230 - DNA, 1134 bp, Setaria italica
  Peptide Sequence Number=SeqID_83204
gtcgtaacacggcagcggtgagcaaagcagcgtccaggttcggcgggatggacggcggcggcgtcgggaggaggaggagggaggcgatagagggggagctgaagaagctacgggcgcagcgggaggagctcgacggccggatacggctgctggagtcgcagctcgaggtgggcctgcgggagtggatggtgcggcggcggggagaggagtggtcgacggatcgtgcgacgggagcgtcgcgtgcaggagccgcggagggaacgggtttgcgccggacggtggtctcccggcggacatgatctaccggtacagccgccacctcctcctcccggacttcggggtcgaaggccagcggaagctgtcacagtcgtcgattttagtggtcggagccggaggtttgggctctcccgtggcattgtacctagcagcctgtggtgtcggttgcttgggcattgtggatggtgatgatgttgaactgaataaccttcatcggcagataatccacaaagaagcatatgttggacaagcaaaagtgaagtcagcagctgatgcttgccatgagattaattcctctatcaaggtggtagagcatcaccatactctgaagccgtgcaatgcattggagattgtgcggaaatatgatatagttgttgatgcaactgacaaccttcctactaggtatatgatcagtgattgttgtgttctgctgaacaagccacttatatccggtgcggcattaggtttggaagggcagttgacagtttatcatcacaatggaagtccatgctaccggtgcctctttccaagtccaccacctgtggcagcctgccagagatgctcagacagtggtgttcttggggttgttcctggagtgattggctgtctacaagctctggaggctataaaggttgcgactgccgttggtgaacccctatgcggaaggatgctactttttgacgcactctctgctcgtattagaattgttaagcttcgtggaagcttgccagattgcaccctttgtggtgaaaattcagttttcacagaacaagattttcagaagtttgactatgagaacttcacgcaatcaccaatgtctgataagacagcaccgagtgtgaaactgctccccgagaa

SEQ ID NO: 17231 - DNA, 1132 bp, Setaria italica
  Peptide Sequence Number=SeqID_83205
tttgtactttttttacttctaccttatatttttaattcagtcattcattgacttctctaacagttgacagtttatcatcacaatggaagtccatgctaccggtgcctctttccaagtccaccacctgtggcagcctgccagagatgctcagacagtggtgttcttggggttgttcctggagtgattggctgtctacaagctctggaggctataaaggttgcgactgccgttggtgaacccctatgcggaaggatgctactttttgacgcactctctgctcgtattagaattgttaagcttcgtggaagcttgccagattgcaccctttgtggtgaaaattcagttttcacagaacaagattttcagaagtttgactatgagaacttcacgcaatcaccaatgtctgataagacagcaccgagtgtgaaactgctccccgagaacgcccgaatcactagtagagattacaaaagattggttgataatggtgaacctcatctgttattggacgtacgacccacgcatcacttccaaatcgcttcgatttctccgtctctgaacatccccctctccatgttggaagagaagctgcccacactcgaaacctcactgaaggaaaaaggagcggtgtcagccttgggtaaagagccttccttggttgtcctgtgcagaaggggcaatgactctcagagagccgttgagctcctccgcgagaaggggtttgcctctgcgaaggatatcatcggtgggttgcaggcatggggacaagatgttgatcctgatttccctgtgtactagtgaaatggatgcaaagtaactggggcctatgaggcttcacactcaagatcaaacctttacatagtgctgagcttgtgggggtgagtttgagaagattgtttcccacgcagttagctgttgttctcggcttaagaatcattggcttatttaagctacttccacgtaatggtttgaatgcagcgagagatgctgctgttgcaagaacagtaattcctattattgtcaattgattagtagagcttttacaaaaatgttatggaaggtgtgaatgttcaactgttctcaagatctgtgatggcttacgccactgacaaatcttatttcgcagctcaaa

SEQ ID NO: 17232 - DNA, 255 bp, Setaria italica
  Peptide Sequence Number=SeqID_83206
caccgcttctgcccgtgaggatcggcggcggcgtctgcctgcccatgcccatgccgtcgacggggtccacggcgacgagcgcggcgagggggatggcgagcttggcgtgtcccagagccagcgcgaacgccaccttgccgccgcggctgtggccggagacggacaccttggtggcgtccgctcggacgccgggcggcagcgcggaggagaggccgccgccggcgagccagccgatgacggccgccgcggcgttga

SEQ ID NO: 17233 - DNA, 249 bp, Setaria italica
  misc_feature (247)..(247): n is a, c, g, or t
  Peptide Sequence Number=SeqID_83207
cgttttcccgttaacccatgacagtggcgcaccgtaaaacaaaacagaagtgatggcgcactctctctctgaaacatcaccttatactgaatctaacaagcagactgactaccattgccaagcagtatccaagaggaaaagggcacaatcgacacatgaaaaattgaaagggcatgcacttaaactaatgcagcagtcagttgctttattcacttgccaccgcctacagccatcagtttgttttacnca

SEQ ID NO: 17234 - DNA, 394 bp, Setaria italica
  Peptide Sequence Number=SeqID_83208
gctgcatccctgatggctacgaatacgatgcctctggaatcatcctctggcagcaaacacctgctgccgaccactggctacgaagaaattcaagattatttgcaggctcgctgttttctggatctgcacccatcaggaccggtgcctggtgcgagtttgtctctctcacgctgcagactgcacaaaaccctgactgctggctggcgtgcatgcaggtggtgagcgagctgactcatgggacgtcccagggcgaggtgagcaaggccgagttccaggaggccctgtccgacatcctcctcggcatggcggccgggctcaagagggaccccatcgtcatactgcgcatggacggcgaggacctcagggacttcgccgccggcagccgatacgagcc

SEQ ID NO: 17235 - DNA, 1647 bp, Setaria italica
  Peptide Sequence Number=SeqID_83209
cttttccatacgcgacgcggcctggccggcctgcgtcctagtgctgtgtgctagtcttgtatataaaaggcggggagggtcgggagcgctatggagaggagcagcagctggttcaggtggtggagaaggaggaaggcgcgggaggggcaggcggccggcgccggggaggaggagggccacgacgaccaccacaaggtggtggtggacgggtcggagatccgggagctggtggaggaccgggaggcgttcgggatgctcgtggacagcaagttccggcagctcgacgccgacggggacggcaggctctccgtgcgggagctgcggccagccgtggcagacatcggcgccgcgctcggcctgcccgcggagggggcctcgcccaacaccaaccacatctgctcagaggtggtgagcgagctgactcatgggacgtcccagggcgaggtgagcaaggccgagttccaggaggccctgtccgacatcctcctcggcatggcggccgggctcaagagggaccccatcgtcatactgcgcatggacggcgaggacctcagggacttcgccgccggcagccgatacgagccctcagccgccgccattttcccacaggtgggctccgaaggcgtgcccctgcgccagtgcctgctggccgctctccaggagctgagcgtcgaccacggagtgccaccggcttcggacgcctgggttgtcgagaacatcgtggagccggcgctgcagcagcttcctgccgatcggctcgagcagccggcggcttcccgagacggcttcttgcagcagctcaagatgctgctgggtgccgtcgccgaacggctccaggagcagcccgtgatcgtcgcgcacaccgagaacacctacgacgggagtggcgtcaagaggctgctggccaacaaattcgagctggacaagctgttggattctgtttggagaggcgtaccatcagaacataagaacaaggcatcaaaggagtgcctcgtagctgcacttgataagatggccgatgctgcaagcctgccacattatggtgcagttaaacaggtggatgctgtggtggacgaggccatcaagacggcaaacgccggcgacggaaagacggtagacgaagcccagttcaagaaatttctcacagataccctcggggcaatcatgcggcaactgaacagcaaccccgtcttcgtctccaccaacaccgtcgtgcacgagccattgtcctccggtgcatcctccgccctgttctcctcgccgcagctggtgacgtcatcgccaagtaaataaagttacatacatggcagttacatggagggaacagaatttcagtattcgagcggggcctgtggtgttgctttttgtctgatcacaggcaccgcggcagcatgttatgctgcctcggttgcaacctgatgaagtgcaaagatgcaggtcgtcaggtttgttaacccgattgatgtatacgtttggaataaggtgttcaagccagacacattggtcaatgggaaatgcaactattttgcagttcatatcctgagacacgcaagagttcgaaaggaacatgtttggttctatgtgcgtaagcattcaaatgttagatactcatgacaaatggtaaccaaagtaacaggttgcaacatg

SEQ ID NO: 17236 - DNA, 405 bp, Setaria italica
  Peptide Sequence Number=SeqID_83210
cgtggaggccgggaggctgcaggaggcgttcggcggggcgggcggggagggagcgtgcatgcgcgtcaacttctacccgcggtgcccgcagcccgagctgacgctcggcgtggcggcgcactccgaccccggcggcatgaccatgctgctggtcgacgaccacgtcaggggcctgcaggtaaggagccccgacggccagtggatcaccgtcgagcccgtccccgatgccttcatcgtcaacgtcggcgaccagatacaggtgctgagcaacgcggcgtacaagagcgtggagcaccgggtgacggtgagcgcggcggaggagcggctgtcgatggccttcttctacaacccgcggagcgacctgcccatcgcgccgatgccggagctggtggcgcccggccgccc

SEQ ID NO: 17237 - DNA, 195 bp, Setaria italica
  Peptide Sequence Number=SeqID_83211
cgggaggcgggggttggcgaagagcgggtaggggttgggcgcggcggggccaggcggcttggacggcagccgccgcgcggagagggagccgttggcggcctggctcacgagcagcatcgtcgcgggcgtacggcctctcgctctcgccggcgagcggtggtggggacggagggagggatggaggggtgggatttg

SEQ ID NO: 17238 - DNA, 683 bp, Setaria italica
  Peptide Sequence Number=SeqID_83212
tttttttttttttttttttaactttacgtaaaggtaacttacgtttagtttacctttaatttttagtaaaaaaaaaaaaaacggaaaatacgggtctattctgtcaagaatatggtatgtctattctgtcaagaaatctgaaaccattaatcttacagcaagaaatcgggtaatatggtatcaatttccattgtcgttcactacgcttatggggtacaatgcagcaatgaaacatcatggccatcagagctgtttgagatggtcttcatgcccatccgttgctaatgaatatctgccacatttgcttcctgcctcctgaaaactgacatccatgctgacattttatgatatcagctacttgcagatgtaaagagttaggtctgatcacttttgttcttttagcctggcaggctttcaaggcttggacctgtgcttggcaggccttccagttgcggtttgactccacaaggcagtcctgcagagagagatagatcgtggcgcactcattaagctgcttaacactctcgtcctcctcatctgcatctgtcacatgtaagggccgttgggacactgacagtggcacattcctagtgttgcttgaggaagattccattgcaagctttggtttggttcagtggtgccacctcgatgagtcagttttggcctttcaattgcagtcaaag

SEQ ID NO: 17239 - DNA, 309 bp, Setaria italica
  Peptide Sequence Number=SeqID_83213
aggacttgtctcctgatcaacttcagaaaggttagttcctcgtttcttaatataggtgaatgattaaatcgtattttgatcggaaattctgccattcctgtgccagcacttcggaagcattttcagctgaaaagaagaaaagtagaatcaggaaggcctgggatgggactaaagtcatttataatgttgcttcatggggtgctacagctgttggcgtctacaataaccgagcattgcttacggtcgcaactacagcctttcggacgtcctgccgtgtgatatccaagtttctatgaatattgcgtcaac

SEQ ID NO: 17240 - DNA, 704 bp, Setaria italica
  Peptide Sequence Number=SeqID_83214
attagccaaatcaaatcaatcatcgcgattctgagtcctaatccggacgtcgccaccgtcgccggctgtaggtccccttcaatccccgatggagccctcgccatcctcctcctcgccggcggcggagcgccggcggtcgccggaggtgaggagggtgcggaagcgggcgctggaggaggtgctggagcaggtccagcgggcggtcgagatgctgcgcgatgccgacgctgatctcggcacgtccctctcggaggacaccgcagcggcgccgccggagggtgaggaccgcaaggccggtgtcggtgacgatgcagatgacgcggcgtcgtcgtcggtggcgagtgactccgactacgagacgacccagatgtgtgaccttcttaaatctaaggttgaatcacttgagttccttaaaaagctcgatggtattcagaagtcagtatatcaagatggcacagttgaacctgatgtatcatgggatataataaaggcagtggatttgtgggaagatgatgacccagatgatgggagtttttatgtctctccttgcatgagtggtgcttaatgccgagtgtcatgttgtgcaggacttgtctcctgatcaacttcagaaagcacttcggaagacattttcagctgaaaagagaaaagtagaatcaggaaggcctgggatgggactaaagtcatttataatgttgcttcat

SEQ ID NO: 17241 - DNA, 872 bp, Setaria italica
  Peptide Sequence Number=SeqID_83215
agcgaatggtggcgaactccgacacgatcaccgcgctcccgctaaagaggctcgcccagaggccgtggccgaacgccagcagcacgacgaaggagatgccgaggagcaccgacagcttcatcgtcaccgacacggcgttcttggccttgtccacgttccccgctccgatctcattcgacacccgggtgctcgcagcggcaccgaacccgtacgtgatcatgtaggcgatggactcggtgctagtgcatatggcgatcagcgacgtgctcaccgtggaattggggagcaagccggcgacaaggaccaggagctcaaacgcccagatctccaggcagaccatgacggcggacggcgcggcgagcttcgcggtgggcagcacgtatctgaatgcctcggcggagaaccccttccacgtctcgctgaacgcctccgaccgcaggatgtacgcgagcaacatgagacaggacgccgcgaaggtgaccgagatggcggcgggcgcaccggcgagccccaagcccagcacgttcaccagcaggtgcgtgagcacgacgtggagcacgaacggcgccacggagcagacgacgagcggaatgacgacggactgcatctgcaggtagcgcagcaggcactggaggaaggcgaacgcgaagaggccggggatctggggccggacgaacgccgccgcttcacgggacacccggggctcctgccggaggagcagcagcagcggctccgtgaacacccacagcacggagacgagcgacgacgccaccgtcgacatgatgagcgacgactgcaggtacaggcccagcttgccgtacagcccggcgccgtaggcctgcccgcacagcgtctccagcccgccgctcagg

SEQ ID NO: 17242 - DNA, 493 bp, Setaria italica
  Peptide Sequence Number=SeqID_83216
tgctgtacgacccgtcggggcagttcgtgcgggcgaagcggcggacgctggaggacgcgccgcccagcgccgacctccgcgtgctcacctgcctctacagcgaggaccacgccgcgccgctcatcgacctgctcgaggcgtcggggtcctcgcgcgactcccccgtctcgctcatcgtgctccacctcacggagctcgtcggccgcgccgcctccgtgctgaagccccaccggaagagcagcagcacaagcaacccgacgccgtcggaccggatcgtgaacgcgttccggtacttcgagcagcagcaggcggcgccgggcgccgtcaccgtaagcccgtacgtggcgcaggcgccgtacagctcgatgcaccacgacgtgtgctcgctggcgcacagccgcaaggccaacctcatcctgctgcccttccacaagtcctccgacggcgcgcgcgccaccgccaacaacgccatccgctccatcaaccgcgctgt

SEQ ID NO: 17243 - DNA, 1367 bp, Setaria italica
  Peptide Sequence Number=SeqID_83217
ttttttttgtttgtttctttgaaagtcgcaggcgacacatccgtatgatgtatattgcaacaagatgtagagctctccttagtgtggagctttgaagtacacagttgataatgcatctgatcactccagtgtgtaaaggttacaggcttagatgctgatatgaatgctacaattgatcctaaccccccagatttagaatctgaaatctgtacacctattcgtattcccattcttcttttgggagtttcagtagatgaccgctgagatgaataagtcccaattctaagcaagacggatggcatagataagacagacagcagctccagatcatgcagaatcctaacatttgtgaaaaatcagccttctgaagaagaagaaattgttctatgcaagtgttctcaaccatcaaaatttttgctcatgaatagcccaaggtgcttcaatttttgcctgaaactgtactatgcaagtgttctcaaccatctgagtagcccaagaagaccagcatctagaactggagatttttgctctagtccaacatctgctgcaactcggtgagcacacatgatccctgagaatgctacagcaatgacaccttgcccaggaaaacagctgtcgccaacacagtaaaggccatctattgatgtagtgttaaaaggcattgccagtaagccctttggtttaccccgtggcatcggtccatatgtaccatcatttcgagcaagaaatcttcggtgagtttttggtgagcctacctctttgaggactattgaatcttgaagaccaggaaacaacttcttttcaagccttctgataatctcattggccactacctcttttttctcttcatattccttcctcgaaagaccctcccaatcttctatgcctgcggtagtaaatatatgaagtatatgatgtccttcaggagctaatgatggatcaagaactgtggggatactaagaaatatgcttccataaggcttctccaaattattccaatcatcctcaagtacaaaatgatggcagtcagtgccagcaggcaagactgaggctttgacacccatatgaattgacaggaaggatggcgccttaacataattcttttggaagtttttctcctcttctggaagctctttgtctttcaacagctttccaaaagtgtcccatcttgtggcatttgatatcaccgttttagcaaagaattccttcccatttgataacctcacaccaacagctttcccattttcaagaagaacgttggttacattcgccttgtaacggatttcactgccctttgcaacaaggccatctgccagggatgtcgcaataccaccaacaccaccaactggataattaatcccccaaag

SEQ ID NO: 17244 - DNA, 1928 bp, Setaria italica
  Peptide Sequence Number=SeqID_83218
cccatctctctttctcgctcgcttcggtgctcccttttctcgcccatccattgctccgatccaaacggtggcggcttcggcggcggccggcgaccggcgcgattgggcgccctcccgagcccctatgccctgaacgcgcaatccgaaccccgacgcgccggtttcgccgtcgccaccatgtctaccatcccctccatcgagcccttcaaccggctggtgaggctggcggcgcgcgccttctacgacgacatctccatgaaaggcgacaaccagcccaagacctcccgcggggacaaccgcggcatggccgtcgtcgtcctagacgcgctcaccagacggcagtgggtccgggaggaggatttggctaaagcgttgaagctccactcgaaacagctacggcgcattctccgcttctttgaagaggagaagctagtcacaagggatcaccggaaggagaatgcaaaaggagcaaaagtacataatgctgctgctgcagctgccggtgatggtccgccaggcactaaggagggagaagagaaagtaaagatgcacacacattcatactgttgtttggattatgctcagatttgtgatgttgtaaggtacaggattcaccgcatgaagaaaaaattgaaggatgaattggacagcagaaatacaattcaacactacatatgtcctagctgtaataaaaggtattcagcctttgatgccctgcaactggtaagctacacggatgagtacttccattgtgaaaattgcaacggtgaactggttgcagagagtgacaagctcgcttctgaggaaatgggtgatggcgatgacaatgttagaaagcgtaggcgtgagaaattgaaggacatgcaacaaagaattgaagagcaattgaagccattggttgcacaacttgatagagtgaagaatttacctccgcctgagtttgggagtctacagacatgggaaagagcaaatgttggcgcttttgcaaatggtgaccctagtgcagctgattcatctaggaactcacaagggcagtatggtacaccaatgccgtacatgggtgagacaaaggttgaagttgagatagctgatggtgtgaaagaagaaggtgctgaatcaggtaaaaacggttcagagctgaaagtcttacctccatggatgatcaaagatggcatgaatcttacaaaggaacaaagaggagagaccagcaaggtatcaaaacttgatgaagaatcagaagccaaggatgacaaaaaacaggactcaaaagatgatcaaagcatacaggaggaatacataaaagcttattatgaggccttaaggaaaaagcaggaagaggaagaagcaaaaaggagaatgcagcaggaaggtgagacttttgtctctgattctcaatctgaacgccaggtgggcaagaagtacaagcgggaggatgaggatgaaggtattgaatgggaagagcagcaacctacagggaatgcaaccgagcagtacaaattggcagatttaaacgcggaggcccaagaatctggtgatgacgaagatgatcttgagtgggaagaaggttaatacttgctggtgtacccccagctccctctgggattttgtcgaaatagtccaattccagcatgtcgctgacagccaaaaaacttgaatcgtgcgctattatgttaagagattctaccagctgcacaaccacaaaaaaattgtcaatagtactgcattgatgagtttgattcagttgtgcttgatcatggaaaacttgttcaattgaaggccagctcctacgcgttcagttaaagaatgtacaaaatgttcctatattcgagcaggaaaaacattttttctctgtaatttggaagagttgtgcacgattatgttgtggacgatttcatgcccgcaaggaggaattacaagtgttagaaaaa

SEQ ID NO: 17245 - DNA, 1115 bp, Setaria italica
  Peptide Sequence Number=SeqID_83219
ctcagtgacgtatgtgcctttgcccacatgttacctcaaggaggaatgtgccaaaagcgaaaacatcagtgagaggtgatgccttgcctgtgcgcagtagctctggagctaagtaacccatggtgccaaccatatgagtggtttggggatcggtgccatggtcatataaccttgcaaggccaaagtcaccaagccgcccattcatttctttgtcgaggagcacattactggccttgatatcccggtgaacgacaactttatcccacttctcatgaaggtataacaaaccagatgcaactcctttgatgatttgaaacctctgagcccaatccaacgttggtctctccacttcgtaatgcaggtatttgtctaggctgccattagacatgtagtcatacaccaaaaggagttcacctttcctccgacaatagccaagtaactgcacaaggttacggtgtcggatgcggccaatactagcaacctcggcaacaaactccttcattccctgcctcgactcatgtgacaccctcttcacggcgacctccactttagatttcggaaggagtcctctatacacccttccaaaccctcctttcccgagaagatgcttgtcctcgaacccatcggtagcatggaacaaatccttatacgagaaccggtgaggcccaaaatcgacctcccaatcctcccggagctcggcatacctcattcttcttctaacgactacaactacaagagtgcctagggtgacaatgaaagctgccgtggcaatcggcaccaagatttccaagaccttggatcgaggcttcgggccgaggcgaggtagctttggcagcttggcgatgtcgatcgccggagcaaatccgtccatggcgaagctccagccaagaatgtagtggtgagagtttatcgggccggtcgcggatgagaagccaatgtatgacggctccctgagcacattggagaggttgtaccttgcagagacgagtggccttactggtttggtcacggcaatgggagcgatggtgacgttgatcctcgcggcctccccgtcgtaatccacccacgcctgcatcacctcgccgctgatcaggttcatgccatggaagctcccg

SEQ ID NO: 17246 - DNA, 436 bp, Setaria italica
  Peptide Sequence Number=SeqID_83220
atcgatccccaccccccggataccacggccaccgcctccaccaaccgattccgttccgcgcccccctcccccgaccccgagggccgaggctctaaccgaggcgaaggctccccggcccgcggattcccgcagctccctgcgccgatcgcgacccgccccggccccgagggagaggtgatgataaaggataattactaaccaaacttgctgtaattttccttaaggaacatcatgtcgcatagaaatatggtctggacacatcagtctgttaatcctggatgggagcaagtacatgtccaagttcaaactgaaagttcctattatggaggtcctggaagtgatccgtccaacctgggtgtgcaagttgctgttggagttccaggaagtactgctaatgtcggtatctgtgatctgcggaatcatgagcaccagcatg

SEQ ID NO: 17247 - DNA, 1666 bp, Setaria italica
  misc_feature (1643)..(1643): n is a, c, g, or t
  misc_feature (1652)..(1652): n is a, c, g, or t
  Peptide Sequence Number=SeqID_83221
ctcgtcgcgatttatttcgccgcaaaaaattcctgccgtaataaaggcccctccgtctaccgtccacgtgggcggcggctgcgtcggcggcgttggcgggcgccggagatgtgagagccgccgcgccgttggagatggctgcggcgggggcgggggccggggccggggagcgaggggaagaagcggggcgcgtcgcggagctggatcctgttcgacgcggccggggaggagcgggtgctggacgccgacaagtacgccatcatgcaccgcgtcgacatcaacgcgcgcgacctccgcatcctcgacccgctgctctcctacccttccaccatcctcgggcgcgagcgcgccatcgtcctcaatctcgagcatataaaggcgatcatcacttccgaggaggttttgcttagggatccatctgatgagaatgtaatccctgtagtagaggagctccggaggcgcttagcaccatcaagtgccacacaacatgatggaaaggagaacttaagtggccagcatgatgtggaaggggcagaagaagatgaatctccatttgagttccgtgcactggaggttactctggaagcaatctgcagtttccttgatgcacgcactactgagcttgagactgatgcttacccagctttggatgaattgacatccaagatcagcagccgcaacttggatagggtgcgaaagttaaaaagtggcatgacaagattgacagcaagggttcagaaggtgagagacgagcttgaacaattattggatgatgacgatgacatggctgatctttacttgtctagaaagttggctggggcatcttcccctgtcagtggttctggaggaccaaattggttccctgcatccccaactattggttcaaaaatatcaagagcaagcagagccagtgttgctactgtacatggaaatgagaatgatgtggaagagctagagatgttgctagaggcatatttcatgcaaattgatggcactttaaacaaattgacaacgctgagagagtacattgatgacacagaagattatatcaatatccagcttgataaccaccgtaatcagttgattcagctagagttattcttgagttctgggactgtctgcctgtcgctgtactcgttggttgctggagtctttggtatgaacataccgtacacctggaacgacaaccatggatatgtctttaaatgggtggttctcgtatcagggcttttttgcgcctttatgtttgtctccattgttgcttatgcgaggcacaagggtctcgttggatcctgaacagctgaaataaccgcagcttgcttccctcaactgtaaattgagctagagagcatcgactttgcggggcaattcatctcttgtaccaaattcattagtatcaaattggggatgttgaatagggtcaataaatagaaagaagttaatgcaaaagaaatatatggtgattgttatcaaagtctgttgttaaccaggtagctctttctgaaacgatttcataactactgcacgggtgcctctgcattctctctcacttttagtttagaaatgcctcgtgagggttggtttgatttttgtcacgtatctaagctatttattctggatgacgtatgtttgcatctgtgaantccttcatntgaatttaaaaaaa

SEQ ID NO: 17248 - DNA, 323 bp, Setaria italica
  Peptide Sequence Number=SeqID_83222
tttaatccgacaagactcttgctggctcattcaaatgggaaaaaagttgtactacattagactggaacccatgggataagaaaactgaaagtcagttatctcacgatgctccatgccttgacagagcttttgaattgcaggtgatttcctgttatctacacaataaaatatgtgactttttttggctaggaacaagtaggctactccatcagtgattttatgcttctacgagacctttactttgtgctttcttcttcccaccttttgcagcctttgaagtacaacttttttcccatttgaatgagccagcaagagtcttgctg

SEQ ID NO: 17249 - DNA, 274 bp, Setaria italica
  Peptide Sequence Number=SeqID_83223
gggttattagggggtagaaagcgagagagaggagaggaagggaggaggaggcggcggcggcgcgccatcactctacccctgctctgctgatccggaggacggaggcgaggtacgcacggctatctccttccgtttctttcgagaagatgacggtcgttggatgattcggcgctcttgatctggagtgaaattccgtttgttccttttttttgtctcgtgtgattggtttcttggtcggagagagaaaggatctcaattcggcagtgatttcgaa

SEQ ID NO: 17250 - DNA, 1301 bp, Setaria italica
  misc_feature (1273)..(1301): n is a, c, g, or t
  Peptide Sequence Number=SeqID_83224
cgtgtctcagttcatcatcatctgatactggaaaaggacaaagtaagttgtcgagcaacaaagtaacacatggatttcacttagtggaaggaagatctggccatgacatggaagactaccacgtagcagagtacagatatgaaaatgatcatgaacttggtctgtttgccatttatgatggccatttgggagatagcgtggccagttatttgaaagctaatctttttaacaacatactgaaagagcctctcttctggtcggaccctcaagaatccattaaaaatgcatacagctctacaaacaaatatattctggaaaattctaaacaactaggaccaggcggttcaacagcagttactgctattgtagttgatggtaaagatatgtggatagcaaatataggtgattcaagagctgttgtgtgtgaaagaggtactgctaatcagcttaccgttgatcatgaaccccatacaactaatgaacgaaaaaggattgaaaagcaaggtggttttgtttctactttccccggtgacgttcctcgtgtaaatggccaacttgccgttgcaagagcttttggtgatcagagcctcaaggcgcacttgagctcagaaccggatgttaagcatatacagataaatccgagtgtagaatttgtcatacttgccagtgatggattgtggaaggtaatgaagaaccaagaagctgttgatctggtgaagtcgaccaaggacccacaaacagcagcgaagcgactaacatccgaggccctggggaggatgagcaaggacgatatctcgtgcatcgtcatccggttccgatgctgagtctcgcaccatccatctcactagtatgggctttttcacatttctccttatctgcatccacggaatggtctcctcctcctataccaggtctgtgtacattgtagctggtgaactctggatctgtgggcagctcaggaccgaagatgtgggcaggttcttgaccaaaggaaaactgttgggttgggtgtttgcagcctgttcaggctgtttcttttatgtgcatatatgtatacacgttagaagcaaatatatactgttgggccggagacaagaaaataaactgcccgaagatgcaaagacggtacagattgtatatgtaagacttggtagtgctagtttgattgttgtttttagtgactcgtgtgtgttttatgtgaatatgtacacttgagaatttgagatgaagtaccgttgccattcacgtccgaatggagccagagactaaaaannnnnnnnnnnnnnnnnnnnnnnnnnnnn

SEQ ID NO: 17251 - DNA, 227 bp, Setaria italica
  Peptide Sequence Number=SeqID_83225
gcggcatgacgaaggtgacctaatctccacagcttgacatacttgtcatggcctgtggaagccaccaggccggagctcgatgaggccacggctgagatgaggctgtcgtgcgctgcaatggtcatgctccggttctcggccatgtcccacagctccagagactggtaacagccaatgacaagcaaggatggatatgtagggtggaaagcacatgaactgaactttcc

SEQ ID NO: 17252 - DNA, 248 bp, Setaria italica
  Peptide Sequence Number=SeqID_83226
atatcttagcatatataatacatcagaaagcaacatagatgatatttgtcaccttaagcaacaacattgaataaagaattggctatataacctagtgaggaaaatgtttgtgtgcatctgaactacaattagaaaaggagcaaggttttgtatgaaattgtagattccagacaatttgctggtaagcaaggttttagattgatcctttgttttctggtaatctgatcaagcctgttcgagagctgttg

SEQ ID NO: 17253 - DNA, 695 bp, Setaria italica
  Peptide Sequence Number=SeqID_83227
ccggcgccggcgacggcgacgaggtggtgccgctagggttcgcgtcgacgcccatcgggaggctcaacaaggggcagtactggatcccgacgccggcgcagatcctcattgggcccacccagttctcctgccccgtctgctacaagaccttcaaccgatacaacaacatgcagatgcacatgtgggggcacgggtcgcagtaccgcaagggcccggagtcgcttcggggcacgcagccgacggcgatgctccggctgccgtgctactgctgcgcggcgggttgccggaacaacatcgaccacccgcgggcgcgtccgctcaaggacttccgcacgctgcagacgcactaccgccggaagcacgggatcaagcccttcatgtgccgcaagtgcggcaaggccttcgccgtgcgcggcgactggcgcacccacgagaagaactgcggcaagctctggtactgcgcctgcggctccgacttcaagcacaagcgctcgctcaaggaccacatccgggcgttcggcaggggccacgccgcctgcgggatcgactgcttcgacgacctcgacgacgacgaccgcgacccatcctccgaggtcgaccacgccactactaatgctggtactactactagtagtgctgctgctgccggcggcgccgccagttctaagcaacaacaccactggaagccgccgccg

SEQ ID NO: 17254 - DNA, 1550 bp, Setaria italica
  Peptide Sequence Number=SeqID_83228
cagaagcagccggtatttaacaaaacccaaaccccattacccaattgtctccggggctagattgatgcttgacgatgtattattgtcactgtttcaccactctcacccctcattattctctccaatcttccatcaactcaagttgagcaatcaaggtgcggggaaaaaaaagtaaactcaaaatggtatatgtgaaatctagcaaccggcggggcgggcgcacaccctgcgctggatgggggtccggcacgaagggcactccttcatcccttgcttctcatggaggtcactgcatttggcacagaccacctggtgggcacaagggaggaacaccacggacatctcctcactcaagcacatgacacactcccggtcacgctgtatatcatcaaaatcgagatcttggggtactgctatattggacaaaatttgtgcattgctgttctttctcccttcagaaagatgcaacgcataggttttattgtcggctccccacttgggggcagcaacctttgaagagtccatggacaccttcagctgcacaatctgctgctcaagagcacggatctcactcttgtatctttgtgtatcattcgctgctttaagatgcagcaaattctcttctgatctcactgatgtctcaatttgatccctctctttcctctctgaagttacaagggcaattgcttccatctttgctgcctcttcttgtttccaccttgcctgcacttgatccttttgctctttagcatgctgaagttgttcttgaacccgagataacctgcttttctgtgctgcaagatcctcttgcaacagggctctctcagattcccaacgctgagaccttttacgactattctcatccttttttaaaagctccgaaatatttgttgcagactctgctgcatgccgctttgcagcttccatctgtaacatgagttgtgcattctcagcctcacgtctacgagcagaggcatctgccctctccagctgagcatttgctctagaaattgcagactccatctctaaaagcttcttccgattactctcttccgaatggtgcctctcttcttgttggcggtccgcatcttccttctctttcctaagcgactgaagttcctccttctcctttgcaagtcggtgtgcaacttgcatcactttctgctgagcccagtccgtccagtcccgcatatgtgcttgcaattctttctgcctctggacaagaatcaagacagtttcatcctttttatcttgtgggatccagactttttgttcctcatcatacgaaaaattaattttgccactagagtccacaccctcggtattcgaatcatgatttgaagagggagcaagaccatcacttgaggagggcaatgacaatgaaagatctgtgctagcagcaggtgctgggtttgagttactaaccaccttggcatcgaatggagaggaaagggtaccagtaaaggaaaggtcaactgatacgtctgatcccgttatgcttgcggcaaaccctttgccaacttttgatgagcccttcaagttgctagcag

SEQ ID NO: 17255 - DNA, 371 bp, Setaria italica
  Peptide Sequence Number=SeqID_83229
gtttcaaaatgatgcaccaagtgacatccaagagcacagttcttgttttcttataattggcctcaagtgtgttaaaagaagcagtaggaaaatggatcacaggtcacagcccacattttgtaccattttaccttgtgccatgataagttactacctcaactctcaaacaacttgtgctctttggcaaacaactgctgagtttgagacctgaagcctcatgcttatggtgttaacacagtttagataaagatactgaggaagtagcatacagcaaaaagttactacagctctagcatatggcataaaattgtgtaatctggctacccaaagtacagtgtgcagtgtagcatagaaccaggagctgatgcaag

SEQ ID NO: 17256 - DNA, 779 bp, Setaria italica
  Peptide Sequence Number=SeqID_83230
aaaatgcattgttgcaccccgtggtctttggatgtttcacactgtagagaatctagagatgatcagtttcaagaagattacttttatgaatgcggtgaggggtacagactgtctcgtttaaataatggtaccgaactcacatctgcttcaaatgaccacatcagtacaataagctcatctgaaggacagtcaccagagggtttatcttccaggccttgttgttcatgttgttccagtaaagaaaagtacttctccattgcagaagacaactgtgactcgtcgcaagaataggagctacaaagcatttatcgctaatcggaaagactttatggaccttgttgtgtcgcctcgcatgttccttgatcatctcccttggaggtgtcagtatgcgatgcaaaaggttatagaagcacagaaacgggagcagctcatccatgattcgtcagctgcagaggacgctgtatgaatctattagctgcgcttgccttctttgttgtacatacgttaggtaattaggatcacctgctctatgtgcaatatcagtcttcggtgcattattgtctgtaagtagatgaggattactctgatctcagcatcgttgtacacagccttggataggtttgctctgagatcaacgatactggctctgttattaatgaagccagcgtagtagattataaccaccagtatagtaggttagagcatatatatagcatcaaatttggttacaacagcattgtataggctttgctctgagtattgtaacctactaaaccggt

SEQ ID NO: 17257 - DNA, 739 bp, Setaria italica
  Peptide Sequence Number=SeqID_83231
ttatttatttattgggttattggtacttaaacactgacaaaggtcttcttttggtggcagataactttggtaatccttacagcctggatagacgatcaaagactagaattgggcatccaactcttatacataaaaagggtagcaaggtaaccagccttcattgcaaccctgcacgacctgaagttcttctgagcagtgggaatgatcactatgcccgtatttgggatacaaggaagcttgaagcgaactcgccccttgccagccttgctcatggacgggtggttaattcaggttatttttctccacaaagtgggaataagatcttgacaacatgtcaggacaaccgtattcgtgtatgggactatattttcggtgatcttcaatccccaagtagagaaattgtgcacagtcatgatttcaatcgtcacctgacacccttcaaagctgagtgggatccaaaggattacacagaaacagttgcagtcattggccgttacataagtgagaactacaacggtgttgctctgcatcccatcgatttcatagataccagttctgggaagcttctggctgaggtgatggaccctgacataacaacaatcagcccagtgaacaagctacacccgcaagatgacatcctggcaacaggaagctcaagatggtccttgcaggtccattttcatttggaaaccaaagattgaagatgaatttacagaagaaaggaccaaacagaactagt

SEQ ID NO: 17258 - DNA, 1361 bp, Setaria italica
  Peptide Sequence Number=SeqID_83232
gagtgaatatcaacttgccgtggcgctaaatgttacatgaatacatgatacacgagccgtctggagctaagtagtgaccgatcaccaaactaccatactgatgatcaagtgcagatgtacaactcaaggcaagttgatattcactcaccgtggcgctaaatgttacatgaatacatgatacacgagccgtctggagctaagtagtgaccgatcaccaaactacacaatattctacagatttgctgccacttcaaaacgtggcagcactcagctgctatcctatccttgttacacatggaatccctcctattactgcaagcacactacatgcatagctcaaaacaatccaaacaaacgatgccgctgctggctgctgctgctgctgctgtagctgcctcccggtggagttacagatatcctgtccgcattagccaacgcccacctgttgaaatccggcgaggacagcaagtgtttcatggctttgtttgtctcctctttggtgaatgctttgtattcttcgtctgagaatttcttcctatctggagtagtatggtaggtcgaatagtagttgtcccttgcagcaccttgtgacaatgtctttcccgagcctgcaagaggcgagtttttcttggtgtacgtctcaggtgaccatggagcttgctaaatccatcttggtaagccccattcatggtagaatactcttcacctaaatctccataacgagaggaatgctttgcagtttcactagaaagtccccgtgaaaaaaagcgtaaaaatcttgactttccctcaattcttgcaattcctttgatgacaacacaaaagaccaaagctgcaaaggcaaagagatagtccagagaactctgaaggatcataacagctgaaacaatcaagatagcccactcaacaaaataagccacaccctcgtcaacagatccatcttccgtcaggacaagtttacggacgccccagtaaccaaccaggctccagctaagacgaccaatacgagaaggaatattcctagaggattatgcatgtcttcggcaattccaatttccacgaggactgagcgcaacagacccgacaaatagtgcagaaaatatgtcgtcatgccaacaactgtagagtaggcaaaaatagcgagcgaactctttctgccagtgggtaaaagcttcattccctgaaagagtataatcagtatcacaaggaaaatgccgatcgtcatcgctccaccatagtagaacaccacagactcactcaatgtatgtgccaccaccatcagcaccaatcccagcaccaagaacaccaccctatggagcaagaactcttcctcagtgtacacaacaacggaccttgaaggg

SEQ ID NO: 17259 - DNA, 342 bp, Setaria italica
  Peptide Sequence Number=SeqID_83233
tatctctgcgactcctcataagctctctcgtatttccatcccaatactccgcggcaatcacggcagtagatatcagcaaccgtgtgaaggccagtcatgagttgcctatcctccttagtccccacagatatgttcatagcatgagaaaacagaaatgcacggccattccttccctagaacagtcagaagagcaagggagagacagtatcatcctccaagcacaaacaaaaaaatacaagctatattcaactataacctgttcttcagttaaatgaattccaactgctttctctacaaacacagactgatgtctaaacacattattcattgtatgtattgtat

SEQ ID NO: 17260 - DNA, 605 bp, Setaria italica
  Peptide Sequence Number=SeqID_83234
gattaacagattgccttcaccgtgatagaaatgacagaaacttggattaactgaaaccctgcaacacaaatctctgcacttattactctacagagagatgaatttgggtgcccctaggaatgcagcaaccaaagaaactctgttcaaactgtaaatttgggtgttcctaggattaatgcagcaaatacagaggcttttactgatgagcttcttcagttctactgcagccaaaactactagtgttctcatgaattcactaattaaaggaactatttactccttgacagatgacaattataggatgccataaacaatcagcccaacactgctgttactgaagaactaggcccgaatctgaaatccccaacaactcccctctcgtttcacctgaaaggccttggaaatgatgtcgtcgtggaggcagacgtggttccggcaatggcagcagctgtacacccgcggccccaccagctccgccatcggcgctcctcccttcccctcccctgcaaccaatctgcgattgaatcgatgagcgggaagtaggggagagatacagatcaatcaatctagccagcacgaaaacagcggcgccgacgactgggaaa

SEQ ID NO: 17261 - DNA, 1665 bp, Setaria italica
  Peptide Sequence Number=SeqID_83235
tcagtgtgagtagtttgcaaggaatatttcaagatttagcatggttgccaagcgaattgaacgtaaaattctcatcacaggttccagaaatgaagtacgtaataatctgccgcaacaaattctaccgagcacctaggtttctgttggctgagtactactgcacctgcggactctgtaaaccaacttaagcctttctaacctgaagccaactataaaagatacctcaccaagaaagcttccatgcattaccacattagcataaaatgaaggagggatcacccaaattcaaagagcagccaggtctgccagtttatccttaccacgcgagctaacattcttcgcaaccccaacaatctcctccatttggttgtccacaagctcattaagctgctgctcctgggtcttgagatcttctggttgctgctcaactgtctggtcgtcagcatccccaccctcttgtgtccagtacacagcaaaggacacctcctcgttcacactgcttgacatctgcaccagacgcttcccattggttccagtggcaccgccaaggatttcacccttggtgcggtcatatatgcaggccctgaagttgtccatgctcttacggtcctcagaatcaaggcttagatagatcagaatttcccagcaccgcaggaactgtttcttgttgatcttcagcttctgccggacagtctcggtcaggtcagctggcggaaccatcttcaagctgcaagtcctttttgaaaggttggtctccttcagagatgataccatagcactgagcgctggtttgattggatcaagtgtgagaagacggaggcagtcgatagatgaacgcacatactgcagataatctgaagggtcttctatggttacgtcatatatgttctcagattgtgcaatagaattgattgcctcaagaagacgaaggccatggccttcaccctgatgaggtggcaacaccagtatctggctgatccgcaaccgattgctctcagggtaatgataaaaattatgcacagctgcaaaacctagcagttgaaattttgaaacggactcttgtgttgtcctttttactaccagaagcatttcccatccatgttccccaatatctataggcgtggaaccttcaactagaagcagaacaagcggcaccaggcgagaataaaggaatgcagcaacaccttggagttcaactcgaacaatctcaactgctggatctgattcatttgtgccgttatgctttatggcactaccatttgtcaccacatctctgatgtattcgcattcctttgaaaaggtttgcataaattcctctttttcgaccaagctttctccaaaaatgctctgaagaacagtatttagatcagttattccttttcctccatcagatgtttcgtcaaatgaaatatcagcatatccatggaatgatattgcacttatccacacatttatcttaagatttttgtaaccatatatctttccatcttcaccaaaaaaatggtttaggtcaaatggttgaatagaagtgcagtcttcagagcccacctcatcagagtttcttgccagaaacactttcatacactcatttgcctcgactccagcatcgatgccggagaagccgacgcggcggcgcttctttggggtcggcggcggcggcggcgt

SEQ ID NO: 17262 - DNA, 731 bp, Setaria italica
  Peptide Sequence Number=SeqID_83236
ggggctcaaaaccactagcttccatgaccaactgctggctggttggattgttctgaacaactgttgtcaccacatcagctgcttttgctcggatacgggcgtcagaatttctgaggaacttgataactggaaccaacccaccaacagagtgcaaatctgaacagcaatattctattgccaaaaaaaccactatagttgcctccatccatttgtttagccacctcaacagaaactactaatgccattgaatcatccaatgatgtgaatgtattcagtttgacaccagtaatgcatgcctccaagtgctaccatggtctccatttgccatgtcgatagactcaacatgtacctgcagctcactcaacagaccttcgatatcgtcgtgggtgatgccctgcgcctccaggacggcaggcggcgtgctcatgagcagcgcgatctcccgcatccggctcacaacgttgtagcaggcgatccacaatgagtcaacgagctgcctctcttcccgtgcagcatccagatcttcaggagtcatcctccttatgctttctacgcgtccccggagaagccgtcgtaacctgtcatgctctgctagtagactcctatttcccagtgtcatgtcccttgcaagctcaagcaagccccctaatgctgcttctctaacaccagagtcattacttggtattgtcctaagtcgtcttatttcttattttaaggttttgggggtttaa

SEQ ID NO: 17263 - DNA, 725 bp, Setaria italica
  Peptide Sequence Number=SeqID_83237
tcttgcactctctgaattcaatgcatctcttagtcctgtatatccattggctaaacgaaatgcagcaactcctggtctgttgtttcgtatcaaggaagatagagcaccaagagctttttatgcgggcagtaaggtcaggatctgatctgaaattggacaagaggggctcaaaaccactagcttccatgaccaactgctggctggttggattgttctgaacaactgttgtcaccacatcagctgcttttgctcggatacgggcgtcagaatttctgaggaacttgataactggaaccaacccaccaacagagtgcaaatcatttgccatgtcgatagactcaacatgtacctgcagctcactcaacagaccttcgatatcgtcgtgggtgatgccctgcgcctccaggacggcaggcggcgtgctcatgagcagcgcgatctcccgcatccggctcaccacgtccaccatcatgtgccgctccaccgcctccgccagccaccgccgctcctcctcgctgatggtgcgggacggcccggccccgtcgacgtaggagaggctccatttcagcagccccgcccagctcagcctatcccccgccatcccgtcctcctctttcaatcctccctgatcccacggcgctgccggcgaaaccaaaccaccgcgcgtccggtgcggttgctctctgcggttcccgaagccggtgatgcgtgcgtgcgtctaaaca

SEQ ID NO: 17264 - DNA, 469 bp, Setaria italica
  Peptide Sequence Number=SeqID_83238
gcgcgcgcgcggcggggcccgcgccgaccgcgcgcatctttataggcagcggcatcggcgcggccaccccacgaatcgcgcaccattcctcgctcaccaccatcgcaccgcacgccctcgcctccgacagcgaccgcgtcgtcccccggttcctctcctccgcagccggcagccgccaagacagccgggaagacccaccagagcaaagctagcgctccacggaggcgacgatgacgacgagctcagccaactccgcggcgtccccggccgtgtccggcctcgactacgacgacactgcgctcaccctcgccctcccgggctcctcctccgaccccgccgccgccgccgaccgcaagcgcgcccacgccgatcacgacaagccgtcctccccaaaggcgcgggcggtggggtggccaccggtgcgcgcgtaccggcgcaacgcgctgcgcgacgaggccaagctcgtcaa

SEQ ID NO: 17265 - DNA, 448 bp, Setaria italica
  Peptide Sequence Number=SeqID_83239
tttggtcagttctgcatcagaacactgtggttgaagattgtgatcatgttgcattgtatggcttcagtttttctactggggaaaagttcccattctctcctgaaccttcaatttctactgtacctttgctggaggggaagcttgtcgacttgaaaataggcaaggacaagctttggatacttaaagaatttggatcaatgctgtatgaaatattgcagtatgacaccaaagctgagaaaatttgctcttatgtgctacaagaagacgctatcagtgagcaattgtttcaaagttcagacaatgcattggatgatttggtctggacagctgattcagtgttctcctccttgaaggaacaggctttcacttttatttcatctatgtttctgcggaggctacttcaaccaggagtaaaccactgttctgctcttcgtgaaaccttattaga

SEQ ID NO: 17266 - DNA, 2078 bp, Setaria italica
  Peptide Sequence Number=SeqID_83240
gggcagtggatactccactttgtgaacaagatggtgatccagctttatttagaagtgtggtattgcaaggcattgtgccagatcattttgaggatatacagaggcatctgtactctgcaactctatcgagggattttctccagttgcagttagatgaggttgctggtcattattcagatgttacacagcggtcttctgatgagatcaccaagctccaggtactactaaaagaaactgaagaaagcaatctggcagttagcaaagagcttcatcaatgtagacatgagctttccgaggtgagcacagttaagggagatcttgaactaatcatggcttccttgaaagaagaaatcaacactagcaacttaaggtgcacacgtttggagagtgagctacattcctccgaggagaacacaaaacaaatgcagagtgaattagctgacaacagattgttactggaagccctgcaaaaggaaaacctggagcttagtgcaagccttgcttctgagaaagaagccaaaaaagcagctgaggagcagcaggaccatctatcttctgataacaggaagcttttatcagagttgtcaggtcttgagcttaacttagcttctatgaaagaggaaatggatgctggcagtagcagatgtgaagttttggagaaagagctgcgttcctccaatgagaatttggagcatactttgacagaattggcaaattatagggctctgttggaatcattgcaaaaagataatttggagttatctgcgaattttgtctctgagaaagaagcaaaaaagaaacttgaagaagacaatgtggatttatgtaatgaaaagggtaggctttcttcagatttatctgaactaaatgacaagttgaacctttcatatgccaagcataagcagcttgagtcacatgtcaaagatacggaaacatactttgaacaacttacggagcagctaattgaggaaaatctgtacgctagtagcagcgcagatgtttaccaatctgcaatcaaagacttgcacgctaagtataatgtggtgctgggccaatttcagaatgttgtgcatcaagaaagtgatcttcatttggacccacctaaagtcaatactgaaaatgctgaaagagccattacgaggcctgtacttgttggccatggtaatcatcagtgcactcctaatctggccaacacgaatgactcatgtaactctactgctttacagttactgaagggccatctagaggtgtctaaaggtgatttgcatgaccttgaaaagttgctagagaggatttcctctaggtctgatggacgtgttctggtatcgaagctcataaaatcattcgagcctaaaggaaatgaggatgacactggactaactgagggggagcacgatgaattacggaagtcaactcgggagatgatacgtcgccttggggaaaagtttatggcaatgagctcagatattacaaaaactgaagaatatgtggctgaactttgtaacaaaattgaactttccgtcaagtctactgcgcagcatgatatagatagacaacagactgttgttcttgcggccaaaatggatgaacttgctgggaagctgagcaactacaaggagacaattgataatctgcacaatcaggttgctactgttcaacaggatgcaaacagtaatgctgaaaggctcattgatcaagcagaactgttgcaaaaggatgcggtagaaaggatttccattcttgagaaggagagggtgtctttatcagatttgctcattgaagtaacaaataggctcacctctttgggatgtactatgtttcctaatgattccagtgaaagtgaagatctcagtttccgcactttgagctgtgtggatcttgttgctacatcattccagagtcttcaggagaaattagaggctgctcaaattgataatgctcagctcaatagttctctggtggagctcaggaaagcaaactgtgttgctcaagagaggagcgaacaagcatttgaaactgtcaagaaactgtatgattccctgcaggaacttctatgcgattcacttaaaaaattcaaa

SEQ ID NO: 17267 - DNA, 255 bp, Setaria italica
  Peptide Sequence Number=SeqID_83241
gcgccgcctgcaacgcgaggggcgggaagtgccggtacgacaacgccaccgcggcgttccggtgcctctgccccgacggcaggcgcgcggcggggtcgacatgctccggaggaagcaataggaagataatgatagtcagtatcacctgtggaacagttggtggtatattggcagtagggatcctcatttttgtctggcacaagcgcaagaggaggaaacaagttggagctccaaatggcttcatgcgtagtgaat

SEQ ID NO: 17268 - DNA, 802 bp, Setaria italica
  Peptide Sequence Number=SeqID_83242
ctcatgccagacagagatgcaaaatagtaattaatcactgggcatcaaatgatgaaaatcatcttcatgtttagtcataaattcttcttttccttttattttaggctttcttctgcctatatacactgtcaagtcttatctgcagttacaaaagtagttcagctatagactaaagagggcaaagttttcatgtcagactaacttaaactgcacaattttacaattgaaatgacaagctattcacagtgactgttcttatgcaggaggaagcaataggaagataatgatagtcagtatcacctgtggaacagttggtggtatattggcagtagggatcctcattttttgtctggcacaagcgcaagaggaggaaacaagttggagctccaaatggcttcatgcgtagtgaatcctctatgcaatcatacagcaaagaccttgagttgggtggttctctccatattttcacttatgaggaacttgaagaagctactgatggatttagtgactcgagggaacttggtgatggtggtttcggaactgtttacaaaggcaaactccgggatggaagagtagtcgcagttaagcgcctttacaagaacaactacaaacgggttgagcaattcataaatgaggtagacatcttgtcccgcctcctccaccagaatctagtcatcctatatgggtgcacatctcgtagcagccgtgaccttatgctcgtgtacgagtacatccctaatgggaccgttgcagaccatcttcatggaccacgtgcatcagacgggcctgacatggcctgtaa

SEQ ID NO: 17269 - DNA, 987 bp, Setaria italica
  Peptide Sequence Number=SeqID_83243
agagcactgcacgacccagctatgcggcaacgtgaacatctccttcccgtttggggctcgttccggaggaggacgccgtgacgcactgctatgcactgttccaggttcgttgccgtaacaacaccccatacctcggatactatcagaccgagttcttcatgcagatcctcagcatcttttacgacaacgcctccttgctcatcgctgagacccaggatcacaatgactctagacacctggaactaggctgctacatcccgacaggcaacgccacctccaagttcggtcgtctgttctcgatcagccccctcaatcagaatctcatcttctacaattgcatcaagccgctgccgccatccgtggggcttgcagagacgatgtgccgcaacaacacgtatgttcgcgtcgctgccgagcgttacgatggtcatggcagctacttcttggagggctgcaactattccgtcaagccggtgcttggaaggtctgtgaagatcgacgcgagcaactacgcgcaactcctcagcgacggcttcctcctgacatggcagctgacaccgcaaccgttgcagctgccaccgccacacccaccgttgcaaccgcgagcaggatcattgcagactgaagtcagtgccctggattaacaaaccttgtcccttgccaatgactgcttgcaatcaaataaactcagaatagagaactttatacagctccagatcctagagatctcactttgcaggatagcaaggtcattaagcaatggtgggcggtatcaggaagctcacgtcgatttgcgagagactggccgcggcagggactggttcagggtcagggtcacgttcagggagtggtcgagggaggcgtcgaggcaggcctcgacgtagggttgaggaggagggagggagggaggagggagcaggaggtggtccaggaggcctcggagggaaaggtaaagcggcgaggccccgtgcctgaacctgaggtgga

SEQ ID NO: 17270 - DNA, 2144 bp, Setaria italica
  Peptide Sequence Number=SeqID_83244
aggtagattgctcggccaatataagatgcggcaatctgaacatctccaagccattcggaatcgttccagatcaagcaacggagcccaactgtggttcgctggtttccaggtcatttgcaagaaccacactccgtacctcgggtactaccacccgaacaagaacattcctgactactaccagctccagatcctggacatcttctacggcaacggatccttgcttgtcgcggatatggagaagctcgaggacttgagaaacctgacccatgaagactgccaacaatacagattccctacagctaacacctcatcgaagatagctctcccgttctcgatcgaccccatcgtcaatcagaatctcatcctctacaactgcaccaagccgtcggcgccggcagcggcagcggccgaggggcttgcggagaggagttgcggaaacaacacgctttatgctcgcgtcggagacgagcggggcaactccagcagcgatgactctattatgaagggctgcactgccatcttcgtgccggtgcgtgggggatatggcaaggcgagcgcgagcaactacgcgcaactcctcagcgacggcttcctcctgacatggcagctgccaccgttgcaaccgcgagcaggaggaagcaataggaagataatgatagtcagtatcacctgtggaacagttggtggtatattggcagtagggatcctcatttttgtctggcacaagcgcaagaggaggaaacaagttggagctccaaatggcttcatgcgtagtgaatcctctatgcaatcatacagcaaagaccttgagttgggtggttctctccatattttcacttatgaggaacttgaagaagctactgatggatttagtgactcgagggaacttggtgatggtggtttcggaactgtttacaaaggtgtcctttttattgcttaaggcaaactccgggatggaagagtagtcgcagttaagcgcctttacaagaacaactacaaacgggttgagcaattcataaatgaggtagacatcttgtcccgcctcctccaccagaatctagtcatcctatatgggtgcacatctcgtagcagccgtgaccttatgctcgtgtacgagtacatccctaatgggaccgttgcagaccatcttcatggaccacgtgcatcagaacggggcctgacatggcctgtaaggatgaacattgccatagaaacagctgaagcacttgcatacctccatgcagttgaaatcatacaccgtgatgttaagaccaacaacatattgctggacaacagcttccatgtcaaagttgctgacttcgggttgtcacgtctgtaccctcttgaagtcacccatgtctcaactgtcccacagggcacaccaggctatgtcgacccggtgtaccaccagtgctacaagctaactgataaaagcgacgtgtacagcttcggagttgtgttggtagagctcatatcctctaaaccagctgttgacatgggcaggagccacagcgagattaacttggccaacatggctctcaacagaattcagaatcacgaagttgagcaactggttgaccccgagctcggttacgagactgatgatgaaacaaagagaatggtagatctcgtcgccgagttggcttttcagtgcttgcagttagaaagagagttgagaccgtcgatcaagcaggtagtggaggccctgaattgtatcaagaatggggattccccagaaaaaaggatggatttgaagtcgtctcctaaggaagattcacacttgctgaagaatagcgtacagtattcgcctgactccgtaatccacaaattccatagtcaatcgactacccactcggtagcatcaaatgctagtggatgaggttgagattccttgtatgtgctgatcctgatgaagaaataaagccctttcggatgagttgtatataatatagagatttgctaatgagctgattcatatgggtaaatttttctgcgtttttttgttgactgatatagaatcatgatgtacgaagactctttcaactatgagcttgccacaaattcaaacattaggcaactactagaagctgtataagggtaatatggaatatctttcatgttgagaaacaagggtgagttaagat

SEQ ID NO: 17271 - DNA, 1638 bp, Setaria italica
  Peptide Sequence Number=SeqID_83245
catgaaattgctggctaatatgcaaatggccatcatgaatgcagctctgttcaaggagaaggtccttgagctcatcataacatgcgagagttttgagataagtgccatggtacagaaggaggtgctgaaggaagaaatcatacaaagaaactcatatgtagatgagctcaaggacaaactgaatgctgttgagattgaaaacagaagactgaaggttgatctaaatggtgatttcacgatgttaggatcgttgcaaactgaagtcagtgccctggaggaacaaaccttgtcccttgccaatgactgcttgcaaccaaataaactcagaatggaggaaaatgtgttatcacctgaagttttgaagacctccatgcgatccagtggtgatgaaaatgcaatgaggatggtgaaggacatggaattgcagaaattgcatggaacaatcaaagcacttcagaaggtggtcacagatactggtgtccttcttgaacaagagaggcttgatttcaatgccaatttgcaggaagcaaagaagcagattgaggtgctgaagctcaaggagatcttggatgatgatataattgaaatgaattatgaacaaatgctaaaagacatacaacttgacctcatccaaacttcttcgggccgtagaactagtccatttggtcaggaaaagaaaagtgtagcacaagtagatgacaaaatggtcaaccttcgcgccattgttgggcccagccgtggacatatggctgttgacttaaggccacctcaaagtgagtcattcgggacagacaacaaccaaatggttgtgaaagagctcagcattgacaagcaagagctaccgaggttgaccgccatggagccacaccaggagtggaaaaacaaggttgtggaaaggttattttctgatgcgcagaggctcaatgccctccagtccagcatccaagaacttaaaacaaatgccgaaacatctgaagagcttgaacttgagagcgtcagataccaaataagagaagctgagggtaccatcatgcagctaatcgataccaacagcaagctatccaagaaggccgaggagttcacgtctgctgatggtcttgatgcggaaaacaccgacttgaggagcagacatcagcgtaagatcttggagcgtgcgaggaagatgtctgagaagattgggaggctggaggtggaaatgcagaaggtccagcaggctctgctgaaatacgaggaggagcagagtagcagaaagacttcaaaagccctgcagcggcgatccaaagtgcagctcgtagagtacctctatggtcgaaggcgggacagtcgcaaacagcgaagctcgccctgtggttgcatgagagcgaaaaccatcgacgactaactcgccttccacgccgcttcttttttaaaaggcgcaagggaaggtcaatcttgtcagcttcagaatcgcatcaaattgtctattttgttcatgttctttataggtaaatgggtgaatgtataagggttgtaaatggtagccatggataataaccatctgttataaaggttctcttcgcttgtaaaattattgctaacatttgttgcttgtagcttctgataatgtccatggttggtttaaagtggaaaaaaaaaaaa

SEQ ID NO: 17272 - DNA, 628 bp, Setaria italica
  Peptide Sequence Number=SeqID_83246
cttgtccaccacctgcagctcctgggagtaggtgcccacaggtatgaccatccggccaccaggcttcagctgatcaagcagaggctgagggatatcgggcgccgctgcacccacatggatcacgtcgtagggggcagcatctggaaagccaaacctgccatctgcaacatgaaaagagagcgatccatccttcagtagcggagctgcagcacttttttggacattttcaatagcagaagcaacaatttcagggatgtgttcaattcccactgcacggccttctggtccaaccatcattgcaaaacaagctgtcaagtagccactacctgatccaacatccagagcatgcatgcctggctgcaaatgatccttcagtagttctaagcaggttgcgtgcatgtgaggagcagatattgtcgcattgaaaccaattggcataggactgtcgatgtaaggggtgccctctggcacaaataacgctctatcaattgtctccatcacttcagccactttatcagtcctaacggcaccatactgctttaggtagtcaaccagagctttgttcttgtccagtgacgctcgagtccaatattgcgccatccggtggaacggatgcagcgccgcagca

SEQ ID NO: 17273 - DNA, 561 bp, Setaria italica
  Peptide Sequence Number=SeqID_83247
attttttttttctagacatatgctgggaacccattttattgcagaaaaagagacatcatacatcgaccgatagatccagacatatgatgggaaacccattctccaacattattggttaaacagcagcaacgaactaaaactgcctaggctattcagaagaacaaacatgatgcttcagatgataacgatcatatatgtacagacatctcgaggtccagacaggaacaggagggcctttaggggtcttgcaactgggcagagcggctggtcagagggacgtagcgaacggaggcgtcgttccggacgctgatcgatccgtcggcgttcttgtccaccacctgcagctcctgggagtaggtgcccacaggtatgaccatccggccaccaggcttcagctgatcaagcagaggctgagggatatcgggcgccgctgcacccacatggatcacgtcgtagggggcagcatctggaaagccaaacctgccatctgcaacatggagaataatccgacatcttagctctaggtgatctcagagaatactgacacgaataaacaggtta

SEQ ID NO: 17274 - DNA, 563 bp, Setaria italica
  Peptide Sequence Number=SeqID_83248
ctcgctttttgttactcttccgtctttgccctcgcgctatcgcctccggtgcattgctcggccggcgtgtacttgtacacccagcgagagagggaggagggaaatacaaagaaagaaaaacaagtctagcctttggctttagttgagcttgttccttcgttcgttcatggagagctcttctcataagcgggcgcgggaggcggcggcggacctctccgccggcgagggcggcgcgctgccggaggccgacgccaagaggctgcggcccgaggacctgctcgacatgctcgacgatgacaccgacgcggcaaccgccggcgacctggcgtccgtcatgcgaagcctcgaggaggagatagccagcttcgacgaggccggagccaccgccgccgctgcgccgccggcgcaccaccagcagcagccggagctcgggttcctgctcgaggcctcggacgacgagctcgggctcccgccggcgggggcctcctcttcgtcggaggacgccggcggcgcggccggggaggagccggacgtggccgccgggctcgacggccagatctggg

SEQ ID NO: 17275 - DNA, 532 bp, Setaria italica
  misc_feature (532)..(532): n is a, c, g, or t
  Peptide Sequence Number=SeqID_83249
taaaagtccagcatccccgcggccgcctcttcgcctctgcaaaattccccaatcccgtcgcctctcgcagtctcgccgcccgcatccgcacgcgcctcggagccctagctccggcggcgcctccagatccggcgccctcatccggcaaaatcggcggctcctatccccggtcgacgcgctccgacacctccgttcaccccggcgttctccacccgacttctccggctgcgaccttccccaggcggcgtcccgaggaatcgcttcgtctacgcacgcccggcgtcgaggatccgagagcctaccgtcgtcgccgatcgcctccccgtagattgattttgatctgtacctcttctctcgttggaattttgtgtatttcatctgagaagaaaatcaggctatctcgtgtaaattgtgaaagagaggccttgcgtgaaatcaggactctccatccatccatccatccatcatgggtgttgtgtattaccaatataagagtgaaaaggatatctgttccatgccaaaaaaaaaaaan

SEQ ID NO: 17276 - DNA, 380 bp, Setaria italica
  Peptide Sequence Number=SeqID_83250
ccaaccatctaccgcgctatgtgcatcttcggactcaagacgatcctgatcccgtaccggacgaacctcgtgcggctgcagaccggcccgaattacgccgatttcttcgccgatttcctgaagagggtcgcgtcttcgtcgggcaggccgaccggcggcgagaagcagagattgtgaacggaattgctcgcctgatggtagatggcgccgaattaattaattgggggaatgagatcgtagtaattgtccatagcttgagttcaggtccttgatccacgtatggcgagggaactttgttatccagtctaattggttgattgtagccactgatgataaagttgggatttctactgtgaatatagcgtatttgttaggttcaa

SEQ ID NO: 17277 - DNA, 1712 bp, Setaria italica
  Peptide Sequence Number=SeqID_83251
cgaacgcttccgccgcttgatgtgcatgagtgggtctcgctacttccggccaagacggttccggtcagaccttccacctctcagctcagaggcccctagcctggagaatgatgctccaccacaaccacctgaaccagaagagcctgtccatgatactgtggaggagaacaaggtggttgccgatggtgctgttgtgggcgtctcagaggatgagggaaccgagcatggtaagagtgctgcaatgtttgagtgtaatatctgctttgaaatggctgctgagccggtggttacctcctgcggccatcttttctgctggccatgtttatatcagtggttgcatgtccactctagccataaggagtgccctgtctgcaaaggagaggtgactgaagggaacattactcctatctatgggagggggaattcaggttcagatgtggagaagaaggttgcagaggatggaaatgcatctggccccaagattccaccaaggccacatggcaatcggctagagagcttccggcagcagtttcaccatttgcgacccatatctagaaggcttggtgaggcgcacggttttttgtctacgtggaggcgcattcttgatcagcatttaatgaatagtgtgagcaggtttgaagggcctcctgaagcaactgcccaggaaattcctccgaatgcaagccgttttagccgaatgactactaggttgagagcaaggaggttgcaaagagaagcagaaaaccctacatccattgcttcatctgccccaggtagtggtgggcagcctggaaacaatatatccgatcttccaaggcgcacttcaagtccatttccatcagaagggatggatttattgcgacactttgatttttctgaccttgaagactcggaaaggtttgcgactgctttcagtgaacttaggcgaattgtaaggcctagccattacggggcatcaacatcatcaaacccaccaaatcctgagccggttgatggaactcatattgtcacgggactggctgcagatcaagcttctaattcaagcaccatggctgtgattcaggaagatgcagctttcactgaaagcgctggagaacctagtaatgcagggtcttcaaggtccctgaggaggaggagaggaggtgatgccttaggttctttggatgtagatggtggggacctacatcagaacaagagaagacgcctaaactaaagctgaagacagccgaattgaagcctgcaggttggagcaatgttctaatttgcttgcagtgctgttctcagtttagcctttttacctctttgctaggtaatatctgctcagtgtggtatgaagttcttcctctttactagtttactaggtagagtggagctggttgccttagttccttccgacctgttcgatttgtgcgatcaccatgcatactgaggaaacctgacgtttgccatcagatgaattttccttgatagtaaattgtatgtgcagatctgtattttccttgatagtaaattgtatgtgcaaatctgtactcaatgaaatcaccaaatcagtctctagttcagaaataacacatggacccctgaatattgtttgcggactactcacacttctattgagcattgaactcaagctaaaatattggtccaacgaatcatacagacttttgccagtttgctgtttgctgctgctctgtgcctacccttaccagccg

SEQ ID NO: 17278 - DNA, 844 bp, Setaria italica
  Peptide Sequence Number=SeqID_83252
tttccagattccacatctaaaaattccaagtccttgcgaattgccttatgaaatttgaatatggtatcgatcggcctacaaatgttatctgggccagaaaatggcgcatctgtctcccatgagaaaaggcttagaatataatgaaggtgcagaataattgtaaggcagagagcgaaaggattttccaggggtaagtgaattaacaccgaggtagctactttctactcttaaccttggaatgtaacagggtttgttgttcggggatgcttcagtatcagcattttgggagcagcgacttctgttaatattggtgctagattctccttgacttgctcgtttgactggtctagaaaaagctcgactgttactcgcataacatggacagaatgactggcatgttttgagatcatttccatccaatgcatagctcactgctcctgatgtcaagcatatgaactttccaggattggatgtgtcctccaaacgacctttgcatgcccagccggagagaagggtgaccaatgaagtttcagaggaaggtgctgccaattgcatattctgaagaaaagacgccgcttctgcatcattgagcttcgctacaaaccatggtagaacatgttccagtagctttagtggcatgacacatagactcttatataaaagtttcctttgtttctctggagagaaatttatcctagctttaggaagtacctttgcttcctcatcactgaagtggctctcaattttctgcataatttcgtcagcttgtgaacataattcacaataaaaatccactacagttgatctggctcctgatatttggatttgttcaattaaactcctt

SEQ ID NO: 17279 - DNA, 2211 bp, Setaria italica
  misc_feature (1)..(28): n is a, c, g, or t
  Peptide Sequence Number=SeqID_83253
nnnnnnnnnnnnnnnnnnnnnnnnnnnnattgaaatgaatgtgctattgcttaagttatcacagctacaagcaaggtttctcgccccgtaaaatatatatgtacaaatgaatcgcggaaacgaaattacagagtacgaaactcgcagagggaaaaaagtctcgcctggttagtttgatgtagaacactctaccgtatcggtcttgataaccctggtgttgtacgagccacagaagccacacttgtggtagagccaatggaaccgtgatctaccttttctctcacagtcgttacacagtatatcctgacaccggtcccggtattcctcaggaagctcctctgcagccagcaaaccgtcaagcatgccaaaatacaccgtcatatcccccaaggatttgcagcagattggacatgtgtagtgggtacaagtatatgcctgaaagcaagctgaatgcatgaaatggccacaaggaagacctttaactggtgcacttgatgtgaacagaaagtcgcagcaaattggacagttcatctctagcatcttttcccggcatctgtgttctatcatctttatgccaaggcaacaattgcacttcatgcaatgaaagaaatcattgcccaatccattcccaagacgacacaagttacaaaaaggacaatggtagacactcctttcatcgtcaaaaaacttgcatatgctacaataatattttgccatggacagtccattgcaagaaggggtttggcaatttggaccaaccggttgaacattcaggcattgcatgcacatcatctccaccactgctttcctgtccattgaatggtcactaactttatcatgacagaatctgcacgtgaatagcttattgcagcaggcagcaacaagcttgcagtttcgtttgtaatgctcacaaccaaatatttgtttctctgggtctcggtatgaaggaacacaaccaggtagttgtgtacatccattatgttcttcggcacttggttgtggtgatttctgctgagcagctatccaacggctggtcatgagattctggatcagataggccttcctccttggatcaagagtagaatcttgagagacctttcgtatctcagcctcaagctcactctggttcattcggaagatgtccttccaaccaggcctaaacatctggtcattctgttcaagattctcctgaagatgactttcttctgaaggagcagaagccatatctgatgagtcagatgaagttgaaggccccttccaccattcatttagccattcatcgaacattgtgttccgagttgcttgcttccatgtatccagcatcttgttctgttcctctagactaagtgctgacgtgacccaaggtaacattgactgcagaacctcagcaccagtagttccgattatacgaccgataatcttatcctgctcgtctacagaaaaatgtttatcaaacaatggccacaactcaagttcttctctgtgaacgtgattcgacaaggtgacccggatagatttgcataatccttgaagctttgtcaaaagttcattacgctttctagcccaatcaatctcattatttgaaatatgatttgttccagcttcaacatcaagggggtcgctcaaactgtcatgtagttgtgaaagttcagataggacagtggatatatcttggaacaattcttcttcctgcttgtgatcaagagtgtatgaatggctgacattgtgcagtgtctccttcgattcaagagcaggaaatacaatctcatcttcagcattgctgtgtgctctatatagaccccacagtaaacgaaaccttccgatgaattggcgaaggcaagattcattcccctcaataagctttccagattccacatctaaaaattccaagtccttgcgaattgccttatgaaatttgaatatggtatcgatcggcctacaaatgttatctgggccagaaaatggcgcatctgtctcccatgagaaaaggcttgaatataatgaaggtgcagaataattgtaaggcagagagcgaaaggattttccaggggtaagtgaattaacaccgaggtagctactttctactcttaaccttggaatgtaacagggtttgttgttcggggatgcttcagtatcagcattttgggagcagcgacttctgttaatattggtgctagattcttctagaccagtcaaacgagcaagtcaagg

SEQ ID NO: 17280 - DNA, 472 bp, Setaria italica
  Peptide Sequence Number=SeqID_83254
cgagaagtatagcatctcgcgtactgtgagagagtcaatgagtacatcatctcgatcaacatagccatatgagccgtagggcaagcgagacttggcaccgttgacaaagacctcgccgtacatcctctcggtggcaccgagcctccctgcaattgctcggagcagggtggatttgccggagcgggcgggtcccatgatgacggtgagcgtggccggcagcgcgtagccgttggagctcttgacgaggcggtcggagaagcggttcgtgcttgcgctgagggaggagacggtgaggtccttccagacgagggttgccccggccaccttgcgctcccggcatgcggcaccggaggcggaggtggtgacggggagggagggcgacggggacgggtaggcgctgctgttgatggatgcggaggcggagctgccgtggcgaggtggatgctgtcgtcgaggtggatgtcgtcccagg

SEQ ID NO: 17281 - DNA, 312 bp, Setaria italica
  Peptide Sequence Number=SeqID_83255
cagttcgttcctctgactaaagagcagattgcgaacccggccagctatgcagattgcacgcattggtgcctccctggcgttcctgatgtctggaacgagtttttatatgggtacctcatatagaaatgatatacagtaatgtcagatgtaactatattataatgtacaaatgacatactccgtctagattagggtgctactgtgcagagaattactgaagacgaaacagtcaaaatgaacagtatgtatcagtgactgtactatttgtttcatctgacagagcaacataatgtatcatggcaaagaacaaaa

SEQ ID NO: 17282 - DNA, 505 bp, Setaria italica
  Peptide Sequence Number=SeqID_83256
attttattatctgtatgactgtaccatcctataacggtagaaaggagatcatatctcgaataacttactcggcatggtatgacatgatttctgaattttgccatatgtcaaaacagattcaacgcaactaggctgcttgaaaagctgaggaacaagagattagtgtttgtgggcgactcagtcaacaggaaccaatgggtttctctggtgtgcatggtggaggcctcaatacctgatgacaggctcaagacgcgtatcttcaatggctctctgatatccttcaaggcattggtatgcccttcacaattctacaggctacagaaaccaacaattttggttaaccgattaaacaaataatcatttcaggaatacaatgcaacaatagatttctactggtcaccgttgcttgtggagtccaacagcgacaacccaattatccaccgggtggagtaccggatcataagggcagacagaattgagaagcatgccagtgtctggagggatg

SEQ ID NO: 17283 - DNA, 1729 bp, Setaria italica
  Peptide Sequence Number=SeqID_83257
gaggggagccaagctaagcgccacacttttctgaaagaagaatgaagacagaagccactcccaagatgacggtgctccatgctccggttggagtgaggagcatcgtgagctccctagtggccttcttcatcgtcgccagctccgtcacgttcttgcttgaccgaggccaggaagcacaagtgcaaatggcagtcgagcatggacgccaagaaatgcaggtgaaggtggaggctgggctccaagaaccagccatgagagggactactgagtcgggggacgctggtgaggagtgcaactggtcgaggggaaggtgggtgtacgacaacgtgtcccggccattgtactccgggctcaagtgcgccttcatcttccctgaggtggcttgcgacaaatatggaaggaaggatgtcatgtaccagcactggagatggcagcctcagggatgcgaccttccaagattcaacgcaactaggctgcttgaaaagctgaggaacaagagattagtgtttgtgggcgactcagtcaacaggaaccaatgggtttctctggtgtgcatggtggaggcctcaatacctgatgacaggctcaagacgcgtatcttcaatggctctctcatatccttcaaggcattggaatacaatgcaacaatagatttctactggtcaccgttgcttgtggagtccaacagcgacaacccaattatccaccgggtggagtaccggatcataagggcagacagaattgagaagcatgccagtgtctggagggatgctgacatcattgtcttcaattcttacctgtggtggaggaagcagaaggatgacatgaggatgaaggttatgtatggttcatttgaagatggcgatgcaaggttagatgaaatggaaatggtcgatggtttcgagatagctctgaagaaactaactgaatggctgggagagaatattgacaagaacaagactagaatctttttcgcaggatcatcaccaacacattcctgggctagcaactggggtggagaagacagcaacaagtgcctcaacgaaacagagccgatctacaaagtcgggtacaaagcggcaactacagactacagcttgatggccaaggctaagtcatattttagaacactggagcccaagggtatacatgttcagatactgaacatcacagagctgtccgactaccgcaaggacgggcatcctacggtgttcaggagacaattcgttcctctaacgaaagagcagattgcgaacccagccagctacgcggattgcacgcattggtgcctcccgggcgttcctgatgtctggaacgagtttttatacggctacctcatgtacaaatgatacttcacataccatcccaatatatagtgtagaaatgacatactgcatctagattaggctgctttgctttgctttgttttgtgcagagaatggctggccccatcacatttacatgtagagacagacaaaaggatctggttgtgcaccacctcactacaggagacattcagagtgaacagtgtatatcatcagtgtactatttgttttgatctgacagggcaacataattctgcaaattcttttttcacagagatttaccatgtcaaagaacaacttaagaatgagaaactgtcctaggaaattccatttatacagaccgttagggaggcaagcaagaaaaagcagcacatgcgagcgatggatcaacgagagaagagcga

SEQ ID NO: 17284 - DNA, 389 bp, Setaria italica
  Peptide Sequence Number=SeqID_83258
cgccgctgtcctgcttgtccatgacgtgcgcccgggtgacgctgttgaagccgccggtgaagagggagccggagacgtagcgctcctcggctctggcggcgccgccgtcctcgtcgtccatgggctggttgtcgggcgtcatggggatgtggacgtggtagtcctggaagtcgacgctgctgatctccgagtcgaggtcgtcgcgcgagtagctgatgaaccgcccggagtcggtccggcggccgaagacgaccgtcggcgccgaggtgggcgcggtgggcggcttgccggcgccctgcggcggcatgcggctggaggcgctgttcttgaggatccccttggacgccatggctgctcgagtactacttcttggccttggccttgggcct

SEQ ID NO: 17285 - DNA, 1148 bp, Setaria italica
  misc_feature (1108)..(1108): n is a, c, g, or t
  misc_feature (1115)..(1148): n is a, c, g, or t
  Peptide Sequence Number=SeqID_83259
gccggcggtacgggtgggacggggcctccgcggtggcggcgttccgcgaggcccgcggcgcgctggggccatgggcggcgccggcctacgtggccgcacacgcgctcacgctcgcgctctgcccgccctacgccatcttcttcgagggtggcgccgcgctcgtcttcggattcctgcccggcgtcgcgtgcgtcttctccgccaaggtcctcggcgcatccatctccttctggatcggaagggcagttttcagatatttcacttcagcaatggaatggctacagaggaacaagtacttccatgttgtggttaaaggggttgagcaggatggctggaaatttgtattgcttgctagattctcgcctctgccttcctacatcatcaactatgctctatcagctacgaatgttggatttttcagagattttctctttccaacaattgtgggctgcttaccaatgatactgcagaatgtgtcaatcgtaagccttgctggtgcagcagtggcctccactacaggatctaagaagtccagtatctactcttacctgtttccagcaattggcattgtgtccagcattctaatttcttggaggattaagcagtattcttctgcacttgctattcctaatgagcttaagagtgcacctacaaatggaaattccaacggtgatgctaagctggcttcggcgccatctacaaataccaactctgggaaaactaggaagagaaggtgactggcagtatctgccctgtgtccacgatttactacattgcaatggcagcaatggagtatcaagcagctacactcagatgctagtcaaagacttaatttacacattggtgtatcactgcagtgctatgctatctgtttcatgccatggttttttgggtgcatttaacagatgctaccttctcgtttctgtcctttgagcttctcttgttctagcggatagcaaggtgaatgtatgatagaagctcacatgttgtgcatccagagtaatctggtggtttagactgcttatctgactgtatcttgtactgaacttaatgtatatccgaagaggtaatataagatattcttctgtatcaaaaaaaaaaaaaaaanaaaaaannnnnnnnnnnnnnnnnnnnnnnnnnnnnnnnnn

SEQ ID NO: 17286 - DNA, 763 bp, Setaria italica
  misc_feature (748)..(748): n is a, c, g, or t
  Peptide Sequence Number=SeqID_83260
caggcgcggtggcgtgggcaggagacgaggtggtcgtttgtgagcccgacggcctgcatgaaggagtggatgacggtggggccgacgaagcggaagccccggcgcaccatgtccttgctgatggactccgacttggacgtcttcaccgggattttccggctgtacttgtaccccggcgacagcggcttgttgttcacgaatgcccacacgtacttgtccagcgacccaaagtccctccgcacctgcaacgccatcacatttctatcattcccctgccatgtatattgtcacaaagctactatagtataagcaagctgttattcgtatgttggtggttagtgggaaccggctcacagtcccgttttggaaaatggaacaatgtcagcaacggattagtgtgcagtactctaccacctaccagtcaccgaggatatcattttgtgagaatgtgaagcgagctcgttaaactaaaaggcatgacaacaaagcaagtacggttagcatcttttccttgccaccaaaacgcccattaggaagggctctctcactctttttggctgtgtccagctactagtgcgactgagtcggagtgcatcggcaatgtggtcacctttaataaaggggcgacgctagcttagcatagctgcttcttcttcattgagctgtctaccaatcgaggggggacagggattctgttaggcttcgctttcacttgttgctaacgggtttcatttcgtaggctgccttnattcattgaccgcct

SEQ ID NO: 17287 - DNA, 442 bp, Setaria italica
  Peptide Sequence Number=SeqID_83261
gttgtcttgtccatcattcttatacttgagaagtcgtctcgtcctcgtgtcctgccgctggcttggtctcggtcggcggtggtcagaagaagaatcagttagcgcggccggcgggactgggcctcgttgacggtgatgctgcggccgtcgagctccttgccgttcatcccctcgatggcgtcgcgcatcgcctgctcgctcgcgaacgtgacgaagccgaagccgcgggacctctgggtgtcgcgatcgaggatgatcttggactccaggacctcgccgaaggggctgaaggcgttgtggagcgagttgtcgtcggtggcccaggcgaggccgccgacgaagcagcggtactcaacatccgacgccgccatctctgcctctcacccccgaaccggacacctcacgaacccgaaccgaaccgaaccgaaccggagggggagga

SEQ ID NO: 17288 - DNA, 1154 bp, Setaria italica
  Peptide Sequence Number=SeqID_83262
gcaagctccttcattgactaattagaggggggcggtaagtaatctacacaagcacactcatcatacacacacttgcaaaccaacactctcttttcgtatactagccgtactactcgatgctatctttctttcttttctctctcgtcttgtccatcattcttatacttgagaagtcgtctcgtcctcgtgtcctgccgctggcttggtctcggtcggcggtggtcagaagaagaatcagttagcgcggccggcggcggcggcggaggtggagcaggcgcggtggcgtgggcaggagacgaggtggtcgtttgtgagcccgacggcctgcatgaaggagtggatgacggtggggccgacgaagcggaagccccggcgcaccatgtccttgctgatggactccgacttggacgtcttcaccgggattttccggctgtacttgtaccccggcgacagcggcttgttgttcacgaatgcccacacgtacttgtccagcgacccaaagtccctccgcacctcgagaatccggcaggcgttgttgacggtccctctgacggtgcccaagtccaggccgaagtcggtgctcagcaacgccatctgcttctcggtgtacttggcgaccgcgtccacgttgaagccggagaacgcctccctgtagacgtgtcttttcttgaggatggaagtccaatccgccccgacttgcacgccagacagggtgagcatctcgaacagcaactcgtcatcgtgcacgggcactccccactcctcgtcgtggtacgccacatacagggggtccgagtagggcgtgatgaagctgcagcgcttctcgtcgttcccggtgggggaggcggggacgggctccgcggcggtggcgccgaccctcccctcgacacgggagaaggacgcggtgcgtccgtagtgcgcgatgcgcatcttgcgctgcgcctgcgcctgcgcggcgtgctcccgctgcgccgccgcgatgctccccgcgggctcgaacgcctccagcgctgcgaacgtcaccaccggcagcaccgcgcccgggcttcctggccttgaccctgctcttctccgcggccacggccgccgccttcgtcgccctcgcggtgaccgaggccggcgtcgcaggcggcagcagggaagccgccgcggcg

SEQ ID NO: 17289 - DNA, 331 bp, Setaria italica
  misc_feature (300)..(300): n is a, c, g, or t
  Peptide Sequence Number=SeqID_83263
cacggaagaagcacacacaccagagctagcaaataattcaattcgccgtgacaagcgtcaaccggaaacagttgcaggttgccaccgatggaggggaagaagcagatgctggctaccttggtcggctgcaactacgccggcacgccggacgagctccggggctgcatcaacgacgttctcgtcatgcgcgacaccctcgttgcccgcttcggcttcgcgccccgcgacatcaccgtcctcaccgacgacgacggcggccgcggctcctcgccgtccgccgtgctcccgacggcgccaacntcaagcgcgcgctggccgagatggtgtcccg

SEQ ID NO: 17290 - DNA, 358 bp, Setaria italica
  Peptide Sequence Number=SeqID_83264
tcagcctcctgccccacccatccgaaggcgtcgcccatggcggcgccgtaggagcgcgcccccacggcgcggctgaaccgcacgagcagctcgatggaggcgtcggtgaggagcgcggcgagcactatcatgacgagcccgggcacgaggccgagcaccttcatggtggccggcagcgccatgattccggcgccgacgatggtggtggagaggttgaacaccgcgccggcgaaggaggctccgttgaactcgtggaacgcggaggcgccggcgtcgtcctcgtccccttcccgcttcgtcgggagcagcgggtcgctgcgctcgttagcgccaccgccgctcatggtgaatctccgag

SEQ ID NO: 17291 - DNA, 272 bp, Setaria italica
  Peptide Sequence Number=SeqID_83265
cctctcggtgatcacctctaccgacgccttcaggcacacgaacttcaccctgcagtcggcgtagtcccccggcttgtagctccggtcggccgcccggaggacctccctgtacttgagctgcagcgccgagcagctgacggccacgtcctcaccgcggtccagtcggtcgctgatggcgtcccgaagggactccagccatggcgtgcggtcggcatcggagagggggatgcccttgctcatctttgctttgtttccatgggaatggtagtcat

SEQ ID NO: 17292 - DNA, 488 bp, Setaria italica
  Peptide Sequence Number=SeqID_83266
tttttttttttgtttgaacgagcttgtttgcaaatgtgggaggttctacatgaccagttggaccatggctatgaagtaagggatcaatgatctctctttgtacactgaatggaatcgcatagccttcagaaacaaggaggatctgtcgatgccagctcctccctgaactgagcaatggcatcacggacaatgtcgccggggtgctccgtcgcgtctacctcggtgatcccctcggcggcgttgatctggagcaggtcgacctggctttgcagcaggctcgccggcatgaagtgcttcccttcgcttgacctcctctgcatcctctcggtgatcacctctaccgacgccttcaggcacacgaacttcaccctgcagtcggcgtagtcccccggcttgtagctccggtcggccgcccggaggaccgactggaccgcggtgaggacgtggccgtcagctgctcggcgctgcagctcaagtacagggaggtt

SEQ ID NO: 17293 - DNA, 1115 bp, Setaria italica
  Peptide Sequence Number=SeqID_83267
ccaaaggtgtcaaggagctgcgtgaagccctgcagcatgacgttgcgaggcattcgcacgggggtcatgggaaagggtccggacatggcaagggccgtggcaagaagcagccgaagaaagaggttgttgacttggaaactctcctcatccattgtgctcagtctgtggccactgatgatcggcgtggcgcaactgagctcctgaagcagatcaggcagcatgcatctcccaaaggtgatggtgaccagcgcttggcgtactgcttcgccaatggccttgaggcgaggcttgctggtaatggtagtcagatttacaagtctgttataatgacgcggtttccctgcactgatgtgctgaaagcctaccagctttatttggcagcttgcccattcaagaagatctctcatttctttgccaatcagacaatcatgaatgccgtggagaaggcaaagaaagttcacattgtcgactatggcatatactatggatttcagtggccatgcctcattcagcggctatctactaggcctggtggccctccaagactccggatcacaggaattgacacacctcagcctggttttcgcccagcagagcgtatagaggagacaggaaggtatctaaaagattatgctcagaccttcaatgtcccttttgagttcaaagctatagcatctcggtttgaggccgttcagatagaggatctccaaattgagaaggatgagctgctgattgtcaactgcatgttcaaattcaagacactgatggacgagagcgtggtggctgagagcccgaggaacatggtcttgaacactatcagaaagatgaacccacatctgttcatccacggcatcatcaatggttcttacaatgctccattcttcgtgtcacgtttccgggaggccttgttccactactctgctgtttttgacatgctggagacaaacattccaagggacaacgagcagaggctgctcatcgagtctgccctgttcgggcgggaggcaatcaatgtgatctcctgcgagggaatggagaggatggagaggccggagacatacaagcaatggcaggtccggaatcagagggccggttcaagcagctgccaatgaacc

SEQ ID NO: 17294 - DNA, 738 bp, Setaria italica
  Peptide Sequence Number=SeqID_83268
tttctttactaattgtcttcctatttctttcgttgttctacgttttccgggtaggcctttgtttccacttactctgctgtttttgacatgctggagacaaacattccaagggacaacgagcagaggctgctcatcgagtctgccctgttcgggcgggaggcaatcaatgtgatctcctgcgagggaatggagaggatggagaggccggagacatacaagcaatggcaggtccggaatcagagggccgggttcaagcagctgccaatgaaccaggacatcatgaagcgcgcacgggagaaggtcaggtgctaccacaaggacttcatcatcgacgaggacaacaagtggttactgcaagggtggaaagggcgcatcctgatggcgctctcgacatggaagccagatcacaaatcatctcactagcttattgggcttctatgattccagagtactgtaagtgcagacctgttcatatgttggatgcttgggctgattgttcctggactgcaacatataagctagatcgagctgctaaacatctcttcaccatcttatatggtgacatgatctgggttccccctgcatgttaggtagttttgggcagtgcattctttgatggagcaggctaggtatgttaattatgcggtagacctaggattgtttcatgcatggatcaatctcatgaaatcttgtattatatttgttcccggttaatcagtgctgtcagaaatttttggc

SEQ ID NO: 17295 - DNA, 536 bp, Setaria italica
  Peptide Sequence Number=SeqID_83269
gtgtcgtaactgcttctccttccttcatcctcttcccctctcccagcttccctgagcttctgaaggttatcggccatggaaggcctcatcccgttcatctacagggccgtcgtgcagtacaggaaggaagggcaggtctccttcactgacctcatcttcgacgagccgtcgccgacgtcctacttccgcctcccgggggactccggccggtaccaggtgacggcgagcgatctcttctcccggtcggctgtggactccggttcggccggcgctatgcggcagtgtccggcgaggctcccgatgcagcgccggcgtcccctggaccgtgataatggaagtgcatcctgggactgggagccaagaaaagaaaagcaagcgaaggatggttcgtagcaagcagtgggggtagtagtgagatcagatatgttgtgtgtgtatgcagatgatgctgagcaactgtgaatattagcctaagttgccgtgtaagtgtacataatctttctctgttttattagcttgttattgtgatctgccat

SEQ ID NO: 17296 - DNA, 302 bp, Setaria italica
  Peptide Sequence Number=SeqID_83270
aagttttgctctaaggcattacagtttaaacacccaaacctacatcctcgctcaagttatagtggcaccatacacaggcatccgtgccagttttggggcactacaggccccaaacaactactgtacgaagctgcagatgcaattcatcaacagaatagcacacagctcaggtcagaacgcggcttacaaggactacaactgcaggcgccacgcccagttcaacagttttgtttaggcatatgtgcaaaatatcgcctgatcagcggccaacgagcacctcattctaagcagacaaccgaggt

SEQ ID NO: 17297 - DNA, 608 bp, Setaria italica
  Peptide Sequence Number=SeqID_83271
atagcatagtgctgatgtgtggtgctactcagctctatgtgccaccttatggtctccagggagcgcttgaatatttcaagcaatcttatggcaatccgcccatctacatccatgagaatggttatccaatgaaccacgatgtggtatttgacgatggccctagggtggaattcttgagtgagcaccttagaagcctagcggactctgtcaggaatggttcaaacaccaagggctacttcgtctggtcactgatggatctatacgagcttaccggtggcttcaacacaacatatggcctttactacgtggactttgcagacaaggaactgaagaggtatccaagacgctctgcaatttggtacacagattttctgaacggcaggagagctgcgatgcccaagagatcttcagattcctcgctgccagtatccagtgtttaagcagcactgatagcactcaaagcgctcttgtgatttcgatattttataaaattagaacttttgctcggggaaatttctccttggtcaaactatgcaaaggattggcactgttcgtgtgctgcggctgtgccgtaccgagcgtggcaccggaaaatgaatgtcaaaacc

SEQ ID NO: 17298 - DNA, 457 bp, Setaria italica
  Peptide Sequence Number=SeqID_83272
gtctaaaaatattacgtatttgatatttgaaaggcatacatcatcatccatattttaaaatttgaagggtagtacgtaaatccagttacaattaatgcgtaaacatgcatacgtggacgacttttcacgacatcgtcttatttatcaactttatttaattattctccactaattctcgccgtcgtcgttcgaccatgccatgcctgatcatgggcagaaggtgacctggtagttgctgttgccggcgcaggcgtgggtcttggtgtcatctttcgggaagaggtaggcgtcggggcagccggcgccggggcagtggaggttcacgccggtgctgcaggagaagtccatgggctggttgaacccgtccaccagcgagatgtcgtagaagtcctgcgagccgccgatgctgtactcggccagcgtcgccggcgtctgggcccggagacggtgcaggagg

SEQ ID NO: 17299 - DNA, 268 bp, Setaria italica
  Peptide Sequence Number=SeqID_83273
cgggaaaaattacatggctgcgtgataactgaatacgagccccagactgggattggaagtcattgatagttgatccacccttgccaattatacatcctgctgcggtattagacacgaggaacctcaaatgtgtcggcttctccttgtcatctccttcctcggagggctgctgctgctgctgcgggggggagcgtggggcgcgcttgggggcggattccggcgaggaggcgtagggggagcccggggcttccatcctttctgcctgcgg

SEQ ID NO: 17300 - DNA, 518 bp, Setaria italica
  Peptide Sequence Number=SeqID_83274
catcacctctctgaactggctgacaccctctgcatgatcatggactcggcggtccggatagcttcagatgttccagtaatcgtcactttcctgtcagatgtcccagatatgaagtctcccctatctgatatcttgatccttgcactagaaatagaatacatctaggttatgttccttccagcacgacctacaacagcaccaatgtgttcatcggccacaccaatggtgagagattcttgggcatcattatttgcaggtgatctcataggtgtgctgggcttgttgttttggtaccttcctcctccatacccattaggtccatagttcacagcattattatatggcacctgtggaatcatataaccaacaggaacaccagggtagcttgggaaagtaagacccacctaatttgagttgccgaaaatcagacacagaaagttgtgactcgatggtagaattgaaatttcatccttgcccctgcctcgcagatggcactacaaataacacatgtcaatacg

SEQ ID NO: 17301 - DNA, 1498 bp, Setaria italica
  misc_feature (1)..(70): n is a, c, g, or t
  Peptide Sequence Number=SeqID_83275
nnnnnnnnnnnnnnnnnnnnnnnnnnnnnnnnnnnnnnnnnnnnnnnnnnnnnnnnnnnnnnnnnnnnnnctcgagagaaatctcaaaccagtcctcctcatgtcctctctaccatcaataaatattcttctatccttgatcaacggaatggaattctcaaactaacacaaggcaggcagcgctaggcagaccagcgtcttgttatggaccctcacgaaatataaaactcgctctattccgaaatcaatccaaacgacggcgcacctaattatcttctactaccagtttatactaacataaaaccatcggtcggacgcaacaaacaataataactttgatttctctcgagctttgctagggaaaaagaaaacaaaaaacaaattatcacgtcctcctaacttgcatcaaacatgcgcagtgagaagcgctccgactccattccaagaggggctcatcacctctctgaactggctgacaccctctgcatgatcatggactcggcggtccggatagcttcagatgttccagtaatcgtcactttcctgtcagatgtcccagatatgaagtctcccctatctgatatcttgatccttgcaccactagcctgaatgatctctgttatgttccttccagcacgacctacaacagcaccaatgtgttcatcggccacaccaatggtgagagattcttgggcatcattatttgcaggtgatctcataggtgtgctgggcttgttgttttggtaccttcctcctccatacccattaggtccatagttcacagcattattatatggcacctgtggaatcatataaccaacaggaacaccagggtagcttgggaaagtaagacctgcatatggaaatggggaactcaaattaggtgggtaatgaacatcctcagataacttcttcaatatcaaatctattgcattcatctggttatcgaaggttccagtcacagtaacaagcctatcatgcaaaccagcatagttgttatcctgtggtgaaattttgattccagcatgtgattcttcaataaacgactttattgtcgctccacctttaccaattatcccaccacaggagctgttaggaactacaagtctaactttaggtctagcttcagcttcctggaattcttcaccctcagccaaaagtttctcaagaatcagctccatggccttcattacttcatcaaacagtccagacaccatgatgattcggtcatttgtaccagggaaaaattcatggctgcgtgataactgaatacgagccccagactgggattggaagtcattgatagttgatccacccttgccaattatacatcctgctgcggtattagacacgaggaacctcaaatgtgtcggcttctccttgtcatctccttcctcggagggctgctgctgctgctcagcgtggggcgcgcttggaattccggcactagaaataacgaagaccccaagaactagggaattaggaaagtacaattaga

SEQ ID NO: 17302 - DNA, 312 bp, Setaria italica
  Peptide Sequence Number=SeqID_83276
caaagccgcgctgctcgccacctccacaccttcctctccctcctcctccaccgaagccgaagagcaaccagagctgagcctgaggctgagagtgctcgtgcccggctcccttcccggcagccatggacgcggccgaggtgaggaggagcagcgcgtcctcctccccggagttcgagttctggccgctccaccccgaccccgccgcctccccatcctgcgccgacgagctcttctccggcggcgtcctcctcccgctccccgtcctgccgccgaagccggcgtcgtcccacgcgggaaggagcagcggtacca

SEQ ID NO: 17303 - DNA, 611 bp, Setaria italica
  Peptide Sequence Number=SeqID_83277
acagttggatcgaagtgcggagtgcaaagcacgtattcgtttgctgaggacatgtctcatcgtgaggcagatgagatatatgagatgttgggcaagcttctcgaccatatgcgcatagcaggggatcctactgaacaccagcttgatttgtgttgagagaaactgcccatgtgtaaaaaagcattgctcctgaatattcaggacaatcactctggtatggccactctaaagcgaggtccactgatttgccatcggtgtcctcattccttgccaagtaaagtattaagccttgtgatgctgcaaaacagctccagcgtccagggcttcagttgttgcagaagcacaaatgctccacaaggtttacctagagaatcaactccagtgaattcaatgctccaagtgccgtaccatggcataatctgtcaggcttcaaccacatcaaaacctacaagagtttgactcattcagttttagttctatgttaacttcagaatcaaatattcctgtgcaccataccatcagctgatctttcttttttaccattgactgattcttcagaacggtgataaatgttagaaggttaatagagattctgatttggtgtagtttgt

SEQ ID NO: 17304 - DNA, 393 bp, Setaria italica
  Peptide Sequence Number=SeqID_83278
ttgtctaggtgtttttctagtgcttgtgctgaggttaagggatactttcaggggttgcaagtccgctgcttatcaattaaatcaggttttgacgtggatgtttgtgtcagaaatgcaattcttgatctatatgggaagtgcaaagcattggtcgaagcataccttatcttccaagagatggagcaaagagattctgtctcttggaatgctattattgcggctcttgagcaaaatgaatgctacgaagatactatatctcacttaaatgaaatgctgcgctctggtatggaacctgatgattttacttatggtagtgtccttaaggcttgtgcaggtttacaatctttggaatatggattgatggttcataacaaggttattaaatcgggtact

SEQ ID NO: 17305 - DNA, 2192 bp, Setaria italica
  Peptide Sequence Number=SeqID_83279
agatgtaccggtgcgccgcgggggcaagggcgccgcgccgcccgccgtgccggggctcgactgctgctgggacatattccgtttgtccgtggagaggtgccccgacaacaggatgctgggccgccgcgaaattgtcgacgggaaggctggcgagtacacgtggctgacgtacaagcaggtatacgacaccgtgatcaaggtcggcgctgcgatccggagctgcggcgtcggcaagggtggccggtgcggcatctatggggccaattcgcctgagtgggttatcagtatgcaggcctgcaatgcccatggcatttactgtgttccattgtatgacacccttggtgccggggcagtagaattcgtattgtgccatgcagaggtacagattgcttttgtcgaggaaaagaagattggagagatgctcaagacatttcccaatgcgaccaaatttttgaagacaattgtgagctttggtaaggtcaatcccgagcacaaggaaaaagttgaacagaatggcttgtccatctactcatgggaagagtttctgcaactgggaggtgaagagaagtttgaacttccaccaaaggaaaaggatgacatatgcacaataatgtataccagtggcacaaccggtgatcctaagggagtattaatatccaacaagagcatcattaccattgtttcagcagtagatgagttccttatcaactcaggcgaggagcttcgcgaggatgatgtttacatttcttaccttccacttgctcatatttttgaccgggtgattgaggaggtgttcattcaccacggtgcttcaattggattctggcgtggggatgtaaaactcttggttgaagacattggagaactcaaaccaacagtattctgcgctgttccacgtgttctggacagaatttatggaggattgcaaaataaaattacagctggcggtttcttgaagaagaccttgttcaatgttgcttacaaatacaaacaaggtaatatgttgaaaggaagcaagcatgaagaggctgctgcagtgtttgacaaggtggtcttcagcaaggtgaaacagggactaggtggcagggttcggctgattctatccggggccgctcccctgtctagacatgttgaggagtatctacgtgtggtgacatgttcccatgttcttcagggatatggactcacggagacctgtgccgggtccttcgtttccctaccaaacaatatgtccatgctgggaaccgtcggccctccggtcccatacgttgaagtacgcctggaatctgtccctgagatggggtacgatgcgctgtcgagtgagatgcctcgtggggagatttgcataagaggggacactctgttctcggggtactacaagcgagaggacctcaccaaggaagtcctggtcgacggttggttccacacaggagacattggtgagtggcagcccgacgggagcatgaagatcatcgaccgcaagaagaacatcttcaagctctcacagggagagtatgttgcggttgagaatctggagaacatctttggtcagactcctggtgttgattcggtttgggtgtatggcaacagcttcgagtcgagcctcgttgcggtggtgaaccccaacaagcaggctctggagcgatgggcagagtccaacggggtaactggagagtttgccacgatttgcgaggaccctaaagccaaagagttcatattgggagaactaaccaagatgggcaaagaaaagaagctcaaaggcttcgagctcatcagggccgttcatctggaccctgtgccgttcgacatggagcgcgacctcattaccccgacgtacaagaagaagcggccgcagctgctgaaatactaccagagcatcattgacggcatgtacaggagcatgaaatagggtcgtgtcgactcagttgcgggtgcagcagggcaccggagaatcaaatggactgctagctagcgacctcggaaaaactttaacgtgaatttggcgcgcatgatgttaacttgtcattgaaaagttgcatgatattagctagtttattgttttattgtgaatttggcgtatattagctagttgcatgaattggcgtatatagtgagctgtctgcacccgtgttggtgtttccatccaaaacaatacatcagatatgcctgttaaaaactactcacactgagtc

SEQ ID NO: 17306 - DNA, 1292 bp, Setaria italica
  Peptide Sequence Number=SeqID_83280
ccgctgtccttggggacgcggcgggccaggatcaggtgcgtcaaggacgactcgctccatttcgacccgtccaagatcgagccgccgccgtactccagctacttcgactccacgtccggccagctcgagccggcgtcgggcgcccgggcgagcatacccgggaaggagtactggcccgagggcaccgcggcccgcgtgcgggccgcgcgcgcgcctgctccggtcggggagtcggctggggccccttcgtttggcacgaagccagggagcaggaggaaaggatacaaggagcacgtgacgtcagcgtcaggaacggagggtgcgcagacagacgacggcgtggatgacgacgagcctgttgtggccattgtagactctggggatgatgcgtcggaggagccaaaggattcagcggatgaatatgtcatttacgagatgccagaggaagaggagttgagtgagtatgacatggacaagatgatggggcggccacatccgttcattgacccggataaggcgatgtcgttaggggagcccaaaaccagtgaagagctctggtggaactggagaaggaagtctcaggaggaggaaatgtggtcaagatggcagaggaggcgtccagatgttgacacggtttttgcaaaggcaatggcagagactgggcaaatcaaaatttttggggaccagccttcacggacagaagctgctctcgcaaagacaagaagacatttgttcaaagaggaaaggttagaagaagagcgaaggagactagaagaaataggaccgatagcatactactcagaatgggttgaagcttataaaaacacggatacatcacgcgaagccatacagaagcactttgaggaaactggtgaagatgagaatgctcaacttataaaaatgtttcaacaccagactgctggcgaatatcgtatcatgatggggacagatgtgcgtattcagcgagatcctttggccatgaggatgcgggaagatcagatcaaacagatttggggcggtgatcctgtctatccaacaattaattatgttcaggatcctgaagaagtgattgactacagaggtccagaatttcatgagcctacacctgaagttgtaccttacctgatggagcatgggataatgatcacaaaggaagagctgtatgcacgtctgaatgaagagagagatgacgtcaatcaagacataacgtatattcctgaagtcaaagatcctatggctactgctgttgatataggagagcattcttacaatgaagatagtgatgatgagga

SEQ ID NO: 17307 - DNA, 267 bp, Setaria italica
  Peptide Sequence Number=SeqID_83281
acccggccttggcctcgtcggtccagttctggcgcatgatctcggcgcgccacaggccggtgtcgttgcagcccagcagcgccacccgcagcggcgacgccacgtccgggttgcccttccagtacgccgtcggcacccggtccacccatttcgttgccttggcgccggccttgatgctcttgaactcacggctccatggctcgatgttcgtctccggccagccccagaaggaccaatccgggaaaggatgtcgaagtggtcctccct

SEQ ID NO: 17308 - DNA, 664 bp, Setaria italica
  Peptide Sequence Number=SeqID_83282
tccatgagcgcggcgtactcggtgagcaggtgcagcatgtagtcgtagacggcggccatgctcaggtcctgcatcagacgctggccgcgcctccccacgcgctcggcctccgccgagttggcgttgccccagtccacggcgtcccggatggactcgcacatgcccacccggctcaccggccagtagttcaccctcgggtccaggccccggctgaagaagtcctcgtactgcgggtcgatcagcagcgccatcgacccgcacgacaggatgtacttcaggctcaccgaccacgcgaacccctccgcgtagatcttgtacctgtgggtgcactggctggagagcttggagtgctggtacccggccttggcctcgtcggtccagttctggcgcatgatctcggcgcgccacaggccggtgtcgttgcagcccagcagcgccacccgcagcggcgacgccacgtccgggttgcccttccagtacgccgtcggcacccggtccacccatttcgttgccttggcgccggccttgatgctcttgaactcacggctccatggctcgatgttcgtctccggccggaagagcggcggcggcggcggcgcggcggggtcgccgtcgccgtgctcggtgcggttgacggccggcttgtccatgcagtcgaacatga

SEQ ID NO: 17309 - DNA, 541 bp, Setaria italica
  Peptide Sequence Number=SeqID_83283
tccatgcgctttcaaccatttctcgcattcttctaagccatcattcacatcggccgtgcaaccttcactatctgttctcaagaatcccaaaatccataaggcatgcgttcaaattgggcgccttcttgtatagtttgaaaaatgtgacataattgccagataaaacagcagcatgaactgcaagggcatgcttaacagctgcatcttgtttggcttcttttgataagctcgccattgatgacagcaagtcccgtttattattatagtgcagcatgacacagagcaaattgtaagcagcaaattcaaaatagcaacccttgattccttctgcatatagcctcttcagttgtgactggcactggttataactgcaagagttgaggcagaaatagttaggactatgacagtcatgaagcactagtgccgttttctaggttgtattttgcgttaaaattgcaaaaataaattttgtaagcaacaagttttaatgccagtcagctttcctgaatcagtagcagtaccagtgatctgccggactgaa

SEQ ID NO: 17310 - DNA, 415 bp, Setaria italica
  Peptide Sequence Number=SeqID_83284
ggtgagactggagaaacttcccatgatcccaactgctacccgttctacttttaggttcaaaaggaatgtgtatattactgttggccaaatcctttttgctatttgttccaccttattggaactttttcatccacagcaggctcccacctgcttttcacacgtttccttggagtagcttgcctccgtcatgccaacaacactttctggcaaaggaagtagtggttcagtatcccaattcttagtaagaagggttccatcagcgatagcttttcttgtgatctctagcattatactttggcaggctgccctttgtgcatcatctttgcaacgattgaggttccttatagtataatttcggagggaaaacgggatagatctagcatcaggaccaacttgagttgctttagcatcattt

SEQ ID NO: 17311 - DNA, 554 bp, Setaria italica
  Peptide Sequence Number=SeqID_83285
tttttgtcgcaagtaggtaatatgaatgaaatatttagtattagtactcggttcctctcgaatgatgtaagatatatttctataggaaaacaacgttatgtgcaagaaaaaatagtttacactcttctgcggacaatggggcagccacaaccagaaaaaggtgcccccaaagacatacatgtattctgtgtatgcttcttggtcatgtttctcgatatttcctacacttgaggccttctaagcggtaagtaaacctaagtaaacctgtgatacaacgccacctcgacgcataaacttgcagctccgcgctggtggctcgtgcggacagcactgcttcagggtttgcccactcaacgaagctcttcagaagcagctctagatgaaggggtcgattatagcaagtggcgagaactcagaatcagatgaccacatccttgttccagctctcgacctctgtaagcatccttgagctgctccatttgaagctcccgttgcatattttctacgggggaagtgcagtatgtccacagctcagcaccaatactaccaagtag

SEQ ID NO: 17312 - DNA, 1815 bp, Setaria italica
  Peptide Sequence Number=SeqID_83286
acaatagtatgtcttggggcacctttttctggttgtggctgccccattgtccgcagaagagtgccttctaagcggtaagtaaacctaagtaaacctgtgatacaacgccacctcgacgcataaacttgcagctccgcgctggtggctcgtgcggacagcactgcttcagggtttgcccactcaacgaagctcttcagaagcagctctagatgaaggggtcgattatagcaagtggcgagaactcagaatcagatgaccacatccttgttccagctctcgacctctgtaagcatccttgagctgctccatttgaagctcccgttgcatattttctacgggggaagtgcagtatgtccacagctcagcaccaatactaccaagtagtagtacccactgtcagcctgtcgctgctacaccttttacgatgtccgtgccaaaaagtcctcgacggccagtgatgcatcaccgtgtgcaactgcattctctggctccggcatgtaaagcgtagcagaagaagccttcatatctatctgcaattctccactgttattatctactgaaagtactgttccatgcgctttcaaccatttctcgcattcttctaagccatcattcacatcggccgtgcaaccttcactatctgttctcaagaatcccaaaatctgtgcaacatatcccacaggtacagttaggcgatatgatctagacatgcatttcatggcttcaaagcgcatccgctccacatatagatccataaggcatgcgttcaaattgggcgccttcttgtatagtttgaaaaatgtgacataattgccagataaaacagcagcatgaactgcaagggcatgcttaacagctgcatcttgtttggcttcttttgataagctcgccattgatgacagcaagtcccgtttattattatagtgcagcatgacacagagcaaattgtaagcagcaaattcaaaatagcaacccttgattccttctgcatatagcctcttcagttgtgactggcactggttatattcaggtaaatcgccagcttgcattgctaaacgggcatgagtttcataaacctttacggttagttcattctggattctctgaaccgtaagatcttggcgaatagattttaattgatcacatttgtaaaaataattcttttgagatgtttcaaccattgcaagggccttctccaggacttcttctggccttactatggatggatcaggtgccgatgtaaggcgtagatatcttttctcaatttcctgacatgttcccttgattgtcagtgcatcccaatccatatcctccacagccctagtgccatcttcataagttctattaagttgagacgaaatagcccttcttctatgcatattagccattgcatctttatttgcagaagagtttctcgattttaatgatgaatcctgactcctttcaaaacgcttagatctatgctccctacgtttcttttcctcgggtgaatttgctagtgcggttgcactggcataatatttggttagatcctgctccttatcactgtcacttgaagcatttccattctgtatttgacttgaattactagtgactttttgcttcttggcaggcctctgattgactttgtttaaaggtgcttggtgagactggagaaacttcccatgatcccaactgctacccgttctacttttaggttcaaaaggaatgtgtatattactgtttggcaatcctgctatttgttccaccttaccatccacagcaggctatagaacaacaagaagacaaaatttagttaaagtactaagactaaaa

SEQ ID NO: 17313 - DNA, 1749 bp, Setaria italica
  misc_feature (1731)..(1731): n is a, c, g, or t
  Peptide Sequence Number=SeqID_83287
gcttggtgagactggagaaacttcccatgatcccaactgctacccgttctacttttaggttcaaaaggaatgtgtatattactgttggccaatccttttgctatttgttccaccttattggtaactttttcatccacagcaggctcccacctgcttttcacacgtttccttggagtagctgttgatgagaagggatttgaatgatttgcacttgcctccgtcatgccaacaacactttctggcaaaggaagtagtggttcagtatcccaattcttagtaagaagggttccatcagcgatagcttttcttgtgatctctagcattatactttggcaggctgccctttgtgcatcatctttgcaacgattgaggttccttatagtataatttcggagggaaaacgggatagatctagcatcaggaccaacttgagttgctttagcatcatttgttggcatggagacgctaacataggcaggtttctttgataaatcagctcctaaatttttcttctcactcttcggtatcaccatagagaaaccaggagcaattcgaggattggttggaatctgtattttgctttcactggaggtatttgttgtcacggaaccctgcaaatttggttgaaaattttcagaaacatggttcgacagagtattggagcttcgacctataggctctacagtcctctgttgatcttcagggttgcttagcggcgcacgattcgagttcatggtcttctgagggtatgcctgtgcctggtaggcataatggtcttgagaccattgaacacctggcacctggttggcatgatggtcttgtgcctggttggcgtattggttttgcagtcctgaaacgcctgggacctgcataggaggagcaacagaagcaattgaattacttttccatgctgtcgtgcctggcggaggtggctggctattaggataggaataaccagaggagttgttaactgctacattatctgtagtactctttccagcaactggattgctagaagcacttggcacagattgattgtaatagtatggccactggttatactgctgctgatatggtatagaattggcaggcattgaagtggaactctggagtgcatttgtatcagacgatgagtagctttggtatgattgggcataattattccctgagcttccaccattccatgtgttgttctgataatagtagttgctgcttccatatcctggcacagtctgatgacccccagcattgtaatatgtgttacttgtaggatcaatgtaagaccctgaattttgaaatgaagtaagaggctgataagctgcacctggatgttggtttgctccttgctggacagaagaatcatttgtagcttgtgggtagctataataatagttggcatattctacaggattgtagccatgttgaactgaactagagtagggcacatgagaatgggatgaatctgccacccccatactcagctgggctgcatgaggtgcactgctgcctacattttgattccctcctgcaactgatacatccctttgtggatcatagtaaactgtatcttggctaggtttgtccactggattgttccatgaaactgttgctgacccactcgcagaggaccatgattgatgactggaagatagaggtggataaggagatggatttgctgtcccatactgacaacctcagcagtggggggctcggatccggcggccgcccggngccgtggctcgccatcct

SEQ ID NO: 17314 - DNA, 1117 bp, Setaria italica
  Peptide Sequence Number=SeqID_83288
cacgaccgtcgaccgcccgaggaggggagcaggccggaaaagaaggtgagccgctgcttcccgtgcctccccctcctataaaaggacccccagggaggcatggacggggcagcagctctacagcgaaccaagcctttcttctacagtcttctcaaatcctcgagaaccagaggtccacccaccttctcctccaccgcacaaaggccatggcggacgccgtcgagcgcttgaagaccgggttcgagcagttcaaggccgatgtctacgacaagaagccggagctgttcgagccgctcaaggcccaccagtcccccaagtacatggtgttcgcctgctccgactcccgcgtgtgcccgtcggtgaccctgggcctgcagcccggcgaggccttcgctgtccgcaacatcgccagcatggtcccaccctacgacaagaccaagtacgccggcgtcgggtccgccatcgagtacgccgtctgcgccctcaaggtggaggtcatcgtcgtcatcggccacagctgctgcggcgggatcaaggcgctcctctcgctccaggacggcgaggccgacaagttccacttcgtcgaggactgggtcaggatcggcgcccccgcgaaggcgaaggtgcaggccgaccacgcctcagctgctttcgaggaccaatgctccatcttggaaaaggaggccgtcaacgtgtcccttgagaacctcaagacctacccgttcgtcaaggaagggctggagaaggggaccctcaagctggtcggcggccactacgacttcgtctccggcaagttcgagacatgggaaccctaagaggccaaccaggccagtacaccatatacctacaaatatgctcccgatcgatatatatgactgcgtggagcacaactaattcgcccctatacagccataccgtattgctctatgtggactgtaataagcgatggaaatttctaccgtggaggatttatttgttttttttttgtaatgtatgatgcataatttgatcgatctgtggtcaaaagacatcagctataatgatcttttcattaatattatcatgaagagagaaaagagtttacctttttatgcttcctctcttgctgttccccaac

SEQ ID NO: 17315 - DNA, 713 bp, Setaria italica
  misc_feature (673)..(673): n is a, c, g, or t
  Peptide Sequence Number=SeqID_83289
tgttgaggtcctccacctcgccaccccacccgtccggtccgggtgacgcggcggccgtccactccccggactccgacacggcggggctgaagtcggcgacgccgcgcggggtgagacggcgcgtggctcccgagggcaggtgcgtgttgtagacggccgcccagctccggcgcggggcctccgcgggctcggcggtggagacgtacacgaggtgggcgccgtcgggggtcagcgacgggcggtccttgagcgcgatggggtcccacgggagcagcggcgaggggagcgctgccgccgcctcgggcacctcgagcgcctcgcggcgggcgccggagccggaggcggaggggaccgggaaggcgtagaggttgagggtgccgttgcgctcggagacgaagaggagggagtccgaggacggcgcgaagttgccgttgtagttgacggaggcgccgtcggtgaggcggacctcagcggcgggggaggaggaggaggaggagagcggggtgagcgggagcgcgaagatgtcgaaggcgtagcggctgcggcccagcgtggtgaagacgatggtgccggaggcggcgagcgcgggagcgggcgcggcgaggtagagtggccccacgaggaggaggagcagcagcagggcggcgcggcgagccatggcgcgcgaggggancgagcgggacggcgtagtgacgtaccacggtgggaggctc

SEQ ID NO: 17316 - DNA, 513 bp, Setaria italica
  Peptide Sequence Number=SeqID_83290
ttgcagctgcaatcatatctctgttgtagaattcgagaaggttggttgagttcatataatttaatttgtgtaaagatacttgaagcacagattttcaagttgttccttccaattcaagatgcccaactgattcgccaagggagcaaatatctccagtgtttcctttgcaaagctctgctgtttgatcttgggcaaagaatccaacgtcctcatgttgtgtagcctgtcagcaagttttataagcacagctcttgcatcttccgttgcaaggaacactgtacgtaacctgtcagcttcatccattctactggctgtatcgtttctacgagccattttgctgaaatgacttagattggaaacccccttaacaagatcggcgacaccagcaccgaactgcttggagatgaaaccgtagtcgaggccggcgtcgtcgaccgtgtcgtgcagcagcccggcagcgacgactgcagggccggcgccgaggtccgcgagcagcgccgccgtctccacgca

SEQ ID NO: 17317 - DNA, 735 bp, Setaria italica
  Peptide Sequence Number=SeqID_83291
gtctgaagaagaacagcttctttgttttccatttgcattggagaaagaagacattgggaggccatgtgatggtgccattggagagtttgagcttggagctcccgaatggggaaatcttagtgggctacgacaaggacatctcagctctgcaagaggagatttcaactctgcgatcaaggcagcgacgatcgttgaccggagaagaagagaggcactcgacaagctcattgacctgaaaggaagtattagggtcttctagccgggtacggccattggtccaaacgagcaacttgaagaccaaatcactggttactgtcgaacatgagaagattgcagtcaagtcagtggggatcaagaaagaattcagtgttgatagggtttttgatcaggagtcaacacaggaggatgtttttcaagaagtaaaaccaatcctcagatctgcacttgacgggcacaatgtctgcattctcgcttttggccagactgggacaggaaaaacctacacaatggaagggactgatggtaagctcggtattgttcctcgagctattcaagaactgttttctcatgcttcagaagacagttcatccacatactctctctccataagcatgcttgaggtctacttggggagtctcagggacttgttggcaccaaggcagcctctcttcaggccaacggaatgtagcacagcatgtaatctcagcataatggcaataggacaaactaaaaaga

SEQ ID NO: 17318 - DNA, 581 bp, Setaria italica
  Peptide Sequence Number=SeqID_83292
tttttttttttttaaaatgttcgaccttgtcatcatcgttatggcaagatcttctcactcattactgttctagtgctcttctatcacaaatacattgttcacacttcacgccataaacatacatatataatccagcgatcagcatacatactaaagcttcctgactctgcaaacatcagtgctaatttcagctccacgttattggagtgatcaacgaagcacattcgaaaccagccggacaagctgcctctcgtgggtctcgaggtccctccgcagggcggcgatctcctccatctgacggctgcattcggcgatcaacgccgcataccgcaacgctccgttcatcttcagttcaggcacgatcctctcgtcctgaggaccctgcgttatcagttccttgatccacgctatcgtgcgcctcaccgcctcaccgcccatctcttcatggcgaatgtcacccgcatctccgtcaacatccacggtgtcgagatcatcggaaactgccgcaacgttcaggtcgatggccaccggcgttcgccgcctgggcaggtcctcgtgcgggatcgggaagttgaggcgcg

SEQ ID NO: 17319 - DNA, 364 bp, Setaria italica
  Peptide Sequence Number=SeqID_83293
tcaagaaaaggaaagaaacctggtatcgtagccatgtgctcacttgaatattccacacaaggggcaattgtcaattgccccttgtgtggaatattcaagtgagcacatggctacgatactatgtctatgagaggctgattcagaaaggaaagaaacctggtttccttcagttgttgggtacacagacagtcagcgccgtctggcatgtgagtatatatttcctctcacctcctatgtacttaggggccatttggaaccattgccggttactatttagccttgcgaagcaaggatagggatgagggctatgcgtttggaaggacagctagcctgtcttggggtctccgctggcaaggttttacct

SEQ ID NO: 17320 - DNA, 289 bp, Setaria italica
  Peptide Sequence Number=SeqID_83294
caggctttactgctcgttggaaatattactttatatggtcaatttcagaagctgcaattattatatctggtctgggctttactggttggtcagagtcttctcccccaaaagccaaatgggatcgtgcaaagaatgttgatgtattaggtgttgaattagctggaagtgcagttcaattgccccttgtgtggaatattcaagtgagcacatggctacgatactatgtctatgagaggctgactgtctgtgtacccaacaactgaaggaaaccaggtttctttcctttctg

SEQ ID NO: 17321 - DNA, 316 bp, Setaria italica
  Peptide Sequence Number=SeqID_83295
tattcctcactcggccttctgagccttcggcttccttgctggtttgataacattgcccagcaggacacatacaatgggaacaattgtgccaacataatacacgctctggtaggatgccaacgtttccttgaagctcagtacctgtcacctaaatttccactctcacggtttagtgagcccctttattatgaatggggtttctggcaccggctcttctatcagtacatgtcaggctttactgctcgttggaaatattaggtgacaggtataaatataaccccatgcatataccagcctgaactagagcacgcaaagt

SEQ ID NO: 17322 - DNA, 453 bp, Setaria italica
  Peptide Sequence Number=SeqID_83296
taatattcctcactcggccttctgagccttcggcttccttgctggtttgataacattgcccagcaggacacatacaatgggaacaattgtgccaacataatacacgctctggtaggatgccaacgtttccttgaagctcagtaccttcagaaaacaaaattaaacagcatattaattgtcatgatcctggcccaggaagtgaaacagacatccattcctcatcctgctcgaggaagtaggcgcaaactttctgcattaagatacgtggaaactgaaactacattaaaaggcagcattatttaacaatgacgtccatatttgctaaaatgttgttccccctctgtaccgtcccatcatctaaaggacttatggaaccaaagatactcacgggaactttctcacgtgtataatcggctgttacaaaaatgcaaaaggaagcataaagcaaactta

SEQ ID NO: 17323 - DNA, 620 bp, Setaria italica
  Peptide Sequence Number=SeqID_83297
ttttttaaaggactaactttagactttaggcaacatagaagtcattatgtggaagaaaaacccgacgggagtgacacgttttaatgacggtcaattgcgatggagttccgaaatatgagaactgggggcaccacactatccttgtgctaactttgatatggttcaaaaggagaatacataatctgaaaactagctgtgttatcgtcgttgaagctctctcccatctttcttctgtgtaacgatcacccgagtatatattcctcactcggccttctgagccttcggcttccttgctggtttgataacattgcccagcaggacacatacaatgggaacaattgtgccaacataatacacgctctggtaggatgccaacgtttccttgaagctcagtacctggaacccaatgcacgagtagttaagcaccagcaatgtatatgcaaaattcagaaaagccaggataccgcggaaaactgaattgttcactgtttgttgccatctgtatataactcgtgaaccatttatcatcaatgccgattgaacaaagaatatgatatacccaggatacagtccatgccagacggcgctgactgtctgtgtacccacaactgagaacagtt

SEQ ID NO: 17324 - DNA, 1433 bp, Setaria italica
  Peptide Sequence Number=SeqID_83298
aatgatcctgttgttattttatctatctaatgaattttgtaacctgattacatgtaattgtactgtaggcccttaggggttttcactgcagtacccacatccaatgacgtctgactttgtgggcacagatgaatcatagtttcaaatacatcaatgacgctcccttctcctctaccctcttatgaaaattgtgctattccaacagatttgattaacttggataatcaatttgatatttaggctaatacttggttagaagtgcaaaacaggacttaggatagcgaatcaaaccaaaacagctggcatacttttttcaggaaacagacatttctagcccaatttaatggtattgaaggcttcaatatatataataagtagcaatgcggatgctgtgtctaatatggccttatcataatagtgggcctacttttgcaataagtttcatgttgttctactacggtccaaaaaaaggtgagacaatttggcaggtcctcatacctcgtgtaattgcataacaccacctctgattgcataacaagtgtcaaactaaggcgccgtatattgattatctgtaactgaaattgaggaccttatatatgccaatacaacatcttttccataaaatgctataattgtcgtcctgtcgacctctgtcctaacttagtaattaggacaacttatccaagtatctgtcttgagagttgagatttgagagtatggtctgaatatcaatcctacttttttttgttgtgtgtccaaccttgctttgacatgtaggtttacttgcatgggtgtagcatatacactgccaatagctattatctgtttctcatattgtgttttctactgtcccttaaatccttgtgtcatatgcaaagttttgaaaagtgaggtgaatcagtcagctgtggttggagttaggaatgttaccactattgggttcaaaaggggcttcttgtattggtgcatttggttttaagtttagatcttacaaagtaaaatcttggccatgatataaaatgttggtactcgattctaagttagataatgtttgcaagaaactaaaataattttttttatgttcagtagtatattacataataataacacattcaaaatcccttacgtgttttgttcttattactagtcatgtgtactacatgagtggagatgcatggaaggagggaggcattgatgcaactggtgctttaatggttttgacgctgaaagtcatttcctgcgcaataaactacagtgatggcatcttgaaggaagagggtttgcgtgatgctcagaaaaagtaccgattgactaagcttccttctctaattgaatattttggttactgcctctgctgtgggagccactttgctggaccggtgtacgagatgaaagattatcttgattggactgaaaggaaaggatatgggcta

SEQ ID NO: 17325 - DNA, 1024 bp, Setaria italica
  misc_feature (17)..(17): n is a, c, g, or t
  misc_feature (30)..(30): n is a, c, g, or t
  Peptide Sequence Number=SeqID_83299
ttttttgtttttttttnttttttttttttnttttttttttttttgttttttttttttttttttttttagttagaggctcgacaagccaaaaatgctttgcaacatgaagtcattatgtggaagaaaaacccgacgggagtgacacgttttaatgacggtcaattgcgatggagttccgaaatatgagaactgggggcaccacactatccttgtgctaactttgatatggttcaaaaggagaatacataatctgaaaactagctgtgttatcgtcgttgaagctctctcccatctttcttctgtgtaacgatcacccgagtatatattcctcactcggccttctgagccttcggcttccttgctggtttgataacattgcccagcaggacacatacaatgggaacaattgtgccaacataatacacgctctggtaggatgccaacgtttccttgaagctcagtacctggaacccaatgcacgagtagttaagcaccagcaatgtatatgcaaaattcagaaaagccaggataccgcggaaaactgaattgttcactgtttgttgccatctgtatataactcgtgaaccatttatcatcaatgccgattgaacaaagaatatgatatacccaggatacagtccatgccagacggcgctgactgtctgtgtacccaacaactgaaggaaaccaggtttctttcctttctgaatcagcctctcatagacatagtatcgtagccatgtgctcacttgaatattccacacaaggggcaattgaactgcacttccagctaattcaacacctaatacatcaacattctttgcacgatcccatttggcttttgggggagaagactctgaccaaccagtaaagcccagaccagatataataattgcagcttctgaaattgaccatataaagtaatatttccaacgagcagtaaagcctgacatgtactgatagaagagccggtgccaacggaccccaatttctaattaaattaaaagggggacttacaacttaa

SEQ ID NO: 17326 - DNA, 1233 bp, Setaria italica
  Peptide Sequence Number=SeqID_83300
ttcggagctcgcatccgaacgcgagcaagcggaccaaatcgccctccgtattctattgcccgcaccgcatctggccgcctcggcacccggcggcggcggcggcggcggcgatggggctggagatggaggcgatggcggcgtcgattggcgtctcggtgcccgtgctccgcttcctgctctgcttcgcggccaccatcccgacgggcctcctgtggcgcgcggtgcccggcgccacggggcgacacctctacgcggggctcacgggcgccgcgctctcctacctctccttcggggccacgtccaacctcctcttcgtcgtgcccatggcgctcggctacctcgccatgctcctcttccgccgccacgccgggctcatcaccttcctcggcgccttcggcttcctcatcgcatgtcatgtgtactacatgagtggagatgcatggaaggagggaggcattgatgcaactggtgctttaatggttttgacgctgaaagtcatttcctgcgcaataaactacagtgatggcatcttgaaggaagagggtttgcgtgatgctcagaaaaagtaccgattgactaagcttccttctctaattgaatattttggttactgcctctgctgtgggagccactttgctggaccggtgtacgagatgaaagattatcttgattggactgaaaggaaaggaatatgggctagcccaactccttcacccttgttacctactttgcgtgctctagttcaggctggtatatgcatggggttatatttatacctgtcacctaaatttccactctcacggtttagtgagcccctttattatgaatggggtttctggcaccggctcttctatcagtacatgtcaggctttactgctcgttggaaatattactttatatggtcaatttcagaagctgcaattattatatctggtctgggctttactggttggtcagagtcttctcccccaaaagccaaatgggatcgtgcaaagaatgttgatgtattaggtgttgaattagctggaagtgcagttcaattgccccttgtgtggaatattcaagtgagcacatggctacgatactatgtctatgagaggctgattcagaaaggaaagaaacctggtttccttcagttgttgggtacacagacagtcagcgccgtctggcatggactgtatcctgggtatatcatattctttgttcaatcggcattgatgataaatggttcac

SEQ ID NO: 17327 - DNA, 327 bp, Setaria italica
  Peptide Sequence Number=SeqID_83301
tatggtgttccacacaaagcaactccctcccttctaactacctctgctactaaagcagctgtctgactcttcaaggcccacacctcatcagggccaacaacatctgatatcaaattaatggtcaaattagcaaattcattccgctctgaagcactgagctcctcccacctcaatctcacaaggtgctgcaacatcttgaacccatgcaagcggatctctgatgtctgatccttccgtaccaagagaaatgatgtgcttgccaaagctcggacgtctccgctcttaaccgattcgaggtaggcgaaggcggcggcgcgggcgtctggg

SEQ ID NO: 17328 - DNA, 396 bp, Setaria italica
  Peptide Sequence Number=SeqID_83302
attcgaggagtagggccaccgttccggtcgtggaggggcccacgccgatgcagcccaacggctacgactgcggtgtctacgtcatggccattgccagggccatctgcggctggtggaagagtggccatggcggccaccggggaggggattggttcgaggcggtggggagggaggtgaacgccgacagcgtcaaggccatgaggggcgagctgctgcaactaatcaacaccctcatccaagacaaggccaaggccagctcaacatccgagggcaacaagacaagcaacactgattgaggatcattgttggatctgtgtaagatcgataggaacgacaggcagtagcttttacctggtatagtaaactggtttctcaagtttggtagctgttgttgat

SEQ ID NO: 17329 - DNA, 2529 bp, Setaria italica
  Peptide Sequence Number=SeqID_83303
tttactggcgaagcatagatcatcccacaaacacatggcttccggggggcaaacttgggctgaacaagaccacaggggtcagtcagcgtcttgttccatggaggaacatggcaaacccatctcccggcttgttttcgctggagctggacccgaacggcacaacacagtacttcatccagtggaaggattccaaaacttactggaccagtggcccttggaatggcaatatcttcagccttgtgccagagatgacggccggttacaactacaatttccaattcatcaacaacgacacagagagctacttcatctattcgatgaaggataacaatgtcatctcacggttcatcattgatgtgaatgggcagatcaagcaggagacatgggtgtccgcctcacagtcgtggatcatgttctgggcccagccacggacacagtgtgaggtgtatgctgtctgcggggcatatggcagctgcaacctcaatgccctcccattctgcaactgcatcaaggggttcactcagaaggttcagagtgattgggacctccaggatttcagtggtggctgtaaaaggagagtaccactgcagtgccagacaaattcgagttctgcacaagccaagcctgataagttctataccatgacaggtgtgaggctacctgataatgctcagactgctgtggctgcgagctctcaagactgtcaggtgacttgtctgagcaattgctcttgtaatgcatacacttacaatagtagcggctgctttgtctggcatggggacctgattaacctccaagaccaatacagtggaaatggaggaggcacactcttcctcaggattgcagcttctgagcttccagactccaaaaagagcaagacagtgatcattggcgcagttgttggtggagttgctgcagttttaatagccattgctactgtgtcgtacttcctatttcagaaataccgccgagacaggactcttcggatatccaagactgctgggggcacactgatctcctttaggtacagtgatctgcagcatgttactaacaacttctcagagaggattggtggaggtgcctttggctcagtgttcaaagggaagctcccagattcaactgccattgctgtgaagaggctagacggagttcaccaaggggagaagcaattccgtgctgaggtgagcaccattgggacaatccagcatgtcaatttggtccgtctacttggattttgctctgaaggatcacggagactgcttgtgtatgagttcatgccgaagggctccctggacttgcagttatttcctggtgagacaacggaactgagctgggcttccaggtaccaaatagcacttggaacagcaagaggtttaaattacctgcatgaaaaatgtagggattgcattatacactgtgatgtcaagccagaaaacatactcttggatgagtcatttgtgccaaaagttgctgattttggtctagcgaagctcttaggcagagacttcagtcgtgtattgacaacaatgagaggaacaaggggttacctcgcacctgaatggatcagtggtgtggccataacagcaaaggcagatgtctttagctacggtatgatgctcttcgaactcatatcaggcaggagaaattctgatcatggtgaaaagtgtggatccaccttcttcccaaccttcgctgcaagcaagcttcatgaaggggatgtgcggagcttgatggaccccaggctaaatggagatgcaaatgttgatgaactcacaagagcttgtaaggttgcctgttggtgcatccaagatgacgaaagtgctagacccacaactggccagattgttcaaatcctcgagggattccttgacgttaacatgcctcctgttccaaggtcattgagagttcttggtgaaagccctgatgttatgaacttcttttcagatatatcttcaagtcaggcttctcagacacaggacagcacgacaacttcccagacacacagtgctacttcaggcggttcacacttccaaagtatataaatcagataatctgcacttggttagggcaaatacttggagagtgttatgagtgagtgaagatgtacataaattagaacctaatatgctccgcttttgtactgtgctatgctttaatactgtagatctagtgcagagtgtagtaaccaatataacaaagggaccactgttgcatgtacacatgcaatcttccccatttgtcctactaaatgtaaaattgagttgatgagttcacctttgaaccatatattggaatctgaatatagacgcttttttgtaagtgttatgtgtttgactaattgctcctaacatcagctcaggcgtgcgcatactctttggtgaatgaggctgaaattattttttctaaaaaaaggaggtacagattgatttttcaaaaatgaaaataaaataacaaaataagcaagcggaccccaaatttctgtgcgaacaaattccgtgttactgtttccttgtttatatgaaacttaag

SEQ ID NO: 17330 - DNA, 312 bp, Setaria italica
  misc_feature (19)..(19): n is a, c, g, or t
  misc_feature (31)..(31): n is a, c, g, or t
  Peptide Sequence Number=SeqID_83304
aattaaacctctccaaagnaccccacataanctgaaaccactgccagcattacaatgaacatcctatgcaaaatctcaggataattatcaccatctatttatttatatgaagtacaacctcacgggccaatttgctgactttcatccagttcactcctttcacatcaagtattgttgttattgtatcaacatgcttctttgatgctacagaacatgctggatacttctcagcaaagagcctctcaagtgactgaacatgatactttaagaatctctccactgttgtcgcattcaagagcttagttgggtccg

SEQ ID NO: 17331 - DNA, 330 bp, Setaria italica
  misc_feature (279)..(279): n is a, c, g, or t
  Peptide Sequence Number=SeqID_83305
ccggcgatggggatggtgtccgctccgggatgggcaccccagaccctcggaggatgtcgctgagcgagggagagggggaccttcccgccgatgatgaggacgaggcaaatcctgatgagcccgaggcagcgtaggcccagagctcacccaccgaaggaatggaaggtcccgcctcggatgagccgggctccgacacgccgaaagtgggggtcgcgcagggaggaggggtggcgatgggtgaatccactggatccagatccagatccaccatggtggganctcgggttagggaagatgaccgtagggtgagtggtgggatggagggatgca

SEQ ID NO: 17332 - DNA, 653 bp, Setaria italica
  misc_feature (607)..(653): n is a, c, g, or t
  Peptide Sequence Number=SeqID_83306
atcaaccacttctaaggtggcacccacgccgttcatataccgacagtgcctttgtagaaagattgaaggaaattgaagctatcaactccaatgatgaggccagatcagtttctggagagacaactgcagacaataaaccatctggagacctgatggaggatccacttgcttgtatacttggttctccaggtgacgtggaaagcaacaatccccctggaaagaccagcactgtcctgaagcgaagtgagctgcgagcccgcaggagaagtcaccggcatcatcatcggcatgctgatgacaagtttgctgcattgtgaattggatcagaaatgcagtggagtaccgtagacgctagcattttgtttgaatctcctgttgtgagaaaataagattgctggaacaagatgttcatgcgtgcgagcagattaattgaagtactatgcctggtcaaaatttgtaggttgtgacaatgttgtgtgagcatacctgtgaggagagatgttgggttgcaggtgctgcattgacagcgatgtaggtactcatgtatcccttgatctttgcattcttcactcaacaaatgaaaagatgacaagtattaccctaaaannnnnnnnnnnnnnnnnnnnnnnnnnnnnnnnnnnnnnnnnnnnnnn

SEQ ID NO: 17333 - DNA, 583 bp, Setaria italica
  Peptide Sequence Number=SeqID_83307
aacccgaacctaacggaatagaagaccgggactaccgaacaacgccgaaaagtgggggtcgcgcagggaggaggggtggcgatgggtgaatccactggatccagatccagatccaccatggtgggagctcgggttagggaagatgacctagggtgagtggtgggatgagggatgcaggttggtggccagcggcgccaggatggccaccgccaggaggctgtggacgccgggaccggagtggtcaccggcggtggcggcgggggaggagaggcgcgggagagctatgaatctaaccagccgatgggctcagctatgaatctcctgttgtgagaaaataagattgctggaacaagatgttcatgcgtgcgagcagattaattgaagtactatgcctggtcaaaatttgtaggttgtgacaatgttgtgtgagcatacctgtgaggagagatgttgggttgcaggtgctgcattgacagcgatgtaggtactcatgtatcccttgatctttgcattcttcactcaacaaatgaaaagatgacaagtattccctccgtcccagtttactattcgttttggtttttcc

SEQ ID NO: 17334 - DNA, 856 bp, Setaria italica
  Peptide Sequence Number=SeqID_83308
tgcatctccagtccggactccagtcaccactcaccaaccctacgagcagctagagaagcgatggcggggctgctgcagctcataaaggacctttattttggccccccgcctggcaagggagtgatacaagatctggagtacgccatgcggaccaagggcggcttgaccaaagaggaggacaccaagcttcagattgccaatttagttccaactgcggccttcgctttgttctcaggattgggcagctatgcagggtggtttagtctcggcctaggaaacaagttacttgggtttccacctagtcctgtatttgcaaggttttgtgcagctactggcggcgcttatatcatgggaactgccatgtatcgtggaaccttgcatgaatgtcctgtatcgcttttaaacactgaaggacgcatgaagatggagctagctaacataatacttactaagcatagtgatgatgcatacctggtcaaagctatgaaaaaacacttttttgcggagcatctgttcgatgacctgcatcaagatcaaccacttctaaggtggcacccacgccgttcatataccgacagtgcctttgtagaaagattgaaggaaattgaagctatcaactccaatgatgaggccagatcagtttctggagagacaactgcagacaataaaccatctggagacctgatggaggatccacttgcttgtatacttggttctccaggtgacgtggaaagcaacaatccccctggaaagaccagcactgtcctgaagcgaagtgagctgcgagcccgcgggagaagtcaccggcatcatcatcggcatagactagaaataagaaacaaaagtttaagaacaa

SEQ ID NO: 17335 - DNA, 906 bp, Setaria italica
  misc_feature (1)..(53): n is a, c, g, or t
  Peptide Sequence Number=SeqID_83309
nnnnnnnnnnnnnnnnnnnnnnnnnnnnnnnnnnnnnnnnnnnnnnnnnnnnnagtatcatcaaacccaatatattacaaagagagaggaatctgattcaattccatacttgtcatatcaccatatggactccccagtgattattgggcagagcagtccccaaatccttgcacagaggacagaggaggactgaccgcccgtgtcacacaacataattcacagcaacaacggctgccgtcgcaagtatcctttcaggtccgtcgaaaggccaagaatagcataattatcacggcaacagaaacagagtagcagtcactgttggtttggttggttgcgtaccgatcgattgccacggccggcaccatcggtcagatcttgtcgatgtcctcgtcctcgaactgtatgtagtcgtcctgcgcgccggtgtcctcctcgtcgacgacgccctcgttgagcctgacgttgtcggggatctcgccgtaggccttgagcagtcgggcctcgtcgttcatgtacttgaggatgacgtcggccttgtcgtcctggtagtcgcggaggccgacgaggacgatgtcccccgccgcgatccacaccttcttgtgcatcttgccccggatgtggcagaggcgcttggtgccgtcgatgcagagcgcctcgcagcggccgttgcccagcatccgcgtcacctgcgcgtactcctgcccgtcctccttgaacaccagctcccgcttctcgtcgtccgcctcgttcttgccccgcttccggttcttgcctcccttccccttgttcttcggcatcgcgggaggcgagagccgagaggaaaccctagcgtggattgatcgggggcagggtagggaaggggtggggaatttggtcgcgaaaggtttgtgcgctgcagctaagctt

SEQ ID NO: 17336 - DNA, 814 bp, Setaria italica
  misc_feature (1)..(3): n is a, c, g, or t
  Peptide Sequence Number=SeqID_83310
nnnttttttttaaactatttttttactttgatttagaacaacaatagcaaaccaccagtatagcatttgtaataacagcatgtaccagattcaaacgaaattaatccgcgattatttaaccacctcagaccctaaccacatctctcgtcgcatcacaagattatgctggcaaaagtgcaaatccataacagccagcctaaaccatatcaccacatgctactagaacataacaataagaagtcacatataagaaagtaaccgcgaggaacagaaatcttagatcttgtcgatgtcctcgtcctcgaactggatgtagtcgctgccctcctcgccgtcctcgggcccgtcgacgtcgacaccctcgttgagcctgagcgtctcggggagctccccgtaggccttgagcaggcgcgcctcgtcgttcatgtacttgagaatgacgtcggccttatcgtcctggtagtcgcggaggccaacgaggacgatgtcgcccgccgcgatccagaccttcttgtgcatcttgccccggatgtggcagaggcggcgcgtgccatcgacgcagatggcctcgcagcggccgttgccgagcatgcgggtcacctgcgcgtactcctgcccatcctccttgaagacgagctcgcgcttgtcgtcgtcggcctcgttctttcccctcttccggttcttgcctcccttacccttgttcttcggcatcttggcggtggggagcggcgagacgaaaccctaggcgcgcgagatggaggtggggaaaggggtgttgtgcggcttgcggtcgacgcacaattagttacggtta

SEQ ID NO: 17337 - DNA, 1270 bp, Setaria italica
  Peptide Sequence Number=SeqID_83311
ccccaaccaaccaaaccaatataccaccaatccattccaattccctaataagtagcactatgttcatcagatgtttggcgtgtacagttacagattacaacaagcaagctgctgactgctgaggaggagagaacagaggatttgcaacaatgatccagccagccagagaggatggatttgcagcaggggaggatgtcagacctggaattgctccatctggacgtcggacgccttgagcgggacgtagtctccgaggtacacctcgaggtggtcggagatgcctgccttgtcgatgctctcgtggtggtagctcttgcagacgaggtagacgagggtctgggcgacgagcgcgagcatgacgacgcaggagagcgcggcgagcgcgaggaggccgacgaggagcctcgcgagggccggtgaggacccgccggccttgacgacccaggcgcggaaggcgagctcgacgactgcgaagacgaggttgagcgtgacgaagatggccgcggcggtgggcagcttccccctgatgaggtccctgctcttgcgcatggctgcgaagcccttgtagtcctcgagcacggagacgacgctggcgaggtgccacacgacgctgatgtagacgagtcccacgaggtaggcgacgacgaggaggaacgcgagcagccccgcgagccccgacccgttatccgcggcgactaggagcccgaggaagacgacgacgaacaccgcgtggtacgcgaagaggagcgcgaaggccgcgaggaacgtggccgcgagcctcctccacacccggggcacgacggagagcacccgcgggaaggtgagcgcgtcgtgcttggcggagtagacggaggcgacggagaagacggcggcggcggtggcgaggagggagaggaggaggagggcgaggaggtaggcggccttgaagaggaggagggcgagccagtcggaggcgaggcgggagaggaggcggcgctgggcgtcggtgcccggggcggaggagtcgagggcggtgtcgtcggtgtcgatgtgggtgaagagcgcgtgggagatggcgacgtggagtaggaagagggcggcgagcgggaggacgaaggcggcggcgacgcgggcgaagaggggccggtgcgggccgcggaggatcgatgcggaggcggcgtagatgcccgccgcccccaggaactgcagctcctccggctcgcactccatggcctcgatctgcgggggtgtgggacttcgggtgggtggggagggagggagggatttgggg

SEQ ID NO: 17338 - DNA, 472 bp, Setaria italica
  misc_feature (471)..(471): n is a, c, g, or t
  Peptide Sequence Number=SeqID_83312
catgttacagtgtgctgagaggaagaagccctgtaacatggatcagcaaagcgcgttctattgcttcggtctcttcctagggatgcaagagaaaggctcaacaagtgttactgtagattatgaatttgctgcaaggacaaggccatcaggtgagtttgtcagcaagtacaaggggtactacaccttcactggtgggaaggcggttggctaccggaatctctttgcaattccatggccctcgtttatggctgatgacagcctcttcttcattgacggggtactacatctgagagctgagttgaccataaagcaaccttagactgccgatggtgtgctactaactgcgtctgtgctgttgtgacaaaatctgtgcatgaatagggacggacaagtagtagtaaaaatacttagtagtttacaagaacaatagaatagtttttaactacaacaaactaaaataagaacaattana

SEQ ID NO: 17339 - DNA, 444 bp, Setaria italica
  Peptide Sequence Number=SeqID_83313
tccgacgcggcaaagaatcgggagcaaactgcaaagttgaagctgaagaatgtgatgcctatgaggaaggcaatgaggagcctgtagctatgatagaagaatctccacctgatattgagcaagatggtcagtgcaatttaacttctgctatcaaatgtgaggatggagaaagcagcgactcatcctggagtatggaatgtactcaagttttgagagtaaagtctatctatatcagctctgcaattctagctgctaagagccctttcttttacaagcttttctcaaatggaatgaaagaatctgatcagaggcatgcaactcttagaataactgcttcagaggaaaatgcccttatggagcttctaagctttatgtatagtggcaagttgacaacaaatcagccaactctcctgctggatatattgatgattgctgacaaattcg

SEQ ID NO: 17340 - DNA, 2001 bp, Setaria italica
  Peptide Sequence Number=SeqID_83314
gtggaaacggctggatggaattggaagagagtggcggccgggtgaaggtgaggcgaggggaggggaggcgcgtggttagttgattcgaggaggaggcagagggatggacccggacttctcgcgggggagcggggggccgagcttcgagttcgccttcaactcggtcaacttctccgaccgggttctgcggatcgagatcgtcgccggggacgacgcgcccggggccaagggcgccgccggcgagggctgctcgtcgctcgccgactgggcgcgccaccgcaagcggcgacgggaggagctccgacgcggcaaagaatcgggagcaaactgcaaagttgaagctgaagaatgtgatgcctatgaggaaggcaatgaggagcctgtagctatgatagaagaatctccacctgatattgagcaagatggtgaggatggagaaagcagcgactcatcctggagtatggaatgtactcaagttttgagagtaaagtctatctatatcagctctgcaattctagctgctaagagccctttcttttacaagcttttctcaaatggaatgaaagaatctgatcagaggcatgcaactcttagaataactgcttcagaggaaaatgcccttatggagcttctaagctttatgtatagtggcaagttgacaacaaatcagccaactctcctgctggatatattgatgattgctgacaaattcgaggttgtttcgtgtatgaggcattgcagtcaattgcttagaagcttgcctatgactacagagtctgcactgctctatctagatctcccttccagtatttcagtggctactgcagttcagccattgactgacactgccaaggaattccttgccaataaatacaaggatttgaccaagttccaagatgaagcaatgaccattcctcttgctggaattgaagccattctatggagtaatgaccttcaggtggcatcagaggatgctatctatgattttgtgatcaagtgggcacgtgctcaatacccaaaattggaagaaagacgtgagatcttgggcactcgcttgctgccccttgtccggttctgccatatgacctgtaggaagctgcggaaggttcttgcatgcagtgatctggatcatgagcaggcaactaaatgcgtcactgaggcacttctttacaaagcagatgcaccacatcggcagcgtgcccttgcagcagatgtgatgacctgtaggaaatatgctgagcgagcttacaaatatcgtccgcttaaggtcgtggagtttgatcgaccatatccgcagtgcatagcgtacttggacctgaagcgtgaggagtgtagccgacttttcccatctgggcggatatactcgcaagcattccatctagctggacagggcttcttcctctcagcacactgtaacatggatcagcaaagcgcgttctattgcttcggtctcttcctagggatgcaagagaaaggctcaacaagtgttactgtagattatgaatttgctgcaaggacaaggccatcaggtgagtttgtcagcaagtacaaggggtactacaccttcactggtgggaaggcggttggctaccggaatctctttgcaattccatggccctcgtttatggctgatgacagcctcttcttcattgacggggtactacatctgagagctgagttgaccataaagcaaccttagactgccgatggtgtgctactaactgcgtctgtgctgttgtgacaaaatctgtgcatgatgggcggcagtgtgtaaaatcttgtgttttcagacatgatgttttttactcacaactaaatagacaatttggaaacgagaactgaaaccccctttgtttttaaaccaaaagaggagcatgtcatgttctgcactggcattgaactgaggaaagtaattccgctgatcaaaagtgtgtaggttgaatgggctacattggctaagtactcgagaaatgaaacttctgctgaatttacttgttaaaa

SEQ ID NO: 17341 - DNA, 1204 bp, Setaria italica
  misc_feature (1168)..(1204): n is a, c, g, or t
  Peptide Sequence Number=SeqID_83315
ggctctggaggcgcggcgccgcttgggcgccgctggtggcggtgcgcgcgtcggggggagggaggaaggacggccccgtcggcggcgagggcaacggcgaggaggccgagagcaaggcgtcgtcttccggacatgatgatgcatctgcccctgaaggggatacctctgctggattgaacaaaccacacgatgaaccaaagtctagtgatccgattaatgtttctagcagcagttactggcgagatgtcagagcaaaccttgtgcgtcgggaacaggagctattcgaggatccaagtgctcccacagagtcgaaggcgtcctcagtagatccggtacagcttcctcaaaagtgggctcatgcaattacaatgccggaggcagggtgtgttttggtcgctactgaggcgcttgatgatgacagcatcttcgaaagaactgtcatcttccttctcagacttggttcaaggggtacctttgatggcccatttggaatcatcctgaaccgcccactttacacaaaaatcaagcacgttaatccatcgctccgagaccaggcaacacctttcggcgactcccctctcttcttcggaggccctgtcgacatgagcatgttcctggtgaggactaacgacagctcgcgtctcaagggatttgaggaggtgataccaggtatctgctacggcttccgtactgacctggaaaaggctgccgctctgatgaagagcggtgcgatcaggacccaggacctgaggttctacgtcgggcatgctgcctgggactatgagcagctgttaggtgagattagggcgggatactgggcagtggcttcctgcagcacggagctgatcagcgatgcgctggcgggtgatccttcttgcctctggaccgagatactgcagctgatgggagggcagggcagtactcggagctgagccagaaaccgaagcaagacggctcggagatgttctgctcatctttgatgtaattttccataacagttgtggtcaagtctgtacataattgcaatagggtgattcacctgtctcaccgtagcttcatctagcaactgttatgcgatggttgtactgagatatatatataaaatggccggctgctcgtggatgtcagctagtggcgaatgtgaagatagtgcatttgatgaatcacnnnnnnnnnnnnnnnnnnnnnnnnnnnnnnnnnnnnn

SEQ ID NO: 17342 - DNA, 229 bp, Setaria italica
  Peptide Sequence Number=SeqID_83316
gcggcgtttagctattggggatcggccgctgcaacaccggcggaggcaaccgcgagttcatcggcgtcggaagcagctgtgaggccgcatcgcgagcacatcggcgtcggaggcagctacgaggccgcgtggcgagcacatcggcgaccgggtctgcggcgagcgcatcggcggcggatcaggtgcggcctgcagggctgcgctgcgagcgcatcggccgcggaggcag

SEQ ID NO: 17343 - DNA, 763 bp, Setaria italica
  Peptide Sequence Number=SeqID_83317
ccgccagcagcagcaagcgctcttaagacagcatctgatgcaattcttatctgagcacttgagctgataagttcacggagcagaagataaagggaagagtgcataaacccactacgtgcgaaatcttgaccaagaacagcacccaagactccaattccttcaagcgtcacctgaaaccacaaactgaaatacttgagaagatagtattttcaaaacagatattcaaaactaaggagcgaaacaattccaatttgtgaatgataattattcattattaccgtgtgcaaagcagtggtatcacggtagaagtgcaatggcaggttcaactctgttaggcatagctcaatatccttttctgttggaagatcccacacttctggacatatatattcatgcagaatactgccgatacaatgaataatattgtctttagtacccttttgttcattacatccccagacttctctttcattagtaactccattatgtttaacagaagcgatcaattgatcattctgacaagctgtccttaccatctgtgctgatctcttctggaacagttgcaaaaacataccaagagatctatctgacaaaccatatatgagctcattgagcatgcaaacagctgaacttgcctggcgtagtgtatgtccagcttcaccattcatgtaccacctatggccatctctgtaaatatttttggatcgcaccacagtgctcaacctcctgaagtgatcgagtagaatatcaacaaaaggagaat

SEQ ID NO: 17344 - DNA, 589 bp, Setaria italica
  Peptide Sequence Number=SeqID_83318
aagcctccctgtaccttcatcaatggtgcaccactgaagtaaccctgaaatttctctgcttcaagggtagcactcataacaacaagcttcaagtccggtctatttttttagaacctccttcagaagcccaaacagaacatctgttgccaatgttctctcatgagcttcatcaagaacaatcaccttgtacctctctaaaagtgggtctgccattgcttctctcagaagcataccatctgtcaaatatctgataggaagcaatagtgttcaacacaacaggattagatcagaatacttgagaacagttttgtggctgctgcaatcctcaaaccggatgctgtaacctacttcctccccaatagtaacatccatctcctcggccacacgcctggagactgacattgctgcaaccctccgcggctgagtgcaggcaaccatggaacggttacccaggccttcagcctcaagtacgaattgggggatctgttcaacataacgcgaatcaatcatcacaactaacttagcaagaatgagagacaaacaccacaatcaccgcaacagtaacaagaacaaatcaagctatagtgaa

SEQ ID NO: 17345 - DNA, 291 bp, Setaria italica
  Peptide Sequence Number=SeqID_83319
caaacggggagcgtgcggcgcttctcgaggatctcgaagtaccgccccgagtatggccgcccgttccaccggttgacggtggggttggccccgcccgccgcggcggcggcggcgccgttggtggcggcgcggccgagcttggcggagacggaggtctcgtcgacaacgtcgaagaggctcaccttccgcttccgctccgtccccatggcggcggcggcggcggcggcggcgagagcgacgctgcgggtcgcgcaggtggccgggaggaggaggcgggagggcggggggagg

SEQ ID NO: 17346 - DNA, 437 bp, Setaria italica
  Peptide Sequence Number=SeqID_83320
cctgatagcagcctctaggtaggtccctttctggttcttgagtatagaagatttcaaccgggtgaagcctccctggtaccttcatcaatggtgcaccactgaagtaaccctgaaatttctctgcttcaagggtagcactcataacaacaagcttcaagtccggtctattttttagaacctccttcagaagcccaaacagaacatctgttgccaatgttctctcatgagcttcatcaagaacaatcaccttgtacctctctaaaagtgggtctgccattgcttctctcagaagcataccatctgtcaaatatctgataggaagcaatagtgttcaacacaacaggattagatcagaatacctttgaaagaaagaaacatacactccatatcaatctgccaaaagtatagtgcatctaattatgttctttaatggaaca

SEQ ID NO: 17347 - DNA, 1071 bp, Setaria italica
  Peptide Sequence Number=SeqID_83321
tgaatgataataacagacgaagtccacggtagtcagcagatgcaaaagggcgagacgcactcaacaaacagcaactatctgcaccagcctaaactgtatgatcatttcgaccaatagctcaagaagccaggtgaataacacagttgctgatgacagctcataaatgttgcaaaaaacatgatgttgagctcacatgcagtagtctgcatgcaaactcaacaaatctaaaaacatagcactttgcttgcacaaattgacaagcaaagtagtccagataaacacatgataattcatttgcagaaatgccatttggtgacctaaagttgacatgcgaacaagctgttgtctgacattgtctgcagatttaagtgctctggaattgataaagttctcgtaacaccactggggatcttcattgttttgcttgtatgcatggtatacgttcagaagcgtcagatggtccccatcaatatggccaaatcgagccttcgcctcatcagcagccttttgagcctccctaggccggaggaagcaattgggtactagagaaagaatatgataataacagacgaagtccacggtagtcagcagatgcaaaagggcgagacgcactcaacaaacagcaactatctgatagcatggcagaaactgataggatctcatttgaacagttatactttggactgatgacaagcatctttgacatttgtggatccaggggaaattcgctcatcatctcacctaactgtgttaggttaccttcatcatcgagtgcccccaagtagttcaaaacttctaaggccctcataagagtttccggtgctggaggatccataaagtcaaaatgtactaaatcatcaattcctagtttcttcaaggtaagaactgtatttgccaggttcgacctaagaatttctgggtaagtctgtggttgcaaatcctcattaaaactcttctctgtgtatagcctgaagcacttcccaggctgcgttcttccagcacgaccagctctctggtgtcaccaatttccaaggcaagtgctcatcagagagctggtcgtgctggaagaac

SEQ ID NO: 17348 - DNA, 2632 bp, Setaria italica
  misc_feature (89)..(91): n is a, c, g, or t
  Peptide Sequence Number=SeqID_83322
tttctttagttttttgttagggttattgtaagtattggtactaaccttgtatttattctttttacagttctaagttaattgttccagtnnnttttttttgatgcataattttagacattagcaaactacgcacatatatcagcacgttttcattgaaaccggtgcaaaatggcacaaataagaaaattgtcttgtccatactaatatggagactgatacccaaatatctgcactaccattctagtaaaaggaagaaaagcaaatatataatcttgacaccgttacacagttgcatcagcaacatttgatttatgtttataaaataatcaccatgctgatgaaatgtgctgaatgttatccagctgctgcctatggtggggtgcccagacggcaacgtgtatcagggggacgaccaagtcttcacttgggtagaaccgtagaaggctcaggcccttcattggcagcttcgagcacccgtcaaaaaagaagcatcaacttcagcctctgttcgtggccctttccctctcccgcttgttatacagcctctcgagaacacgcttcgcctcgcatgatgggaaattgctcagatcataatagtgtggagcgatatcaatcaaccattccccacggatatcagtgactgtgcggatgaaattcctggtggtcaggacgtattcattgtagatgacccattctggcttatggtccatacagtttgagggatgaagatggacaacctgattatcttttacagtcaagtaatgtccagtccgctccaggtgagcgacctgcatgaaatatcctgaaagcattgctttcctgatattgacatagtactcacgactattgaagtctgtgctgcacatcttgagattgaatctagtcatgatgcgaacaagctgttgtctgacattgtctgcagatttaagtgctctggaattgataaagttctcgtaacaccactggggatcttcattgttttgcttgtatgcatggtatacgttcagaagcgtcagatggtccccatcaatatggccaaatcgagccttcgcctcatcagcagccttttgagcctccctaggccggaggaagcaattgggtactgatagcatggcagaaactgataggatctcatttgaacagttatactttggactgatgacaagcatctttgacatttgtggatccaggggaaattcgctcatcatctcacctaactgtgttaggttaccttcatcatcgagtgcccccaagtagttcaaaacttctaaggccctcataagagtttccggtgctggaggatccataaagtcaaaatgtactaaatcatcaattcctagtttcttcaaggtaagaactgtatttgccaggttcgacctaagaatttctgggtaagtctgtggttgcaaatcctcattaaaactcttctctgtgtatagcctgaagcacttcccaggctgcgttcttccagcacgaccagctctctgatgagcacttgccttggaaattggtgacaccaggagggattccaccctaatccttgggttgtaaactttctgtttggaaaaccctgggtctatcacataaactataccgtctatagttaaggatgtctcagcaatgtttgtggacacaacgattttccttccaggaggtcctccttcctttaatggggcaggagcaggttcaaaaatcttttgctgcatggctggaggcagcgtagaatacaaaggaacaactttaactggcccaacctgatctcccatgttattaatttccttgttaattttacgacaggcatcctcaatctcctcttctccggtaaggaatacaaggatatcaccagcaggttcacacgtgtgtatttgcacaactgtcctgatagcagcctctaggtagtccctttctggttcttgagtatagaagatttcaaccgggtgaagcctccctggtaccttcatcaatggtgcaccactgaagtaaccctgaaatttctctgcttcaagggtagcactcataacaacaagcttcaagtccggtctattttttagaacctccttcagaagcccaaacagaacatctgttgccaatgttctctcatgagcttcatcaagaacaatcaccttgtacctctctaaaagtgggtctgccattgcttctctcagaagcataccatctgtcaaatatttgagaacagttttgtggctgctgcaatcctcaaaccggatgctgtaacctacttcctccccaatagtaacatccatctcctcggccacacgcctggagactgacattgctgcaaccctccgcggctgagtgcaggcaaccatggaacggttacccaggccttcagcctcaagtacgaattgggggatctgagtggtcttcccacttcccgtttcgccgacgaggatgagggtctggttgtcgcggagggcgcggaggaactcgtccttctgctgccaaacggggcgtgcggcgcttctcgaggatctcgaagtccggagtagaatttttacgtactaggtctattccttctaattcttccttctttcttcctttagtaaccgttagtaaggtcttctaggttccctttcttattttggtttctttagttttcttttttcgtttt

SEQ ID NO: 17349 - DNA, 862 bp, Setaria italica
  Peptide Sequence Number=SeqID_83323
ccaagaacatcaagggtgcacgacgatcttggtgttcttggtcatgtcggtggtggcgcggccggcgttgccggcgagagggaagtagaatgggtagatctcgtagcgcaccctgcagctgctgtagttgatctggcacccctgctgcgcgcggcagtagtcgccgaaccgggacaccgccgtggacaggcactgcgcgcacgccagcggcgccaggtcccgcgtgcactgcgccagcccgtagatggtcacgaacgccgtgtactggtccttgtcccgcccgagcccgccgctccccgatgccgacgcctgcgccgccgccttcccgaccaccttccccaccgccttctcgaacgccttggcgttgtccatcccttgcacgttcaccaggatcacgccggcgtccgtgtccgcctgcccgatgaagttggcgttctcgtaccgcatgaagcagtagtcgtaccatattcttgcgtcggagctgtagctgcaggtggcggggagctgcttggcggcgtcggcgaggcaggccgcgcagtcgccggcggagacgtcgccgcggcattgcgcgaggccgtagatgacgttgttgcccttgccggcggtggacgtggcgtagccgccggtggaggccgtggcgacgaggtcggcgaggacggagttgatgctggccacggccttgttgttgccggcgtagctattaccggcgcagtagctgccgatggagtcggcggccatccccagcacagggagcagggccaaggagacaagtagcacgcatgagcggcgcatcgtgctgaactccatgtgtgtctaaagctcaaatgtttgctatctttttaagataaatgcaagcgatttg

SEQ ID NO: 17350 - DNA, 476 bp, Setaria italica
  Peptide Sequence Number=SeqID_83324
tgttgtattaatttttattcttactaattgttttgtcttatctattgaatgcatatttgtgtaaatttaggaacaagattatacaagaactgcagtgttttgatgttgcccaaggaggccggaatagcaccactgagcgcattcttctgaagctccaagttcataaggcttttcagattgccaagggatgatggtatagatcctgtcaggttgttctcaaacaacatcctgcagaacatcaacgcttttctcagttcagaaaattgttatagttcgcagccatctcaaggaatcatgtgaaattcttgtaaaaaggaggcacaaagaaatcaatgtagttacaaattatgcaattcttacagaaaacggaggttcttcagtccacccagatcaggaatcagagagcctgagaggcctgcgttcccaaatccctgcaaaaagcaagacagacggttaatgggacatgcacaagataa

SEQ ID NO: 17351 - DNA, 606 bp, Setaria italica
  Peptide Sequence Number=SeqID_83325
cctatcccctgtgtgccttgcctttcccctgttgcgtgtctcagtcttctaaagatgacattgacgttctccatggaaggacactgactgccccagtatcacttatcaaatgcttgagatccatcaaagaatatgcttttgtggcatctccctatcctgttattataacattcgaagaccacctcacacctgatcttcaggcgaaagtagctaagatggtccttgaagtgtttggagacatcctatattaccctgaatcaaaacatcttcaagaatttccttcacctgaagctctaaaggggcgtgtcctgctctcaactaaacccccaaaggagtaccttgaagcaaacagcggtaccatgaaggatagagaaattgaatcccagtttaaaaagggagaaaaggaagaagcagcatggggagtagaagttccagatattcaggatgagatgcaagttgccgacaggcatgatgatgatctattatatcgcggaagaggtctggatgatgatgataagcagaaaacaagcaagcatgtggcaacagagtataaacacctgattactatcaaggcaggaaagccaaagggtcctcttgtggatgcct

SEQ ID NO: 17352 - DNA, 883 bp, Setaria italica
  Peptide Sequence Number=SeqID_83326
gtggcgaacaggatggctgcttggtaaggcgcggattggtacaggagctgcgtggaggagaccttcagcttcctctgtattgtgtttgtgagcttcattcaacaagttaaggatacatcataccaatagtagaagatgttgacaattaatgacaaaaatctagaaatgtcaaacgtaggatacaatctgtccaacacaagtcgtggcgatggcgagtccagaaaggatagacccaagaaaatttagcttcaggtcggtgactgaagcaattccaactccaagtagcaagaccagtagagagaacttgatagtctcactgcattttgttggttatatcgttgtcagcatagtgatgaactataggaagggccaagcttcctaaaaacaaaatgtttctgtccagtaccaggggaaaaaacaaagccaagaacactttcgatttatctaattttttggctaaaccttttctatctcactttatttgacgaataactgttcttgacagaatagttatatagaaatgttagtcatcacaaagaaagaaaatgcgcaaacagaaatcttggatgtagaccattgtacttcagggtctctacgtttcatcactgtgttgtcctgaatgaaatacaaccaaaacatctagttgacaggcagtagtacttatgatgtttctaacctgaatcttttcttcaggaatatagtctccaacagcactgtgaagggtatgatggccagctttgtcatctggtagaacccgatggagttgaatcctaaactaagattgagaaggccaattgaggttccattcagcaacccgaacaaaactaccgtctgtccatcaattgccttgggctcaaaaaagcgcaagcgctgcgcaacgtag

SEQ ID NO: 17353 - DNA, 675 bp, Setaria italica
  Peptide Sequence Number=SeqID_83327
gaccagcagcacggcggactggtacggcgacgactggtacagcagctgcgtcgaggacaccttcagcctcctctggatttggttggtcagaatctgtccgacgcatgtcgccgcgatggtgagcacggcgatgatggagccaaggagattgagctggagatcggtgaccgacgcgatgccgactcccaggagcaggaccatgagggaggccttgatgctctggctgaacttcttgttcagaaagatggtttccaagactatggtgaagggtatgatggccagcttggtcatctggtaaaaaccaacagagttgaatccgaggcagaggttgaggaggccgatggagatgccattgagcaatccaaatgagatgacggtccgcgtgtcaataggctttggctcaaagaagcgcagccgctgtgcgacatacagtgtgaagaaggtgaccatcaggtgccagctcgtcagtgttgtcgcgaagaagaagccgagggtgctgatgaggtacttgttgcagatgacgatggccacggacgaggtgaccgataggctcagcgcgccgacgacgcccatccgggagcccgcgccgtccgacatctcctccccggcggcaacgggcggtgacttgcctcttggtgcagaagcaggatccctttatctgtttgtttattacaa

SEQ ID NO: 17354 - DNA, 938 bp, Setaria italica
  Peptide Sequence Number=SeqID_83328
gggcgtaaatctgaaagattttgcacaccttgtactatcaccgctcaccagtccagtccaccatttcaagcttgatcgggaaacaacacattcattctctcatctatgctctaccaactggtcatcacttctctgagcagaaatctcgcaaaaatgagaactggaacttcacttggccgccgatacatcttttgatcgtgttgctcgttgcctaccaccgccctagataggtacgtatagaacgaggctacgcgctcaccggccggtaaacgcgctcttcgccgtcctcggcatgtagtcgaagctatcctcgttcttgttctccgtccgtggcgagcccttggcgccaaggagcggcgccgagtccttctcaatcatctgcgcggcgaccggaagcgagacggcggcctcggtcttcttccggctctcggcgaccgagtagtaggagtagaggcccatgccgaagatggcgacgaggatgccggccacgttgcggacgctgaaagggtccttgaggatgatgtagccgaaggagagcaccaggcacgtcttgaggtggcccagcacctggtacgtcacgggggacgtcgtgccgatcaccaggaacgtgctgaagttcacgcacaccgcgatcgagcaagacagcgcgatgaacgccacgacttggacggtgtagttgaaggcgaagacgtcgcgcttggtcaggaacttgtcgacgaacgggccggtgaccagcagcacggcggactggtaaggcgcggattggtacaggagctgcgtggaggagaccttcagcttcctctgtattgtgtttgtgagaatctgtccaacacaatacaggagctgcgtggaggagaccttcagcttcctctgtattgtgtttgtgagaatctgtccaacacaagttcgttggtcgtattggtcgtagttcctagtaa

SEQ ID NO: 17355 - DNA, 1723 bp, Setaria italica
  misc_feature (1)..(63): n is a, c, g, or t
  misc_feature (1696)..(1696): n is a, c, g, or t
  Peptide Sequence Number=SeqID_83329
nnnnnnnnnnnnnnnnnnnnnnnnnnnnnnnnnnnnnnnnnnnnnnnnnnnnnnnnnnnnnnnctattcgagccgtgcggcggcctttttttaaaagagagggaaatcatcgatctgagaactgctgcatcaaattgtacaacgcgtcccacttctgtaatacgaaacgaaagggattttgcttccccgacctcagattcagaacagcgcatagtaaaactagatagagctggtgctgggctatgctacaaacgagagaaagaaacatctagcagtcgtgagctacgccgttggccttcttggcgtcactgccgtccttggccgacaccagcagcggctccgtctccttgtccggcatctgtgacaccgggagggcgtcgcccgcggacttcttcttgccctcgcgcaccgagaagtaggagtagagcgccatgccaaagatggcgacgaggatgcccaggatgttgcgcacggtgaaggggtcgtgcagcagcgtgtaaccgaacgacagcaccaggcacgtcttgaggtggcccagcacctggtacgtcaccggcgacgtcgtcccgatcaccaggaacgtgctgaagttcaccgacaccgcgatcaggcacgacagcacgatgaaacccacaactgggaaagtgtacttgtgggcgaagacgctgcggtcggtgaggagctgatccacgaaggggccggtggcgaacaggatggctgcttggtaaggcgcggattggtacaggagctgcgtggaggagaccttcagcttcctctgtattgtgtttgtgagaatctgtccaacacaagtcgtggcgatggcgagtccagaaaggatagacccaagaaaatttagcttcaggtcggtgactgaagcaattccaactccaagtagcaagaccagtagagagaacttgatagtctcactgaatcttttcttcaggaatatagtctccaacagcactgtgaagggtatgatggccagctttgtcatctggtagaacccgatggagttgaatcctaaactaagattgagaaggccaattgaggttccattcagcaacccgaacaaaactaccgtctgtccatcaattgccttgggctcaaaaagcgcaagcgctgcgcaacgtgaagagtgcagaaggtcaccatcaggtgccagcttgtcaatgttgtagcaaatgggaaccctagggtgctgatgagggctttgttgcagatgacaatggcgaccgacgatgcgacggagagcgtgagagacccaatcacaccgagctggaaaccggcggtcatcttggccagctgctgtatctgctgccttgtcagtcagttgagaactctgaatctgctacctgaacttcaaattgacgtaatctttccaatcaacaggtgctagactgctcgctcctccttctctgttgctacctcctcctgtttgtattgaaggaatggagggaggcgtggcttctaatggcgctgaacctgtgcggtggcgacgggcggtgacttgcctcttgccgcctttggatgatccctttatctgtttgtttattacaatccgcgcgcggttcttgttcccggcgcgccctcggccgatcggatctcctggcgagggaggagaagggagcgagggagagacgaatcgttccccggctcttttctccgaggaaggaggggagggggcgcagagggaacngcgggttttggtggctaatttgtattt

SEQ ID NO: 17356 - DNA, 284 bp, Setaria italica
  Peptide Sequence Number=SeqID_83330
cggccgtggtgctgtcggggctcaacagccagagcccggcgcgcagctcgtgccgctctcggcattccggacggagccccggatgccggaggagatactcgagaaggcgttcaagatcaacggccaggacgtgcacaggatccaaagaaacctcggcggatagtcttagcagtcataagaaggaagaaaactgacctttatctgattttgcataaggccatgccattctgtggattaataaagtttgaccatggaacgactagaaaaataaaatgacaccggaa

SEQ ID NO: 17357 - DNA, 304 bp, Setaria italica
  Peptide Sequence Number=SeqID_83331
tcttcagttgtaaggggaaacgaaaaataaaaaggaaaagctgaaggtcactcgtgcttttggagttggatatctaaagcaggtaacatatgatccttagataagagaacaaaattcatatcatccttacagttgtaagtaaaattcatacctttttatctgtcattttgcagaaaaagttaaatgatgcactcatgggcattctccgtgttcgtgatctgagcagcccaccttacgtttatacaaatccacacacattgagtcacaaagttacagatgatgatttgtttgtcattcttggtag

SEQ ID NO: 17358 - DNA, 2497 bp, Setaria italica
  misc_feature (2451)..(2497): n is a, c, g, or t
  Peptide Sequence Number=SeqID_83332
ccggctctccctcgccccgtcccccaccagccaccaccggaccaccccaatatattcgccgcagccctcgtcgtcgtccctccgcgctcaacttgctcggctcttcttggattggcggctcggggcctcctcggtgattggtggcgggagagctgcggtagggccggccgggtcttcgagaagaacgggcggcgctttttcttagaggcgaattggcttggtctcttctttcctttgctgcgcgttgggaggggtggcgggctcaggaatggggggagagaagcggctgcgtcgcctggcccggttcccatctctctgaacttagatggatgcatctgtgaacgcgaagaagaaggttagttcctgtgggggtactggtcacagccgctgtggtgaagtccatcgagcaaccgtgcgctccgctcctatgcgaagcaaccccttctcacttcaggtttggttcgcgtttccattcaagtataaaggaagtagtatttggcatggcctttgaataggatcaggacctttaaaacaaagtgttgcagcaatattacatcatattggtgttatacttctttacaaaaacatggtggacgaagaactgttttatagggacaatagtgatcacagcatcagctctgaggaagaagacatgcttgtgaggagttgtagcaatctcaatgtcagctttggataccactgtgattcttatccaagttttccttctgaaaatgatcatgagaatggtatctctcctaagaacatatttggcactaataccatgatgcggtcacgaaatggctcatttacttgtttgtctggtgctgcaataagtgcaaatttcacactggcaaatacaaatatctgcaagggtcttatcggtgaagaaattttaccagaactagattctccgaattcctttagaaaaattgtttcttctccatcaatgtcaagattggactcgttctccacctcacaaggcagccctgagagctctatatttgaaatcagtaaaaatacttggaggtccagcgctccaactgctgtatcatccaattttctgactaatacagaggtgaaaatggctggcggagctgctggggaggatagagtccaagctgtgtgctcagagaaaaatggttggctgatttgtggaatatatgatgggtttaatgggagagatgcagctgattttctagctgtaactctatatgataacatcgtatattacttatacttgttggagaatcggatcaagcaacaaaatggtctatataatttttcagaaagctctcttagtggtgttaagagtgagctaacactagccatgagaattgcagaaaatgaagatataaaattttctgaaacatttcgagctggtgtgctgaactgcctttccactgctgttgagcaagctgagaatgactttttgtgcatggttgagcaagagatggatgatagaccagatttagtatcagtagggtcttgtgttctggttgtgcttcttcacggaacagatttgtgcatcttgaatctgggggatagtagagctgtgcttgctagcatgccatatgcagaaaagggcatcttaaaggctacacaattaacagagacccactcacttgaaaatccattggagtaccaaaaacttatagccgatcaccccaacgattcttcagttgtaaggggaaacaaaataaaaggaaagctgaaggtcactcgtgcttttggagttggatatctaaagcagaaaaagttaaatgatgcactcatgggcattctccgtgttcgtgatctgagcagcccaccttacgtttatacaaatccacacacattgagtcacaaagttacagatgatgatttgtttgtcattcttggtagtgatggcttattcgatttcttcactaacaatgaagttgttcggttggtttatcaattcatgcatgataatcctatgggggatccagcaaaatatctcatcgagcaacttatactcaaagcagccagggaagcagctttaacagctgaagaattgatgaggatacctgttgggagtaggaggaagtaccacgatgacgtgactgtcattgttatcatccttggaaatgggcagaggacaatgactgcatcaacctccttgtgagagaatggcgagctaaacagaggagctatcagctggtaaaattttgtgggtgttggcaaacaactatttcgaataatatgtttttgattagtctggtgtggtagtcaataaaccaaaaatctgtatacatccttttggaattttggttgtggacaaaaccttttgttaaatcaaaaggttcacatggatttgtttggcttattttgtacatgactggaacatggatgctcttctttgagattgaatccatgaagcaaacggcaaacaatttcagttttcattagataaaaaaaaaaaaaaaaaaaaannnnnnnnnnnnnnnnnnnnnnnnnnnnnnnnnnnnnnnnnnnnnnn

SEQ ID NO: 17359 - DNA, 1157 bp, Setaria italica
  misc_feature (1087)..(1087): n is a, c, g, or t
  Peptide Sequence Number=SeqID_83333
aagtagtttatagatggtattgtgtggctcaaataaatgaatagtttcgaacttcctgtagatgacggtgcagatttagtctatgctatatttgtagtttttcaaattcttattggattaaccctagaaatacgttgggtggttaacacacagtaggttgaactttgttttttcccccttgctagtgtcatatatgtgaatggatttgcataagctgtcttcatggataatctaatatatttttggatttaacatatataagcagctgttgcaaaggcattagatagcatgaaatctcggtggagatggtcaaccttttgggaggctggacaagttatttatatcttgactacttggggaatcacattagcagggtaaatttctcaccatgtctatctgcagttgcacaccaaaaacgctcgacctcccatatggtgtatcattgtttaaactttctatttctcttttttgattaggttgtagagtatttttgcaatgctaacctgctattggttctcatcatcttatatacttcctctgattggaaatatctaaattttatatagattaatgacacataagattgacattactaatttattacattcattatgtaaaaatactttcataatacataactctttccatttaagacaatatatttttatagatagatacttgttggtataagtgttatatttaaaactgttttgatgtcccgatggactcatatatgtccaaacagaggaagtatgatggaatttagtactaataatcgcaaaatattctgatcttttttatttttcttgtcatcatgttttttcttagcgtcttttaatttgtgctccagtggctcttgttttcaccgttacctcttgaactggattcaggttgtacaagagccgtcatgtcctgaaggtggcagcgaagggtgctgccgcatctgccagatttgttatgaaggctctctgagtgcaatagcaccagcatcatgtggaatgatcagcaagttgtgcatatgtaaaatacaaactcagtcgcgtcagttgtacatatgtggttgcaacgtgttctatcatgaattaangattgtccaggcgtgatgatttgttctattttatttttctttcatagacgctgctgtaactgcagacgag

SEQ ID NO: 17360 - DNA, 1005 bp, Setaria italica
  Peptide Sequence Number=SeqID_83334
tgtattggtcttgtcggtttaactaatgcttagcttccttgctcatcttgagaagttacaggatgagtcagcacgtcaacatactgaactatcttctggcaatatgacaggttcatgctcgctagacattgtgaagtttgttactaaactttatggtcactattgttcttctaatgaattctgccaaagtgtttagaacctaactcatttccaccttctgctttaattcaacgaggtggaaattggagacattccagacaaaaatggggtaatggggaagaaaggatcatgggtcttagttgcctgtgacactgctggggctaatttggaggaaattagtgggattgatgatgaaaattatgttataatcaatgaagatgacatagttgatggtattgccacctttgttgctaggtgcattcttgaagatccaaagtccaaggtacttgcttgtttaaaagttattttgagaggctatcaaggattgatgagcatcctcttcaccactgctatgttgttctaactgttttgtattattttccttcagtcattatcaccagcacagctccaaaagggtatgtctatcctccattctgcacccaagttacatgttatacccctaaatagctgtccaggttactggattcatcattttcaaaatcgtcgcctaagattctcaactatgctatgtatcttactatgtgtgaatgatcatcataccgtgtttttttatgcacatagttccttgattatacaagatattgggaaattgtagaagatgttgatctggcaccttacaatacttgagagtatgcaactcaagtgtatgatgtacactgttgctaagcataagttaatcttcatagagataataccgtagctaaagtagatatcaaccgaggttgtctatgtgttcttagcacttggttttcagattgctatacttgatgaggtagtattggtgaaggtcaagctgggaatgctaactttctagtttatagatgg

SEQ ID NO: 17361 - DNA, 1283 bp, Setaria italica
  Peptide Sequence Number=SeqID_83335
gtttttttttttttttttttttattttttctttccgaatgtgaaaagattcttcttgacatgtttacatcgattttttttcttatacgcgaactggctttatcaatttttatctctcagatgtgaaaatattcagcgtgtcatgtttacatcgattcagcaccatacagatgaattggctccattgctctggcagcacatgagcacttcttttatttgcaaaactaaccatgaattggggaaatgaacattccaattccatcaccatcctcttgcaggagaatgatagcaaaaggacacgttctttgaagcaaccggaaacagctactagatcagaaggccgggaactcgatcctgctgccgcagggcctgccgcgggggaggatggggcactcgacgaggctgtcgccggcggcgttgacgcagaagtagagctggtagagctggctgttgccggactcgtcgcggttgcactccacgtagggctcgaacccggtgccgtcccggatggcgcccttgatctggtccagcgtgtagtagccgccgtcgggcctgacgccgccggcggcgagcgcccggagcacgccgagccggtcgcggaggcggagcgccgcctggaagtagccgtgctcgtcgaagacgtcggaggcgcaggtgccgtgcttctcccactcgtggccccagaagcggagcccgtcgttggtcgggcacgccagcgtcggccacttggcgcgcaggctgctcagcaggtcgctcaccttggatgggtcgaactcggagtcggggttgcagttctgcgggtaggagccgtcgtcgcggttgggccagaggccgtggatgccgaagtcggccgccggcttgccggacttggggtagcagcagctctgcctggtgtcgcagtaggacccgggccactgcagcacgaggtagaagaagtcgtagtccggcgccgccgcgcgcccgggagcgacggcggccaggaccatcagcaggatcgccgccgccagggacaggcgcgccgacgccatggccggagctcgacctgcgctagctagggattcttggagacggatcgatcgatcgacgacgaggctgtgtgcgtggttgcagttatggaacggagacgacggtggattgaatgatgaggtttgcgaggacccggggtgcggatttataggaaactttgggtgggggatcgggagggaaaggtgtggattcacaggcacagcaatggtgtgcacgcgtactgcatgtcaatggcgatagctatggaagtacagcata

SEQ ID NO: 17362 - DNA, 285 bp, Setaria italica
  Peptide Sequence Number=SeqID_83336
ccggagatatcaagaaccgtcaggttcgccgcggcggggaacgcggggtgcggcccgtcgaaggtgttggaggagatgttgaccacttcgatcgccgggaagccgccgtcgctggccgggaacgtgccggaaagcccgttcgcgctgaggtcgagcacccgcagcctcgccagctggccgagcgccaccggcgccgcgccgcggagcgagttccgggagaggttgagcgtgacgaggccgtcgagggaggcgaccgaggaggagatgccgccgtggaggcgtctt

SEQ ID NO: 17363 - DNA, 577 bp, Setaria italica
  Peptide Sequence Number=SeqID_83337
acctttccacgcaaacgcaaaacttcgatgcacaatttttttacaactttacaaacatcacatgatactagcagtgttttacatgccactcctacgtacatacatgatacaccttcacgccacacaccactgtgtatgtgtgcgtatctcattcatcgatgcaggtcctagcttggacttctagttgaagactgaaggattggtcgtcgcgctgctcacttggacttcaagcacctccagctttcgctccaggatgtcaagcttctcgttcaaagacgccagcttgctcttcgtcgtagcttcgaatctgaggaggaagtcgaagagtcgacggacgttgagggagatgttggagatgaactcgcggttctcccagtccgcctgcacggcgatgcccacgttgaccgggttccccatcccgccgccgcgacccatcctgaattcctgatgccgccgccgccgccgccgcctgcttctcttctcttctcttgtcgtgtcgtcgtcgtcacggagagacgggacgcgcacccacccaccaacagctgtgctgatggatggttggtgaaggccggccggg

SEQ ID NO: 17364 - DNA, 555 bp, Setaria italica
  Peptide Sequence Number=SeqID_83338
gtaccgaaatcctttcactcgtacttcaagtaccttacaagaaacgtgggctcgtccagaaagagaaacgtggacgtatcccaccactaccattcacttccaaacaggcatcgtcgcccatcagttggctctaaacgacacaaacccagcaaacactatgtcagttacctccacgcaaacgcaaaacttcgatgcacaagtgttttacaactttacaaacatcacatgatactagcagtgttttacatgccactcctacgtacatacatgatacaccttcacgccacacaccactgtgtatgtgtgcgtatctcattcatcgatgcaggtcctagcttggacttctagttgaagactgaaggattggtcgtcgcgctgctcacttggacttcaagcacctccagctttcgctccaggatgtcaagcttctcgttcaaagacgccagcttgctcttcgtcgtagcttctgcacatatttaattttagaaacatcagcgaaatggtccgtgctcacttttcttttcttctcgctaaagatccatacaaccagcctag

SEQ ID NO: 17365 - DNA, 546 bp, Setaria italica
  Peptide Sequence Number=SeqID_83339
ttcgtggaggagcgaaagggggaacgatttttgggaagcgagtgtttccgaggaatttccagaatggcactctgattggtggtgggacgctcgatccaagaatacctgtaagtcttgtggaacttgttagtggaacacggggcaactctcttgttttggtttgccagtaaagatctgcttattagtttttttatgagtttggaggtctaactgccagtatttgaaaaatcttgattcatatcttgtgagttctagttacctacttcgcatttatatacaaacaacttgaacagctgagcaggcaggaagatctgatcgtctggatgcgaaccgcggcgctgccaacgttccggaagctgtacgggaggatcgaggtggacctccacgtcgacgagctgatcacggtgacgctgcagaacaactacaacacgtacagcttcggcgggaagaaggcgctggtgctgtcgaccgccggcgtgctggggggcaagaacgggttcctcggccgcgggtacgtggtcgtcggcctcgcctgcctcgcgctgg

SEQ ID NO: 17366 - DNA, 1639 bp, Setaria italica
  misc_feature (1598)..(1639): n is a, c, g, or t
  Peptide Sequence Number=SeqID_83340
cagaggctctcaaggacaggttgtctctctatcctttcagttccttgcttcgtctctactcctaatcctgattaatgccttgcctccttttcgtagtctcctgctgaagctttctgaaatcactacatcaccatttgtttctatcactcactttgggggcattaagctcttccagcttgcagggctggagtcttcattgaggcgcttgcttcgccacaggcagcaatggtgctggcaaacagtgatgcagctggaccaagctctagccaggatgattcggcagccaccatgaagaagcgcaacaggcctcagtatcatccgtttactcagcagcagcttccagcttgcaagcctatacttgcgcctaagacagttattcctgtacttttgtttgtgggcataatttttatcccaattggccttggttgcattgcagcatcaaatagggttgttgaagtggtctatcaatatgaaacttcatgtgtaccaggatacatgcttgacaacaaagttgcttatatccagaatccttctatagataagacctgcagaaggattctcaaggttcctaaggatatgaagcagccaatctacatatattatcaactcgacaagttttaccagaaccatcgaaggtatgtgacgagccgtaacgataagcagctgagaagtcctgaggaggtcaacaccacacagtattgcaaacctgaagctactcaccatggaaacccagttgtcccctgcgggctcgtagcttggagcttgttcaacgacacgtacagcttcactcgtggcaatgaggtgctgatggttaacaagcgaggcatttcgtggaggagcgaaaggggggacatttttgggaagcgagtgtttccgaggaatttccagaatggcactctgattggtggtgggacgctcgatccaagaatacctctgagcaggcaggaagatctgatcgtctggatgcgaaccgcggcgctgccaacgttccggaagctgtacgggaggatcgaggtggacctccacgtcgacgagctgatcacggtgacgctgcagaacaactacaacacgtacagcttcggcgggaagaaggcgctggtgctgtcgaccgccggcgtgctggggggcaagaacgggttcctcggccgcgggtacgtggtcgtcggcctcgcctgcctcgcgctggcggcgctcctgacgctgctctgcctcgtcttcccactgagagaggagcatcttgcgctgcggtaccctctgacccggcctgcacgatgaccacgcgtgcctagatggagaagatcgtgttcagattatattgaagccgtttctttttcaggcttgggttcggttggtgattttcttgctaggatcgaacgaacagcgatagagctgcgtcgtgtgtgtatatactgtacatccgacagattgcagcgctgcatttgcatgccattgccgtgcgtgaaaatggtttggttaacccgtaaattcagacatgttggttgggcagttggctgcttatacagaattcagactgaggagatacaaaatgcaccaagcagtaatgtcagttattcccggttgttcttcctaaaaaaaannnnnnnnnnnnnnnnnnnnnnnnnnnnnnnnnnnnnnnnnn

SEQ ID NO: 17367 - DNA, 277 bp, Setaria italica
  misc_feature (245)..(245): n is a, c, g, or t
  Peptide Sequence Number=SeqID_83341
ccgttcccgtccaccggcggccggcgccgccgccacaagaggccggagttcaggtcgtgggagtatcgccagatagcatctgtcccttctcgtgcgctgggaaccgcacccatccgtgcgccatcggtggggactcgggagtggccccaaatcaccgctgcgccctccccctccggccgcctgcgacctactccgcgattaaaggtaaaggctaaacgtttgattgatccgatgcagcttaaatnttggattcggttgcactctgcacctttttctg

SEQ ID NO: 17368 - DNA, 492 bp, Setaria italica
  Peptide Sequence Number=SeqID_83342
ggttttttcattggtgatggggctggtgttggtaagggtcgaacgattgctggattaatctgggaaaattggcagcagggaagacataaggcagtgtgggtatctgttggttctgacctgaagtatgatgctcaaagagatttagatgatgttggtgcaaagtgtgtccaagtgcaccctttaaataagttaccgtattcgaagctagattccaaggccattaggattaagaatggggtaatctttgtaacttatagcagcttaatagcatcgtctgagagaggccgctcccgtttacagcaattggttcaatggtgtggccacgagtttgacggtctcctagtgtttgatgagtgccacaaggccaaaaatctgattcctgatgcagggagccagcccactcgcacgggaaaagcagttcttgagatccaggaaaagttacctgaggctcgggttgtttactgctcagcaactggtgcatcagaaccaacg

SEQ ID NO: 17369 - DNA, 880 bp, Setaria italica
  Peptide Sequence Number=SeqID_83343
cgaagatgctgaaaatggatgccagagtaaaggtgatcttatacagaagatattgcaaatatacctaagaaatagtgattccacttcagatctgcttcatgagctttccggagcattgtctcaggtaccttcgaccaaagcacaaggtacccaggatgtgtcaaatggttttccaacactctgttcctccactatcccctcttggtaccgtgtcctacatgaggagaatactgggagtttagactagaagatcaagcaggccctcaagactagaggattaccagaaagaggatcaattgatactattctggaggaaattcagaaatcagtgaaggtgtttgtttctctaatagaaaagtgcaagactcatgaaaaggtatctatgcacgcaatggcagttaaacatgggggaaagtatatcgacacatttctgaaagccttcaactttctagagacacaattcaaggaacataatgccattatacttcaaatgctaaaagaacttcagaaagcgacaagaataatccaaactatatgtgcggaggctaagggttacaagcggacaatgatcacaagcaaaaatacctcctgcaaagagatccatggagcggttcttgttccaagtcaaggcgctgctacacaactgctccacggagaagaaattttggatgggcaatttgaagcacaaggacctgcacggtcatgtggtgagctcccaagtgtatggaagcgtggatgaggaagatgaggagcagatggagtctgactcggacactccggctgccgagaacgacaacaccatggacgaggatgatgcggcggcggaagggagcaacgaggcgccgatggaggaggaatagcagcataggtaccaatctgc

SEQ ID NO: 17370 - DNA, 650 bp, Setaria italica
  Peptide Sequence Number=SeqID_83344
atacaaagaacattttatttctttttgcgaggacattaacgggctcaaccattgcgatagtaaacacaatcacaggcataactactgttacctcctggacgttgatcagctcactcctgacaacttgtacatgaataggcatggggccaaaaatattgaaccaaccaccatctgttctaggcagcaaaatttcagctcataaagttttaacaggacgtaaagcaggattcatatcatgcttaagtagctccaaaagtctttgtagatggagacactggaggatggacccggtaaatatgaatccagctcaaatggcgcagatgcaccactccctgttctactcgtcgtccttcaggacgtgctccctggaggccggcgtggctgctgctgccgcggcggcggcagcttctccttcctcccggagcatcttctgcatatcgttgacccgcatccggacgatgccgccgaccacaattgcggcggtgcccagggtccagatccacaggatcttgaggcccgggctcttctggctccacctggtcaccattggaggagcggcggcagcttgcagtccggtggacgcgtcggggatttcagtccaggcggagttcggggtctctcttgaaacaaaggaattttagtaaaactaa

SEQ ID NO: 17371 - DNA, 1383 bp, Setaria italica
  Peptide Sequence Number=SeqID_83345
cccaccgcaatttctctaccacctcatcctcctcaacacccgacatcgatgtcgcggcggacgtgctctccgacgccgcctcctcggtccccgtatcggagctgctctcggatgaagtggcttccgccgcagcctccatcccagtgccgccagcgccgtacgcgggagaggtggctgccgccgctgccgaatcatttcctccggtcgctgccctgcagcacctcctggacgccgtgcaatccttcactgggctcaactggtgggttacaattgcgctgacgacagtgctgatccggtcactgactgtcccattgctcatcaaccagatgaagtccacgattaagttaaatgagatgagaccagaaattgaagccatcaatgaagagatgcggaattcaactgatccaaggtcaatggaagtggggaagcagaaattgggcgagctattccttaaacatgatgtgactccattgacaccattgaagggtctattcatacaggggcctatattcatgagctttttctttgctatatcaaacatggttgagaaagtcccttctctcaaaggaggtggtgcatattggtttactgatttgacaacgcctgatgaatttatcatcctcccagtgttaacatcactgacctttttggctacagtagagctcaatatgcaagatggtatggaaggaaatcctatggcggaaacaatgaaaaaggtctccagattttttggtgttatgtttgttccacttacactaggctttccaaaggcattttcttttattgggtcacatcaaacatgttctcgcttgtatatggtgttgttatccggaatccggctgtaagaatgtgcttagatcttcctcccttggaatctcagccagcacctgcacgaatgcaggccctaaacctcgttgacggtcctaagccaagtcctagagttgattctcctattgcagacaaggagtgtgatcaatctagttctgagctaagtgagcaatctagttctgagctaagtgagcaatctagttctgagctaagtgaccgtatcagagatcttgagaacagggcaaaatcaaggggtgaatctcaagagtagttcctgatttttctgctcatggaagtaaaagaaccgcagcacctttttgggttttggtaactttatgttgggagcgaagggtacccaatatgtgcacattgtactgagattttattcgggagaggcggctgtttttcagaccatggggtcactgtcgtttcagcaaataaattggagtaattttggcatgtatattgtttcacagcacgatataacctaactagcttaacaacagcatgttgtttcatggattaagcataagtgatgctgctctgagtttttac

SEQ ID NO: 17372 - DNA, 282 bp, Setaria italica
  Peptide Sequence Number=SeqID_83346
cgtgcggtgagtgatgcacatttatagatcgtcaacttttctagtgctgtacatgtgcataactgtagcgattccaacgatgcacaatcataaaccatcaactcttccagtgccgtgcaggaacgcagctgtagcaatctcaaacttgggctgtcacgtatttgtaactttttgaggcagttgtgatcttctaggaagcagggctgcagcgtttcaggggaaccgtcaatctcaagttcgccaagtgaatacgggagaagccatcttccgtttcgctggtac

SEQ ID NO: 17373 - DNA, 945 bp, Setaria italica
  Peptide Sequence Number=SeqID_83347
acaaaattgaattctgagatgcttgagagatgggagggcattgaaatttatgtcggtcatgtcttcatgggtatgctctggtggtggtgggacatctgaagagaaaaggttaatgcagtagcttatgtccatagtctttaagctaatgagttgcctgaaaccttcgagtgaaatagaagcagggctgcagcgtttcaggggaaccgtcaatctcaagttcgccaagtgaatacgggagaagccatcttccgtttcgctggtcgttgttttcatatgtctgcaccaaagacgggatcagtttggggcatccacgaattgttagctcctcaagggaggtgaatacagagaagccatccttgttcccctggaacgttagctcttcgcagtactcaatagacattttcttgagcgaggagacggaatttgatgggatgcgcaggagtccatctggagttgagcttgtcaatgcgtcatctgggtttcctgctgatggagcccgtggagccgaggtgtgatttgatgaactactatctcccacttcgatcaacagtcctgatatctggtcgcaatgatacaagcacaattcctctagggctggtgcatggcgcagcatcacagatagccacatcccagttatcccacaaaattgaattctgagatgcttgagagatgggagggcattgaaatttatgtcggtcatgtcttcatgggtatgctctggtggtggtgggacatctgaagagaaaaggttaatgcagtagcttatgtccatagtctttaagctaatgagttgcctgaaaccttcgagtgaaatagaagcagggttgcagcgtttcaggggaaccgtcaatctcaagttcgccaagtgaatacgggagaagccatcttccgtttcgctggtcgttgttttcatatgtctgcaccaaagacgggatcagtttgggg
